(19) United States
(12) Patent Application Publication
(10) Pub. No.: US 2023/0025039 A1
(43) Pub. Date: Jan. 26, 2023

(54) NOVEL TYPE VI CRISPR ENZYMES AND SYSTEMS

(71) Applicants: THE BROAD INSTITUTE, INC., Cambridge, MA (US); MASSACHUSETTS INSTITUTE OF TECHNOLOGY, Cambridge, MA (US)

(72) Inventors: Feng Zhang, Cambridge, MA (US); Han Altae-Tran, Cambridge, MA (US); Soumya Kannan, Cambridge, MA (US)

(73) Assignees: THE BROAD INSTITUTE, INC., Cambridge, MA (US); MASSACHUSETTS INSTITUTE OF TECHNOLOGY, Cambridge, MA (US)

(21) Appl. No.: 17/761,292

(22) PCT Filed: Sep. 18, 2020
(86) PCT No.: PCT/US2020/051660

§ 371 Date: Mar. 17, 2022

Related U.S. Application Data
(60) Provisional application No. 62/903,604, filed on Sep. 20, 2019.
(60) Provisional application No. 62/905,645, filed on Sep. 25, 2019.
(60) Provisional application No. 62/967,408, filed on Jan. 29, 2020.
(60) Provisional application No. 63/044,190, filed on Jun. 25, 2020.

(51) Int. Cl. C12N 9/22; C12N 15/11; C12N 9/78; C12N 15/90

(52) U.S. Cl. CPC C12N 9/22; C12N 15/11; C12Y 305/04004; C12N 9/78; C12N 15/907; C12N 2800/80; C12N 2310/20

(57) ABSTRACT

The present disclosure provides for systems, methods, and compositions for targeting nucleic acids. In particular, the invention provides Cas proteins and their use in modifying target sequences.

### CROSS-REFERENCE TO RELATED APPLICATIONS

[0001] This application claims the benefit of U.S. Provisional Application No. 62/903,604, filed Sep. 20, 2019, U.S. Provisional Application No. 62/905,645 filed Sep. 25, 2019, U.S. Provisional Application No. 62/967,408, filed Jan. 29, 2020, and U.S. Provisional Application No. 63/044,190 filed Jun. 25, 2020. The entire contents of the above-identified applications are hereby fully incorporated herein by reference.

### STATEMENT REGARDING FEDERALLY SPONSORED RESEARCH

[0002] This invention was made with government support under Grant Nos. HG009761, MH110049, and HL141201 awarded by the National Institutes of Health. The government has certain rights in the invention.

### REFERENCE TO AN ELECTRONIC SEQUENCE LISTING

[0003] The contents of the electronic sequence listing (“BROD-4860_ST25.txt”; Size is 46,147,870 bytes and it was created on Sep. 18, 2020) is herein incorporated by reference in its entirety.

### TECHNICAL FIELD

[0004] The present invention generally relates to systems, methods and compositions used for the control of gene expression involving sequence targeting, such as perturbation of gene transcripts or nucleic acid editing, that may use vector systems related to Clustered Regularly Interspaced Short Palindromic Repeats (CRISPR) and components thereof.

### BACKGROUND

[0005] The CRISPR-CRISPR associated (Cas) systems of bacterial and archaeal adaptive immunity are some such systems that show extreme diversity of protein composition and genomic loci architecture. There exists a pressing need for alternative and robust systems and techniques for targeting nucleic acids or polynucleotides.

### SUMMARY

[0006] In one aspect, the present disclosure provides a non-naturally occurring or engineered composition comprising: a Cas protein that comprises at least one HEPN domain and is less than 900 amino acids in size; and a guide sequence capable of forming of complex with the Cas protein and directing the complex to bind to a target sequence. In some embodiments, the Cas protein is a Type VI Cas protein. In some embodiments, the Cas protein is Cas13. In some embodiments, the Cas protein is selected from (a) SEQ ID NOs. 4102-4298; (b) SEQ ID NOs. 4299-4654; (c) SEQ ID NOs. 2771-2772, 4655-4768, or 5260-5265; (d) SEQ ID NOs. 4769-4797; or (e) SEQ ID NOs. 4798-5203.

[0007] In another aspect, the present disclosure provides a non-naturally occurring or engineered system comprising: (a) a Cas protein selected from: (i) SEQ ID NOs. 1-1323, (ii) SEQ ID NOs. 1324-2770, (iii) SEQ ID NOs. 2773-2797, or (iv) SEQ ID NOs. 2798-4092; (b) a guide sequence capable of forming of complex with the Cas protein and directing the complex to bind to a target sequence.

[0008] In some embodiments, the Cas protein exhibits collateral nuclease activity and cleaves a non-target sequence. In some embodiments, the composition comprises two or more guide sequences capable of hybridizing to two different target sequences or different regions of a target sequence. In some embodiments, the guide sequence is capable of hybridizing to one or more target sequences in a prokaryotic cell. In some embodiments, the guide sequence is capable of hybridizing to one or more target sequences in a eukaryotic cell. In some embodiments, the Cas protein comprises one or more nuclear localization signals. In some embodiments, the Cas protein comprises one or more nuclear export signals. In some embodiments, the Cas protein is catalytically inactive. In some embodiments, the Cas protein is a nickase. In some embodiments, the Cas protein is associated with one or more functional domains. In some embodiments, the one or more functional domains is heterologous functional domains. In some embodiments, the one or more functional domains cleaves the one or more target sequences. In some embodiments, the one or more functional domains modifies transcription or translation of the target sequence. In some embodiments, the Cas protein is associated with an adenosine deaminase or cytidine deaminase. In some embodiments, the composition further comprises a recombination template. In some embodiments, the recombination template is inserted by homology-directed repair (HDR). In some embodiments, the composition further comprises a tracr RNA. In some embodiments, the Cas protein comprises two HEPN domains.

[0009] In another aspect, the present disclosure provides a non-naturally occurring or engineered composition comprising: an mRNA encoding the Cas protein herein, and a guide sequence capable of forming of complex with the Cas protein and directing the complex to bind to a target sequence.

[0010] In another aspect, the present disclosure provides a non-naturally occurring or engineered composition for modifying nucleotides in a target nucleic acid, comprising: the composition herein; and a nucleotide deaminase associated with the Cas protein.

[0011] In some embodiments, the Cas protein is a dead Cas protein. In some embodiments, the Cas protein is a nickase. In some embodiments, the nucleotide deaminase is covalently or non-covalently linked to the Cas protein or the guide sequence, or is adapted to link thereof after delivery. In some embodiments, the nucleotide deaminase is a adenosine deaminase. In some embodiments, the nucleotide deaminase is a cytidine deaminase. In some embodiments, the nucleotide deaminase is a human ADAR2 or a deaminase domain thereof. In some embodiments, the adenosine deaminase comprises one or more mutations. In some embodiments, the one or more mutations comprise E620G or Q696L based on amino acid sequence positions of human ADAR2, and corresponding mutations in a homologous ADAR protein. In some embodiments, the adenosine deaminase comprises (i) E488Q and E620G, (ii) E488Q and Q696L, or (iii) E488Q and V505I, based on amino acid sequence positions of human ADAR2, or corresponding mutations in a homologous ADAR protein. In some embodiments, the adenosine deaminase has cytidine deaminase activity. In some embodiments, the nucleotide deaminase protein or catalytic domain thereof has been modified to increase activity against a DNA-RNA heteroduplex. In some embodiments, the nucleotide deaminase protein or catalytic domain thereof has been modified to reduce off-target effects. In some embodiments, the modification of the nucleotides in the target nucleic acid remedies a disease caused by a G→A or C→T point mutation or a pathogenic SNP. In some embodiments, the disease comprises cancer, haemophilia, beta-thalassemia, Marfan syndrome, and Wiskott-Aldrich syndrome. In some embodiments, the modification of the nucleotides in the target nucleic acid remedies a disease caused by a T→C or A→G point mutation or a pathogenic SNP. In some embodiments, the modification of the nucleotide at the target locus of interest inactivates a target gene at the target locus. In some embodiments, the modification of the nucleotide modifies gene product encoded at the target locus or expression of the gene product.

[0012] In another aspect, the present disclosure provides an engineered adenosine deaminase comprising one or more mutations: E488Q, E620G, Q696L, or V505I based on amino acid sequence positions of human ADAR2, or corresponding mutations in a homologous ADAR protein. In some embodiments, the adenosine deaminase comprises (i) E488Q and E620G, (ii) E488Q and Q696L, or (iii) E488Q and V505I based on amino acid sequence positions of human ADAR2, or corresponding mutations in a homologous ADAR protein.

[0013] In another aspect, the present disclosure provides a system for detecting presence of one or more target polypeptides in one or more in vitro samples comprising: a Cas protein herein;

[0014] one or more detection aptamers, each designed to bind to one of the one or more target polypeptides, each detection aptamer comprising a masked promoter binding site or masked primer binding site and a trigger sequence template; and an oligonucleotide-based masking construct comprising a non-target sequence. In some embodiments, the system further comprises nucleic acid amplification reagents to amplify the target sequence or the trigger sequence. In some embodiments, the nucleic acid amplification reagents are isothermal amplification reagents.

[0015] In another aspect, the present disclosure provides a system for detecting the presence of one or more target sequences in one or more in vitro samples, comprising: a Cas protein herein; at least one guide polynucleotide comprising a guide sequence designed to have a degree of complementarity with the one or more target sequences, and designed to form a complex with the Cas protein; and an oligonucleotide-based masking construct comprising a non-target sequence, wherein the Cas protein exhibits collateral nuclease activity and cleaves the non-target sequence of the oligo-nucleotide based masking construct once activated by the one or more target sequences.

[0016] In another aspect, the present disclosure provides a non-naturally occurring or engineered composition comprising the Cas protein herein that is linked to an inactive first portion of an enzyme or reporter moiety, wherein the enzyme or reporter moiety is reconstituted when contacted with a complementary portion of the enzyme or reporter moiety. In some embodiments, the enzyme or reporter moiety comprises a proteolytic enzyme. In some embodiments, the Cas protein comprises a first Cas protein and a second Cas protein linked to the complementary portion of the enzyme or reporter moiety. In some embodiments, the composition further comprises: i) a first guide capable of forming a complex with the first Cas protein and hybridizing to a first target sequence of a target nucleic acid; and ii) a second guide capable of forming a complex with the second Cas protein, and hybridizing to a second target sequence of the target nucleic acid.

[0017] In another aspect, the present disclosure provides a non-naturally occurring or engineered composition comprising one or more polynucleotides encoding the Cas protein and the guide sequence herein.

[0018] In another aspect, the present disclosure provides a vector system, which comprises one or more vectors comprising: a first regulatory element operably linked to a nucleotide sequence encoding a Cas protein herein, and a second regulatory element operably linked to a nucleotide sequence encoding the guide sequence. In some embodiments, the nucleotide sequence encoding the Cas protein is codon optimized for expression in a eukaryotic cell. In some embodiments, the vector system is comprised in a single vector. In some embodiments, the one or more vectors comprise viral vectors. In some embodiments, the one or more vectors comprise one or more retroviral, lentiviral, adenoviral, adeno-associated or herpes simplex viral vectors.

[0019] In another aspect, the present disclosure provides a delivery system comprising the composition herein, or the system herein, and a delivery vehicle. In some embodiments, the delivery system comprises one or more vectors, or one or more polynucleotide molecules, the one or more vectors or polynucleotide molecules comprising one or more polynucleotide molecules encoding the Cas protein and one or more nucleic acid components of the non-naturally occurring or engineered composition. In some embodiments, the delivery vehicle comprises a ribonucleoprotein complex, one or more particles, one or more vesicles, or one or more viral vectors, liposomes, nanoparticles, exosomes, microvesicles, nucleic acid nanoassemblies, a gene gun, an implantable device, or a vector system. In some embodiments, the one or more particles comprises a lipid, a sugar, a metal or a protein. In some embodiments, the one or more particles comprises lipid nanoparticles. In some embodiments, the one or more vesicles comprises exosomes or liposomes. In some embodiments, the one or more viral vectors comprises one or more adenoviral vectors, one or more lentiviral vectors, or one or more adeno-associated viral vectors.

[0020] In another aspect, the present disclosure provides a cell comprising the composition or the system herein. In some embodiments, the cell or progeny thereof is a eukaryotic cell, preferably a human or non-human animal cell, optionally a therapeutic T cell or antibody-producing B-cell or wherein thereof is a eukaryotic the cell is a plant cell.

[0021] In another aspect, the present disclosure provides a non-human animal or plant comprising the cell herein, or progeny thereof. In some embodiments, the present disclosure provides the composition herein, or the system herein, or the cell herein, for use in a therapeutic method of treatment.

[0022] In another aspect, the present disclosure provides a method of modifying one or more target sequences, the method comprising contacting the one or more target sequences with the composition herein. In some embodiments, modifying the one or more target sequences comprises increasing or decreasing expression of the one or more target sequences. In some embodiments, the system further comprises a recombination template, and wherein modifying the one or more target sequences comprises insertion of the recombination template or a portion thereof. In some embodiments, the one or more target sequences is in a prokaryotic cell. In some embodiments, the one or more target sequences is in a eukaryotic cell.

[0023] In another aspect, the present disclosure provides a method of modifying one or more nucleotides in a target sequence, comprising contacting the target sequences with the composition herein. In some embodiments, the target sequence is RNA.

[0024] In another aspect, the present disclosure provides a method for detecting a target nucleic acid in a sample comprising: contacting a sample with: the composition herein; and a RNA-based masking construct comprising a non-target sequence; wherein the Cas protein exhibits collateral RNase activity and cleaves the non-target sequence of the detection construct; and detecting a signal from cleavage of the non-target sequence, thereby detecting the target nucleic acid in the sample.

[0025] In some embodiments, the method further comprises contacting the sample with reagents for amplifying the target nucleic acid. In some embodiments, the reagents for amplifying comprises isothermal amplification reaction reagents. In some embodiments, the isothermal amplification reagents comprise nucleic-acid sequence-based amplification, recombinase polymerase amplification, loop-mediated isothermal amplification, strand displacement amplification, helicase-dependent amplification, or nicking enzyme amplification reagents. In some embodiments, the target nucleic acid is DNA molecule and the method further comprises contacting the target DNA molecule with a primer comprising an RNA polymerase site and RNA polymerase.

[0026] In some embodiments, the masking construct: suppresses generation of a detectable positive signal until the masking construct cleaved or deactivated, or masks a detectable positive signal or generates a detectable negative signal until the masking construct cleaved or deactivated.

[0027] In some embodiments, the masking construct comprises: a. a silencing RNA that suppresses generation of a gene product encoded by a reporting construct, wherein the gene product generates the detectable positive signal when expressed; b. a ribozyme that generates the negative detectable signal, and wherein the positive detectable signal is generated when the ribozyme is deactivated; c. a ribozyme that converts a substrate to a first color and wherein the substrate converts to a second color when the ribozyme is deactivated; d. an aptamer and/or comprises a polynucleotide-tethered inhibitor; e. a polynucleotide to which a detectable ligand and a masking component are attached; f. a nanoparticle held in aggregate by bridge molecules, wherein at least a portion of the bridge molecules comprises a polynucleotide, and wherein the solution undergoes a color shift when the nanoparticle is disbursed in solution; g. a quantum dot or fluorophore linked to one or more quencher molecules by a linking molecule, wherein at least a portion of the linking molecule comprises a polynucleotide; h. a polynucleotide in complex with an intercalating agent, wherein the intercalating agent changes absorbance upon cleavage of the polynucleotide; or 1. two fluorophores tethered by a polynucleotide that undergo a shift in fluorescence when released from the polynucleotide.

[0028] In some embodiments, the aptamer: a. comprises a polynucleotide-tethered inhibitor that sequesters an enzyme, wherein the enzyme generates a detectable signal upon release from the aptamer or polynucleotide-tethered inhibitor by acting upon a substrate; b. is an inhibitory aptamer that inhibits an enzyme and prevents the enzyme from catalyzing generation of a detectable signal from a substrate or wherein the polynucleotide-tethered inhibitor inhibits an enzyme and prevents the enzyme from catalyzing generation of a detectable signal from a substrate; or c. sequesters a pair of agents that when released from the aptamers combine to generate a detectable signal. In some embodiments, the nanoparticle is a colloidal metal. In some embodiments, the at least one guide polynucleotide comprises a mismatch. In some embodiments, the mismatch is upstream or downstream of a single nucleotide variation on the one or more guide sequences.

[0029] In another aspect, the present disclosure provides a method of treating or preventing a disease in a subject, comprising administering the composition, or the system, or the cell herein, to the subject.

[0030] These and other aspects, objects, features, and advantages of the example embodiments will become apparent to those having ordinary skill in the art upon consideration of the following detailed description of illustrated example embodiments.

### BRIEF DESCRIPTION OF THE DRAWINGS

[0031] An understanding of the features and advantages of the present invention will be obtained by reference to the following detailed description that sets forth illustrative embodiments, in which the principles of the invention may be utilized, and the accompanying drawings of which:

[0032] FIG. 1A shows protein alignment of five Cas13a sequences with likely thermostability, loci QNRW01000010.1, OWPA01000389.1, 0153798_10014618, 0153978_10005171, and 0153798_10004687 (SEQ ID NOS: 6026-6031); FIG. 1B shows a Cas13 phylogeny, with identified Cas13a sequences stemming from bioreactors maintained at 55° C. forming a distinct branch in the Cas13a tree.

[0033] FIG. 2A QNRW01000010.1 direct repeat alignment (SEQ ID NOS: 6032-6048); FIG. 2B OWPA01000389.1 direct repeat alignment (SEQ ID NOS: 6049-6054); FIG. 2C 0153798_10014618 direct repeat alignment (SEQ ID NOS: 6055-6058); FIG. 2D 0153978_10005171 direct repeat alignment (SEQ ID NOS: 6059-6062); FIG. 2E 0153798_10004687 direct repeat alignment (SEQ ID NOS: 6063-6066).

[0034] FIG. 3A 0153798_10004687 thermophilic Cas13 branch; FIG. 3B 0153978_10005171 thermophilic Cas13 branch; FIG. 3C 0153798_10014618 thermophilic Cas13 branch; FIG. 3D OWPA01000389.1 thermophilic Cas13 branch; FIG. 3E QNRW01000010.1 thermophilic Cas13 branch; FIG. 3F 0J26742_10014101 loci associated with thermophilic Cas 13 branch; and FIG. 3G 0123519_10037894 loci identifying a likely thermostable Cas13a from study conducted at high temperatures.

[0035] FIG. 4 shows exemplary methods for identifying novel Cas proteins.

[0036] FIG. 5 shows an exemplary method of iterative multi-criterion HMM searches.

[0037] FIG. 6 shows an exemplary method of identifying spacer hits to page/bacterial genomes.

[0038] FIG. 7 shows an exemplary method of determining estimate feature co-occurrence rates.

[0039] FIG. 8 shows hypothesized evolution of various CRISPR systems.

[0040] FIG. 9 shows the distribution of sizes of proteins in Cas13 families.

[0041] FIG. 10 shows a phylogenetic tree of subgroups of Type VI-B1 Cas proteins.

[0042] FIG. 11 shows 6 examples of Cas13b-ts.

[0043] FIG. 12 analysis results of CRISPR arrays of Cas13b-t loci.

[0044] FIG. 13 shows results of E. coli essential gene screens.

[0045] FIG. 14 shows results of E. coli essential gene PFS screens.

[0046] FIG. 15 shows 5′ D PFS preferences of exemplary active Cas13b-t orthologs.

[0047] FIG. 16 shows depletion of sequences containing PFS by exemplary Cas13b-ts.

[0048] FIG. 17 shows gene knockdown mediated by exemplary Cas13b-ts.

[0049] FIG. 18 shows knockdown of endogenous transcripts by exemplary Cas13-bts.

[0050] FIG. 19 shows A-to-I RNA editing mediated by exemplary Cas13-bts.

[0051] FIGS. 20A-20B: FIG. 20A shows the map of the vector expressing targeting guide RNA. FIG. 20B shows the map the vector expressing the non-target guide RNA.

[0052] FIG. 21 shows Cas13b-t1, t3 mediated C-to-U editing of reporter transcripts in mammalian cells when fused to evolved CDAR.

[0053] FIGS. 22A-22H. Cas13b-t is a functional family of ultra-small Cas nucleases. FIG. 22A. UPGMA dendrogram and protein size distribution of Cas13 subtypes and variants. Previously unknown subfamilies are highlighted. FIG. 22B. Phylogenetic tree of unique Cas13b-t proteins. Points indicate experimentally studied proteins. FIG. 22C. Cas13b-t locus organization. FIG. 22D. CRISPR RNA identified from small RNA sequencing of E. coli containing Cas13b-t2 locus. FIG. 22E. Schematic of PFS placement relative to target sequence. FIG. 22F. E. coli essential gene screen shows Cas13b-t1, 3 and 5 mediate interference with a weak 5′ D (A/G/T) PFS. Weblogos: nucleotides surrounding top 1% of depleted spacers. Histograms: distribution of fold depletion of both targeting and non-targeting spacers. Line plots: relative abundance in final library of spacers targeting regions across normalized positions in the target transcript. FIGS. 22G-22G Evaluation of Cas13b-t1, 3 and 5 for knockdown of (FIG. 22G) luciferase and (FIG. 2211) endogenous transcripts in HEK293FT cells. All values are normalized to a transfection control containing the corresponding gRNA without Cas13b-t expression and are mean+/−standard deviation, n=4. T: targeting gRNA, NT: non-targeting gRNA.

[0054] FIGS. 23A-23I. RNA editing with Cas13b-t. FIG. 23A. Schematic of gRNAs mediating RNA editing. Mismatch bubble shown. Mismatch distance refers to the number of nucleotides between the mismatched base and the 5′ end of the DR. FIG. 23B. Evaluation of RNA editing for restoration of a W85X Cypridina luciferase reporter in HEK293FT cells as measured by restoration of luciferase activity. All values are mean+/−standard deviation, n=4 for Cas13b-t1-REPAIR and n=3 for Cas13b-t3-REPAIR. FIGS. 23C-23F. Quantification of RNA editing by Cas13b-t1-REPAIR and RESCUE at indicated target by next-generation sequencing (FIG. 23C) and protein activity assays for selected targets (FIGS. 230D-23F). T: targeting gRNA, NT: Non-targeting gRNA. All values are mean+/−standard deviation, n=4. FIG. 23G. Schematic of directed evolution approach for engineering specific ADAR2dd variants. Selection of both activity and specificity was performed by simultaneous positive selection for editing of a premature stop codon in the ADE2 transcript and negative selection for editing of a premature stop codon in the URA3 transcript. FIG. 23H. Evaluation of specificity-enhancing ADAR2dd mutants applied to Cas13b-t1-REPAIR targeting the W85X (TAG stop codon) Cypridina luciferase reporter as measured by luciferase activity. Restoration of luciferase activity using this reporter with a non-targeting gRNA was used as a proxy for evaluating specificity. FIG. 23I. Quantitative comparison of off-target editing between Cas13b-t1-REPAIR variants. Gold point marks the on-target edit. REPAIR-S refers to addition of E620G and Q696L specificity-enhancing mutants in ADAR2dd. G: Gaussia luciferase transcript, C: Cypridina luciferase transcript.

[0055] FIGS. 24A-24B. PFS preferences of Cas13b-t orthologs. FIG. 24A. Workflow of E. coli essential gene screen for determining interference activity and PFS preference of Cas13b-t orthologs. FIG. 24B. Examination of both 5′ and 3′ PFS together reveals that Cas13b-t1, 3 and 5 show preference not only for a 5′ A/T/G, but also a preference for an A in either the +2 or +3 position on the 3′ side. 5′ PFS refers to the single base directly 5′ of the target sequence, and 3′ PFS refers to the +2 and +3 bases on the 3′ side of the target sequence, as the +1 base does not show any preference for any ortholog tested.

[0056] FIG. 25. HEPN mutations abolished cleavage activity. Wild-type sequence and sequences with mutation of both the arginine and histidine residues to alanines in both HEPN domains of RanCas13b, Cas13b-t1 and Cas13b-t3 (gray) were targeted to a Gaussia luciferase transcript with two different targeting spacers. Knockdown, as measured by decrease of luciferase activity, was abolished for HEPN-mutated proteins, with RanCas13b acting as a positive control. All values are normalized to a non-targeting spacer condition, with standard error propagation (n=3).

[0057] FIGS. 26A-26H. Determination of optimal mismatch distance in RNA editing gRNA spacers. Quantitative evaluation of optimal mismatch distance for (FIGS. 26A 26D) RanCas13b-REPAIR, Cas13b-t1-REPAIR, Cas13b-t3-REPAIR and (FIGS. 26E-2611) RanCas13b-RESCUE, Cas13b-t1-RESCUE, Cas13b-t3-RESCUE targeting the indicated site by next-generation sequencing. In all panels, all values represent mean+/−standard deviation (n=4). Bars represent optimal mismatch distance selected for each target/ortholog for all further experiments. The nucleotide triplet containing the target adenosine or cytosine is shown in parentheses.

[0058] FIGS. 27A-27L. Comparison of RNA editing by RanCas13b, Cas13b-t1 and Cas13b-t3 at selected sites. In all panels, all values represent mean+/−standard deviation (n=4). Value for targeting gRNA with REPAIR/RESCUE protein expression condition is shown above the corresponding bar. FIGS. 27A-27I. Measurement of editing rate by next-generation sequencing at indicated target sites. FIG. 27J. Restoration of luciferase activity by A-to-I RNA editing of a W85X Cypridina luciferase reporter. FIG. 27K. Fold activation of beta-catenin by A-to-I RNA editing of the CTNNB1 T41 codon as measured by normalized luciferase activity. FIG. 27L. Restoration of luciferase activity by C-to-U RNA editing of a C82R Gaussia luciferase reporter.

[0059] FIGS. 28A-28F. Evaluation of ADAR2dd mutants after Round 1 of evolution. In all panels, all values represent mean+/−standard deviation (n=4). Wt refers to RanCas13b-ADAR2dd(E488Q). All amino acid changes refer to position in ADAR2dd. The nucleotide triplet containing the target adenosine is shown in parentheses. For (FIGS. 28A-28B), Bars or points indicate mutations selected for further analysis. For (FIGS. 28C-28F), the bar or point indicates the final mutation selected from this round of evolution. FIG. 28A. Evaluation of candidate mutants targeting a W113X Cypridina luciferase reporter as measured by restoration of luciferase activity. FIG. 28B. Evaluation of candidate mutants targeting a W85X Cypridina luciferase reporter as measured by restoration of luciferase activity. Nontargeting RLU refers to restoration of luciferase activity in a non-targeting spacer condition and is used as a proxy for off-target editing. FIGS. 28C-28E. Evaluation of selected mutants targeting indicated sites as measured by next generation sequencing. FIG. 28F. Evaluation of candidate mutants targeting a W85X Cypridina luciferase reporter as measured by restoration of luciferase activity. Nontargeting RLU refers to restoration of luciferase activity in a non-targeting spacer condition and is used as a proxy for off-target editing.

[0060] FIGS. 29A-29J. Evaluation of ADAR2dd mutants after Round 2 of evolution. In all panels, values represent mean+/−standard deviation (n=4). Wt refers to RanCas13b-ADAR2dd(E488Q) and wt+E620G refers to RanCas13b-ADAR2dd(E488Q/E620G). All amino acid changes refer to position in ADAR2dd and all mutations are on top of an ADAR2dd(E488Q/E620G) background. The nucleotide triplet containing the target adenosine is shown in parentheses. For (FIGS. 29A-29C), bars or points indicate mutations selected for further analysis. For FIGS. 29D-29J, the bar or point indicates the final mutation selected from this round of evolution. FIG. 29A. Evaluation of candidate mutants targeting a R93H Gaussia luciferase reporter as measured by restoration of luciferase activity. FIG. 29B. Evaluation of candidate mutants targeting a W85X (TGA stop codon) Cypridina luciferase reporter as measured by restoration of luciferase activity. FIG. 29C. Evaluation of candidate mutants targeting a W85X (TAG stop codon) Cypridina luciferase reporter as measured by restoration of luciferase activity. Nontargeting RLU refers to restoration of luciferase activity in a non-targeting spacer condition and is used as a proxy for off-target editing. FIGS. 29D-29I. Evaluation of selected candidate mutants targeting indicated sites as measured by next generation sequencing. FIG. 29J. Evaluation of candidate mutants targeting a W85X (TAG stop codon) Cypridina luciferase reporter as measured by restoration of luciferase activity. Nontargeting RLU refers to restoration of luciferase activity in a non-targeting spacer condition and is used as a proxy for off-target editing.

[0061] FIGS. 30A-30B. Comparison of off-target edits between REPAIR variants. Quantitative comparison of off-target editing between REPAIR variants in targeting (FIG. 30A) and non-targeting (FIG. 30B) gRNA conditions. Gold point marks the on-target edit. REPAIR-S refers to addition of E620G and Q696L specificity-enhancing mutants in ADAR2dd. G: Gaussia luciferase transcript, C: Cypridina luciferase transcript. Cas13b-t1-REPAIR and REPAIR-S are as shown in FIG. 23I.

[0062] FIGS. 31A-31H. Cas13b-t is a functional family of ultra-small Cas nucleases. (FIG. 31A) UPGMA dendrogram and protein size distribution of Cas13 subtypes and variants. Previously unknown subfamilies are highlighted. (FIG. 31B)Phylogenetic tree of unique Cas13b-t proteins. Points indicate experimentally studied proteins. (FIG. 31C) Cas13b-t locus organization. (FIG. 31D) CRISPR RNA identified from small RNA sequencing of E. coli containing Cas13b-t2 locus. (FIG. 31E) Schematic of PFS placement relative to target sequence. (FIG. 31F) E. coli essential gene screen shows Cas13b-t1, 3 and 5 mediate interference with a weak 5′ D (A/G/T) PFS. Weblogos: nucleotides surrounding top 1% of depleted spacers. Histograms: distribution of fold depletion of both targeting and non-targeting spacers. Line plots: relative abundance in final library of spacers targeting regions across normalized positions in the target transcript. (FIGS. 31G-31H) Evaluation of Cas13b-t1, 3 and 5 for knockdown of (FIG. 31G) luciferase and (FIG. 31H) endogenous transcripts in HEK293FT cells. All values are normalized to a transfection control containing the corresponding gRNA without Cas13b-t expression and are mean+/−standard deviation, n=4. T: targeting gRNA, NT: non-targeting gRNA.

[0063] FIGS. 32A-32I. RNA editing with Cas13b-t. (FIG. 32A) Schematic of gRNAs mediating RNA editing. Mismatch distance refers to the number of nucleotides between the mismatched base and the 5′ end of the DR. (FIG. 32B) Evaluation of RNA editing for restoration of a W85X Cypridina luciferase reporter in HEK293FT cells as measured by restoration of luciferase activity. All values are mean+/−standard deviation, n=4 for Cas13b-t1-REPAIR and n=3 for Cas13b-t3-REPAIR. (FIGS. 32C-32F) Quantification of RNA editing by Cas13b-t1-REPAIR and RESCUE at indicated target by next-generation sequencing (FIG. 32C) and protein activity assays for selected targets (FIGS. 32D-32F). T: targeting gRNA, NT: Non-targeting gRNA. All values are mean+/−standard deviation, n=4. (FIG. 32G) Schematic of directed evolution approach for engineering specific ADAR2dd variants. Selection of both activity and specificity was performed by simultaneous positive selection for editing of a premature stop codon in the ADE2 transcript and negative selection for editing of a premature stop codon in the URA3 transcript. (FIG. 32H) Evaluation of specificity-enhancing ADAR2dd mutants applied to Cas13b-t1-REPAIR targeting the W85X (TAG stop codon) Cypridina luciferase reporter as measured by luciferase activity. Restoration of luciferase activity using this reporter with a non-targeting gRNA is used as a proxy for evaluating specificity. (FIG. 32I) Quantitative comparison of off-target editing between Cas13b-t1-REPAIR variants. Gold point marks the on-target edit. REPAIR-S refers to addition of E620G and Q696L specificity-enhancing mutants in ADAR2dd. G: Gaussia luciferase transcript, C: Cypridina luciferase transcript.

[0064] FIGS. 33A-33B. PFS preferences of Cas13b-t orthologs. (FIG. 33A) Workflow of E. coli essential gene screen for determining interference activity and PFS preference of Cas13b-t orthologs. (FIG. 33B) Examination of both 5′ and 3′ PFS together reveals that Cas13b-t1, 3 and 5 show preference not only for a 5′ A/T/G, but also a preference for an A in either the +2 or +3 position on the 3′ side. 5′ PFS refers to the single base directly 5′ of the target sequence, and 3′ PFS refers to the +2 and +3 bases on the 3′ side of the target sequence, as the +1 base does not show any preference for any ortholog tested.

[0065] FIG. 34. HEPN mutations abolish cleavage activity. Wild-type sequence and sequences with mutation of both the arginine and histidine residues to alanines in both HEPN domains of RanCas13b, Cas13b-t1 and Cas13b-t3 were targeted to a Gaussia luciferase transcript with two different targeting spacers. Knockdown, as measured by decrease of luciferase activity, was abolished for HEPN-mutated proteins, with RanCas13b acting as a positive control. All values are normalized to a non-targeting spacer condition, with standard error propagation (n=3).

[0066] FIGS. 35A-35H. Determination of optimal mismatch distance in RNA editing gRNA spacers. Quantitative evaluation of optimal mismatch distance for (FIGS. 35A-35D) RanCas13b-REPAIR, Cas13b-t1-REPAIR, Cas13b-t3-REPAIR and (FIGS. 35E-35H) RanCas13b-RESCUE, Cas13b-t1-RESCUE, Cas13b-t3-RESCUE targeting the indicated site by next-generation sequencing. In all panels, all values represent mean+/−standard deviation (n=4). Bars represent optimal mismatch distance selected for each target/ortholog for all further experiments. The nucleotide triplet containing the target adenosine or cytosine is shown in parentheses.

[0067] FIGS. 36A-36L. Comparison of RNA editing by RanCas13b, Cas13b-t1 and Cas13b-t3 at selected sites. In all panels, all values represent mean+/−standard deviation (n=4). Value for targeting gRNA with REPAIR/RESCUE protein expression condition is shown above the corresponding bar. (FIGS. 36A-36I) Measurement of editing rate by next-generation sequencing at indicated target sites. (FIG. 36J) Restoration of luciferase activity by A-to-I RNA editing of a W85X Cypridina luciferase reporter. (FIG. 36K) Fold activation of beta-catenin by A-to-I RNA editing of the CTNNB1 T41 codon as measured by normalized luciferase activity. (FIG. 36L) Restoration of luciferase activity by C-to-U RNA editing of a C82R Gaussia luciferase reporter.

[0068] FIGS. 37A-37F. Evaluation of ADAR2dd mutants after Round 1 of evolution. In all panels, all values represent mean+/−standard deviation (n=4). Wt refers to RanCas13b-ADAR2dd(E488Q). All amino acid changes refer to position in ADAR2dd. The nucleotide triplet containing the target adenosine is shown in parentheses. For (FIGS. 37A-37B), the bars or points indicate mutations selected for further analysis. For (FIGS. 37C-37F), the bar or point indicates the final mutation selected from this round of evolution. (FIG. 37A). Evaluation of candidate mutants targeting a W113X Cypridina luciferase reporter as measured by restoration of luciferase activity. (FIG. 37B). Evaluation of candidate mutants targeting a W85X Cypridina luciferase reporter as measured by restoration of luciferase activity. Nontargeting RLU refers to restoration of luciferase activity in a non-targeting spacer condition and is used as a proxy for off-target editing. (FIGS. 37C-37E). Evaluation of selected mutants targeting indicated sites as measured by next generation sequencing. (FIG. 37F). Evaluation of candidate mutants targeting a W85X Cypridina luciferase reporter as measured by restoration of luciferase activity. Nontargeting RLU refers to restoration of luciferase activity in a non-targeting spacer condition and is used as a proxy for off-target editing.

[0069] FIGS. 38A-38J. Evaluation of ADAR2dd mutants after Round 2 of evolution. In all panels, values represent mean+/−standard deviation (n=4). Wt refers to RanCas13b-ADAR2dd(E488Q) and wt+E620G refers to RanCas13b-ADAR2dd(E488Q/E620G). All amino acid changes refer to position in ADAR2dd and all mutations are on top of an ADAR2dd(E488Q/E620G) background. The nucleotide triplet containing the target adenosine is shown in parentheses. For (FIGS. 38A-38C), bars or points indicate mutations selected for further analysis. For (FIGS. 38D-38J), the bar or point indicates the final mutation selected from this round of evolution. (FIG. 38A). Evaluation of candidate mutants targeting a R93H Gaussia luciferase reporter as measured by restoration of luciferase activity. (FIG. 38B). Evaluation of candidate mutants targeting a W85X (TGA stop codon) Cypridina luciferase reporter as measured by restoration of luciferase activity. (FIG. 38C). Evaluation of candidate mutants targeting a W85X (TAG stop codon) Cypridina luciferase reporter as measured by restoration of luciferase activity. Nontargeting RLU refers to restoration of luciferase activity in a non-targeting spacer condition and is used as a proxy for off-target editing. (FIGS. 38D-381). Evaluation of selected candidate mutants targeting indicated sites as measured by next generation sequencing. (FIG. 38J). Evaluation of candidate mutants targeting a W85X (TAG stop codon) Cypridina luciferase reporter as measured by restoration of luciferase activity. Nontargeting RLU refers to restoration of luciferase activity in a non-targeting spacer condition and is used as a proxy for off-target editing.

[0070] FIGS. 39A-39B. Comparison of off-target edits between REPAIR variants. Quantitative comparison of off-target editing between REPAIR variants in targeting (FIG. 39A) and non-targeting (FIG. 39B) gRNA conditions. Gold point marks the on-target edit. REPAIR-S refers to addition of E620G and Q696L specificity-enhancing mutants in ADAR2dd. G: Gaussia luciferase transcript, C: Cypridina luciferase transcript. Cas13b-t1-REPAIR and REPAIR-S are as shown in FIG. 32I.

[0071] FIG. 40—Cas13b-t has collateral activity.

[0072] FIG. 41 shows that Cas13b-t-REPAIR mediated RNA editing via AAV delivery of a single AAV vector. (T: Targeting guideRNA; NT: non-targeting guideRNA; GFP: GFP protein delivered instead of REPAIR protein; PBS: no virus control).

[0073] The figures herein are for illustrative purposes only and are not necessarily drawn to scale.

### DETAILED DESCRIPTION OF THE EXAMPLE EMBODIMENTS

### Definitions

[0074] Unless defined otherwise, technical and scientific terms used herein have the same meaning as commonly understood by one of ordinary skill in the art to which this disclosure pertains. Definitions of common terms and techniques in molecular biology may be found in Molecular Cloning: A Laboratory Manual, 2^{nd} edition (1989) (Sambrook, Fritsch, and Maniatis); Molecular Cloning: A Laboratory Manual, 4^{th} edition (2012) (Green and Sambrook); Current Protocols in Molecular Biology (1987) (F. M. Ausubel et al. eds.); the series Methods in Enzymology (Academic Press, Inc.): PCR 2: A Practical Approach (1995) (M. J. MacPherson, B. D. Hames, and G. R. Taylor eds.): Antibodies, A Laboratory Manual (1988) (Harlow and Lane, eds.): Antibodies A Laboratory Manual, 2^{nd} edition 2013 (E. A. Greenfield ed.); Animal Cell Culture (1987) (R.I. Freshney, ed.); Benjamin Lewin, Genes IX, published by Jones and Bartlet, 2008 (ISBN 0763752223); Kendrew et al. (eds.), The Encyclopedia of Molecular Biology, published by Blackwell Science Ltd., 1994 (ISBN 0632021829); Robert A. Meyers (ed.), Molecular Biology and Biotechnology: a Comprehensive Desk Reference, published by VCH Publishers, Inc., 1995 (ISBN 9780471185710); Singleton et al., Dictionary of Microbiology and Molecular Biology 2nd ed., J. Wiley & Sons (New York, N.Y. 1994), March, Advanced Organic Chemistry Reactions, Mechanisms and Structure 4th ed., John Wiley & Sons (New York, N.Y. 1992); and Marten H. Hofker and Jan van Deursen, Transgenic Mouse Methods and Protocols, 2^{nd} edition (2011).

[0075] As used herein, the singular forms “a”, “an”, and “the” include both singular and plural referents unless the context clearly dictates otherwise.

[0076] The term “optional” or “optionally” means that the subsequent described event, circumstance or substituent may or may not occur, and that the description includes instances where the event or circumstance occurs and instances where it does not.

[0077] The recitation of numerical ranges by endpoints includes all numbers and fractions subsumed within the respective ranges, as well as the recited endpoints.

[0078] The term “about” in relation to a reference numerical value and its grammatical equivalents as used herein can include the numerical value itself and a range of values plus or minus 10% from that numerical value. For example, the amount “about 10” includes 10 and any amounts from 9 to 11. For example, the term “about” in relation to a reference numerical value can also include a range of values plus or minus 10%, 9%, 8%, 7%, 6%, 5%, 4%, 3%, 2%, or 1% from that value.

[0079] As used herein, a “biological sample” may contain whole cells and/or live cells and/or cell debris. The biological sample may contain (or be derived from) a “bodily fluid”. The present invention encompasses embodiments wherein the bodily fluid is selected from amniotic fluid, aqueous humour, vitreous humour, bile, blood serum, breast milk, cerebrospinal fluid, cerumen (earwax), chyle, chyme, endolymph, perilymph, exudates, feces, female ejaculate, gastric acid, gastric juice, lymph, mucus (including nasal drainage and phlegm), pericardial fluid, peritoneal fluid, pleural fluid, pus, rheum, saliva, sebum (skin oil), semen, sputum, synovial fluid, sweat, tears, urine, vaginal secretion, vomit and mixtures of one or more thereof. Biological samples include cell cultures, bodily fluids, cell cultures from bodily fluids. Bodily fluids may be obtained from a mammal organism, for example by puncture, or other collecting or sampling procedures.

[0080] The terms “subject,” “individual,” and “patient” are used interchangeably herein to refer to a vertebrate, preferably a mammal, more preferably a human. Mammals include, but are not limited to, murines, simians, humans, farm animals, sport animals, and pets. Tissues, cells and their progeny of a biological entity obtained in vivo or cultured in vitro are also encompassed.

[0081] The term “exemplary” is used herein to mean serving as an example, instance, or illustration. Any aspect or design described herein as “exemplary” is not necessarily to be construed as preferred or advantageous over other aspects or designs. Rather, use of the word exemplary is intended to present concepts in a concrete fashion.

[0082] A protein or nucleic acid derived from a species means that the protein or nucleic acid has a sequence identical to an endogenous protein or nucleic acid or a portion thereof in the species. The protein or nucleic acid derived from the species may be directly obtained from an organism of the species (e.g., by isolation), or may be produced, e.g., by recombination production or chemical synthesis.

[0083] Various embodiments are described hereinafter. It should be noted that the specific embodiments are not intended as an exhaustive description or as a limitation to the broader aspects discussed herein. One aspect described in conjunction with a particular embodiment is not necessarily limited to that embodiment and can be practiced with any other embodiment(s). Reference throughout this specification to “one embodiment”, “an embodiment,” “an example embodiment,” means that a particular feature, structure or characteristic described in connection with the embodiment is included in at least one embodiment of the present invention. Thus, appearances of the phrases “in one embodiment,” “in an embodiment,” or “an example embodiment” in various places throughout this specification are not necessarily all referring to the same embodiment, but may. Furthermore, the particular features, structures or characteristics may be combined in any suitable manner, as would be apparent to a person skilled in the art from this disclosure, in one or more embodiments. Furthermore, while some embodiments described herein include some but not other features included in other embodiments, combinations of features of different embodiments are meant to be within the scope of the invention. For example, in the appended claims, any of the claimed embodiments can be used in any combination.

[0084] All publications, published patent documents, and patent applications cited herein are hereby incorporated by reference to the same extent as though each individual publication, published patent document, or patent application was specifically and individually indicated as being incorporated by reference.

### OVERVIEW

[0085] In one aspect, the present disclosure provides systems and methods for nucleic acid modification. In some examples, the embodiments disclosed herein are directed to non-naturally occurring or engineered systems comprising one or more Cas proteins and one or more guide sequences. The Cas proteins may be engineered to include one or more mutations. In certain embodiments, the engineered Cas protein increases or decreases one or more of protospacer flanking site (PFS) recognition/specificity, gRNA binding, protease activity, polynucleotide binding capability, stability, specificity, target binding, off-target binding, and/or catalytic activity as compared to a corresponding wild-type Cas protein.

[0086] In some embodiments, a sub-set of newly identified Cas proteins that are smaller in size than previously discovered Cas proteins, including further modifications to and uses thereof. In some embodiments, the systems comprise one or more Cas proteins that is less than 900 amino acids in size and one or more guide sequences. The relatively small sizes of these Cas protein may allow easier engineering, multiplexing, packaging, and delivery, and being used as a component of a fusion construct, e.g., fusion with a nucleotide deaminase.

[0087] In another aspect, the present disclosure provides a base editing system. In some examples, the base editing system comprises a engineered adenosine deaminase comprising (i) E488Q and E620G, (ii) E488Q and Q696L, or (iii) E488Q and V505I, based on amino acid sequence positions of human ADAR2, and corresponding mutations in a homologous ADAR protein. The base editing system may further comprise a dead or nickase form of the Cas13 protein herein associated with (e.g., fused to) the engineered adenosine deaminase.

[0088] In another aspect, embodiments disclosed herein include systems and uses for such Cas proteins including diagnostics, base editing therapeutics and methods of detection. Fusion proteins comprising a Cas protein, including those disclosed herein, and nucleotide deaminase may also be used for base editing. Delivery of the proteins and systems disclosed is also provided, including to a variety of cells and via a variety of particles, vesicles and vectors.

### Systems and Compositions in General

[0089] In one aspect, the present disclosure provides for systems and compositions for modification of nucleic acids. In general, the systems or composition may comprise one or more Cas protein and one or more guide sequences. In some embodiments, the Cas proteins may be Type VI Cas proteins. The Type VI Cas proteins may be Cas13 proteins. In some examples, the Cas13 proteins may be Cas13a, e.g., SEQ ID NOs. 1-1323. In some examples, the Cas13 proteins may be Cas13b, e.g., SEQ ID NOs. 1324-2770. In some examples, the Cas13 proteins may be Cas13c, e.g., SEQ ID NOs. 2773-2797. In some examples, the Cas13 proteins may be Cas13d, e.g., SEQ ID NOs. 2798-4092. In some examples, the Cas13 proteins may be small Cas13a, e.g., SEQ ID NOs. 4102-4298. In some examples, the Cas13 proteins may be small Cas13b, e.g., SEQ ID NOs. 4299-4654. In some examples, the Cas13 proteins may be small Cas13b-t, e.g., SEQ ID NOs. 2771-2772, 4655-4768, or 5260-5265. In some examples, the Cas13 proteins may be small Cas13c, e.g., SEQ ID NOs. 4769-4797. In some examples, the Cas13 proteins may be small Cas13d, e.g., SEQ ID NOs. 4798-5203.

[0090] The Cas13 proteins herein also include variants, homologs, and orthologs of the proteins in SEQ ID NOs 1-4092, 4102-5203, and 5260-5265.

[0091] In some examples, the Cas13 proteins are small proteins, e.g., less than 900 amino acid in size. In some examples, the small Cas13 proteins include Cas13b-t proteins include Cas proteins of a subfamily of Cas13b closely related to the Cas13b ortholog from Alistipes sp. ZOR00009 and is not associated with any auxiliary proteins.

### CRISPR-Cas Systems in General

[0092] In general, a Cas protein and/or a guide sequence is the component of a CRISPR-Cas system. A CRISPR-Cas system or CRISPR system refers collectively to transcripts and other elements involved in the expression of or directing the activity of CRISPR-associated (“Cas”) genes, including sequences encoding a Cas gene, a tracr (trans-activating CRISPR) sequence (e.g. tracrRNA or an active partial tracrRNA), a tracr-mate sequence (encompassing a “direct repeat” and a tracrRNA-processed partial direct repeat in the context of an endogenous CRISPR system), a guide sequence (also referred to as a “spacer” in the context of an endogenous CRISPR system), or “RNA(s)” as that term is herein used (e.g., RNA(s) to guide Cas, such as Cas9, e.g. CRISPR RNA and transactivating (tracr) RNA or a single guide RNA (sgRNA) (chimeric RNA)) or other sequences and transcripts from a CRISPR locus. In general, a CRISPR system is characterized by elements that promote the formation of a CRISPR complex at the site of a target sequence (also referred to as a protospacer in the context of an endogenous CRISPR system). When the CRISPR protein is a Class 2 Type VI effector, a tracrRNA is not required. In an engineered system of the invention, the direct repeat may encompass naturally-occurring sequences or non-naturally-occurring sequences. The direct repeat of the invention is not limited to naturally occurring lengths and sequences. A direct repeat can be 36nt in length, but a longer or shorter direct repeat can vary. For example, a direct repeat can be 30nt or longer, such as 30-100 nt or longer. For example, a direct repeat can be 30 nt, 40nt, 50nt, 60nt, 70nt, 70nt, 80nt, 90nt, 100nt or longer in length. In some embodiments, a direct repeat of the invention can include synthetic nucleotide sequences inserted between the 5′ and 3′ ends of naturally occurring direct repeats. In certain embodiments, the inserted sequence may be self-complementary, for example, 20%, 30%, 40%, 50%, 60%, 70%, 80%, 90%, or 100% self-complementary. Furthermore, a direct repeat of the invention may include insertions of nucleotides such as an aptamer or sequences that bind to an adapter protein (for association with functional domains). In certain embodiments, one end of a direct repeat containing such an insertion is roughly the first half of a short DR and the end is roughly the second half of the short DR.

[0093] The CRISPR-Cas protein (used interchangeably herein with “Cas protein”, “Cas effector”, “effector”, “effector protein”) may include Cas9, Cas12 (e.g., Cas12a, Cas12b, Cas12c, Cas12d, etc.), Cas13 (e.g., Cas13a, Cas13b, Cas13b-t, Cas13c, Cas13d, etc.), Cas14, CasX, and CasY. In some embodiments, the CRISPR-Cas protein may be a type VI CRISPR-Cas protein. For example, the Type VI CRISPR-Cas protein may be a Cas13 protein. The Cas13 protein may be Cas13a, Cas13b, Cas13b-t, Cas13c, or Cas13d. In some examples, the CRISPR-Cas protein is Cas13a. In some examples, the CRISPR-Cas protein is Cas13b. In some examples, the CRISPR-Cas protein is Cas13b-t. In some examples, the CRISPR-Cas protein is Cas13c. In some examples, the CRISPR-Cas protein is Cas13d.

[0094] In the context of formation of a CRISPR complex, “target sequence” refers to a sequence to which a guide sequence is designed to have complementarity, where hybridization between a target sequence and a guide sequence promotes the formation of a CRISPR complex. A target sequence may comprise any polynucleotide, such as DNA or RNA polynucleotides. In some embodiments, a target sequence is located in the nucleus or cytoplasm of a cell. In some embodiments, direct repeats may be identified in silico by searching for repetitive motifs that fulfill any or all of the following criteria: 1. found in a 2Kb window of genomic sequence flanking the type II CRISPR locus; 2. span from 20 to 50 bp; and 3. interspaced by 20 to 50 bp. In some embodiments, 2 of these criteria may be used, for instance 1 and 2, 2 and 3, or 1 and 3. In some embodiments, all 3 criteria may be used.

[0095] In embodiments of the invention, the terms guide sequence and guide RNA, e.g., RNA capable of guiding CRISPR-Cas effector proteins to a target locus, are used interchangeably as in herein cited documents such as International Patent Publication No. WO 2014/093622 (PCT/US2013/074667). In some embodiments, a guide sequence (or spacer sequence) is about or more than about 5, 10, 11, 12, 13, 14, 15, 16, 17, 18, 19, 20, 21, 22, 23, 24, 25, 26, 27, 28, 29, 30, 35, 40, 45, 50, 75, or more nucleotides in length. In some embodiments, a guide sequence is less than about 75, 50, 45, 40, 35, 30, 25, 20, 15, 12, or fewer nucleotides in length. Preferably the guide sequence is 10-40 nucleotides long, such as 20-30 or 20-40 nucleotides long or longer, such as 30 nucleotides long or about 30 nucleotides long. In certain embodiments, the guide sequence is 10-30 nucleotides long, such as 20-30 or 20-40 nucleotides long or longer, such as 30 nucleotides long or about 30 nucleotides long for CRISPR-Cas effectors. In certain embodiments, the guide sequence is 10-30 nucleotides long, such as 20-30 nucleotides long, such as 30 nucleotides long. The ability of a guide sequence to direct sequence-specific binding of a CRISPR complex to a target sequence may be assessed by any suitable assay. For example, the components of a CRISPR system sufficient to form a CRISPR complex, including the guide sequence to be tested, may be provided to a host cell having the corresponding target sequence, such as by transfection with vectors encoding the components of the CRISPR sequence, followed by an assessment of preferential cleavage within the target sequence, such as by Surveyor assay as described herein. Similarly, cleavage of a target polynucleotide sequence may be evaluated in a test tube by providing the target sequence, components of a CRISPR complex, including the guide sequence to be tested and a control guide sequence different from the test guide sequence, and comparing binding or rate of cleavage at the target sequence between the test and control guide sequence reactions. Other assays are possible, and will occur to those skilled in the art.

[0096] In some CRISPR-Cas systems, the degree of complementarity between a guide sequence and its corresponding target sequence can be about or more than about 50%, 60%, 75%, 80%, 85%, 90%, 95%, 97.5%, 99%, or 100%; a guide or RNA or crRNA can be about or more than about 5, 10, 11, 12, 13, 14, 15, 16, 17, 18, 19, 20, 21, 22, 23, 24, 25, 26, 27, 28, 29, 30, 35, 40, 45, 50, 75, or more nucleotides in length; or guide or RNA or crRNA can be less than about 75, 50, 45, 40, 35, 30, 25, 20, 15, 12, or fewer nucleotides in length; and advantageously tracr RNA is 30 or 50 nucleotides in length. However, an aspect of the invention is to reduce off-target interactions, e.g., reduce the guide interacting with a target sequence having low complementarity. Indeed, in the examples, it is shown that the invention involves mutations that result in the CRISPR-Cas system being able to distinguish between target and off-target sequences that have greater than 80% to about 95% complementarity, e.g., 83%-84% or 88-89% or 94-95% complementarity (for instance, distinguishing between a target having 18 nucleotides from an off-target of 18 nucleotides having 1, 2 or 3 mismatches). Accordingly, in the context of the present invention the degree of complementarity between a guide sequence and its corresponding target sequence is greater than 94.5% or 95% or 95.5% or 96% or 96.5% or 97% or 97.5% or 98% or 98.5% or 99% or 99.5% or 99.9%, or 100%. Off target is less than 100% or 99.9% or 99.5% or 99% or 99% or 98.5% or 98% or 97.5% or 97% or 96.5% or 96% or 95.5% or 95% or 94.5% or 94% or 93% or 92% or 91% or 90% or 89% or 88% or 87% or 86% or 85% or 84% or 83% or 82% or 81% or 80% complementarity between the sequence and the guide, with it advantageous that off target is 100% or 99.9% or 99.5% or 99% or 99% or 98.5% or 98% or 97.5% or 97% or 96.5% or 96% or 95.5% or 95% or 94.5% complementarity between the sequence and the guide.

[0097] In certain embodiments, modulations of cleavage efficiency can be exploited by introduction of mismatches, e.g. 1 or more mismatches, such as 1 or 2 mismatches between spacer sequence and target sequence, including the position of the mismatch along the spacer/target. The more central (e.g., not 3′ or 5′) for instance a double mismatch is, the more cleavage efficiency is affected. Accordingly, by choosing mismatch position along the spacer, cleavage efficiency can be modulated. By means of example, if less than 100% cleavage of targets is desired (e.g. in a cell population), 1 or more, such as preferably 2 mismatches between spacer and target sequence may be introduced in the spacer sequences. The more central along the spacer of the mismatch position, the lower the cleavage percentage.

[0098] The methods according to the invention as described herein comprehend inducing one or more nucleotide modifications in a eukaryotic cell (in vitro, i.e. in an isolated eukaryotic cell) as herein discussed comprising delivering to cell a vector as herein discussed. The mutation(s) can include the introduction, deletion, or substitution of one or more nucleotides at each target sequence of cell(s) via the guide(s) RNA(s) or sgRNA(s). The mutations can include the introduction, deletion, or substitution of 1-75 nucleotides at each target sequence of said cell(s) via the guide(s) RNA(s). The mutations can include the introduction, deletion, or substitution of 1, 5, 10, 11, 12, 13, 14, 15, 16, 17, 18, 19, 20, 21, 22, 23, 24, 25, 26, 27, 28, 29, 30, 35, 40, 45, 50, or 75 nucleotides at each target sequence of said cell(s) via the guide(s) RNA(s). The mutations can include the introduction, deletion, or substitution of 5, 10, 11, 12, 13, 14, 15, 16, 17, 18, 19, 20, 21, 22, 23, 24, 25, 26, 27, 28, 29, 30, 35, 40, 45, 50, or 75 nucleotides at each target sequence of said cell(s) via the guide(s) RNA(s). The mutations include the introduction, deletion, or substitution of 10, 11, 12, 13, 14, 15, 16, 17, 18, 19, 20, 21, 22, 23, 24, 25, 26, 27, 28, 29, 30, 35, 40, 45, 50, or 75 nucleotides at each target sequence of said cell(s) via the guide(s) RNA(s). The mutations can include the introduction, deletion, or substitution of 20, 21, 22, 23, 24, 25, 26, 27, 28, 29, 30, 35, 40, 45, 50, or 75 nucleotides at each target sequence of said cell(s) via the guide(s) RNA(s). The mutations can include the introduction, deletion, or substitution of 40, 45, 50, 75, 100, 200, 300, 400 or 500 nucleotides at each target sequence of said cell(s) via the guide(s) RNA(s).

[0099] For minimization of toxicity and off-target effect, it will be important to control the concentration of Cas mRNA or protein and guide RNA delivered. Optimal concentrations of Cas mRNA or protein and guide RNA can be determined by testing different concentrations in a cellular or non-human eukaryote animal model and using deep sequencing the analyze the extent of modification at potential off-target genomic loci.

[0100] Typically, in the context of an endogenous CRISPR system, formation of a CRISPR complex (comprising a guide sequence hybridized to a target sequence and complexed with one or more Cas proteins) results in cleavage in or near (e.g. within 1, 2, 3, 4, 5, 6, 7, 8, 9, 10, 20, 50, or more base pairs from) the target sequence, but may depend on for instance secondary structure, in particular in the case of RNA targets. In some cases, in the context of an endogenous CRISPR system, formation of a CRISPR complex (comprising a guide sequence hybridized to a target sequence and complexed with one or more Cas proteins) results in cleavage of one or both strands (if applicable) in or near (e.g. within 1, 2, 3, 4, 5, 6, 7, 8, 9, 10, 20, 50, or more base pairs from) the target sequence.

[0101] In particularly preferred embodiments according to the invention, the guide RNA (capable of guiding Cas to a target locus) may comprise (1) a guide sequence capable of hybridizing to a target locus (a polynucleotide target locus, such as an RNA target locus) in the eukaryotic cell; (2) a direct repeat (DR) sequence) which reside in a single RNA, i.e. an sgRNA (arranged in a 5′ to 3′ orientation) or crRNA.

[0102] With respect to general information on CRISPR-Cas Systems, components thereof, and delivery of such components, including methods, materials, delivery vehicles, vectors, particles, AAV, and making and using thereof, including as to amounts and formulations, all useful in the practice of the instant invention, reference is made to: U.S. Pat. Nos. 8,999,641, 8,993,233, 8,945,839, 8,932,814, 8,906,616, 8,895,308, 8,889,418, 8,889,356, 8,871,445, 8,865,406, 8,795,965, 8,771,945 and 8,697,359; US Patent Publications US 2014-0310830 (U.S. application Ser. No. 14/105,031), US 2014-0287938 A1 (U.S. application Ser. No. 14/213,991), US 2014-0273234 A1 (U.S. application Ser. No. 14/293,674), US2014-0273232 A1 (U.S. application Ser. No. 14/290,575), US 2014-0273231 (U.S. application Ser. No. 14/259,420), US 2014-0256046 A1 (U.S. application Ser. No. 14/226,274), US 2014-0248702 A1 (U.S. application Ser. No. 14/258,458), US 2014-0242700 A1 (U.S. application Ser. No. 14/222,930), US 2014-0242699 A1 (U.S. application Ser. No. 14/183,512), US 2014-0242664 A1 (U.S. application Ser. No. 14/104,990), US 2014-0234972 A1 (U.S. application Ser. No. 14/183,471), US 2014-0227787 A1 (U.S. application Ser. No. 14/256,912), US 2014-0189896 A1 (U.S. application Ser. No. 14/105,035), US 2014-0186958A1 (U.S. application Ser. No. 14/105,017), US 2014-0186919 A1 (U.S. application Ser. No. 14/104,977), US 2014-0186843 A1 (U.S. application Ser. No. 14/104,900), US 2014-0179770 A1 (U.S. application Ser. No. 14/104,837) and US 2014-0179006 A1 (U.S. application Ser. No. 14/183,486), US 2014-0170753 A1 (U.S. application Ser. No. 14/183,429); European Patents EP 2 784 162 B1 and EP 2 771 468 B 1; European Patent Applications EP 2 771 468 (EP13818570.7), EP 2 764 103 (EP13824232.6), and EP 2 784 162 (EP14170383.5); and PCT Patent Publications PCT Patent Publications WO 2014/093661 (PCT/US2013/074743), WO 2014/093694 (PCT/US2013/074790), WO 2014/093595 (PCT/US2013/074611), WO 2014/093718 (PCT/US2013/074825), WO 2014/093709 (PCT/US2013/074812), WO 2014/093622 (PCT/US2013/074667), WO 2014/093635 (PCT/US2013/074691), WO 2014/093655 (PCT/US2013/074736), WO 2014/093712 (PCT/US2013/074819), WO 2014/093701 (PCT/US2013/074800), WO 2014/018423 (PCT/US2013/051418), WO 2014/204723 (PCT/US2014/041790), WO 2014/204724 (PCT/US2014/041800), WO 2014/204725 (PCT/US2014/041803), WO 2014/204726 (PCT/US2014/041804), WO 2014/204727 (PCT/US2014/041806), WO 2014/204728 (PCT/US2014/041808), WO 2014/204729 (PCT/US2014/041809).

[0103] Reference is also made to U.S. Provisional Application Nos. 61/758,468; 61/802,174; 61/806,375; 61/814,263; 61/819,803 and 61/828,130, filed on Jan. 30, 2013; Mar. 15, 2013; Mar. 28, 2013; Apr. 20, 2013; May 6, 2013 and May 28, 2013 respectively. Reference is also made to U.S. Provisional Patent Application No. 61/836,123, filed on Jun. 17, 2013. Reference is additionally made to U.S. Provisional Application Nos. 61/835,931, 61/835,936, 61/836,127, 61/836,101, 61/836,080 and 61/835,973, each filed Jun. 17, 2013. Further reference is made to U.S. Provisional Application Nos. 61/862,468 and 61/862,355 filed on Aug. 5, 2013; 61/871,301 filed on Aug. 28, 2013; 61/960,777 filed on Sep. 25, 2013 and 61/961,980 filed on Oct. 28, 2013. Reference is yet further made to: PCT Patent applications Nos: PCT/US2014/041803, PCT/US2014/041800, PCT/US2014/041809, PCT/US2014/041804 and PCT/US2014/041806, each filed Jun. 10, 2014 6/10/14; PCT/US2014/041808 filed Jun. 11, 2014; and PCT/US2014/62558 filed Oct. 28, 2014, and U.S. Provisional Application Nos. 61/915,150, 61/915,301, 61/915,267 and 61/915,260, each filed Dec. 12, 2013; 61/757,972 and 61/768,959, filed on Jan. 29, 2013 and Feb. 25, 2013; 61/835,936, 61/836,127, 61/836,101, 61/836,080, 61/835,973, and 61/835,931, filed Jun. 17, 2013; 62/010,888 and 62/010,879, both filed Jun. 11, 2014; 62/010,329 and 62/010,441, each filed Jun. 10, 2014; 61/939,228 and 61/939,242, each filed Feb. 12, 2014; 61/980,012, filed Apr. 15, 2014; 62/038,358, filed Aug. 17, 2014; 62/054,490, 62/055,484, 62/055,460 and 62/055,487, each filed Sep. 25, 2014; and 62/069,243, filed Oct. 27, 2014. Reference is also made to U.S. Provisional Application Nos. 62/055,484, 62/055,460, and 62/055,487, filed Sep. 25, 2014; U.S. Provisional Application No. 61/980,012, filed Apr. 15, 2014; and U.S. Provisional Application No. 61/939,242 filed Feb. 12, 2014. Reference is made to PCT application designating, inter alia, the United States, application No. PCT/US14/41806, filed Jun. 10, 2014. Reference is made to U.S. Provisional Application No. 61/930,214 filed on Jan. 22, 2014. Reference is made to U.S. Provisional Application Nos. 61/915,251; 61/915,260 and 61/915,267, each filed on Dec. 12, 2013. Reference is made to U.S. Provisional Application No. 61/980,012 filed Apr. 15, 2014. Reference is made to PCT application designating, inter alia, the United States, application No. PCT/US14/41806, filed Jun. 10, 2014. Reference is made to US Provisional Application Nos. 61/930,214 filed on Jan. 22, 2014. Reference is made to U.S. Provisional Application Nos. 61/915,251; 61/915,260 and 61/915,267, each filed on Dec. 12, 2013.

[0104] Mention is also made of U.S. Provisional Application No. 62/091,455, filed 12 Dec. 2014, PROTECTED GUIDE RNAS (PGRNAS); US Provisional Application Nos. 62/096,708, filed 24 Dec. 2014, PROTECTED GUIDE RNAS (PGRNAS); U.S. Provisional Application No. 62/091,462, filed 12 Dec. 2014, DEAD GUIDES FOR CRISPR TRANSCRIPTION FACTORS; U.S. Provisional Application No. 62/096,324, filed 23 Dec. 2014, DEAD GUIDES FOR CRISPR TRANSCRIPTION FACTORS; U.S. Provisional Application No. 62/091,456, filed 12-Dec.-14, ESCORTED AND FUNCTIONALIZED GUIDES FOR CRISPR-CAS SYSTEMS; U.S. Provisional Application No. 62/091,461, filed 12 Dec. 2014, DELIVERY, USE AND THERAPEUTIC APPLICATIONS OF THE CRISPR-CAS SYSTEMS AND COMPOSITIONS FOR GENOME EDITING AS TO HEMATOPOETIC STEM CELLS (HSCs); U.S. Provisional Application No. 62/094,903, filed 19 Dec. 2014, UNBIASED IDENTIFICATION OF DOUBLE-STRAND BREAKS AND GENOMIC REARRANGEMENT BY GENOME-WISE INSERT CAPTURE SEQUENCING; U.S. Provisional Application No. 62/096,761, filed 24 Dec. 2014, ENGINEERING OF SYSTEMS, METHODS AND OPTIMIZED ENZYME AND GUIDE SCAFFOLDS FOR SEQUENCE MANIPULATION; U.S. application 62/098,059, 30-Dec.-14, RNA-TARGETING SYSTEM; U.S. Provisional Application No. 62/096,656, filed 24 Dec. 2014, CRISPR HAVING OR ASSOCIATED WITH DESTABILIZATION DOMAINS; U.S. Provisional Application No. 62/096,697, filed 24 Dec. 2014, CRISPR HAVING OR ASSOCIATED WITH AAV; U.S. Provisional Application No. 62/098,158, filed 30 Dec. 2014, ENGINEERED CRISPR COMPLEX INSERTIONAL TARGETING SYSTEMS; U.S. Provisional Application No. 62/151,052, filed 22 Apr. 2015, CELLULAR TARGETING FOR EXTRACELLULAR EXOSOMAL REPORTING; U.S. Provisional Application No. 62/054,490, filed 24 Sep. 2014, DELIVERY, USE AND THERAPEUTIC APPLICATIONS OF THE CRISPR-CAS SYSTEMS AND COMPOSITIONS FOR TARGETING DISORDERS AND DISEASES USING PARTICLE DELIVERY COMPONENTS; U.S. Provisional Application No. 62/055,484, filed 25 Sep. 2014, SYSTEMS, METHODS AND COMPOSITIONS FOR SEQUENCE MANIPULATION WITH OPTIMIZED FUNCTIONAL CRISPR-CAS SYSTEMS; U.S. Provisional Application No. 62/087,537, filed 4 Dec. 2014, SYSTEMS, METHODS AND COMPOSITIONS FOR SEQUENCE MANIPULATION WITH OPTIMIZED FUNCTIONAL CRISPR-CAS SYSTEMS; U.S. Provisional Application No. 62/054,651, filed 24 Sep. 2014, DELIVERY, USE AND THERAPEUTIC APPLICATIONS OF THE CRISPR-CAS SYSTEMS AND COMPOSITIONS FOR MODELING COMPETITION OF MULTIPLE CANCER MUTATIONS IN VIVO; U.S. Provisional Application No. 62/067,886, filed 23 Oct. 2014, DELIVERY, USE AND THERAPEUTIC APPLICATIONS OF THE CRISPR-CAS SYSTEMS AND COMPOSITIONS FOR MODELING COMPETITION OF MULTIPLE CANCER MUTATIONS IN VIVO; U.S. Provisional Application No. 62/054,675, filed 24-Sep.-2014, DELIVERY, USE AND THERAPEUTIC APPLICATIONS OF THE CRISPR-CAS SYSTEMS AND COMPOSITIONS IN NEURONAL CELLS/TISSUES; U.S. Provisional Application No. 62/054,528, filed 24 Sep. 2014, DELIVERY, USE AND THERAPEUTIC APPLICATIONS OF THE CRISPR-CAS SYSTEMS AND COMPOSITIONS IN IMMUNE DISEASES OR DISORDERS; U.S. Provisional Application No. 62/055,454, filed 25 Sep. 2014, DELIVERY, USE AND THERAPEUTIC APPLICATIONS OF THE CRISPR-CAS SYSTEMS AND COMPOSITIONS FOR TARGETING DISORDERS AND DISEASES USING CELL PENETRATION PEPTIDES (CPP); U.S. Provisional Application No. 62/055,460, filed 25 Sep. 2014, MULTIFUNCTIONAL-CRISPR COMPLEXES AND/OR OPTIMIZED ENZYME LINKED FUNCTIONAL-CRISPR COMPLEXES; U.S. Provisional Application No. 62/087,475, filed 4 Dec. 2014, FUNCTIONAL SCREENING WITH OPTIMIZED FUNCTIONAL CRISPR-CAS SYSTEMS; U.S. Provisional Application No. 62/055,487, filed 25 Sep. 2014, FUNCTIONAL SCREENING WITH OPTIMIZED FUNCTIONAL CRISPR-CAS SYSTEMS; U.S. Provisional Application No. 62/087,546, filed 4 Dec. 2014, MULTIFUNCTIONAL CRISPR COMPLEXES AND/OR OPTIMIZED ENZYME LINKED FUNCTIONAL-CRISPR COMPLEXES; and U.S. Provisional Application No. 62/098,285, filed 30-Dec.-14, CRISPR MEDIATED IN VIVO MODELING AND GENETIC SCREENING OF TUMOR GROWTH AND METASTASIS.

[0105] Also with respect to general information on CRISPR-Cas Systems, mention is made of the following (also hereby incorporated herein by reference):
[0106] Multiplex genome engineering using CRISPR/Cas systems. Cong, L., Ran, F. A., Cox, D., Lin, S., Barretto, R., Habib, N., Hsu, P. D., Wu, X., Jiang, W., Marraffini, L. A., & Zhang, F. Science February 15; 339(6121):819-23 (2013);
[0107] RNA-guided editing of bacterial genomes using CRISPR-Cas systems. Jiang W., Bikard D., Cox D., Zhang F, Marraffini L A. Nat Biotechnol March; 31(3):233-9 (2013);
[0108] One-Step Generation of Mice Carrying Mutations in Multiple Genes by CRISPR/Cas-Mediated Genome Engineering. Wang H., Yang H., Shivalila C S., Dawlaty M M., Cheng A W., Zhang F., Jaenisch R. Cell May 9; 153(4):910-8 (2013);
[0109] Optical control of mammalian endogenous transcription and epigenetic states. Konermann S, Brigham M D, Trevino A E, Hsu P D, Heidenreich M, Cong L, Platt R J, Scott D A, Church G M, Zhang F. Nature. August 22; 500(7463):472-6. doi: 10.1038Nature12466. Epub 2013 Aug. 23 (2013);
[0110] Double Nicking by RNA-Guided CRISPR Cas9 for Enhanced Genome Editing Specificity. Ran, F A., Hsu, P D., Lin, C Y., Gootenberg, J S., Konermann, S., Trevino, A E., Scott, D A., Inoue, A., Matoba, S., Zhang, Y., & Zhang, F. Cell August 28. pii: S0092-8674(13)01015-5 (2013-A);
[0111] DNA targeting specificity of RNA-guided Cas9 nucleases. Hsu, P., Scott, D., Weinstein, J., Ran, F A., Konermann, S., Agarwala, V., Li, Y., Fine, E., Wu, X., Shalem, O., Cradick, T J., Marraffini, L A., Bao, G., & Zhang, F. Nat Biotechnol doi:10.1038/nbt.2647 (2013);
   [0112] Genome engineering using the CRISPR-Cas9 system. Ran, F A., Hsu, P D., Wright, J., Agarwala, V., Scott, D A., Zhang, F. Nature Protocols November; 8(11):2281-308 (2013-B);
[0113] Genome-Scale CRISPR-Cas9 Knockout Screening in Human Cells. Shalem, O., Sanjana, N E., Hartenian, E., Shi, X., Scott, D A., Mikkelson, T., Heckl, D., Ebert, B L., Root, D E., Doench, J G., Zhang, F. Science December 12. (2013). [Epub ahead of print];
[0114] Crystal structure of cas9 in complex with guide RNA and target DNA. Nishimasu, H., Ran, F A., Hsu, P D., Konermann, S., Shehata, S I., Dohmae, N., Ishitani, R., Zhang, F., Nureki, O. Cell February 27, 156(5):935-49 (2014);
[0115] Genome-wide binding of the CRISPR endonuclease Cas9 in mammalian cells. Wu X., Scott D A., Kriz A J., Chiu A C., Hsu P D., Dadon D B., Cheng A W., Trevino A E., Konermann S., Chen S., Jaenisch R., Zhang F., Sharp P A. Nat Biotechnol. April 20. doi: 10.1038/nbt.2889 (2014);
[0116] CRISPR-Cas9 Knockin Mice for Genome Editing and Cancer Modeling. Platt R J, Chen S, Zhou Y, Yim M J, Swiech L, Kempton H R, Dahlman J E, Parnas O, Eisenhaure T M, Jovanovic M, Graham D B, Jhunjhunwala S, Heidenreich M, Xavier R J, Langer R, Anderson D G, Hacohen N, Regev A, Feng G, Sharp P A, Zhang F. Cell 159(2): 440-455 DOI: 10.1016/j.cell.2014.09.014(2014);
[0117] Development and Applications of CRISPR-Cas9 for Genome Engineering, Hsu P D, Lander E S, Zhang F., Cell. June 5; 157(6):1262-78 (2014).
[0118] Genetic screens in human cells using the CRISPR/Cas9 system, Wang T, Wei J J, Sabatini D M, Lander E S., Science. January 3; 343(6166): 80-84. doi:10.1126/science.1246981 (2014);
[0119] Rational design of highly active sgRNAs for CRISPR-Cas9-mediated gene inactivation, Doench J G, Hartenian E, Graham D B, Tothova Z, Hegde M, Smith I, Sullender M, Ebert B L, Xavier R J, Root D E., (published online 3 Sep. 2014) Nat Biotechnol. December; 32(12):1262-7 (2014);
[0120] In vivo interrogation of gene function in the mammalian brain using CRISPR-Cas9, Swiech L, Heidenreich M, Banerjee A, Habib N, Li Y, Trombetta J, Sur M, Zhang F., (published online 19 Oct. 2014) Nat Biotechnol. January; 33(1):102-6 (2015);
[0121] Genome-scale transcriptional activation by an engineered CRISPR-Cas9 complex, Konermann S, Brigham M D, Trevino A E, Joung J, Abudayyeh O O, Barcena C, Hsu P D, Habib N, Gootenberg J S, Nishimasu H, Nureki O, Zhang F., Nature. January 29; 517(7536):583-8 (2015).
[0122] A split-Cas9 architecture for inducible genome editing and transcription modulation, Zetsche B, Volz S E, Zhang F., (published online 2 Feb. 2015) Nat Biotechnol. February; 33(2):139-42 (2015);
[0123] Genome-wide CRISPR Screen in a Mouse Model of Tumor Growth and Metastasis, Chen S, Sanjana N E, Zheng K, Shalem O, Lee K, Shi X, Scott D A, Song J, Pan J Q, Weissleder R, Lee H, Zhang F, Sharp P A. Cell 160, 1246-1260, Mar. 12, 2015 (multiplex screen in mouse), and
[0124] In vivo genome editing using Staphylococcus aureus Cas9, Ran F A, Cong L, Yan W X, Scott D A, Gootenberg J S, Kriz A J, Zetsche B, Shalem O, Wu X, Makarova K S, Koonin E V, Sharp P A, Zhang F., (published online 1 Apr. 2015), Nature. April 9; 520(7546):186-91 (2015).
[0125] Shalem et al., “High-throughput functional genomics using CRISPR-Cas9,” Nature Reviews Genetics 16, 299-311 (May 2015).
[0126] Xu et al., “Sequence determinants of improved CRISPR sgRNA design,” Genome Research 25, 1147-1157 (August 2015).
[0127] Parnas et al., “A Genome-wide CRISPR Screen in Primary Immune Cells to Dissect Regulatory Networks,” Cell 162, 675-686 (Jul. 30, 2015).
[0128] Ramanan et al., CRISPR/Cas9 cleavage of viral DNA efficiently suppresses hepatitis B virus,” Scientific Reports 5:10833. doi: 10.1038/srep10833 (Jun. 2, 2015)
[0129] Nishimasu et al., Crystal Structure of Staphylococcus aureus Cas9,” Cell 162, 1113-1126 (Aug. 27, 2015)
[0130] Zetsche et al. (2015), “Cpf1 is a single RNA-guided endonuclease of a class 2 CRISPR-Cas system,” Cell 163, 759-771 (Oct. 22, 2015) doi: 10.1016/j.cell.2015.09.038. Epub Sep. 25, 2015
[0131] Shmakov et al. (2015), “Discovery and Functional Characterization of Diverse Class 2 CRISPR-Cas Systems,” Molecular Cell 60, 385-397 (Nov. 5, 2015) doi: 10.1016/j.molcel.2015.10.008. Epub Oct. 22, 2015
[0132] Dahlman et al., “Orthogonal gene control with a catalytically active Cas9 nuclease,” Nature Biotechnology 33, 1159-1161 (November, 2015)
[0133] Gao et al, “Engineered Cpf1 Enzymes with Altered PAM Specificities,” bioRxiv 091611; doi: dx.doi.org/10.1101/091611 Epub Dec. 4, 2016
[0134] Smargon et al. (2017), “Cas13b Is a Type VI-B CRISPR-Associated RNA-Guided RNase Differentially Regulated by Accessory Proteins Csx27 and Csx28,” Molecular Cell 65, 618-630 (Feb. 16, 2017) doi: 10.1016/j.molcel.2016.12.023. Epub Jan. 5, 2017
   each of which is incorporated herein by reference, may be considered in the practice of the instant invention, and discussed briefly below:
[0135] Cong et al. engineered type II CRISPR-Cas systems for use in eukaryotic cells based on both Streptococcus thermophilus Cas9 and also Streptococcus pyogenes Cas9 and demonstrated that Cas9 nucleases can be directed by short RNAs to induce precise cleavage of DNA in human and mouse cells. Their study further showed that Cas9 as converted into a nicking enzyme can be used to facilitate homology-directed repair in eukaryotic cells with minimal mutagenic activity. Additionally, their study demonstrated that multiple guide sequences can be encoded into a single CRISPR array to enable simultaneous editing of several at endogenous genomic loci sites within the mammalian genome, demonstrating easy programmability and wide applicability of the RNA-guided nuclease technology. This ability to use RNA to program sequence specific DNA cleavage in cells defined a new class of genome engineering tools. These studies further showed that other CRISPR loci are likely to be transplantable into mammalian cells and can also mediate mammalian genome cleavage. Importantly, it can be envisaged that several aspects of the CRISPR-Cas system can be further improved to increase its efficiency and versatility.
[0136] Jiang et al. used the clustered, regularly interspaced, short palindromic repeats (CRISPR)— associated Cas9 endonuclease complexed with dual-RNAs to introduce precise mutations in the genomes of Streptococcus pneumoniae and Escherichia coli. The approach relied on dual-RNA:Cas9-directed cleavage at the targeted genomic site to kill unmutated cells and circumvents the need for selectable markers or counter-selection systems. The study reported reprogramming dual-RNA:Cas9 specificity by changing the sequence of short CRISPR RNA (crRNA) to make single- and multinucleotide changes carried on editing templates. The study showed that simultaneous use of two crRNAs enabled multiplex mutagenesis. Furthermore, when the approach was used in combination with recombineering, in S. pneumoniae, nearly 100% of cells that were recovered using the described approach contained the desired mutation, and in E. coli, 65% that were recovered contained the mutation.
[0137] Wang et al. (2013) used the CRISPR/Cas system for the one-step generation of mice carrying mutations in multiple genes which were traditionally generated in multiple steps by sequential recombination in embryonic stem cells and/or time-consuming intercrossing of mice with a single mutation. The CRISPR/Cas system will greatly accelerate the in vivo study of functionally redundant genes and of epistatic gene interactions.
[0138] Konermann et al. (2013) addressed the need in the art for versatile and robust technologies that enable optical and chemical modulation of DNA-binding domains based CRISPR Cas9 enzyme and also Transcriptional Activator Like Effectors
[0139] Ran et al. (2013-A) described an approach that combined a Cas9 nickase mutant with paired guide RNAs to introduce targeted double-strand breaks. This addresses the issue of the Cas9 nuclease from the microbial CRISPR-Cas system being targeted to specific genomic loci by a guide sequence, which can tolerate certain mismatches to the DNA target and thereby promote undesired off-target mutagenesis. Because individual nicks in the genome are repaired with high fidelity, simultaneous nicking via appropriately offset guide RNAs is required for double-stranded breaks and extends the number of specifically recognized bases for target cleavage. The authors demonstrated that using paired nicking can reduce off-target activity by 50- to 1,500-fold in cell lines and to facilitate gene knockout in mouse zygotes without sacrificing on-target cleavage efficiency. This versatile strategy enables a wide variety of genome editing applications that require high specificity.
[0140] Hsu et al. (2013) characterized SpCas9 targeting specificity in human cells to inform the selection of target sites and avoid off-target effects. The study evaluated >700 guide RNA variants and SpCas9-induced indel mutation levels at >100 predicted genomic off-target loci in 293T and 293FT cells. The authors that SpCas9 tolerates mismatches between guide RNA and target DNA at different positions in a sequence-dependent manner, sensitive to the number, position and distribution of mismatches. The authors further showed that SpCas9-mediated cleavage is unaffected by DNA methylation and that the dosage of SpCas9 and sgRNA can be titrated to minimize off-target modification. Additionally, to facilitate mammalian genome engineering applications, the authors reported providing a web-based software tool to guide the selection and validation of target sequences as well as off-target analyses.
[0141] Ran et al. (2013-B) described a set of tools for Cas9-mediated genome editing via non-homologous end joining (NHEJ) or homology-directed repair (HDR) in mammalian cells, as well as generation of modified cell lines for downstream functional studies. To minimize off-target cleavage, the authors further described a double-nicking strategy using the Cas9 nickase mutant with paired guide RNAs. The protocol provided by the authors experimentally derived guidelines for the selection of target sites, evaluation of cleavage efficiency and analysis of off-target activity. The studies showed that beginning with target design, gene modifications can be achieved within as little as 1-2 weeks, and modified clonal cell lines can be derived within 2-3 weeks.
[0142] Shalem et al. described a new way to interrogate gene function on a genome-wide scale. Their studies showed that delivery of a genome-scale CRISPR-Cas9 knockout (GeCKO) library targeted 18,080 genes with 64,751 unique guide sequences enabled both negative and positive selection screening in human cells. First, the authors showed use of the GeCKO library to identify genes essential for cell viability in cancer and pluripotent stem cells. Next, in a melanoma model, the authors screened for genes whose loss is involved in resistance to vemurafenib, a therapeutic that inhibits mutant protein kinase BRAF. Their studies showed that the highest-ranking candidates included previously validated genes NF1 and MED12 as well as novel hits NF2, CUL3, TADA2B, and TADA1. The authors observed a high level of consistency between independent guide RNAs targeting the same gene and a high rate of hit confirmation, and thus demonstrated the promise of genome-scale screening with Cas9.
[0143] Nishimasu et al. reported the crystal structure of Streptococcus pyogenes Cas9 in complex with sgRNA and its target DNA at 2.5 A° resolution. The structure revealed a bilobed architecture composed of target recognition and nuclease lobes, accommodating the sgRNA:DNA heteroduplex in a positively charged groove at their interface. Whereas the recognition lobe is essential for binding sgRNA and DNA, the nuclease lobe contains the HNH and RuvC nuclease domains, which are properly positioned for cleavage of the complementary and non-complementary strands of the target DNA, respectively. The nuclease lobe also contains a carboxyl-terminal domain responsible for the interaction with the protospacer adjacent motif (PAM). This high-resolution structure and accompanying functional analyses have revealed the molecular mechanism of RNA-guided DNA targeting by Cas9, thus paving the way for the rational design of new, versatile genome-editing technologies.
[0144] Wu et al. mapped genome-wide binding sites of a catalytically inactive Cas9 (dCas9) from Streptococcus pyogenes loaded with single guide RNAs (sgRNAs) in mouse embryonic stem cells (mESCs). The authors showed that each of the four sgRNAs tested targets dCas9 to between tens and thousands of genomic sites, frequently characterized by a 5-nucleotide seed region in the sgRNA and an NGG protospacer adjacent motif (PAM). Chromatin inaccessibility decreases dCas9 binding to other sites with matching seed sequences; thus 70% of off-target sites are associated with genes. The authors showed that targeted sequencing of 295 dCas9 binding sites in mESCs transfected with catalytically active Cas9 identified only one site mutated above background levels. The authors proposed a two-state model for Cas9 binding and cleavage, in which a seed match triggers binding but extensive pairing with target DNA is required for cleavage.
[0145] Platt et al. established a Cre-dependent Cas9 knockin mouse. The authors demonstrated in vivo as well as ex vivo genome editing using adeno-associated virus (AAV)-, lentivirus-, or particle-mediated delivery of guide RNA in neurons, immune cells, and endothelial cells.
[0146] Hsu et al. (2014) is a review article that discusses generally CRISPR-Cas9 history from yogurt to genome editing, including genetic screening of cells.
[0147] Wang et al. (2014) relates to a pooled, loss-of-function genetic screening approach suitable for both positive and negative selection that uses a genome-scale lentiviral single guide RNA (sgRNA) library.
[0148] Doench et al. created a pool of sgRNAs, tiling across all possible target sites of a panel of six endogenous mouse and three endogenous human genes and quantitatively assessed their ability to produce null alleles of their target gene by antibody staining and flow cytometry. The authors showed that optimization of the PAM improved activity and also provided an on-line tool for designing sgRNAs.
[0149] Swiech et al. demonstrate that AAV-mediated SpCas9 genome editing can enable reverse genetic studies of gene function in the brain.
[0150] Konermann et al. (2015) discusses the ability to attach multiple effector domains, e.g., transcriptional activator, functional and epigenomic regulators at appropriate positions on the guide such as stem or tetraloop with and without linkers.
[0151] Zetsche et al. demonstrates that the Cas9 enzyme can be split into two and hence the assembly of Cas9 for activation can be controlled.
[0152] Chen et al. relates to multiplex screening by demonstrating that a genome-wide in vivo CRISPR-Cas9 screen in mice reveals genes regulating lung metastasis.
[0153] Ran et al. (2015) relates to SaCas9 and its ability to edit genomes and demonstrates that one cannot extrapolate from biochemical assays. Shalem et al. (2015) described ways in which catalytically inactive Cas9 (dCas9) fusions are used to synthetically repress (CRISPRi) or activate (CRISPRa) expression, showing. advances using Cas9 for genome-scale screens, including arrayed and pooled screens, knockout approaches that inactivate genomic loci and strategies that modulate transcriptional activity.
[0154] Shalem et al. (2015) described ways in which catalytically inactive Cas9 (dCas9) fusions are used to synthetically repress (CRISPRi) or activate (CRISPRa) expression, showing. advances using Cas9 for genome-scale screens, including arrayed and pooled screens, knockout approaches that inactivate genomic loci and strategies that modulate transcriptional activity.
[0155] Xu et al. (2015) assessed the DNA sequence features that contribute to single guide RNA (sgRNA) efficiency in CRISPR-based screens. The authors explored efficiency of CRISPR/Cas9 knockout and nucleotide preference at the cleavage site. The authors also found that the sequence preference for CRISPRi/a is substantially different from that for CRISPR/Cas9 knockout.
[0156] Parnas et al. (2015) introduced genome-wide pooled CRISPR-Cas9 libraries into dendritic cells (DCs) to identify genes that control the induction of tumor necrosis factor (Tnf) by bacterial lipopolysaccharide (LPS). Known regulators of Tlr4 signaling and previously unknown candidates were identified and classified into three functional modules with distinct effects on the canonical responses to LPS.
[0157] Ramanan et al (2015) demonstrated cleavage of viral episomal DNA (cccDNA) in infected cells. The HBV genome exists in the nuclei of infected hepatocytes as a 3.2 kb double-stranded episomal DNA species called covalently closed circular DNA (cccDNA), which is a key component in the HBV life cycle whose replication is not inhibited by current therapies. The authors showed that sgRNAs specifically targeting highly conserved regions of HBV robustly suppresses viral replication and depleted cccDNA.
[0158] Nishimasu et al. (2015) reported the crystal structures of SaCas9 in complex with a single guide RNA (sgRNA) and its double-stranded DNA targets, containing the 5′-TTGAAT-3′ PAM and the 5′-TTGGGT-3′ PAM. A structural comparison of SaCas9 with SpCas9 highlighted both structural conservation and divergence, explaining their distinct PAM specificities and orthologous sgRNA recognition.

[0159] Also, “Dimeric CRISPR RNA-guided FokI nucleases for highly specific genome editing”, Shengdar Q. Tsai, Nicolas Wyvekens, Cyd Khayter, Jennifer A. Foden, Vishal Thapar, Deepak Reyon, Mathew J. Goodwin, Martin J. Aryee, J. Keith Joung Nature Biotechnology 32(6): 569-77 (2014), relates to dimeric RNA-guided FokI Nucleases that recognize extended sequences and can edit endogenous genes with high efficiencies in human cells. In addition, mention is made of PCT application PCT/US14/70057, Attorney Reference 47627.99.2060 and BI-2013/107 entitled “DELIVERY, USE AND THERAPEUTIC APPLICATIONS OF THE CRISPR-CAS SYSTEMS AND COMPOSITIONS FOR TARGETING DISORDERS AND DISEASES USING PARTICLE DELIVERY COMPONENTS (claiming priority from one or more or all of US provisional patent applications: 62/054,490, filed Sep. 24, 2014; 62/010,441, filed Jun. 10, 2014; and 61/915,118, 61/915,215 and 61/915,148, each filed on Dec. 12, 2013) (“the Particle Delivery PCT”), incorporated herein by reference, with respect to a method of preparing an sgRNA-and-Cas9 protein containing particle comprising admixing a mixture comprising an sgRNA and Cas9 protein (and optionally HDR template) with a mixture comprising or consisting essentially of or consisting of surfactant, phospholipid, biodegradable polymer, lipoprotein and alcohol; and particles from such a process. For example, wherein Cas9 protein and sgRNA were mixed together at a suitable, e.g., 3:1 to 1:3 or 2:1 to 1:2 or 1:1 molar ratio, at a suitable temperature, e.g., 15-30C, e.g., 20-25C, e.g., room temperature, for a suitable time, e.g., 15-45, such as 30 minutes, advantageously in sterile, nuclease free buffer, e.g., 1X PBS. Separately, particle components such as or comprising: a surfactant, e.g., cationic lipid, e.g., 1,2-dioleoyl-3-trimethylammonium-propane (DOTAP); phospholipid, e.g., dimyristoylphosphatidylcholine (DMPC); biodegradable polymer, such as an ethylene-glycol polymer or PEG, and a lipoprotein, such as a low-density lipoprotein, e.g., cholesterol were dissolved in an alcohol, advantageously a C₁₋₆ alkyl alcohol, such as methanol, ethanol, isopropanol, e.g., 100% ethanol. The two solutions were mixed together to form particles containing the Cas9-sgRNA complexes. Accordingly, sgRNA may be pre-complexed with the Cas9 protein, before formulating the entire complex in a particle. Formulations may be made with a different molar ratio of different components known to promote delivery of nucleic acids into cells (e.g. 1,2-dioleoyl-3-trimethylammonium-propane (DOTAP), 1,2-ditetradecanoyl-sn-glycero-3-phosphocholine (DMPC), polyethylene glycol (PEG), and cholesterol) For example DOTAP:DMPC:PEG:Cholesterol Molar Ratios may be DOTAP 100, DMPC 0, PEG 0, Cholesterol 0; or DOTAP 90, DMPC 0, PEG 10, Cholesterol 0; or DOTAP 90, DMPC 0, PEG 5, Cholesterol 5. DOTAP 100, DMPC 0, PEG 0, Cholesterol 0. That application accordingly comprehends admixing sgRNA, Cas9 protein and components that form a particle; as well as particles from such admixing. Aspects of the instant invention can involve particles; for example, particles using a process analogous to that of the Particle Delivery PCT, e.g., by admixing a mixture comprising crRNA and/or CRISPR-Cas as in the instant invention and components that form a particle, e.g., as in the Particle Delivery PCT, to form a particle and particles from such admixing (or, of course, other particles involving crRNA and/or CRISPR-Cas as in the instant invention).

### Multiplex Targeting Approach

[0160] The Cas proteins herein can employ more than one guide molecules without losing activity. This may enable the use of the Cas proteins, CRISPR-Cas systems or complexes as defined herein for targeting multiple targets (e.g., DNA targets), genes or gene loci, with a single enzyme, system or complex as defined herein. The guide molecules may be tandemly arranged, optionally separated by a nucleotide sequence such as a direct repeat as defined herein. The position of the different guide molecules is the tandem does not influence the activity.

[0161] In any of the described methods the complex may be delivered with multiple guides for multiplexed use. In any of the described methods more than one protein(s) may be used. In some examples, one Cas protein may be delivered with multiple guides, e.g., at least 2, at least 5, at least 10, at least 15, at least 20, at least 30, at least 40, at least 50, at least 60, at least 70, at least 80, at least 90, at least 100, at least 120, at least 140, at least 160, at least 180, at least 200, at least 220, at least 240, at least 260, at least 280, at least 300, at least 350, at least 400, or at least 500 guides. In some examples, a system herein may comprise a Cas protein and multiple guides, e.g., at least 2, at least 5, at least 10, at least 15, at least 20, at least 30, at least 40, at least 50, at least 60, at least 70, at least 80, at least 90, at least 100, at least 120, at least 140, at least 160, at least 180, at least 200, at least 220, at least 240, at least 260, at least 280, at least 300, at least 350, at least 400, or at least 500 guides.

[0162] The Cas protein may form part of a CRISPR system or complex, which further comprises tandemly arranged guide RNAs (gRNAs) comprising a series of 2, 3, 4, 5, 6, 7, 8, 9, 10, 15, 25, 25, 30, or more than 30 guide sequences, each capable of specifically hybridizing to a target sequence in a genomic locus of interest in a cell. In some embodiments, the functional Cas CRISPR system or complex binds to the multiple target sequences. In some embodiments, the functional CRISPR system or complex may edit the multiple target sequences, e.g., the target sequences may comprise a genomic locus, and in some embodiments, there may be an alteration of gene expression. In some embodiments, the functional CRISPR system or complex may comprise further functional domains. In some embodiments, the composition comprises two or more guide sequences capable of hybridizing to two different target sequences or different regions of a target sequence.

[0163] In some embodiments, the invention provides a method for altering or modifying expression of multiple gene products. The method may comprise introducing into a cell containing said target nucleic acids, e.g., DNA molecules, or containing and expressing target nucleic acid, e.g., DNA molecules; for instance, the target nucleic acids may encode gene products or provide for expression of gene products (e.g., regulatory sequences). In some general embodiments, the Cas enzyme used for multiplex targeting is associated with one or more functional domains. In some more specific embodiments, the CRISPR enzyme used for multiplex targeting is a deadCas as defined herein elsewhere. In some embodiments, each of the guide sequence is at least 16, 17, 18, 19, 20, 25 nucleotides, or between 16-30, or between 16-25, or between 16-20 nucleotides in length. Examples of multiplex genome engineering using CRISPR effector proteins are provided in Cong et al. (Science February 15; 339(6121):819-23 (2013) and other publications cited herein.

[0164] In any of the described methods the strand break may be a single strand break or a double strand break. In preferred embodiments the double strand break may refer to the breakage of two sections of RNA, such as the two sections of RNA formed when a single strand RNA molecule has folded onto itself or putative double helices that are formed with an RNA molecule which contains self-complementary sequences allows parts of the RNA to fold and pair with itself.

[0165] Provided herein are engineered polynucleotide sequences that can direct the activity of a CRISPR protein to multiple targets using a single crRNA. The engineered polynucleotide sequences, also referred to as multiplexing polynucleotides, can include two or more direct repeats interspersed with two or more guide sequences. More specifically, the engineered polynucleotide sequences can include a direct repeat sequence having one or more mutations relative to the corresponding wild type direct repeat sequence. The engineered polynucleotide can be configured, for example, as: 5′ DR1-G1-DR2-G2 3′. In some embodiments, the engineered polynucleotide can be configured to include three, four, five, or more additional direct repeat and guide sequences, for example: 5′ DR1-G1-DR2-G2-DR3-G3 3′, 5″ DR1-G1-DR2-G2-DR3-G3-DR4-G4 3′, or 5′ DR1-G1-DR2-G2-DR3-G3-DR4-G4-DR5-G5 3′.

[0166] Regardless of the number of direct repeat sequences, the direct repeat sequences differ from one another. Thus, DR1 can be a wild type sequence and DR2 can include one or more mutations relative to the wild type sequence in accordance with the disclosure provided herein regarding direct repeats for Cas orthologs. The guide sequences can also be the same or different. In some embodiments, the guide sequences can bind to different nucleic acid targets, for example, nucleic acids encoding different polypeptides. The multiplexing polynucleotides can be as described, for example, at [0039]-[0072] in U.S. Application 62/780,748 entitled “CRISPR Cpf1 Direct Repeat Variants” and filed Dec. 17, 2018, incorporated herein in its entirety by reference.

[0167] Multiplex design of guide molecules for the detection of coronaviruses and/or other respiratory viruses in a sample to identify the cause of a respiratory infection is envisioned, and design can be according to the methods disclosed herein. Briefly, the design of guide molecules can encompass utilization of training models described herein using a variety of input features, which may include the particular Cas protein used for targeting of the sequences of interest. See U.S. Provisional Application 62/818,702 FIG. 4A, incorporated specifically by reference. Guide molecules can be designed as detailed elsewhere herein. Regarding detection of coronavirus, guide design can be predicated on genome sequences disclosed in Tian et al, “Potent binding of 2019 novel coronavirus spike protein by a SARS coronavirus-specific human monoclonal antibody”; doi: 10.1101/2020.01.28.923011, incorporated by reference, which details human monoclonal antibody, CR3022 binding of the 2019-nCoV RBD (KD of 6.3 nM) or Sequences of the 2019-nCoV are available at GISAID accession no. EPI_ISL_402124 and EPI_ISL_402127-402130, and described in doi:10.1101/2020.01.22.914952, or EP_ISL_402119-402121 and EP_ISL 402123-402124; see also GenBank Accession No. MN908947.3. Guide design can target unique viral genomic regions of the 2019-nCoV or conserved genomic regions across one or more viruses of the coronavirus family.

### Type VI Cas Proteins

[0168] In some embodiments, the Cas proteins herein are Class 2 Type VI Cas proteins. Type VI Cas proteins include Cas proteins that contain one or more (e.g., two) higher eukaryotes and prokaryotes nucleotide-binding (HEPN) domains. HEPN domains are common in various defense systems, the experimentally characterized of which, such as the toxins of numerous prokaryotic toxin-antitoxin systems or eukaryotic RNase L, all have RNase activity. Examples of HEPN include those described in Anantharaman V, Makarova K S, Burroughs A M, Koonin E V, Aravind L. Comprehensive analysis of the HEPN superfamily: identification of novel roles in intra-genomic conflicts. Examples of Type VI Cas proteins include those described in Shmakov S, et al. Discovery and functional characterization of diverse class 2 CRISPR-Cas systems. Mol. Cell. 2015; 60:385-397, Shmakov S, et al. Nat Rev Microbiol. 2017 March; 15(3): 169-182; and Makarova, K. S., Wolf, Y. I., Iranzo, J. et al. Evolutionary classification of CRISPR-Cas systems: a burst of class 2 and derived variants. Nat Rev Microbiol 18, 67-83 (2020), which are incorporated by reference herein in their entireties.

[0169] In an embodiment, a HEPN domain comprises at least one RxxxxH motif comprising the sequence of R{N/H/K}X₁X₂X₃H. In an embodiment of the invention, a HEPN domain comprises a RxxxxH motif comprising the sequence of R{N/H}X₁X₂X₃H. In an embodiment of the invention, a HEPN domain comprises the sequence of R{N/K}X₁X₂X₃H. In certain embodiments, X₁ is R, S, D, E, Q, N, G, Y, or H. In certain embodiments, X₂ is I, S, T, V, or L. In certain embodiments, X₃ is L, F, N, Y, V, I, S, D, E, or A.

[0170] In some embodiments, the systems or compositions comprise a protein comprising one or more HEPN domains and is less than 1000 amino acids in length. For example, the protein may be less than 950, less than 900, less than 850, less than 800, less than 750, less than 700, less than 650, less than 600, less than 550, or less than 500 amino acids in size.

### Cas13 in General

[0171] In some examples, the Type VI Cas proteins are Cas13 proteins. Examples of Cas 13 proteins include Cas13a, Cas13b, Cas13c, Cas13d, and Cas13b-t. The instant invention provides particular Cas13 effectors, nucleic acids, systems, vectors, and methods of use. The features and functions of Cas13 may also be the features and functions of other CRISPR-Cas proteins described herein. In some examples, the CRISPR-Cas protein is Cas13a. In some examples, the CRISPR-Cas protein is Cas13b. In some examples, the CRISPR-Cas protein is Cas13b-t. In some examples, the CRISPR-Cas protein is Cas13c. In some examples, the CRISPR-Cas protein is Cas13d.

[0172] Cas13 proteins may have RNA binding and cleaving function. In particular embodiments, the Cas13 proteins may have RNA and/or DNA cleaving function, e.g., RNA cleaving function. The systems and methods herein may be used to introduce one or more mutations in nucleic acids. The mutation(s) can include the introduction, deletion, or substitution of one or more nucleotides at each target sequence of cell(s) via the guide(s) RNA(s) or sgRNA(s) or crRNA(s). The mutations can include the introduction, deletion, or substitution of 1-75 nucleotides at each target sequence of said cell(s) via the guide(s) RNA(s) or sgRNA(s) or crRNA(s). The mutations can include the introduction, deletion, or substitution of 1, 5, 10, 11, 12, 13, 14, 15, 16, 17, 18, 19, 20, 21, 22, 23, 24, 25, 26, 27, 28, 29, 30, 35, 40, 45, 50, or 75 nucleotides at each target sequence of said cell(s) via the guide(s) RNA(s) or sgRNA(s) or crRNA(s). The mutations can include the introduction, deletion, or substitution of 5, 10, 11, 12, 13, 14, 15, 16, 17, 18, 19, 20, 21, 22, 23, 24, 25, 26, 27, 28, 29, 30, 35, 40, 45, 50, or 75 nucleotides at each target sequence of said cell(s) via the guide(s) RNA(s) or sgRNA(s) or crRNA(s). The mutations include the introduction, deletion, or substitution of 10, 11, 12, 13, 14, 15, 16, 17, 18, 19, 20, 21, 22, 23, 24, 25, 26, 27, 28, 29, 30, 35, 40, 45, 50, or 75 nucleotides at each target sequence of said cell(s) via the guide(s) RNA(s) or sgRNA(s) or crRNA(s). The mutations can include the introduction, deletion, or substitution of 20, 21, 22, 23, 24, 25, 26, 27, 28, 29, 30, 35, 40, 45, 50, or 75 nucleotides at each target sequence of said cell(s) via the guide(s) RNA(s) or sgRNA(s) or crRNA(s). The mutations can include the introduction, deletion, or substitution of 40, 45, 50, 75, 100, 200, 300, 400 or 500 nucleotides at each target sequence of said cell(s) via the guide(s) RNA(s) or sgRNA(s) or crRNAs.

[0173] For minimization of toxicity and off-target effect, it will be important to control the concentration of Cas13 mRNA and guide RNA delivered. Optimal concentrations of Cas13 mRNA and guide RNA can be determined by testing different concentrations in a cellular or non-human eukaryote animal model and using deep sequencing the analyze the extent of modification at potential off-target genomic loci. Guide sequences and strategies to minimize toxicity and off-target effects can be as in WO 2014/093622 (PCT/US2013/074667); or, via mutation as herein.

[0174] In some embodiments, the Cas proteins may have cleavage activity. In some embodiments, Cas13 may direct cleavage of one or two nucleic acid strands at the location of or near a target sequence, such as within the target sequence and/or within the complement of the target sequence or at sequences associated with the target sequence, e.g., within about 1, 2, 3, 4, 5, 6, 7, 8, 9, 10, 15, 20, 25, 50, 100, 200, 500, or more base pairs from the first or last nucleotide of a target sequence. In some embodiments, the Cas13 protein may direct more than one cleavage (such as one, two three, four, five, or more cleavages) of one or two strands within the target sequence and/or within the complement of the target sequence or at sequences associated with the target sequence and/or within about 1, 2, 3, 4, 5, 6, 7, 8, 9, 10, 15, 20, 25, 50, 100, 200, 500, or more base pairs from the first or last nucleotide of a target sequence. In some embodiments, the cleavage may be blunt, i.e., generating blunt ends. In some embodiments, the cleavage may be staggered, i.e., generating sticky ends. In some embodiments, a vector encodes a nucleic acid-targeting Cas13 protein that may be mutated with respect to a corresponding wild-type enzyme such that the mutated nucleic acid-targeting Cas13 protein lacks the ability to cleave one or two strands of a target polynucleotide containing a target sequence, e.g., alteration or mutation in a HEPN domain to produce a mutated Cas13 substantially lacking all RNA cleavage activity, e.g., the RNA cleavage activity of the mutated enzyme is about no more than 25%, 10%, 5%, 1%, 0.1%, 0.01%, or less of the nucleic acid cleavage activity of the non-mutated form of the enzyme; an example can be when the nucleic acid cleavage activity of the mutated form is nil or negligible as compared with the non-mutated form. By derived, Applicants mean that the derived enzyme is largely based, in the sense of having a high degree of sequence homology with, a wildtype enzyme, but that it has been mutated (modified) in some way as known in the art or as described herein.

[0175] Typically, in the context of an endogenous RNA-targeting system, formation of a RNA-targeting complex (comprising a guide RNA or crRNA hybridized to a target sequence and complexed with one or more RNA-targeting effector proteins) results in cleavage of RNA strand(s) in or near (e.g., within 1, 2, 3, 4, 5, 6, 7, 8, 9, 10, 20, 50, or more base pairs from) the target sequence. As used herein the term “sequence(s) associated with a target locus of interest” refers to sequences near the vicinity of the target sequence (e.g. within 1, 2, 3, 4, 5, 6, 7, 8, 9, 10, 20, 50, or more base pairs from the target sequence, wherein the target sequence is comprised within a target locus of interest).

[0176] The (i) Cas13 or nucleic acid molecule(s) encoding it or (ii) crRNA can be delivered separately; and advantageously at least one or both of one of (i) and (ii), e.g., an assembled complex is delivered via a particle or nanoparticle complex. RNA-targeting effector protein mRNA can be delivered prior to the RNA-targeting guide RNA or crRNA to give time for nucleic acid-targeting effector protein to be expressed. RNA-targeting effector protein (Cas13) mRNA might be administered 1-12 hours (preferably around 2-6 hours) prior to the administration of RNA-targeting guide RNA or crRNA. Alternatively, RNA-targeting effector protein mRNA and RNA-targeting guide RNA or crRNA can be administered together. Advantageously, a second booster dose of guide RNA or crRNA can be administered 1-12 hours (preferably around 2-6 hours) after the initial administration of RNA-targeting effector (Cas13) protein mRNA+guide RNA. Additional administrations of RNA-targeting effector protein mRNA and/or guide RNA or crRNA might be useful to achieve the most efficient levels of genome modification.

[0177] In one embodiment, the systems and methods herein may be used for cleaving a target RNA. The method may comprise modifying a target RNA using a RNA-targeting complex that binds to the target RNA and effect cleavage of said target RNA. In an embodiment, the systems or compositions herein, when introduced into a cell, may create a break (e.g., a single or a double strand break) in the RNA sequence. For example, the systems and methods can be used to cleave a disease RNA in a cell. For example, an exogenous RNA template comprising a sequence to be integrated flanked by an upstream sequence and a downstream sequence may be introduced into a cell. The upstream and downstream sequences share sequence similarity with either side of the site of integration in the RNA. Where desired, a donor RNA can be mRNA. The exogenous RNA template comprises a sequence to be integrated (e.g., a mutated RNA). The sequence for integration may be a sequence endogenous or exogenous to the cell. Examples of a sequence to be integrated include RNA encoding a protein or a non-coding RNA (e.g., a microRNA). Thus, the sequence for integration may be operably linked to an appropriate control sequence or sequences. Alternatively, the sequence to be integrated may provide a regulatory function. The upstream and downstream sequences in the exogenous RNA template are selected to promote recombination between the RNA sequence of interest and the donor RNA. The upstream sequence may be a RNA sequence that shares sequence similarity with the RNA sequence upstream of the targeted site for integration. Similarly, the downstream sequence may be a RNA sequence that shares sequence similarity with the RNA sequence downstream of the targeted site of integration. The upstream and downstream sequences in the exogenous RNA template can have 75%, 80%, 85%, 90%, 95%, or 100% sequence identity with the targeted RNA sequence. Preferably, the upstream and downstream sequences in the exogenous RNA template have about 95%, 96%, 97%, 98%, 99%, or 100% sequence identity with the targeted RNA sequence. In some cases, the upstream and downstream sequences in the exogenous RNA template have about 99% or 100% sequence identity with the targeted RNA sequence. An upstream or downstream sequence may comprise from about 20 bp to about 2500 bp, for example, about 50, 100, 200, 300, 400, 500, 600, 700, 800, 900, 1000, 1100, 1200, 1300, 1400, 1500, 1600, 1700, 1800, 1900, 2000, 2100, 2200, 2300, 2400, or 2500 bp. In some methods, the exemplary upstream or downstream sequence have about 200 bp to about 2000 bp, about 600 bp to about 1000 bp, or more particularly about 700 bp to about 1000 bp. In some methods, the exogenous RNA template may further comprise a marker. Such a marker may make it easy to screen for targeted integrations. Examples of suitable markers include restriction sites, fluorescent proteins, or selectable markers. The exogenous RNA template of the invention can be constructed using recombinant techniques (see, for example, Sambrook et al., 2001 and Ausubel et al., 1996). In a method for modifying a target RNA by integrating an exogenous RNA template, a break (e.g., double or single stranded break in double or single stranded RNA) is introduced into the RNA sequence by the nucleic acid-targeting complex, the break is repaired via homologous recombination with an exogenous RNA template such that the template is integrated into the RNA target. The presence of a double-stranded break facilitates integration of the template. In other embodiments, this invention provides a method of modifying expression of a RNA in a eukaryotic cell. The method comprises increasing or decreasing expression of a target polynucleotide by using a nucleic acid-targeting complex that binds to the DNA or RNA (e.g., mRNA or pre-mRNA). In some methods, a target RNA can be inactivated to affect the modification of the expression in a cell. For example, upon the binding of a RNA-targeting complex to a target sequence in a cell, the target RNA is inactivated such that the sequence is not translated, the coded protein is not produced, or the sequence does not function as the wild-type sequence does. For example, a protein or microRNA coding sequence may be inactivated such that the protein or microRNA or pre-microRNA transcript is not produced. The target RNA of a RNA-targeting complex can be any RNA endogenous or exogenous to the eukaryotic cell. For example, the target RNA can be a RNA residing in the nucleus of the eukaryotic cell. The target RNA can be a sequence (e.g., mRNA or pre-mRNA) coding a gene product (e.g., a protein) or a non-coding sequence (e.g., ncRNA, lncRNA, tRNA, or rRNA). Examples of target RNA include a sequence associated with a signaling biochemical pathway, e.g., a signaling biochemical pathway-associated RNA. Examples of target RNA include a disease associated RNA. A “disease-associated” RNA refers to any RNA which is yielding translation products at an abnormal level or in an abnormal form in cells derived from a disease-affected tissues compared with tissues or cells of a non-disease control. It may be a RNA transcribed from a gene that becomes expressed at an abnormally high level; it may be a RNA transcribed from a gene that becomes expressed at an abnormally low level, where the altered expression correlates with the occurrence and/or progression of the disease. A disease-associated RNA also refers to a RNA transcribed from a gene possessing mutation(s) or genetic variation that is directly responsible or is in linkage disequilibrium with a gene(s) that is responsible for the etiology of a disease. The translated products may be known or unknown, and may be at a normal or abnormal level. The target RNA of a RNA-targeting complex can be any RNA endogenous or exogenous to the eukaryotic cell. For example, the target RNA can be a RNA residing in the nucleus of the eukaryotic cell. The target RNA can be a sequence (e.g., mRNA or pre-mRNA) coding a gene product (e.g., a protein) or a non-coding sequence (e.g., ncRNA, lncRNA, tRNA, or rRNA).

[0178] In some embodiments, the systems and methods may comprise allowing a RNA-targeting complex to bind to the target RNA to effect cleavage of said target RNA thereby modifying the target RNA, wherein the RNA-targeting complex comprises a nucleic acid-targeting effector (Cas13) protein complexed with a guide RNA or crRNA hybridized to a target sequence within said target RNA. In one aspect, the invention provides a method of modifying expression of RNA in a eukaryotic cell. In some embodiments, the method comprises allowing a RNA-targeting complex to bind to the RNA such that said binding results in increased or decreased expression of said RNA; wherein the RNA-targeting complex comprises a nucleic acid-targeting effector (Cas13) protein complexed with a guide RNA. Methods of modifying a target RNA can be in a eukaryotic cell, which may be in vivo, ex vivo or in vitro. In some embodiments, the method comprises sampling a cell or population of cells from a human or non-human animal, and modifying the cell or cells. Culturing may occur at any stage ex vivo. The cell or cells may even be re-introduced into the non-human animal or plant. For re-introduced cells it is particularly preferred that the cells are stem cells.

[0179] The use of two different aptamers (each associated with a distinct RNA-targeting guide RNAs) allows an activator-adaptor protein fusion and a repressor-adaptor protein fusion to be used, with different RNA-targeting guide RNAs or crRNAs, to activate expression of RNA, whilst repressing another. They, along with their different guide RNAs or crRNAs can be administered together, or substantially together, in a multiplexed approach. A large number of such modified RNA-targeting guide RNAs or crRNAs can be used all at the same time, for example 10 or 20 or 30 and so forth, whilst only one (or at least a minimal number) of effector protein (Cas13) molecules need to be delivered, as a comparatively small number of effector protein molecules can be used with a large number of modified guides. The adaptor protein may be associated (preferably linked or fused to) one or more activators or one or more repressors. For example, the adaptor protein may be associated with a first activator and a second activator. The first and second activators may be the same, but they are preferably different activators. Three or more or even four or more activators (or repressors) may be used, but package size may limit the number being higher than 5 different functional domains. Linkers are preferably used, over a direct fusion to the adaptor protein, where two or more functional domains are associated with the adaptor protein. Suitable linkers might include the GlySer linker.

[0180] CRISPR effector (Cas13) protein or mRNA therefor (or more generally a nucleic acid molecule therefor) and guide RNA or crRNA might also be delivered separately e.g., the former 1-12 hours (preferably around 2-6 hours) prior to the administration of guide RNA or crRNA, or together. A second booster dose of guide RNA or crRNA can be administered 1-12 hours (preferably around 2-6 hours) after the initial administration.

[0181] The Cas13 effector protein is sometimes referred to herein as a CRISPR Enzyme. It will be appreciated that the effector protein is based on or derived from an enzyme, so the term ‘effector protein’ certainly includes ‘enzyme’ in some embodiments. However, it will also be appreciated that the effector protein may, as required in some embodiments, have DNA or RNA binding, but not necessarily cutting or nicking, activity, including a dead-Cas effector protein function.

[0182] Cellular targets include Hemopoietic Stem/Progenitor Cells (CD34+); Human T cells; and Eye (retinal cells)—for example photoreceptor precursor cells.

[0183] The systems may comprise templates. Delivery of templates may be via the cotemporaneous or separate from delivery of any or all the CRISPR effector protein (Cas13) or guide or crRNA and via the same delivery mechanism or different.

[0184] In certain embodiments, the methods as described herein may comprise providing a Cas13 transgenic cell in which one or more nucleic acids encoding one or more guide RNAs are provided or introduced operably connected in the cell with a regulatory element comprising a promoter of one or more gene of interest. As used herein, the term “Cas13 transgenic cell” refers to a cell, such as a eukaryotic cell, in which a Cas13 gene has been genomically integrated. The nature, type, or origin of the cell are not particularly limiting according to the present invention. Also the way how the Cas13 transgene is introduced in the cell is may vary and can be any method as is known in the art. In certain embodiments, the Cas13 transgenic cell is obtained by introducing the Cas13 transgene in an isolated cell. In certain other embodiments, the Cas13 transgenic cell is obtained by isolating cells from a Cas13 transgenic organism. By means of example, and without limitation, the Cas13 transgenic cell as referred to herein may be derived from a Cas13 transgenic eukaryote, such as a Cas13 knock-in eukaryote. Reference is made to WO 2014/093622 (PCT/US13/74667), incorporated herein by reference. Methods of US Patent Publication Nos. 20120017290 and 20110265198 assigned to Sangamo BioSciences, Inc. directed to targeting the Rosa locus may be modified to utilize the CRISPR Cas system of the present invention. Methods of US Patent Publication No. 20130236946 assigned to Cellectis directed to targeting the Rosa locus may also be modified to utilize the CRISPR Cas system of the present invention. By means of further example reference is made to Platt et. al. (Cell; 159(2):440-455 (2014)), describing a Cas9 knock-in mouse, which is incorporated herein by reference. The Cas13 transgene can further comprise a Lox-Stop-polyA-Lox(LSL) cassette thereby rendering Cas13 expression inducible by Cre recombinase. Alternatively, the Cas13 transgenic cell may be obtained by introducing the Cas13 transgene in an isolated cell. Delivery systems for transgenes are well known in the art. By means of example, the Cas13 transgene may be delivered in for instance eukaryotic cell by means of vector (e.g., AAV, adenovirus, lentivirus) and/or particle and/or particle delivery, as also described herein elsewhere.

[0185] It will be understood by the skilled person that the cell, such as the Cas13 transgenic cell, as referred to herein may comprise further genomic alterations besides having an integrated Cas13 gene or the mutations arising from the sequence specific action of Cas13 when complexed with RNA capable of guiding Cas13 to a target locus, such as for instance one or more oncogenic mutations, as for instance and without limitation described in Platt et al. (2014), Chen et al., (2014) or Kumar et al. (2009).

[0186] The guide RNA(s), e.g., sgRNA(s) or crRNA(s) encoding sequences and/or Cas13 encoding sequences, can be functionally or operatively linked to regulatory element(s) and hence the regulatory element(s) drive expression. The promoter(s) can be constitutive promoter(s) and/or conditional promoter(s) and/or inducible promoter(s) and/or tissue specific promoter(s). The promoter can be selected from the group consisting of RNA polymerases, pol I, pol II, pol III, T7, U6, H1, retroviral Rous sarcoma virus (RSV) LTR promoter, the cytomegalovirus (CMV) promoter, the SV40 promoter, the dihydrofolate reductase promoter, the β-actin promoter, the phosphoglycerol kinase (PGK) promoter, and the EF1a promoter. An advantageous promoter is the promoter is U6.

[0187] In some embodiments, a Cas protein (e.g., Cas13 protein) may form a component of an inducible system. The inducible nature of the system would allow for spatiotemporal control of gene editing or gene expression using a form of energy. The form of energy may include but is not limited to electromagnetic radiation, sound energy, chemical energy and thermal energy. Examples of inducible system include tetracycline inducible promoters (Tet-On or Tet-Off), small molecule two-hybrid transcription activations systems (FKBP, ABA, etc.), or light inducible systems (Phytochrome, LOV domains, or cryptochrome). In one embodiment, the CRISPR effector protein may be a part of a Light Inducible Transcriptional Effector (LITE) to direct changes in transcriptional activity in a sequence-specific manner. The components of a light may include a CRISPR effector protein, a light-responsive cytochrome heterodimer (e.g. from Arabidopsis thaliana), and a transcriptional activation/repression domain. Further examples of inducible DNA binding proteins and methods for their use are provided in U.S. 61/736,465 and U.S. 61/721,283, and WO 2014018423 A2 which is hereby incorporated by reference in its entirety.

[0188] In one aspect, the invention provides a mutated Cas13 as described herein, having one or more mutations resulting in reduced off-target effects, i.e. improved CRISPR enzymes for use in effecting modifications to target loci but which reduce or eliminate activity towards off-targets, such as when complexed to guide RNAs, as well as improved CRISPR enzymes for increasing the activity of CRISPR enzymes, such as when complexed with guide RNAs. It is to be understood that mutated enzymes as described herein below may be used in any of the methods according to the invention as described herein elsewhere. Any of the methods, products, compositions and uses as described herein elsewhere are equally applicable with the mutated CRISPR enzymes as further detailed below.

[0189] Slaymaker et al. recently described a method for the generation of Cas9 orthologs with enhanced specificity (Slaymaker et al. 2015 “Rationally engineered Cas9 nucleases with improved specificity”). This strategy can be used to enhance the specificity of the Cas13 protein. Primary residues for mutagenesis are preferably all positive charges residues within the HEPN domain. Additional residues are positive charged residues that are conserved between different orthologs.

[0190] In an aspect, the invention also provides methods and mutations for modulating Cas13 binding activity and/or binding specificity. In certain embodiments Cas13 proteins lacking nuclease activity are used. In certain embodiments, modified guide RNAs are employed that promote binding but not nuclease activity of a Cas13 nuclease. In such embodiments, on-target binding can be increased or decreased. Also, in such embodiments off-target binding can be increased or decreased. Moreover, there can be increased or decreased specificity as to on-target binding vs. off-target binding.

[0191] The methods and mutations which can be employed in various combinations to increase or decrease activity and/or specificity of on-target vs. off-target activity, or increase or decrease binding and/or specificity of on-target vs. off-target binding, can be used to compensate or enhance mutations or modifications made to promote other effects. Such mutations or modifications made to promote other effects in include mutations or modification to the Cas13 and or mutation or modification made to a guide RNA. The methods and mutations of the invention are used to modulate Cas13 nuclease activity and/or binding with chemically modified guide RNAs.

[0192] In an aspect, the invention provides methods and mutations for modulating binding and/or binding specificity of Cas13 proteins according to the invention as defined herein comprising functional domains such as nucleases, transcriptional activators, transcriptional repressors, and the like. For example, a Cas13 protein can be made nuclease-null, or having altered or reduced nuclease activity by introducing mutations such as for instance Cas13 mutations described herein elsewhere. Nuclease deficient Cas13 proteins are useful for RNA-guided target sequence dependent delivery of functional domains. The invention provides methods and mutations for modulating binding of Cas13 proteins. In one embodiment, the functional domain comprises VP64, providing an RNA-guided transcription factor. In another embodiment, the functional domain comprises Fok I, providing an RNA-guided nuclease activity. Mention is made of U.S. Pat. Pub. 2014/0356959, U.S. Pat. Pub. 2014/0342456, U.S. Pat. Pub. 2015/0031132, and Mali, P. et al., 2013, Science 339(6121):823-6, doi: 10.1126/science.1232033, published online 3 Jan. 2013 and through the teachings herein the invention comprehends methods and materials of these documents applied in conjunction with the teachings herein. In certain embodiments, on-target binding is increased. In certain embodiments, off-target binding is decreased. In certain embodiments, on-target binding is decreased. In certain embodiments, off-target binding is increased. Accordingly, the invention also provides for increasing or decreasing specificity of on-target binding vs. off-target binding of functionalized Cas13 binding proteins.

[0193] The use of Cas13 as an RNA-guided binding protein is not limited to nuclease-null Ca13. Cas13 enzymes comprising nuclease activity can also function as RNA-guided binding proteins when used with certain guide RNAs. For example short guide RNAs and guide RNAs comprising nucleotides mismatched to the target can promote RNA directed Cas13 binding to a target sequence with little or no target cleavage. (See, e.g., Dahlman, 2015, Nat Biotechnol. 33(11):1159-1161, doi: 10.1038/nbt.3390, published online 5 Oct. 2015). In an aspect, the invention provides methods and mutations for modulating binding of Cas13 proteins that comprise nuclease activity. In certain embodiments, on-target binding is increased. In certain embodiments, off-target binding is decreased. In certain embodiments, on-target binding is decreased. In certain embodiments, off-target binding is increased. In certain embodiments, there is increased or decreased specificity of on-target binding vs. off-target binding. In certain embodiments, nuclease activity of guide RNA-Cas13 enzyme is also modulated.

[0194] RNA-RNA duplex formation is important for cleavage activity and specificity throughout the target region, not only the seed region sequence closest to the PFS. Thus, truncated guide RNAs show reduced cleavage activity and specificity. In an aspect, the invention provides method and mutations for increasing activity and specificity of cleavage using altered guide RNAs.

[0195] In certain embodiments, the catalytic activity of the Cas protein (e.g., Cas13) of the invention is altered or modified. It is to be understood that mutated Cas13 has an altered or modified catalytic activity if the catalytic activity is different than the catalytic activity of the corresponding wild type CRISPR-Cas protein (e.g., unmutated CRISPR-Cas protein). Catalytic activity can be determined by means known in the art. By means of example, and without limitation, catalytic activity can be determined in vitro or in vivo by determination of indel percentage (for instance after a given time, or at a given dose). In certain embodiments, catalytic activity is increased. In certain embodiments, catalytic activity is increased by at least 5%, preferably at least 10%, more preferably at least 20%, such as at least 30%, at least 40%, at least 50%, at least 60%, at least 70%, at least 80%, at least 90%, or at least 100%. In certain embodiments, catalytic activity is decreased. In certain embodiments, catalytic activity is decreased by at least 5%, preferably at least 10%, more preferably at least 20%, such as at least 30%, at least 40%, at least 50%, at least 60%, at least 70%, at least 80%, at least 90%, or (substantially) 100%. The one or more mutations herein may inactivate the catalytic activity, which may substantially all catalytic activity, below detectable levels, or no measurable catalytic activity.

[0196] One or more characteristics of the engineered CRISPR-Cas protein may be different from a corresponding wiled type CRISPR-Cas protein. Examples of such characteristics include catalytic activity, gRNA binding, specificity of the CRISPR-Cas protein (e.g., specificity of editing a defined target), stability of the CRISPR-Cas protein, off-target binding, target binding, protease activity, nickase activity, PFS recognition. In some examples, a engineered CRISPR-Cas protein may comprise one or more mutations of the corresponding wild type CRISPR-Cas protein. In some embodiments, the catalytic activity of the engineered CRISPR-Cas protein is increased as compared to a corresponding wildtype CRISPR-Cas protein. In some embodiments, the catalytic activity of the engineered CRISPR-Cas protein is decreased as compared to a corresponding wildtype CRISPR-Cas protein. In some embodiments, the gRNA binding of the engineered CRISPR-Cas protein is increased as compared to a corresponding wildtype CRISPR-Cas protein. In some embodiments, the gRNA binding of the engineered CRISPR-Cas protein is decreased as compared to a corresponding wildtype CRISPR-Cas protein. In some embodiments, the specificity of the CRISPR-Cas protein is increased as compared to a corresponding wildtype CRISPR-Cas protein. In some embodiments, the specificity of the CRISPR-Cas protein is decreased as compared to a corresponding wildtype CRISPR-Cas protein. In some embodiments, the stability of the CRISPR-Cas protein is increased as compared to a corresponding wildtype CRISPR-Cas protein. In some embodiments, the stability of the CRISPR-Cas protein is decreased as compared to a corresponding wildtype CRISPR-Cas protein. In some embodiments, the engineered CRISPR-Cas protein further comprises one or more mutations which inactivate catalytic activity. In some embodiments, the off-target binding of the CRISPR-Cas protein is increased as compared to a corresponding wildtype CRISPR-Cas protein. In some embodiments, the off-target binding of the CRISPR-Cas protein is decreased as compared to a corresponding wildtype CRISPR-Cas protein. In some embodiments, the target binding of the CRISPR-Cas protein is increased as compared to a corresponding wildtype CRISPR-Cas protein. In some embodiments, the target binding of the CRISPR-Cas protein is decreased as compared to a corresponding wildtype CRISPR-Cas protein. In some embodiments, the engineered CRISPR-Cas protein has a higher protease activity or polynucleotide-binding capability compared with a corresponding wildtype CRISPR-Cas protein. In some embodiments, the PFS recognition is altered as compared to a corresponding wildtype CRISPR-Cas protein.

[0197] In certain embodiments, the gRNA (crRNA) binding of the Cas13 protein of the invention is altered or modified. It is to be understood that mutated Cas13 has an altered or modified gRNA binding if the gRNA binding is different than the gRNA binding of the corresponding wild type Cas13 (i.e. unmutated Cas13).gRNA binding can be determined by means known in the art. By means of example, and without limitation, gRNA binding can be determined by calculating binding strength or affinity (such as based on equilibrium constants, Ka, Kd, etc). In certain embodiments, gRNA binding is increased. In certain embodiments, gRNA binding is increased by at least 5%, preferably at least 10%, more preferably at least 20%, such as at least 30%, at least 40%, at least 50%, at least 60%, at least 70%, at least 80%, at least 90%, or at least 100%. In certain embodiments, gRNA binding is decreased. In certain embodiments, gRNA binding is decreased by at least 5%, preferably at least 10%, more preferably at least 20%, such as at least 30%, at least 40%, at least 50%, at least 60%, at least 70%, at least 80%, at least 90%, or (substantially) 100%.

[0198] In certain embodiments, the specificity of the Cas13 protein of the invention is altered or modified. It is to be understood that mutated Cas13 has an altered or modified specificity if the specificity is different than the specificity of the corresponding wild type Cas13 (i.e. unmutated Cas13). Specificity can be determined by means known in the art. By means of example, and without limitation, specificity can be determined by comparison of on-target activity and off-target activity. In certain embodiments, specificity is increased. In certain embodiments, specificity is increased by at least 5%, preferably at least 10%, more preferably at least 20%, such as at least 30%, at least 40%, at least 50%, at least 60%, at least 70%, at least 80%, at least 90%, or at least 100%. In certain embodiments, specificity is decreased. In certain embodiments, specificity is decreased by at least 5%, preferably at least 10%, more preferably at least 20%, such as at least 30%, at least 40%, at least 50%, at least 60%, at least 70%, at least 80%, at least 90%, or (substantially) 100%.

[0199] In certain embodiments, the stability of the Cas13 protein of the invention is altered or modified. It is to be understood that mutated Cas13 has an altered or modified stability if the stability is different than the stability of the corresponding wild type Cas13 (i.e. unmutated Cas13). Stability can be determined by means known in the art. By means of example, and without limitation, stability can be determined by determining the half-life of the Cas13 protein. In certain embodiments, stability is increased. In certain embodiments, stability is increased by at least 5%, preferably at least 10%, more preferably at least 20%, such as at least 30%, at least 40%, at least 50%, at least 60%, at least 70%, at least 80%, at least 90%, or at least 100%. In certain embodiments, stability is decreased. In certain embodiments, stability is decreased by at least 5%, preferably at least 10%, more preferably at least 20%, such as at least 30%, at least 40%, at least 50%, at least 60%, at least 70%, at least 80%, at least 90%, or (substantially) 100%.

[0200] In certain embodiments, the target binding of the Cas13 protein of the invention is altered or modified. It is to be understood that mutated Cas13 has an altered or modified target binding if the target binding is different than the target binding of the corresponding wild type Cas13 (i.e. unmutated Cas13). target binding can be determined by means known in the art. By means of example, and without limitation, target binding can be determined by calculating binding strength or affinity (such as based on equilibrium constants, Ka, Kd, etc). In certain embodiments, target bindings increased. In certain embodiments, target binding is increased by at least 5%, preferably at least 10%, more preferably at least 20%, such as at least 30%, at least 40%, at least 50%, at least 60%, at least 70%, at least 80%, at least 90%, or at least 100%. In certain embodiments, target binding is decreased. In certain embodiments, target binding is decreased by at least 5%, preferably at least 10%, more preferably at least 20%, such as at least 30%, at least 40%, at least 50%, at least 60%, at least 70%, at least 80%, at least 90%, or (substantially) 100%.

[0201] In certain embodiments, the off-target binding of the Cas13 protein of the invention is altered or modified. It is to be understood that mutated Cas13 has an altered or modified off-target binding if the off-target binding is different than the off-target binding of the corresponding wild type Cas13 (i.e. unmutated Cas13). Off-target binding can be determined by means known in the art. By means of example, and without limitation, off-target binding can be determined by calculating binding strength or affinity (such as based on equilibrium constants, Ka, Kd, etc). In certain embodiments, off-target bindings increased. In certain embodiments, off-target binding is increased by at least 5%, preferably at least 10%, more preferably at least 20%, such as at least 30%, at least 40%, at least 50%, at least 60%, at least 70%, at least 80%, at least 90%, or at least 100%. In certain embodiments, off-target binding is decreased. In certain embodiments, off-target binding is decreased by at least 5%, preferably at least 10%, more preferably at least 20%, such as at least 30%, at least 40%, at least 50%, at least 60%, at least 70%, at least 80%, at least 90%, or (substantially) 100%.

[0202] In certain embodiments, the PFS recognition or specificity of the Cas13 protein of the invention is altered or modified. It is to be understood that mutated Cas13 has an altered or modified PFS recognition or specificity if the PFS recognition or specificity is different than the PFS recognition or specificity of the corresponding wild type Cas13 (i.e. unmutated Cas13). PFS recognition or specificity can be determined by means known in the art. By means of example, and without limitation, PFS recognition or specificity can be determined by PFS screens. In certain embodiments, at least one different PFS is recognized by the Cas13. In certain embodiments, at least one PFS is recognized by the mutated Cas13 which is not recognized by the corresponding wild type Cas13. In certain embodiments, at least one PFS is recognized by the mutated Cas13 which is not recognized by the corresponding wild type Cas13, in addition to the wild type PFS. In certain embodiments, at least one PFS is recognized by the mutated Cas13 which is not recognized by the corresponding wild type Cas13, and the wild type PFS is not anymore recognized. In certain embodiments, the PFS recognized by the mutated Cas13 is longer than the PFS recognized by the wild type Cas13, such as 1, 2, or 3 nucleotides longer. In certain embodiments, the PFS recognized by the mutated Cas13 is shorter than the PFS recognized by the wild type Cas13, such as 1, 2, or 3 nucleotides shorter.

[0203] In some embodiments, the invention provides a non-naturally occurring or engineered composition comprising i) a mutated Cas13 effector protein, and ii) a crRNA, wherein the crRNA comprises a) a guide sequence that is capable of hybridizing to a target RNA sequence, and b) a direct repeat sequence, whereby there is formed a CRISPR complex comprising the Cas13 effector protein complexed with the guide sequence that is hybridized to the target RNA sequence. The complex can be formed in vitro or ex vivo and introduced into a cell or contacted with RNA; or can be formed in vivo.

[0204] In some embodiments, such as for Cas13, a non-naturally occurring or engineered composition of the invention may comprise an accessory protein that enhances Type VI Cas protein activity. In such embodiments, the Type VI Cas protein and the Type VI CRISPR-Cas accessory protein may be from the same source or from a different source. In some embodiments, a non-naturally occurring or engineered composition of the invention comprises an accessory protein that represses Cas13 protein activity. In some embodiments, a non-naturally occurring or engineered composition of the invention comprises two or more crRNAs. In some embodiments, a non-naturally occurring or engineered composition of the invention comprises a guide sequence that hybridizes to a target RNA sequence in a prokaryotic cell. In some embodiments, a non-naturally occurring or engineered composition of the invention comprises a guide sequence that hybridizes to a target RNA sequence in a eukaryotic cell. In some embodiments, the Cas13 protein comprises one or more nuclear localization signals (NLSs).

[0205] In some embodiments of the non-naturally occurring or engineered composition of the invention, the Cas13 protein and the accessory protein are from the same organism.

[0206] In some embodiments of the non-naturally occurring or engineered composition of the invention, the Cas13 protein and the accessory protein are from different organisms.

[0207] The invention also provides a Type VI CRISPR-Cas vector system, which comprises one or more vectors comprising: a first regulatory element operably linked to a nucleotide sequence encoding the Cas13 effector protein, and a second regulatory element operably linked to a nucleotide sequence encoding the crRNA.

[0208] In certain embodiments, the vector system of the invention further comprises a regulatory element operably linked to a nucleotide sequence of a Type VI CRISPR-Cas accessory protein.

[0209] When appropriate, the nucleotide sequence encoding the Type VI CRISPR-Cas effector protein (and/or optionally the nucleotide sequence encoding the Type VI CRISPR-Cas accessory protein) is codon optimized for expression in a eukaryotic cell.

[0210] In some embodiments of the vector system of the invention, the nucleotide sequences encoding the Cas13 effector protein (and optionally) the accessory protein are codon optimized for expression in a eukaryotic cell.

[0211] In some embodiments, the vector system of the invention comprises in a single vector. In some embodiment of the vector system of the invention, the one or more vectors comprise viral vectors. In some embodiment of the vector system of the invention, the one or more vectors comprise one or more retroviral, lentiviral, adenoviral, adeno-associated or herpes simplex viral vectors.

[0212] In some embodiments, the invention provides a delivery system configured to deliver a Cas13 effector protein and one or more nucleic acid components of a non-naturally occurring or engineered composition comprising i) a mutated Cas13 effector protein according to the invention as described herein, and ii) a crRNA, wherein the crRNA comprises a) a guide sequence that hybridizes to a target RNA sequence in a cell, and b) a direct repeat sequence, wherein the Cas13 effector protein forms a complex with the crRNA, wherein the guide sequence directs sequence-specific binding to the target RNA sequence, whereby there is formed a CRISPR complex comprising the Cas13 effector protein complexed with the guide sequence that is hybridized to the target RNA sequence. The complex can be formed in vitro or ex vivo and introduced into a cell or contacted with RNA; or can be formed in vivo.

[0213] In some embodiments of the delivery system of the invention, the system comprises one or more vectors or one or more polynucleotide molecules, the one or more vectors or polynucleotide molecules comprising one or more polynucleotide molecules encoding the Cas13 effector protein and one or more nucleic acid components of the non-naturally occurring or engineered composition.

[0214] In some embodiments, the delivery system of the invention comprises a delivery vehicle comprising liposome(s), particle(s), exosome(s), microvesicle(s), a gene-gun or one or more viral vector(s). In some embodiment, the non-naturally occurring or engineered composition of the invention is for use in a therapeutic method of treatment or in a research program. In some embodiment, the non-naturally occurring or engineered vector system of the invention is for use in a therapeutic method of treatment or in a research program. In some embodiment, the non-naturally occurring or engineered delivery system of the invention is for use in a therapeutic method of treatment or in a research program.

[0215] In some embodiments of the invention provides a method of modifying expression of a target gene of interest, the method comprising contacting a target RNA with one or more non-naturally occurring or engineered compositions comprising i) a mutated Cas13 effector protein according to the invention as described herein, and ii) a crRNA, wherein the crRNA comprises a) a guide sequence that hybridizes to a target RNA sequence in a cell, and b) a direct repeat sequence, wherein the Cas13 effector protein forms a complex with the crRNA, wherein the guide sequence directs sequence-specific binding to the target RNA sequence in a cell, whereby there is formed a CRISPR complex comprising the Cas13 effector protein complexed with the guide sequence that is hybridized to the target RNA sequence, whereby expression of the target locus of interest is modified. The complex can be formed in vitro or ex vivo and introduced into a cell or contacted with RNA; or can be formed in vivo.

[0216] In some embodiments, the method of modifying expression of a target gene of interest further comprises contacting the target RNA with an accessory protein that enhances Cas13 effector protein activity.

[0217] In some embodiments of the method of modifying expression of a target gene of interest, the accessory protein that enhances Cas13 effector protein activity is a csx28 protein.

[0218] In some embodiments, the method of modifying expression of a target gene of interest further comprises contacting the target RNA with an accessory protein that represses Cas13 protein activity.

[0219] In some embodiments of the method of modifying expression of a target gene of interest, the accessory protein that represses Cas13 effector protein activity is a csx27 protein.

[0220] In some embodiments, the method of modifying expression of a target gene of interest comprises cleaving the target RNA.

[0221] In some embodiments, the method of modifying expression of a target gene of interest comprises increasing or decreasing expression of the target RNA.

[0222] In some embodiments of the method of modifying expression of a target gene of interest, the target gene is in a prokaryotic cell.

[0223] In some embodiments of the method of modifying expression of a target gene of interest, the target gene is in a eukaryotic cell.

[0224] In some embodiments of the invention provides a cell comprising a modified target of interest, wherein the target of interest has been modified according to any of the method disclosed herein.

[0225] In some embodiments of the invention, the cell is a prokaryotic cell.

[0226] In some embodiments of the invention, the cell is a eukaryotic cell.

[0227] In some embodiments, modification of the target of interest in a cell results in: a cell comprising altered expression of at least one gene product; a cell comprising altered expression of at least one gene product, wherein the expression of the at least one gene product is increased; or a cell comprising altered expression of at least one gene product, wherein the expression of the at least one gene product is decreased.

[0228] In some embodiments, the cell is a mammalian cell or a human cell.

[0229] In some embodiments of the invention provides a cell line of or comprising a cell disclosed herein or a cell modified by any of the methods disclosed herein, or progeny thereof.

[0230] In some embodiments of the invention provides a multicellular organism comprising one or more cells disclosed herein or one or more cells modified according to any of the methods disclosed herein.

[0231] In some embodiments of the invention provides a plant or animal model comprising one or more cells disclosed herein or one or more cells modified according to any of the methods disclosed herein.

[0232] In some embodiments of the invention provides a gene product from a cell or the cell line or the organism or the plant or animal model disclosed herein.

[0233] In some embodiment, the amount of gene product expressed is greater than or less than the amount of gene product from a cell that does not have altered expression.

[0234] In certain embodiments, the Cas13 protein originates from a species of the genus Alistipes, Anaerosalibacter, Bacteroides, Bacteroidetes, Bergeyella, Blautia, Butyrivibrio, Capnocytophaga, Carnobacterium, Chloroflexus, Chryseobacterium, Clostridium, Demequina, Eubacteriaceae, Eubacterium, Flavobacterium, Fusobacterium, Herbinix, Insolitispirillum, Lachnospiraceae, Leptotrichia, Listeria, Myroides, Paludibacter, Phaeodactylibacter, Porphyromonadaceae, Porphyromonas, Prevotella, Pseudobutyrivibrio, Psychroflexus, Reichenbachiella, Rhodobacter, Riemerella, Sinomicrobium, Thalassospira, Ruminococcus. As used herein, when a Cas13 protein originates form a species, it may be the wild type Cas13 protein in the species, or a homolog of the wild type Cas13 protein in the species. The Cas13 protein that is a homolog of the wild type Cas13 protein in the species may comprise one or more variations (e.g., mutations, truncations, etc.) of the wild type Cas13 protein.

[0235] In certain embodiments, the Cas13 protein originates from Leptotrichia shahii, Listeria seeligeri, Lachnospiraceae bacterium (such as Lb MA2020, Lb NK4A179, Lb NK4A144), Clostridium aminophilum (such as Ca DSM 10710), Carnobacterium gallinarum (such as Cg DSM 4847), Paludibacter propionicigenes (such as Pp WB4), Listeria weihenstephanensis (such as Lw FSL R9-0317), Listeriaceae bacterium (such as Lb FSL M6-0635), Leptotrichia wadei (such as Lw F0279), Rhodobacter capsulatus (such as Rc SB 1003, Rc R121, Rc DE442), Leptotrichia buccalis (such as Lb C-1013-b), Herbinix hemicellulosilytica, Eubacteriaceae bacterium (such as Eb CHKCI004), Blautia. sp Marseille-P2398, Leptotrichia sp. oral taxon 879 str. F0557, Chloroflexus aggregans, Demequina aurantiaca, Thalassospira sp. TSLS-1, Pseudobutyrivibrio sp. OR37, Butyrivibrio sp. YAB3001, Leptotrichia sp. Marseille-P3007, Bacteroides ihuae, Porphyromonadaceae bacterium (such as Pb KH3CP3RA), Listeria riparia, Insolitispirillum peregrinum, Alistipes sp. ZOR0009, Bacteroides pyogenes (such as Bp F0041), Bacteroidetes bacterium (such as Bb GWA2_31_9), Bergeyella zoohelcum (such as Bz ATCC 43767), Capnocytophaga canimorsus, Capnocytophaga cynodegmi, Chryseobacterium carnipullorum, Chryseobacterium jejuense, Chryseobacterium ureilyticum, Flavobacterium branchiophilum, Flavobacterium columnare, Flavobacterium sp. 316, Myroides odoratimimus (such as Mo CCUG 10230, Mo CCUG 12901, Mo CCUG 3837), Paludibacter propionicigenes, Phaeodactylibacter xiamenensis, Porphyromonas gingivalis (such as Pg F0185, Pg F0568, Pg JCVI SC001, Pg W4087, Porphyromonas gulae, Porphyromonas sp. COT-052 OH4946, Prevotella aurantiaca, Prevotella buccae (such as Pb ATCC 33574), Prevotella falsenii, Prevotella intermedia (such as Pi 17, Pi ZT), Prevotella pallens (such as Pp ATCC 700821), Prevotella pleuritidis, Prevotella saccharolytica (such as Ps F0055), Prevotella sp. MA2016, Prevotella sp. MSX73, Prevotella sp. P4-76, Prevotella sp. P5-119, Prevotella sp. P5-125, Prevotella sp. P5-60, Psychroflexus torquis, Reichenbachiella agariperforans, Riemerella anatipestifer, Sinomicrobium oceani, Fusobacterium necrophorum (such as Fn subsp. funduliforme ATCC 51357, Fn DJ-2, Fn BFTR-1, Fn subsp. Funduliforme), Fusobacterium perfoetens (such as Fp ATCC 29250), Fusobacterium ulcerans (such as Fu ATCC 49185), Anaerosalibacter sp. ND1, Eubacterium siraeum, Ruminococcus flavefaciens (such as Rfx XPD3002), or Ruminococcus albus.

[0236] In certain embodiments, the Cas13 is Cas13a and originates from a species of the genus Bacteroides, Blautia, Butyrivibrio, Carnobacterium, Chloroflexus, Clostridium, Demequina, Eubacterium, Herbinix, Insolitispirillum, Lachnospiraceae, Leptotrichia, Listeria, Paludibacter, Porphyromonadaceae, Pseudobutyrivibrio, Rhodobacter, or Thalassospira.

[0237] In certain embodiments, the Cas13 is Cas13a and originates from Leptotrichia shahii, Listeria seeligeri, Lachnospiraceae bacterium (such as Lb MA2020, Lb NK4A179, Lb NK4A144), Clostridium aminophilum (such as Ca DSM 10710), Carnobacterium gallinarum (such as Cg DSM 4847), Paludibacter propionicigenes (such as Pp WB4), Listeria weihenstephanensis (such as Lw FSL R9-0317), Listeriaceae bacterium (such as Lb FSL M6-0635), Leptotrichia wadei (such as Lw F0279), Rhodobacter capsulatus (such as Rc SB 1003, Rc R121, Rc DE442), Leptotrichia buccalis (such as Lb C-1013-b), Herbinix hemicellulosilytica, Eubacteriaceae bacterium (such as Eb CHKCI004), Blautia. sp Marseille-P2398, Leptotrichia sp. oral taxon 879 str. F0557, Chloroflexus aggregans, Demequina aurantiaca, Thalassospira sp. TSLS-1, Pseudobutyrivibrio sp. OR37, Butyrivibrio sp. YAB3001, Leptotrichia sp. Marseille-P3007, Bacteroides ihuae, Porphyromonadaceae bacterium (such as Pb KH3CP3RA), Listeria riparia, or Insolitispirillum peregrinum.

[0238] In certain embodiments, the Cas13 is Cas13b and originates from a species of the genus Alistipes, Bacteroides, Bacteroidetes, Bergeyella, Capnocytophaga, Chryseobacterium, Flavobacterium, Myroides, Paludibacter, Phaeodactylibacter, Porphyromonas, Prevotella, Psychroflexus, Reichenbachiella, Riemerella, or Sinomicrobium.

[0239] In certain embodiments, the Cas13 is Cas13b and originates from Alistipes sp. ZOR0009, Bacteroides pyogenes (such as Bp F0041), Bacteroidetes bacterium (such as Bb GWA2_31_9), Bergeyella zoohelcum (such as Bz ATCC 43767), Capnocytophaga canimorsus, Capnocytophaga cynodegmi, Chryseobacterium carnipullorum, Chryseobacterium jejuense, Chryseobacterium ureilyticum, Flavobacterium branchiophilum, Flavobacterium columnare, Flavobacterium sp. 316, Myroides odoratimimus (such as Mo CCUG 10230, Mo CCUG 12901, Mo CCUG 3837), Paludibacter propionicigenes, Phaeodactylibacter xiamenensis, Porphyromonas gingivalis (such as Pg F0185, Pg F0568, Pg JCVI SC001, Pg W4087, Porphyromonas gulae, Porphyromonas sp. COT-052 OH4946, Prevotella aurantiaca, Prevotella buccae (such as Pb ATCC 33574), Prevotella falsenii, Prevotella intermedia (such as Pi 17, Pi ZT), Prevotella pallens (such as Pp ATCC 700821), Prevotella pleuritidis, Prevotella saccharolytica (such as Ps F0055), Prevotella sp. MA2016, Prevotella sp. MSX73, Prevotella sp. P4-76, Prevotella sp. P5-119, Prevotella sp. P5-125, Prevotella sp. P5-60, Psychroflexus torquis, Reichenbachiella agariperforans, Riemerella anatipestifer, or Sinomicrobium oceani. In some examples, the Cas13 is Riemerella anatipestifer Cas13b. In some examples, the Cas13 is a dead Riemerella anatipestifer Cas13. In some examples, the Cas13 is Prevotella sp. P5-125. In some examples, the Cas13 is a dead Prevotella sp. P5-125.

[0240] In certain embodiments, the Cas13 is Cas13c and originates from a species of the genus Fusobacterium or Anaerosalibacter.

[0241] In certain embodiments, the Cas13 is Cas13c and originates from Fusobacterium necrophorum (such as Fn subsp. funduliforme ATCC 51357, Fn DJ-2, Fn BFTR-1, Fn subsp. Funduliforme), Fusobacterium perfoetens (such as Fp ATCC 29250), Fusobacterium ulcerans (such as Fu ATCC 49185), or Anaerosalibacter sp. ND1.

[0242] In certain embodiments, the Cas13 is Cas13d and originates from a species of the genus Eubacterium or Ruminococcus.

[0243] In certain embodiments, the Cas13 is Cas13d and originates from Eubacterium siraeum, Ruminococcus flavefaciens (such as Rfx XPD3002), or Ruminococcus albus.

[0244] In certain example embodiments, the ortholog selected may be more thermostable at higher temperatures. For example, the ortholog may be thermostable at or above 32° C., 33° C., 34° C., 35° C., 36° C., 37° C., 38° C., 39° C., 40° C., 41° C., 42° C., 43° C., 44° C., 45° C., 46° C., 47° C., 48° C., 49° C., 50° C., 51° C., 52° C., 53° C., 54° C., 55° C., 56° C., 57° C., 58° C., 59° C., 60° C., 61° C., 62° C., 63° C., 64° C., 65° C., 66° C., 67° C., 68° C., 69° C., 70° C., 71° C., 72° C. In certain example embodiments, the ortholog is thermostable at or above 55° C. In certain example embodiments the ortholog is a Cas13a, Cas13b, Cas13c, or Cas13d. In certain example embodiments the ortholog is a Cas13 ortholog. In certain example embodiments, the Cas13a ortholog is derived from Herbinix hemicellulosilytica. In certain example embodiments, the Cas13a ortholog is derived from Herbinix hemicellulosilytica DSM 29228. In certain example embodiments, the Cas 13 ortholog is defined by SEQ ID NO: 1, or by SEQ ID NO: 75 of International Publication No. WO 2017/219027. In certain example embodiments, the Cas 13 ortholog is defined by a sequence from FIG. 1A (loci QNRW01000010.1, OWPA01000389.1, 0153798_10014618, 0153978_10005171, and 0153798_10004687). In certain example embodiments, the Cas 13a ortholog is encoded by the nucleic acid sequence 0123519_10037894 or 0J26742_10014101. In certain other example embodiments, the Cas13 ortholog has at least 80% sequence identity to SEQ ID NO: 1 or to SEQ ID NO: 75 of International Publication No. WO 2017/219027. In certain other example embodiments, the Cas13 ortholog has at least 80% sequence identity to sequence from FIG. 1A (loci QNRW01000010.1, OWPA01000389.1, 0153798_10014618, 0153978_10005171, and 0153798_10004687). In certain other example embodiments, the Cas13 ortholog has at least 80% sequence identity to a polypeptide encoded by the nucleic acid sequence 0123519_10037894 or 0J26742_10014101. In certain example embodiments, the Cas13 ortholog has at least one HEPN domain and at least 80% identity to SEQ ID NO: 1 or to SEQ ID NO: 75 of International Publication No. WO 2017/219027. In certain example embodiments, the Cas13 ortholog has at least one HEPN domain and at least 80% identity to sequence from FIG. 1A (loci QNRW01000010.1, OWPA01000389.1, 0153798_10014618, 0153978_10005171, and 0153798_10004687). In certain example embodiments, the Cas13 ortholog has at least one HEPN domain and at least 80% identity to a polypeptide encoded by the nucleic acid sequence of any one of SEQ ID NOs 1-4092, 4102-5203, and 5260-5265. In another example embodiment, the Cas13 ortholog has at least two HEPN domains and at least 80% identity to SEQ ID NO: 1 or to SEQ ID NO: 75 of International Publication No. WO 2017/219027. In another example embodiment, the Cas13 ortholog has at least two HEPN domains and at least 80% identity to sequence from FIG. 1A (loci QNRW01000010.1, OWPA01000389.1, 0153798_10014618, 0153978_10005171, and 0153798_10004687). The Cas13a thermostable proteins of FIG. 1A were identified from stable anaerobic thermophilic methanogenic microbiomes fermenting switchgrass, supporting their thermostability. See, Liang et al., Biotechnol Biofuels 2018; 11: 243 doi: 10.1186/s13068-018-1238-1. Similarly, the 0J26742_10014101 clusters with the verified thermophilic sourced Cas13a sequences detailed in FIG. 1A. The nucleic acid identified at loci 123519_10037894 was identified from a study focusing on 70° C. organism. In certain example embodiments, the Cas13 ortholog has at least two HEPN domains and at least 80% identity to a polypeptide encoded by the nucleic acid sequence 0123519_10037894 or 0J26742_10014101. Accordingly, a person of ordinary skill in the art may use characteristics of the above identified orthologs to select other suitable thermostable orthologs from those disclosed herein.

[0245] In some embodiments, the invention provides an isolated nucleic acid encoding the Cas13 effector protein. In some embodiments of the invention the isolated nucleic acid comprises DNA sequence and further comprises a sequence encoding a crRNA. The invention provides an isolated eukaryotic cell comprising the nucleic acid encoding the Cas13 effector protein. Thus, herein, “Cas13 effector protein” or “effector protein” or “Cas” or “Cas protein” or “RNA targeting effector protein” or “RNA targeting protein” or like expressions is to be understood as including Cas13a, Cas13b, Cas13c, or Cas13d; expressions such as “RNA targeting CRISPR system” are to be understood as including Cas13a, Cas13b, Cas13c, or Cas13d CRISPR systems; and references to guide RNA or sgRNA are to be read in conjunction with the herein-discussion of the Cas13 system crRNA, e.g., that which is sgRNA in other systems may be considered as or akin to crRNA in the instant invention.

[0246] In some embodiments, the invention provides a method of identifying the requirements of a suitable guide sequence for the Cas13 effector protein of the invention, said method comprising: (a) selecting a set of essential genes within an organism, (b) designing a library of targeting guide sequences capable of hybridizing to regions the coding regions of these genes as well as 5′ and 3′ UTRs of these genes, (c) generating randomized guide sequences that do not hybridize to any region within the genome of said organism as control guides, (d) preparing a plasmid comprising the RNA-targeting protein and a first resistance gene and a guide plasmid library comprising said library of targeting guides and said control guides and a second resistance gene, (e) co-introducing said plasmids into a host cell, (f) introducing said host cells on a selective medium for said first and second resistance genes, (g) sequencing essential genes of growing host cells, (h) determining significance of depletion of cells transformed with targeting guides by comparing depletion of cells with control guides; and, (i) determining based on the depleted guide sequences the requirements of a suitable guide sequence.

[0247] In one aspect, determining the PFS sequence for suitable guide sequence of the RNA-targeting protein is by comparison of sequences targeted by guides in depleted cells. In one aspect of such method, the method further comprises comparing the guide abundance for the different conditions in different replicate experiments. In one aspect of such method, the control guides are selected in that they are determined to show limited deviation in guide depletion in replicate experiments. In one aspect of such method, the significance of depletion is determined as (a) a depletion which is more than the most depleted control guide; or (b) a depletion which is more than the average depletion plus two times the standard deviation for the control guides. In one aspect of such method, the host cell is a bacterial host cell. In one aspect of such method, the step of co-introducing the plasmids is by electroporation and the host cell is an electro-competent host cell.

[0248] In some embodiments, the invention provides a method of modifying sequences associated with or at a target locus of interest, the method comprising delivering to said locus a non-naturally occurring or engineered composition comprising a Cas13 effector protein and one or more nucleic acid components, wherein the effector protein forms a complex with the one or more nucleic acid components and upon binding of the said complex to the locus of interest the effector protein induces the modification of the sequences associated with or at the target locus of interest. In a preferred embodiment, the modification is the introduction of a strand break. In a preferred embodiment, the sequences associated with or at the target locus of interest comprises RNA or consists of RNA.

[0249] In some embodiments, the invention provides a method of modifying sequences associated with or at a target locus of interest, the method comprising delivering to said locus a non-naturally occurring or engineered composition comprising a Cas13 effector protein, optionally a small accessory protein, and one or more nucleic acid components, wherein the effector protein forms a complex with the one or more nucleic acid components and upon binding of the said complex to the locus of interest the effector protein induces the modification of the sequences associated with or at the target locus of interest. In a preferred embodiment, the modification is the introduction of a strand break. In a preferred embodiment, the sequences associated with or at the target locus of interest comprises RNA or consists of RNA.

[0250] In some embodiments, the invention provides a method of modifying sequences associated with or at a target locus of interest, the method comprising delivering to said sequences associated with or at the locus a non-naturally occurring or engineered composition comprising a Cas13 loci effector protein and one or more nucleic acid components, wherein the Cas13 effector protein forms a complex with the one or more nucleic acid components and upon binding of the said complex to the locus of interest the effector protein induces the modification of sequences associated with or at the target locus of interest. In a preferred embodiment, the modification is the introduction of a strand break. In a preferred embodiment the Cas13 effector protein forms a complex with one nucleic acid component; advantageously an engineered or non-naturally occurring nucleic acid component. The induction of modification of sequences associated with or at the target locus of interest can be Cas13 effector protein-nucleic acid guided. In a preferred embodiment the one nucleic acid component is a CRISPR RNA (crRNA). In a preferred embodiment the one nucleic acid component is a mature crRNA or guide RNA, wherein the mature crRNA or guide RNA comprises a spacer sequence (or guide sequence) and a direct repeat (DR) sequence or derivatives thereof. In a preferred embodiment the spacer sequence or the derivative thereof comprises a seed sequence, wherein the seed sequence is critical for recognition and/or hybridization to the sequence at the target locus. In a preferred embodiment of the invention the crRNA is a short crRNA that may be associated with a short DR sequence. In another embodiment of the invention the crRNA is a long crRNA that may be associated with a long DR sequence (or dual DR). Aspects of the invention relate to Cas13 effector protein complexes having one or more non-naturally occurring or engineered or modified or optimized nucleic acid components. In a preferred embodiment the nucleic acid component comprises RNA. In a preferred embodiment the nucleic acid component of the complex may comprise a guide sequence linked to a direct repeat sequence, wherein the direct repeat sequence comprises one or more stem loops or optimized secondary structures. In preferred embodiments of the invention, the direct repeat may be a short DR or a long DR (dual DR). In a preferred embodiment the direct repeat may be modified to comprise one or more protein-binding RNA aptamers. In a preferred embodiment, one or more aptamers may be included such as part of optimized secondary structure. Such aptamers may be capable of binding a bacteriophage coat protein. The bacteriophage coat protein may be selected from the group comprising Qβ, F2, GA, fr, JP501, MS2, M12, R17, BZ13, JP34, JP500, KU1, M11, MX1, TW18, VK, SP, FI, ID2, NL95, TW19, AP205, ϕCb5, ϕCb8r, ϕCb12r, ϕCb23r, 7s and PRR1. In a preferred embodiment the bacteriophage coat protein is MS2. The invention also provides for the nucleic acid component of the complex being 30 or more, 40 or more or 50 or more nucleotides in length.

[0251] In some embodiments, the invention provides methods of genome editing or modifying sequences associated with or at a target locus of interest wherein the method comprises introducing a Cas13 complex into any desired cell type, prokaryotic or eukaryotic cell, whereby the Cas13 effector protein complex effectively functions to interfere with RNA in the eukaryotic or prokaryotic cell. In preferred embodiments, the cell is a eukaryotic cell and the RNA is transcribed from a mammalian genome or is present in a mammalian cell. In preferred methods of RNA editing or genome editing in human cells, the Cas13 effector proteins may include but are not limited to the specific species of Cas13 effector proteins disclosed herein.

[0252] In some embodiments, the invention also provides a method of modifying a target locus of interest, the method comprising delivering to said locus a non-naturally occurring or engineered composition comprising a Cas13 effector protein and one or more nucleic acid components, wherein the Cas13 effector protein forms a complex with the one or more nucleic acid components and upon binding of the said complex to the locus of interest the effector protein induces the modification of the target locus of interest. In a preferred embodiment, the modification is the introduction of a strand break.

[0253] In such methods the target locus of interest may be comprised within a RNA molecule. In such methods the target locus of interest may be comprised in a RNA molecule in vitro.

[0254] In such methods the target locus of interest may be comprised in a RNA molecule within a cell. The cell may be a prokaryotic cell or a eukaryotic cell. The cell may be a mammalian cell. The modification introduced to the cell by the present invention may be such that the cell and progeny of the cell are altered for improved production of biologic products such as an antibody, starch, alcohol or other desired cellular output. The modification introduced to the cell by the present invention may be such that the cell and progeny of the cell include an alteration that changes the biologic product produced.

[0255] The mammalian cell many be a non-human mammal, e.g., primate, bovine, ovine, porcine, canine, rodent, Leporidae such as monkey, cow, sheep, pig, dog, rabbit, rat or mouse cell. The cell may be a non-mammalian eukaryotic cell such as poultry bird (e.g., chicken), vertebrate fish (e.g., salmon) or shellfish (e.g., oyster, claim, lobster, shrimp) cell. The cell may also be a plant cell. The plant cell may be of a monocot or dicot or of a crop or grain plant such as cassava, corn, sorghum, soybean, wheat, oat or rice. The plant cell may also be of an algae, tree or production plant, fruit or vegetable (e.g., trees such as citrus trees, e.g., orange, grapefruit or lemon trees; peach or nectarine trees; apple or pear trees; nut trees such as almond or walnut or pistachio trees; nightshade plants; plants of the genus Brassica; plants of the genus Lectica; plants of the genus Spinalis; plants of the genus Capsicum; cotton, tobacco, asparagus, carrot, cabbage, broccoli, cauliflower, tomato, eggplant, pepper, lettuce, spinach, strawberry, blueberry, raspberry, blackberry, grape, coffee, cocoa).

[0256] In some embodiments, the invention provides a method of modifying a target locus of interest, the method comprising delivering to said locus a non-naturally occurring or engineered composition comprising a Cas13 effector protein and one or more nucleic acid components, wherein the effector protein forms a complex with the one or more nucleic acid components and upon binding of the said complex to the locus of interest the effector protein induces the modification of the target locus of interest. In a preferred embodiment, the modification is the introduction of a strand break.

[0257] In such methods the target locus of interest may be comprised within an RNA molecule. In a preferred embodiment, the target locus of interest comprises or consists of RNA.

[0258] In some embodiments, the invention also provides a method of modifying a target locus of interest, the method comprising delivering to said locus a non-naturally occurring or engineered composition comprising a Cas13 effector protein and one or more nucleic acid components, wherein the Cas13 effector protein forms a complex with the one or more nucleic acid components and upon binding of the said complex to the locus of interest the effector protein induces the modification of the target locus of interest. In a preferred embodiment, the modification is the introduction of a strand break.

[0259] In such methods the target locus of interest may be comprised in a RNA molecule in vitro. In such methods the target locus of interest may be comprised in a RNA molecule within a cell. The cell may be a prokaryotic cell or a eukaryotic cell. The cell may be a mammalian cell. The cell may be a rodent cell. The cell may be a mouse cell.

[0260] In any of the described methods the target locus of interest may be a genomic or epigenomic locus of interest. In any of the described methods the complex may be delivered with multiple guides for multiplexed use. In any of the described methods more than one protein(s) may be used.

[0261] In further aspects of the invention the nucleic acid components may comprise a CRISPR RNA (crRNA) sequence. As the effector protein is a Cas13 effector protein, the nucleic acid components may comprise a CRISPR RNA (crRNA) sequence and generally may not comprise any trans-activating crRNA (tracr RNA) sequence.

[0262] In any of the described methods the effector protein and nucleic acid components may be provided via one or more polynucleotide molecules encoding the protein and/or nucleic acid component(s), and wherein the one or more polynucleotide molecules are operably configured to express the protein and/or the nucleic acid component(s). The one or more polynucleotide molecules may comprise one or more regulatory elements operably configured to express the protein and/or the nucleic acid component(s). The one or more polynucleotide molecules may be comprised within one or more vectors. In any of the described methods the target locus of interest may be a genomic, epigenomic, or transcriptomic locus of interest. In any of the described methods the complex may be delivered with multiple guides for multiplexed use. In any of the described methods more than one protein(s) may be used.

[0263] In any of the described methods the strand break may be a single strand break or a double strand break. In preferred embodiments the double strand break may refer to the breakage of two sections of RNA, such as the two sections of RNA formed when a single strand RNA molecule has folded onto itself or putative double helices that are formed with an RNA molecule which contains self-complementary sequences allows parts of the RNA to fold and pair with itself.

[0264] Regulatory elements may comprise inducible promotors. Polynucleotides and/or vector systems may comprise inducible systems.

[0265] In any of the described methods the one or more polynucleotide molecules may be comprised in a delivery system, or the one or more vectors may be comprised in a delivery system.

[0266] In any of the described methods the non-naturally occurring or engineered composition may be delivered via liposomes, particles including nanoparticles, exosomes, microvesicles, a gene-gun or one or more viral vectors.

[0267] In some embodiments, the invention also provides a non-naturally occurring or engineered composition which is a composition having the characteristics as discussed herein or defined in any of the herein described methods.

[0268] In certain embodiments, the invention thus provides a non-naturally occurring or engineered composition, such as particularly a composition capable of or configured to modify a target locus of interest, said composition comprising a Cas13 effector protein and one or more nucleic acid components, wherein the effector protein forms a complex with the one or more nucleic acid components and upon binding of the said complex to the locus of interest the effector protein induces the modification of the target locus of interest. In certain embodiments, the effector protein may be a Cas13a, Cas13b, Cas13c, or Cas13d effector protein, a Cas13b effector protein.

[0269] In certain embodiments, the invention also provides in a further aspect a non-naturally occurring or engineered composition, such as particularly a composition capable of or configured to modify a target locus of interest, said composition comprising: (a) a guide RNA molecule (or a combination of guide RNA molecules, e.g., a first guide RNA molecule and a second guide RNA molecule) or a nucleic acid encoding the guide RNA molecule (or one or more nucleic acids encoding the combination of guide RNA molecules); (b) a Cas13 protein. In certain embodiments, the effector protein may be a Cas13b protein.

[0270] In some embodiments, the invention also provides in a further aspect a non-naturally occurring or engineered composition comprising: (I.) one or more CRISPR-Cas system polynucleotide sequences comprising (a) a guide sequence capable of hybridizing to a target sequence in a polynucleotide locus, (b) a tracr mate (i.e. direct repeat) sequence, and (II.) a second polynucleotide sequence encoding a Cas13 effector protein, wherein when transcribed, the guide sequence directs sequence-specific binding of a CRISPR complex to the target sequence, and wherein the CRISPR complex comprises the Cas13 effector protein complexed with the guide sequence that is hybridized to the target sequence. In certain embodiments, the effector protein may be a Cas13 protein.

[0271] In certain embodiments, a tracrRNA may not be required. Hence, the invention also provides in certain embodiments a non-naturally occurring or engineered composition comprising: (I.) one or more CRISPR-Cas system polynucleotide sequences comprising (a) a guide sequence capable of hybridizing to a target sequence in a polynucleotide locus, and (b) a direct repeat sequence, and (II.) a second polynucleotide sequence encoding a Cas13 effector protein, wherein when transcribed, the guide sequence directs sequence-specific binding of a CRISPR complex to the target sequence, and wherein the CRISPR complex comprises the Cas13 effector protein complexed with (1) the guide sequence that is hybridized to the target sequence, and (2) the direct repeat sequence. Preferably, the effector protein may be a Cas13 effector protein. Without limitation, the Applicants hypothesize that in such instances, the direct repeat sequence may comprise secondary structure that is sufficient for crRNA loading onto the effector protein. By means of example and not limitation, such secondary structure may comprise, consist essentially of or consist of a stem loop (such as one or more stem loops) within the direct repeat.

[0272] In some embodiments, the invention also provides a vector system comprising one or more vectors, the one or more vectors comprising one or more polynucleotide molecules encoding components of a non-naturally occurring or engineered composition which is a composition having the characteristics as defined in any of the herein described methods.

[0273] In some embodiments, the invention also provides a delivery system comprising one or more vectors or one or more polynucleotide molecules, the one or more vectors or polynucleotide molecules comprising one or more polynucleotide molecules encoding components of a non-naturally occurring or engineered composition which is a composition having the characteristics discussed herein or as defined in any of the herein described methods.

[0274] In some embodiments, the invention also provides a non-naturally occurring or engineered composition, or one or more polynucleotides encoding components of said composition, or vector or delivery systems comprising one or more polynucleotides encoding components of said composition for use in a therapeutic method of treatment. The therapeutic method of treatment may comprise gene or genome editing, or gene therapy.

[0275] In some embodiments, the invention also provides for methods and compositions wherein one or more amino acid residues of the effector protein may be modified e.g., an engineered or non-naturally-occurring Cas13 effector protein of or comprising or consisting or consisting essentially a protein from SEQ ID NOs 1-4092, 4102-5203, and 5260-5265. In an embodiment, the modification may comprise mutation of one or more amino acid residues of the effector protein. The one or more mutations may be in one or more catalytically active domains of the effector protein. The effector protein may have reduced or abolished nuclease activity compared with an effector protein lacking said one or more mutations. The effector protein may not direct cleavage of one RNA strand at the target locus of interest. In a preferred embodiment, the one or more mutations may comprise two mutations. In a preferred embodiment the one or more amino acid residues are modified in the Cas13 effector protein, e.g., an engineered or non-naturally-occurring Cas13 effector protein. In certain embodiments of the invention the effector protein comprises one or more HEPN domains. In a preferred embodiment, the effector protein comprises two HEPN domains. In another preferred embodiment, the effector protein comprises one HEPN domain at the C-terminus and another HEPN domain at the N-terminus of the protein. In certain embodiments, the one or more mutations or the two or more mutations may be in a catalytically active domain of the effector protein comprising a HEPN domain, or a catalytically active domain which is homologous to a HEPN domain. In certain embodiments, the effector protein comprises one or more of the following mutations: R116A, H121A, R1177A, H1182A (wherein amino acid positions correspond to amino acid positions of Group 29 protein originating from Bergeyella zoohelcum ATCC 43767). The skilled person will understand that corresponding amino acid positions in different Cas13 proteins may be mutated to the same effect. In certain embodiments, one or more mutations abolish catalytic activity of the protein completely or partially (e.g. altered cleavage rate, altered specificity, etc.) In certain embodiments, the effector protein as described herein is a “dead” effector protein, such as a dead Cas13 effector protein (dCas13). In certain embodiments, the effector protein has one or more mutations in HEPN domain 1. In certain embodiments, the effector protein has one or more mutations in HEPN domain 2. In certain embodiments, the effector protein has one or more mutations in HEPN domain 1 and HEPN domain 2.

[0276] In some embodiments, in certain embodiments, the Cas13 effector proteins herein may be associated with a locus comprising short CRISPR repeats between 30 and 40 bp long, more typically between 34 and 38 bp long, even more typically between 36 and 37 bp long, e.g., 30, 31, 32, 33, 34, 35, 36, 37, 38, 39, or 40 bp long. In certain embodiments the CRISPR repeats are long or dual repeats between 80 and 350 bp long such as between 80 and 200 bp long, even more typically between 86 and 88 bp long, e.g., 80, 81, 82, 83, 84, 85, 86, 87, 88, 89, or 90 bp long

[0277] In certain embodiments, a protospacer flanking site (PFS) or protospacer adjacent motif (PAM) or PAM-like motif directs binding of the effector protein (e.g. a Cas13 effector protein) complex as disclosed herein to the target locus of interest. In some embodiments, the PFS may be a 5′ PFS (i.e., located upstream of the 5′ end of the protospacer). In other embodiments, the PFS may be a 3′ PFS (i.e., located downstream of the 5′ end of the protospacer). In other embodiments, both a 5′ PFS and a 3′ PFS are required. In certain embodiments of the invention, a PFS or PFS-like motif may not be required for directing binding of the effector protein (e.g. a Cas13 effector protein). In certain embodiments, a 5′ PFS is D (e.g., A, G, or U). In certain embodiments, a 5′ v is D for Cas13 effectors. In certain embodiments of the invention, cleavage at repeat sequences may generate crRNAs (e.g. short or long crRNAs) containing a full spacer sequence flanked by a short nucleotide (e.g. 5, 6, 7, 8, 9, or 10 nt or longer if it is a dual repeat) repeat sequence at the 5′ end (this may be referred to as a crRNA “tag”) and the rest of the repeat at the 3′ end. In certain embodiments, targeting by the effector proteins described herein may require the lack of homology between the crRNA tag and the target 5′ flanking sequence. This requirement may be similar to that described further in Samai et al. “Co-transcriptional DNA and RNA Cleavage during Type III CRISPR-Cas Immunity” Cell 161, 1164-1174, May 21, 2015, where the requirement is thought to distinguish between bona fide targets on invading nucleic acids from the CRISPR array itself, and where the presence of repeat sequences will lead to full homology with the crRNA tag and prevent autoimmunity.

[0278] In certain embodiments, Cas13 effector protein is engineered and can comprise one or more mutations that reduce or eliminate nuclease activity, thereby reducing or eliminating RNA interfering activity. Mutations can also be made at neighboring residues, e.g., at amino acids near those that participate in the nuclease activity. In some embodiments, one or more putative catalytic nuclease domains are inactivated, and the effector protein complex lacks cleavage activity and functions as an RNA binding complex. In a preferred embodiment, the resulting RNA binding complex may be linked with one or more functional domains as described herein.

[0279] In certain embodiments of the invention, the guide RNA or mature crRNA comprises, consists essentially of, or consists of a direct repeat sequence and a guide sequence or spacer sequence. In certain embodiments, the guide RNA or mature crRNA comprises, consists essentially of, or consists of a direct repeat sequence linked to a guide sequence or spacer sequence. In preferred embodiments of the invention, the mature crRNA comprises a stem loop or an optimized stem loop structure or an optimized secondary structure. In preferred embodiments the mature crRNA comprises a stem loop or an optimized stem loop structure in the direct repeat sequence, wherein the stem loop or optimized stem loop structure is important for cleavage activity. In certain embodiments, the mature crRNA preferably comprises a single stem loop. In certain embodiments, the direct repeat sequence preferably comprises a single stem loop. In certain embodiments, the cleavage activity of the effector protein complex is modified by introducing mutations that affect the stem loop RNA duplex structure. In preferred embodiments, mutations which maintain the RNA duplex of the stem loop may be introduced, whereby the cleavage activity of the effector protein complex is maintained. In other preferred embodiments, mutations which disrupt the RNA duplex structure of the stem loop may be introduced, whereby the cleavage activity of the effector protein complex is completely abolished.

[0280] The CRISPR system as provided herein can make use of a crRNA or analogous polynucleotide comprising a guide sequence, wherein the polynucleotide is an RNA, a DNA or a mixture of RNA and DNA, and/or wherein the polynucleotide comprises one or more nucleotide analogs. The sequence can comprise any structure, including but not limited to a structure of a native crRNA, such as a bulge, a hairpin or a stem loop structure. In certain embodiments, the polynucleotide comprising the guide sequence forms a duplex with a second polynucleotide sequence which can be an RNA or a DNA sequence.

[0281] The present disclosure also provides cells, tissues, organisms comprising the engineered CRISPR-Cas protein, the CRISPR-Cas systems, the polynucleotides encoding one or more components of the CRISPR-Cas systems, and/or vectors comprising the polynucleotides. The invention also provides for the nucleotide sequence encoding the effector protein being codon optimized for expression in a eukaryote or eukaryotic cell in any of the herein described methods or compositions. In an embodiment of the invention, the codon optimized effector protein is any Cas13 effector protein discussed herein and is codon optimized for operability in a eukaryotic cell or organism, e.g., such cell or organism as elsewhere herein mentioned, for instance, without limitation, a yeast cell, or a mammalian cell or organism, including a mouse cell, a rat cell, and a human cell or non-human eukaryote organism, e.g., plant.

[0282] In a further aspect, the invention provides a eukaryotic cell comprising a modified target locus of interest, wherein the target locus of interest has been modified according to in any of the herein described methods. A further aspect provides a cell line of said cell. Another aspect provides a multicellular organism comprising one or more said cells.

[0283] In certain embodiments, the modification of the target locus of interest may result in: the eukaryotic cell comprising altered expression of at least one gene product; the eukaryotic cell comprising altered expression of at least one gene product, wherein the expression of the at least one gene product is increased; the eukaryotic cell comprising altered expression of at least one gene product, wherein the expression of the at least one gene product is decreased; or the eukaryotic cell comprising an edited genome.

[0284] In certain embodiments, the eukaryotic cell may be a mammalian cell or a human cell.

[0285] In further embodiments, the non-naturally occurring or engineered compositions, the vector systems, or the delivery systems as described in the present specification may be used for: site-specific gene knockout; site-specific genome editing; RNA sequence-specific interference; or multiplexed genome engineering.

[0286] Also provided is a gene product from the cell, the cell line, or the organism as described herein. In certain embodiments, the amount of gene product expressed may be greater than or less than the amount of gene product from a cell that does not have altered expression or edited genome. In certain embodiments, the gene product may be altered in comparison with the gene product from a cell that does not have altered expression or edited genome.

[0287] In another aspect, the invention provides a method for identifying novel nucleic acid modifying effectors, comprising: identifying putative nucleic acid modifying loci from a set of nucleic acid sequences encoding the putative nucleic acid modifying enzyme loci that are within a defined distance from a conserved genomic element of the loci, that comprise at least one protein above a defined size limit, or both; grouping the identified putative nucleic acid modifying loci into subsets comprising homologous proteins; identifying a final set of candidate nucleic acid modifying loci by selecting nucleic acid modifying loci from one or more subsets based on one or more of the following; subsets comprising loci with putative effector proteins with low domain homology matches to known protein domains relative to loci in other subsets, subsets comprising putative proteins with minimal distances to the conserved genomic element relative to loci in other subsets, subsets with loci comprising large effector proteins having a same orientations as putative adjacent accessory proteins relative to large effector proteins in other subsets, subset comprising putative effector proteins with lower existing nucleic acid modifying classifications relative to other loci, subsets comprising loci with a lower proximity to known nucleic acid modifying loci relative to other subsets, and total number of candidate loci in each subset.

[0288] In one embodiment, the set of nucleic acid sequences is obtained from a genomic or metagenomic database, such as a genomic or metagenomic database comprising prokaryotic genomic or metagenomic sequences.

[0289] In one embodiment, the defined distance from the conserved genomic element is between 1 kb and 25 kb.

[0290] In one embodiment, the conserved genomic element comprises a repetitive element, such as a CRISPR array. In a specific embodiment, the defined distance from the conserved genomic element is within 10 kb of the CRISPR array.

[0291] In one embodiment, the defined size limit of a protein comprised within the putative nucleic acid modifying (effector) locus is greater than 200 amino acids, or more particularly, the defined size limit is greater than 700 amino acids. In one embodiment, the putative nucleic acid modifying locus is between 900 to 1800 amino acids.

[0292] In one embodiment, the conserved genomic elements are identified using a repeat or pattern finding analysis of the set of nucleic acids, such as PILER-CR.

[0293] In one embodiment, the grouping step of the method described herein is based, at least in part, on results of a domain homology search or an HHpred protein domain homology search.

[0294] In one embodiment, the defined threshold is a BLAST nearest-neighbor cut-off value of 0 to 1e-7.

[0295] In one embodiment, the method described herein further comprises a filtering step that includes only loci with putative proteins between 900 and 1800 amino acids.

[0296] In one embodiment, the method described herein further comprises experimental validation of the nucleic acid modifying function of the candidate nucleic acid modifying effectors comprising generating a set of nucleic acid constructs encoding the nucleic acid modifying effectors and performing one or more biochemical validation assays, such as through the use of PFS validation in bacterial colonies, in vitro cleavage assays, the Surveyor method, experiments in mammalian cells, PFS validation, or a combination thereof.

[0297] In one embodiment, the method described herein further comprises preparing a non-naturally occurring or engineered composition comprising one or more proteins from the identified nucleic acid modifying loci.

[0298] In one embodiment, the identified loci comprise a Class 2 CRISPR effector, or the identified loci lack Cas1 or Cas2, or the identified loci comprise a single effector.

[0299] In one embodiment, the single large effector protein is greater than 900, or greater than 1100 amino acids in length, or comprises at least one HEPN domain.

[0300] In one embodiment, the at least one HEPN domain is near a N- or C-terminus of the effector protein, or is located in an interior position of the effector protein.

[0301] In one embodiment, the single large effector protein comprises a HEPN domain at the N- and C-terminus and two HEPN domains internal to the protein.

[0302] In one embodiment, the identified loci further comprise one or two small putative accessory proteins within 2 kb to 10 kb of the CRISPR array.

[0303] In one embodiment, a small accessory protein is less than 700 amino acids. In one embodiment, the small accessory protein is from 50 to 300 amino acids in length.

[0304] In one embodiment, the small accessory protein comprises multiple predicted transmembrane domains, or comprises four predicted transmembrane domains, or comprises at least one HEPN domain.

[0305] In one embodiment, the small accessory protein comprises at least one HEPN domain and at least one transmembrane domain.

[0306] In one embodiment, the loci comprise no additional proteins out to 25 kb from the CRISPR array.

[0307] In one embodiment, the CRISPR array comprises direct repeat sequences comprising about 36 nucleotides in length. In a specific embodiment, the direct repeat comprises a GTTG/GUUG at the 5′ end that is reverse complementary to a CAAC at the 3′ end.

[0308] In one embodiment, the CRISPR array comprises spacer sequences comprising about 30 nucleotides in length.

[0309] In one embodiment, the identified loci lack a small accessory protein.

[0310] The invention provides a method of identifying novel CRISPR effectors, comprising: a) identifying sequences in a genomic or metagenomic database encoding a CRISPR array; b) identifying one or more Open Reading Frames (ORFs) in said selected sequences within 10 kb of the CRISPR array; c) selecting loci based on the presence of a putative CRISPR effector protein between 900-1800 amino acids in size, d) selecting loci encoding a putative accessory protein of 50-300 amino acids; and e) identifying loci encoding a putative CRISPR effector and CRISPR accessory proteins and optionally classifying them based on structure analysis.

[0311] In one embodiment, the CRISPR effector is a Type VI CRISPR effector. In an embodiment, step (a) comprises i) comparing sequences in a genomic and/or metagenomic database with at least one pre-identified seed sequence that encodes a CRISPR array, and selecting sequences comprising said seed sequence; or ii) identifying CRISPR arrays based on a CRISPR algorithm.

[0312] In an embodiment, step (d) comprises identifying nuclease domains. In an embodiment, step (d) comprises identifying RuvC, HPN, and/or HEPN domains.

[0313] In an embodiment, no ORF encoding Cast or Cas2 is present within 10 kb of the CRISPR array

[0314] In an embodiment, an ORF in step (b) encodes a putative accessory protein of 50-300 amino acids.

[0315] In an embodiment, putative novel CRISPR effectors obtained in step (d) are used as seed sequences for further comparing genomic and/or metagenomics sequences and subsequent selecting loci of interest as described in steps a) to d) of claim 1. In an embodiment, the pre-identified seed sequence is obtained by a method comprising: (a) identifying CRISPR motifs in a genomic or metagenomic database, (b) extracting multiple features in said identified CRISPR motifs, (c) classifying the CRISPR loci using unsupervised learning, (d) identifying conserved locus elements based on said classification, and (e) selecting therefrom a putative CRISPR effector suitable as seed sequence.

[0316] In an embodiment, the features include protein elements, repeat structure, repeat sequence, spacer sequence and spacer mapping. In an embodiment, the genomic and metagenomic databases are bacterial and/or archaeal genomes. In an embodiment, the genomic and metagenomic sequences are obtained from the Ensembl and/or NCBI genome databases. In an embodiment, the structure analysis in step (d) is based on secondary structure prediction and/or sequence alignments. In an embodiment, step (d) is achieved by clustering of the remaining loci based on the proteins they encode and manual curation of the obtained clusters. n another aspect, the disclosure provides a mutated Cas13 protein comprising one or more mutations of amino acids, wherein the amino acids: interact with a guide RNA that forms a complex with the mutated Cas 13 protein; or are in a HEPN active site, a lid domain which is a domain that caps the 3′ end of the crRNA with two beta hairpins, a helical domain, selected from a helical 1 or a helical 2 domain, an inter-domain linker (IDL) domain, or a bridge helix domain of the engineered Cas 13 protein. In certain embodiments the helical domain 1 is helical domain 1-1, 1-2 or 1-3. In embodiments helical domain 2 is helical domain 2-1 or 2-2. In one aspect, the engineered Cas13 protein has a higher protease activity or polynucleotide-binding capability compared with a naturally-occurring counterpart Cas13 protein.

[0317] In another aspect, the disclosure provides a method of altering activity of a Cas13 protein, comprising: identifying one or more candidate amino acids in the Cas13 protein based on a three-dimensional structure of at least a portion of the Cas 13 protein, wherein the one or more candidate amino acids interact with a guide RNA that forms a complex with the Cas13 protein, or are in a HEPN active site, an inter-domain linker domain, or a bridge helix domain of the Cas13 protein; and mutating the one or more candidate amino acids thereby generating a mutated Cas13 protein, wherein activity the mutated Cas13 protein is different than the Cas13 protein.

### Example Cas13 Proteins and Orthologs

[0318] In some examples, Cas13 proteins are Cas13a, e.g., those of SEQ ID NOs 1-1321. In some examples, Cas13 proteins are Cas13b, e.g., those of SEQ ID NOs 1324-2770. In some examples, Cas13 proteins are Cas13c, e.g., those of SEQ ID NOs 2773-2797. In some examples, Cas13 proteins are Cas13d, e.g., those of SEQ ID NOs 2798-4092.

[0319] In some embodiments, the Cas13 proteins include orthologs and homologs of the example Cas13s herein. The systems and compositions may comprise orthologs and homologs of the small Cas proteins. The terms “ortholog” and “homolog” are well known in the art. By means of further guidance, a “homolog” of a protein as used herein is a protein of the same species which performs the same or a similar function as the protein it is a homolog thereof. Homologous proteins may but need not be structurally related, or are only partially structurally related. An “ortholog” of a protein as used herein is a protein of a different species which performs the same or a similar function as the protein it is an ortholog of. Orthologous proteins may but need not be structurally related, or are only partially structurally related. In particular embodiments, the homolog or ortholog of a Cas13 protein as referred to herein has a sequence homology or identity of at least 60%, preferably at least 70%, preferably at least 80%, more preferably at least 85%, even more preferably at least 90%, such as for instance at least 95% with a Cas13 effector protein set forth in SEQ ID NOs 1-4092, 4102-5203, and 5260-5265 herein.

[0320] It has been found that a number of Cas13 orthologs are characterized by common motifs. Accordingly, in particular embodiments, the Cas13 protein is a protein comprising a sequence having at least 70% sequence identity with one or more of the sequences consisting of DKHXFGAFLNLARHN (SEQ ID NO: 4093), GLLFFVSLFLDK (SEQ ID NO: 4094), SKIXGFK (SEQ ID NO: 4095), DMLNELXRCP (SEQ ID NO: 4096), RXZDRFPYFALRYXD (SEQ ID NO: 4097) and LRFQVBLGXY (SEQ ID NO: 4098). In further particular embodiments, the Cas13 protein comprises a sequence having at least 70% sequence identity at least 2, 3, 4, 5 or all 6 of these sequences. In further particular embodiments, the sequence identity with these sequences is at least 75%, 80%, 85%, 90%, 95% or 100%. In further particular embodiments, the Cas13 protein is a protein comprising a sequence having 100% sequence identity with GLLFFVSLFL (SEQ ID NO: 4099) and RHQXRFPYF (SEQ ID NO: 4100). In further particular embodiments, the Cas13 is a Cas13b effector protein comprising a sequence having 100% sequence identity with RHQDRFPY (SEQ ID NO: 4101).

[0321] In particular embodiments, the Cas13 protein is a Cas13 protein having at least 65%, preferably at least 70%, 75%, 80%, 85%, 90%, 95% or more sequence identity with a Cas13b protein from Prevotella buccae, Porphyromonas gingivales, Prevotella saccharolytica, or Riemerella antipestifer. In further particular embodiments, the Cas13b effector is selected from the Cas13b protein from Bacteroides pyogenes, Prevotella sp. MA2016, Riemerella anatipestifer, Porphyromonas gulae, Porphyromonas gingivalis, and Porphyromonas sp. COT-0520H4946.

[0322] It will be appreciated that Cas13 proteins that can be within the invention can include a chimeric enzyme comprising a fragment of a Cas13 enzyme of multiple orthologs. Examples of such orthologs are described elsewhere herein. A chimeric enzyme may comprise a fragment of the Cas13 proteins and a fragment from another CRISPR enzyme, such as an ortholog of a Cas13 enzyme of an organism which includes but is not limited to Bergeyella, Prevotella, Porphyromonas, Bacteroides, Alistipes, Riemerella, Myroides, Flavobacterium, Capnocytophaga, Chryseobacterium, Phaeodactylibacter, Paludibacter or Psychroflexus.

[0323] In some embodiments, the systems herein also encompass a functional variant of the effector protein or a homolog or an ortholog thereof. A “functional variant” of a protein as used herein refers to a variant of such protein which retains at least partially the activity of that protein. Functional variants may include mutants (which may be insertion, deletion, or replacement mutants), including polymorphs, etc. Also included within functional variants are fusion products of such protein with another, usually unrelated, nucleic acid, protein, polypeptide or peptide. Functional variants may be naturally occurring or may be man-made. In an embodiment, nucleic acid molecule(s) encoding the Cas13 RNA-targeting effector proteins, or an ortholog or homolog thereof, may be codon-optimized for expression in an eukaryotic cell. A eukaryote can be as herein discussed. Nucleic acid molecule(s) can be engineered or non-naturally occurring.

[0324] In an embodiment, the Cas13 protein or an ortholog or homolog thereof, may comprise one or more mutations. The mutations may be artificially introduced mutations and may include but are not limited to one or more mutations in a catalytic domain, e.g., one or more mutations are introduced into one or more of the HEPN domains.

[0325] In certain example embodiments, the Cas13 effector protein is from an organism. In certain example embodiments, the Cas13 effector protein is from an organism selected from Bergeyella zoohelcum, Prevotella intermedia, Prevotella buccae, Porphyromonas gingivalis, Bacteroides pyogenes, Alistipes sp. ZOR0009, Prevotella sp. MA2016, Riemerella anatipestifer, Prevotella aurantiaca, Prevotella saccharolytica, Myroides odoratimimus CCUG 10230, Capnocytophaga canimorsus, Porphyromonas gulae, Prevotella sp. P5-125, Flavobacterium branchiophilum, Myroides odoratimimus, Flavobacterium columnare, or Porphyromonas sp. COT-052 OH4946. In another embodiment, the one or more guide RNAs are designed to bind to one or more target RNA sequences that are diagnostic for a disease state.

### Small Cas Proteins and Orthologs

[0326] The systems and compositions herein comprise Cas proteins that are relatively small. The Cas proteins may have less than 1000, less than 950, less than 900, less than 850, less than 800, less than 750, less than 700, less than 650, less than 600, less than 550, less than 500, less than 450, less than 400, less than 350, or less than 300 amino acids in size. In some examples, the Cas proteins have less than 900 amino acids in size. In some examples, the Cas proteins have less than 850 amino acids in size. In some examples, the Cas proteins have less than 800 amino acids in size. In some examples, the Cas proteins have less than 750 amino acids in size. In some examples, the Cas proteins have less than 700 amino acids in size.

[0327] In some embodiments, the Cas proteins are a subgroup of Type VI-B1 Cas proteins with no auxiliary proteins. In some examples, the CRISPR-array in loci of the Cas proteins are processed and no other non-coding RNAs (ncRNAs) are present. In some examples, the Cas proteins are Cas13b-t.

[0328] In some embodiments, the small Cas proteins are small Cas 13a. Examples of small Cas13a are shown in Table 1 below.

TABLE 1

| Accession | |
|---|---|
| No. | Sequences |
| IMG_3300008161_ | MKITKIDGVSHYKEKEKGVLKGKDILNGKIEKIVKKRYDATIESKIYKEFIKLRKNRIEQNNEKSILKLIK |
| 3 | LNIDKNEKEIKTLLLNKFKIKEKNKKYDKYMLDENKLDNDIKIYESVESLYFLIKEIYLGQNNKKWNIS |
| SEQ ID NO: | KIDLEKIMEEDNNLIMLGYKLKKNITENDYPYLYSDKNGQESTSVYKLLKKLIEENKDRNQDIRKSQEY |
| 4102 | EKIRKNFEEYKNRKINLLVKSIKNNKINIQYINNEIKSHNNSREENIIKFFKKMIEEKNEPILKDKLKLFKL |
| | EVFFDEEFLEEIKKLLDSDDFDKSYNKKISELRGKIFNRIREEIKNNKNRDELENIYFLELKKYIENNLSH |
| | KKEKDKNNNNTGEEKSKELYLKFLKKVLFIDDNNRISIEKLKSRIDDNFKNLLIQHVIEYGKIKYYVEN |
| | DDYIRNIVKNGELKLETKDLEYIKTKETLIRKMAVLVSFATNSYYNLFGRTENNIPTQEISDDLLLGKIE |
| | NEIYIKGERNRRYVFKEKMLNYFFYSEIFGDNKIVEVLNAISSSIYNIRNGVNHFDKMILGKYNNGLDLK |
| | DSDTIKDYFNFKKKEIQQDLKDRFISNNLQYYYTENEIKKYFEKYKFEILKTKASFAPNFKRILIKGENLS |
| | ISESNNSYEFFKAYSESSDKNTEYNEFMKTRNFLLKELYYNNFYTEFLNNKAKFNEAVKKVKKNKKKR |
| | AENKGRAAGKSYDMIENYNFSDNIPEYISYIHKSEMERIEINTEKNRRDTSKHIRDFIEEIFLEGFIEYLDN |
| | NNFKFLKKRNEVDKEREEIVRNLNIQIEGLDILNENDSEILNLYLFFNMIDNKRISEFRNDMIKYKQFLA |
| | KRQNIDSKFLKIDIEKIEAIIEFVIITKEKLEILEGETKEQKKR |
| UPJI01.1 | MCMKITKIDGVSHYKEKEKGVLKAKGVLNEEIQKIVKKRYDKTIESKIYKEFIKLRKNRIEQNNEKSILE |
| SEQ ID NO: | LIKSNIDKNEKEIKTLLWKNFKIKEKNKKYDKYILDENKLDNDIKIYESAESLYFFIKEVYLGENNKKW |
| 4103 | NISKIDLEKIMEEDSDLIMLGYKLKKNIKEDDYPYLYRDKNGQESTSVYELLKKLIEENKDRNQDIRESE |
| | EYRKIQKEFKEYKNRKINLLVKSILNNKVNIKYNTNNNSLEDSNSKREKEIIEFFKKMIEEKNKPILKDK |
| | LELFRLEVFFDEEFLEEIKKLLDSDDSDKSDNKKIAELRGKIFSRIREKIKEDKNRGILKNIYFLELRKYIE |
| | NNLSHKKEKNKNKNNNIGEEKSKELYLEFLKKVLFIDDNNRISIEKLKSRIDDNFKNLLIQHVIEYGKIK |
| | YYVENDDYIRNIVKNGELKLETENLEYIRIRETLIRKMAVLVSFAANSFYNLFENITSDILTANINLDSDV |
| | IKIGNNRLKEKFLNYFFYSEEISDKEDFLKALKDSIYNVRNGVNHFDKMILGKYNNGLDLKDSNTIKDY |
| | FNFKKKEIQQDLKDRFISNNLQYYYTENEIKKYFEKYKFEILKTKASFAPNFKRILIKGENLSISESNNSY |
| | EFFKAYSESSDKNTEYNEFMKTRNFLLKELYYNNFYTEFLNNKAKFKDFKDKVAFALVSPFLVSSMIAI |
| | SPVLFIESLIED |
| IMG_3300008271_ | MKITKIDGISHKKYIKEGKLVKSTSEENKTDERLSELLIIRLDTYIKNPDNASEEENRIRRENLKEFFSNK |
| 2 | VLYLKDGILYLKDRREKNQLQNKNYSEEDISEYDLKNKNSFSVLKKILLNEDINSEELEIFRNDFEKKLD |
| SEQ ID NO: | KINSLKYSLEENRANYQKINENNIKKVEGKSKRNIFYNYYKDSAKRNDYINNIQEAFDKLYKKEDIENL |
| 4104 | FFLIENSKKHEKYKIRECYHKIIGRKNDKENFATIIYEEIQNVNNMKELIEKVPNVSELKKSQVFYKYYL |
| | NKEKLNDENIKYVFCHFVEIEMSKLLKNYVYKKPSNISNDKVKRIFEYQSLKKLIENKLLNKLDTYVRN |
| | CGKYSFYLQDGEIATSNFIVENRQNEAFLRNIIGVSSAAYFSLRNILETENENDITGRIKGKTVKNNKGEE |
| | KYISGEIDKLYDNNKQNEVKKNLKMFYSYDFNMNSKKEIEDFFSNIDEAIRQSKKYRGSH |
| IMG_3300007713 | MKITKIDGISHKKYIKEGKLVKSTSEENKTDERLSELLIIRLDTYIKNPDNASEEENRIRRENLKEFFSNK |
| SEQ ID NO: | VLYLKDGILYLKDRREKNQLQNKNYSEEDISEYDLKNKNSFSVLKKILLNEDINSEELEIFRNDFEKKLD |
| 4105 | KINSLKYSLEENRANYQKINENNIKKVEGKSKRNIFYNYYKDSAKRNDYINNIQEAFDKLYKKEDIENL |
| | FFLIENSKKHEKYKIRECYHKIIGRKNDKENFATIIYEEIQNVNNMKELIEKVPNVSELKKSQVFYKYYL |
| | NKEKLNDENIKYVFCHFVEIEMSKLLKNYVYKKPSNISNDKVKRIFEYQSLKKLIENKLLNKLDTYVRN |
| | CGKYSFYLQDGEIATSNFIVENRQNEAFLRNIIGVSSAAYFSLRNILETENENDITGRIKGKTVKNNKGEE |
| | KYISGEIDKLYDNNKQNEVKKNLKMFYSYDFNMNSKKEIEDFFSNIDEAIRQSKKYRGSH |
| UPJG01.1 | LYMKITKIDGISHKKYIKEGKLVKSTSEENKTDERLSELLTIRLDTYIKNPDNASEEENRIRRENLKEFFS |
| SEQ ID NO: | NKVLYLKDGILYLKDRREKNQLQNKNYSEQDISEYDLKNKNNFLVLKKILLNEDINSEELEIFRNDFEK |
| 4106 | KLDKINSLKYSLEENKANYQKINENNIEKVEGKSKRNIFYNYYKDSAKRNDYINNIQEAFDKLYKKEDI |
| | ENLFFFIENSKKHEKYKIRECYHKIIGRKNDKENFSKIIYEEIQNVNNMKELIEKVPNVSELKKSQVFYK |
| | YYLNKEKLNDENIKYVFCHFVEIEMSKLLKNYVYKKPSNISNDKVKRIFEYQSLKKLIENKLLNKLDTY |
| | VRNCGKYSFYLQDGEIATSNFIVGNRQNEAFLRNIIGVSSAAYFSLRNILETENENDITGRIKGKTVKNN |
| | KGEEKYISGEIDKLYDNNKQNEVKKNLKMFYSYDFNMNSKKEIEDFFSNIDEAISSIRHGIVHFNLELEG |
| | KDIFTFKNIVPSQISKKMFQDEINEKKLKLKIFRQLNSANVFRYLEKYKILNYLKRTRFEFVNKNIPFVPS |
| | FTKLYSRIDDLKNSLCIYWKIPKANDNNKTKEITDAQIYLLKNIYYGDKVLNEADPKSFKSLSKISYGLG |
| | KDKNNLYF |
| IMG_3300011928 | MKITKIDGISHKKYIKEGKLVKSTSEENKTDERLSELLTIRLDTYIKNPDNASEEENRIRRENLKEFFSNK |
| SEQ ID NO: | VLYLKDGILYLKDRREKNQLQNKNYSEEDISEYDLKNKNSFLVLKKILLNEDINSEELEIFRNDFEKKFN |
| 4107 | KINSLKYSLEENKANYQKINENNIKKVEGKSKRNIFYNYYKDSAKRNDYINNIQEAFDKLYKKEDIENL |
| | FFLIENSKKHEKYKIRECYHKIIGRKNDKENFSKIIYEEIQNVNNMKELIEKVPNVSELKKSQVFYKYYL |
| | NKEKLNDENIKYVFCHFVEIEMSKLLKNYVYKKPSNISNDKVKRIFEYQSLKKLIENKLLNKLDTYVRN |
| | CGKYSFYLQDGEIATSDFIVGNRQNEAFLRNIIGVSSTAYFSLRNILETENENDITGRIKGKTVKNNKGEE |
| | KYISGEIDKLYDNNKQNEVKKNLKMFYSYDFNMNRKKEIEDFFSNIDEAISSIRHGIVHFNLELEGKDIF |
| | TFKNIVPSQISKKMFQNEINEKKLKLKIFRQLNSANVFRYLEKYKILNYLNRTRFEFVNKNIPFVPSFTKL |
| | YSRIDDLKNSLCIYWKIPKANDNNKTKEITDAQIYLLKNIYYGEFLNYFMSNNGNFFEITKEIIELNKND |
| | KRNLKTGFYKLQKFENLQEKTPKEYLANIQSLYMINAGNQDEEEKDTYIDFIQKIFLKGFMTYLANNG |
| | RLSLIYIGSDEETNTSLAEKKQEFDKFLKKYEQNNNIEIPHEINEFVREIKLGKILKYTESLNIFYLILKLLN |
| | HKEFTNLKGSLEKYQSANKEEAFSDQLELINLLNLDNNRVTEDFELEADEIGKFLDFNGNKVKDNKEL |
| | KKFDTNKIYFDGENIIKHRAFY |
| IMG_3300009393 | MKITKIDGISHKKYIKEGKLVKSTSEENKTDERLSELLTIRLDTYIKNPNNASEEENRIRRENLKEFFSNK |
| SEQ ID NO: | VLYLKDGILYLKDRREKNQLQNKNYSEEDISEYDLKNKNNFLVLKKILLNEDINSEELEIFRNDFEKKL |
| 4108 | DKINSLKYSLEENKANYQKINENNIEKVEGKSKRNIFYNYYKDSAKRNDYINNIQEAFDKLYKKEDIEN |
| | LFFLIENSKKHEKYKIRECYHKIIGRKNDKENFATIIYEEIQNVNNMKELIEKVPNVSELKKSQVFYKYY |
| | LNKEKLNDENIKYVFCHFVEIEMSKLLKNYVYKKPSNISNDKVKRIFEYQSLKKLIENKLLNKLDTYVR |
| | NCGKYSFYLQDGEIAISDFIVGNRQNEAFLRNIIGVSSTAYFSLRNILETENENDITGRIKGKTVKNNKGG |
| | EKYNSRQHLKDKYVAERLSIE |
| IMG_3300011936 | MKVTKVDGISHKKYIEEGKLVKSTSEENRTSERLSELLSIRLDIYIKNPDNASEEENRIRRENLKKFFSNK |
| SEQ ID NO: | VLYLKDSVLYLKNRNEKNAVQDKNYSEEDISEYDLKNKNSFSVLKKILLNEDINSEELEIFRKDVEAKL |
| 4109 | NKINSLKYSFEENKANYQKINENNVEKVGGKSKRNIIYDYYRESAKRNDYINNVQEAFDKLYKKEDIE |
| | KLFFLIENSKKHEKYKIRECYHKIIGRKNDKENFAKIIYEEIQNVNNIKELIEKVPNMSELKKSQVFYKYY |
| | LDKEELNDKNIKYAFCHFVEIEMSKLLKNYVYKKPSNISNDKVKRIFEYQNLKKLIENKLLNKLDTYVR |
| | NCGKYNYYLQVGEIATSDFIARNRQNEAFLRNIIGVSSVAYFSLRNILETENENDITGRMRGKTVKNNK |
| | GEEKYVSGEVDKIYNENKQNEVKENLKMFYSYDFNMDNKNEIEDFFANIDEAISSIRHGIVHFNLELEG |
| | KDIFAFKNIVPSEISKKMFQNEINEKKLKLKIFRQLNSANVFRYLEKYKILNYLKRTRFEFVNKNIPFVPS |
| | FTKLYSRIDDLKNSLGIYWKTPKTNDDNKTKEIIDAQIYLLKNIYYGEFLNYFMSNNGNFFEISREIIELN |
| | KNDKRNLKTGFYKLQKFEDIQEKTPKEYLANIQSLYMINAGNQD |
| IMG_3300006462 | MKVTKVDGISHKKYIEEGKLVKSTSEENRTSERLSELLSIRLDIYIKNPDNASEEENRIRRENLKKFFSNK |
| SEQ ID NO: | VLHLKDSVLYLKNRKEKNAVQDKNYSEEDISEYDLKNKNSFSVLKKILLNEDINSEELEIFRKDVEAKL |
| 4110 | NKINSLKYSFEENKANYQKINENNVEKVGGKSKRNIIYDYYRESAKRNDYINNVQEAFDKLYKKEDIE |
| | KLFFLIENSKKHEKYKIRECYHKIIGRKNDKENFAKIIYEEIQNVNNIKELIEKVPDMSELKKSQVFYKYY |
| | LDKEELNDKNIKYAFCHFVEIEMSQLLKNYVYKRLSNISNDKIKRIFEYQNLKKLIENKLLNKLDTYVR |
| | NCGKYNYYLQDGEIATSDFIARNRQNEAFLRNIIGVSSVAYFSLRNILETENENDITGRMRGKTVKNNK |
| | GEEKYVSGEVDKIYNENKQNEVKENLKMFYSYDFNMDNKNEIEDFFANIDEAISSIRHGIVHFNLELEG |
| | KDIFAFKNIVPSEISKKMFQNEINEKKLKLKIFRQLNSANVFRYLEKYKILNYLKRTRFEFVNKNIPFVPS |
| | FTKLYSRIDDLKNSLGIYWKTPKTNDDNKTKEIIDAQIYLLKNIYYGEFLNYFMSNNGNFFEISKEIIELN |
| | KNDKRNLKTGFYKLQKFEDIQEKTPKEYLANIQSLYMINAGNQDEEEKDTYIDFIQKIFLKGFMTYLAN |
| | NGRLSLMYIGNDEQINTSLAGKKQEFDKFLKKYEQNNNIEIPHEINEFVREIKLGKILKYTESLNMFYLIL |
| | KLLNHKELTNLKGSLEKYQSANKEETFSDELELINLLNLDNNRVTEDFELEANEIGKFLDFNGNKIKDR |
| | KELKKFDTNKIYFDGENIIKHRAFYNIKKYG |
| IMG_3300008161 | MKVTKVDGISHKKYIEEGKLVKSTSEENRTSERLSELLSIRLDIYIKNPDNASEEENRIRRENLKKFFSNK |
| SEQ ID NO: | VLHLKDSVLYLKNRKEKNAVQDKNYSEEDISEYDLKNKNSFSVLKKILLNEDINSEELEIFRKDVEAKL |
| 4111 | NKINSLKYSFEENKANYQKINENNIEKVEGKSKRNIIYDYYRESAKRNDYINNVQEAFDKLYKKEDIET |
| | LFFLIENSKKHEKYKIRECYHKIIGRKNDKENFAKIIYEEIQNVNNIKELIEKVPDMSELKKSQVFYKYYL |
| | DKEELNDENIKYVFCHFVEIEMSKLLKNYVYKKPSNISNDKVKRIFEYQSLKKLIENKLLNKLDTYVRN |
| | CGKYNYYLQDGEIATSDFIARNRQNEAFLRNIIGVSSVAYFSLRNILETENENDITGRMRGKTVKNNKG |
| | EEKYVSGEVDKIYNENKQNEVKENLKMFYSYDFNMDNKNEIEDFFANIDEAISSIRHGIVHFNLELEGK |
| | DIFAFKNIAPSEISKKMFQNEINEKKLKLKIFRQLNSANVFRYLEKYKILNYLKRTRFEFVNKNIPFVPSF |
| | TKLYSRIDDLKNSLGIYWKTPKTNDDNKTKEIIDAQIYLLKNIYYGEFLNYFMSNNGNFFEISREIIELNK |
| | NDKRNLKTGFYKLQKFEDIQEKTPKEYLANIQSLYMINAGNQDEEEKDTYIDFIQKIFLKGFMTYLANN |
| | GRLSLIYIGSDE |
| IMG_3300008486 | MKVTKVDGISHKKYIEEGKLVKSTSEENRTSERLSELLSIRLDIYIKNPDNASEEENRIRRENLKKFFSNK |
| SEQ ID NO: | VLHLKDSVLYLKNRKEKNAVQDKNYSEEDISEYDLKNKNSFSVLKKILLNEDINSEELEIFRKDVEAKL |
| 4112 | NKINSLKYSFEENKANYQKINENNIEKVEGKSKRNIIYDYYRESAKRNDYINNVQEAFDKLYKKEDIEK |
| | LFFLIENSKKHEKYKIREYYHKIIGRKNDKENFAKIIYEEIQNVNNIKELIEKVPDMSELKKSQVFYKYYL |
| | DKEELNDENIKYVFCHFVEIEMSKLLKNYVYKKPSNISNDKVKRIFEYQSLKKLIENKLLNKLDTYVRN |
| | CGKYNYYLQDGEIATSDFIARNRQNEAFLRNIIGVSSVAYFSLRNILETENENDITGRMRGKTVKNNKG |
| | EEKYVSGEVDKIYNENKQNEVKENLKMFYSYDFNMDNKNEIEDFFANIDEAISSIRHGIVHFNLELEGK |
| | DIFAFKNIAPSEISKKMFQNEINEKKLKLKIFRQLNSANVFRYLEKYKILNYLKRTRFEFVNKNIPFVPSF |
| | TKLYSRIDDLKNSLGIYWKTPKTNDDNKTKEIIDAQIYLLKNIYYGEFLNYFMSNNGNFFEISREIIELNK |
| | NDKRNLKTGFYKLQKFEDIQEKTPKEYLANIQSLYMINAGNQDEEEKDTYIDFIQKIFLKGFMTYLANN |
| | GRLSLIYIGSDE |
| IMG_3300006254_ | MKVTKVDGISHKKYIEEGKLVKSTSEENRTSERLSELLSIRLDIYIKNPDNASEEENRIRRENLKKFFSNK |
| 2 | VLHLKDSVLYLKNRNEKNAVQDKNYSEEDISEYDLKNKNSFSVLKKILLNEDINSEELEIFRKDVEVKL |
| SEQ ID NO: | NKINSLKYSFEENKANYQKINENNVEKVGGKSKRNIIYDYYRESAKRNDYINNVQEAFDKLYKKEDIE |
| 4113 | NLFFLIENSKKNEKYKIRECYHKIIGRKNDKENFAKIIYEEIQNVNNIKELIEKVPDMSELKKSQVFYKYY |
| | LDKEELNDKNIKYAFCHFVEIEMSKLLKNYVYKKPSNISNDKVKRIFEYQSLKKLIENKLLNKLDTYVR |
| | NCGKYNYYLQDGEIATSDFIARNRQNEAFLRNIIGVSSAAYFSLRNILETENENDITGRMRGKTVKNNK |
| | GEEKYVSGEVDKIYNENKQNEVKENLKMFYSYDFNVDNKNEIEDFFVNIDEAISSIRHGIVHFNLELEG |
| | KDIFAFKNIAPSEISKKMFQNEINEKKLKLKIFRQLNSANVFRYLEKYKILNYLKRTRFEFVNKNIPFVPS |
| | FTKLYSRIDDLKNSLGIYWKTPKTNDDNKTKEIIDAQIYLLKNIYYGEFLNYFMSNNGNFFEISKEIIELN |
| | KNDKRNLKTGFYKLQKFEDIQEKTPKE |
| UPJS01.1 | MKVTKVDGISHKKYIEEGKLVKSTSEENRTSERLSELLSIRLDIYIKNPDNASEEENRIRRENLKKFFSNK |
| SEQ ID NO: | VLHLKDSVLYLKNRNEKNAVQDKNYSEEDISEYDLKNKNSFSVLKKILLNEDINSEELEIFRKDVEAKL |
| 4114 | NKINSLKYSFEENKANYQKINENNVEKVGGKSKRNIIYDYYRESAKRNDYINNVQEAFDKLYKKEDIE |
| | KLFFLIENSKKHEKYKIRECYHKIIGRKNDKENFAKIIYEEIQNVNNIKELIEKVPDMSELKKSQVFYKYY |
| | LDKEELNDKNIKYAFCHFVEIEMSKLLKNYVYKKPSNISNDKVKRIFEYQSLKKLIENKLLNKLDTYVR |
| | NCGKYNYYLQDGEIATSDFIARNRQNEAFLRNIIGVSSVAYFSLRNILETENENDITGRMRGKTVKNNK |
| | GEEKYVSGEVDKIYNENKQNEVKENLKMFYSYDFNVDNKNEIEDFFVNIDEAISSIRHGIVHFNLELEG |
| | KDIFAFKNIAPSEISKKMFQNEINEKKLKLKIFRQLNSANVFRYLEKDRILDYLRSTRFEFVNKNIPFVPSF |
| | TKLYDRIDDLKNSLDIYWKIPKTKDDIKTKEITDAQIYLLKNIYYGKFLDYFMSRNGNFFKISREVIKLN |
| | KNDKRNLKTGFYKLQKFEDIQEKTPKEYLANIQSLYMINAGNQDEEEKDTYIDFIQKIFLKGFMTYLAN |
| | NGRLSLMYIGNDEQINTSLAGKK |
| IMG_3300014815 | MKVTKVDGISHKKYIEEGKLVKSTSEENRTSERLSELLSIRLDIYIKNPDNASEEENRIRRENLKKFFSNK |
| SEQ ID NO: | VLHLKDSVLYLKNRNEKNTVQDKNYSEEDISEYDLKNKNSFSVLKKILLNEDINSEELEIFRKDVEAKL |
| 4115 | NKINSLKYSFEENKANYQKINENNVEKVGGKSKRNIIYDYYRESAKRNDYINNVQEAFDKLYKKEDIE |
| | NLFFLIENSKKHEKYKIRECYHKIIGRKNDKENFAKIIYEEIQNVNNIKELIEKVPDMSELKKSQVFYKYY |
| | LDKEELNDKNIKYAFCHFVEIEMSKLLKNYVYKKPSNISNDKVKRIFEYQSLKKLIENKLLNKLDTYVR |
| | NCGKYNYYLQDGEIATSDFIARNRQNEAFLRNIIGVSSVAYFSLRNILETENENDITGR |
| IMG_3300007794 | MKVTKVDGISHKKYIEEGKLVKSTSEENRTSERLSELLSIRLDIYIKNPDNASEEENRIRRENLKKFFSNK |
| SEQ ID NO: | VLHLKDSVLYLKNRKEKNAVQDKNYSEEDISEYDLKNKNSFLVLKKILLNEDINSEELEIFRKDVEAKL |
| 4116 | NKINSLKYSFEENKANYQKINENNVEKVGGKSKRNIIYDYYRESAKHNDYINNVQEAFDKLYKKEDIE |
| | NLFFLIENSKKHEKYKIRECYHKIIGRKNDKENFAKIIYEEIQNVNNIKELIEKVPNMSELKKSQVFYKYY |
| | LDKEELNDKNIKYAFCHFVEIEMSKLLKNYVYKKPSNISNDKVKRIFEYQSLKKLIENKLLNKLDTYVR |
| | NCGKYNYYLQDGEIATSDFIARNRQNEAFLRNIIGVSSVAYFSLRNILETENENDITGRMRGKTVKNNK |
| | GEEKYVSGEVDKIYNENKQNEVKENLKMFYSYDFNMDNKNEIEDFFANIDEAISSIRHGIVHFNLELEG |
| | KDIFAFKNIAPSEISKKIFQNEINEKKLKLKIFRQLNSANVFNFYEKDVIIKYLKNTKFNFVNKNIPFVPSF |
| | TKLYNKIDDLRNTLKFSWKIPKDKEEKDAQIYLLKNIYYGEFLNKFVKNSKDFFKITDEVIKINKQINQK |
| | TGYYKYQKFENIEKTVPVEYLAIIQSRDMINNQDKEEKNTYIDFVQQIFLKGFIDYLNKNNLKYIENNN |
| | NN |
| UPUO01.1 | MKVTKVDGISHKKYIEEGKLVKSTSEENRTSERLSELLSIRLDIYIKNPDNASEEENRIRRENLKKFFSNK |
| SEQ ID NO: | VLHLKDSVLYLKNRKEKNAVQDKNYSEEDISEYDLKNKNSFSVLKKILLNEDVNSEELEIFRKDVEAK |
| 4117 | LNKINSLKYSFEENKANYQKINENNVEKVGGKSKRNIIYDYYRESAKHNDYINNVQEAFDKLYKKEDI |
| | ENLFFLIENSKKHEKYKIRECYHKIIGRKNDKENFAKIIYEEIQNVNNIKELIEKVPDMSELKKSQVFYKY |
| | YLDKEELNDENIKYAFCHFVEIEMSKLLKNYVYKKPSNISNDKVKRIFEYQSLKKLIENKLLNKLDTYV |
| | RNCGKYNYYLQDGEIATSDFIARNRQNEAFLRNIIGVSSVAYFSLRNILETENENDITGRMRGKTVKNN |
| | KGEEKYVSGEVDKIYNENKQNEVKENLKMFYSYDFNMDNKNEIEDFFANIDEAISSIRHGIVHFNLELE |
| | GKDIFAFKNIVPSEISKKMFQNEINEKKLKLKIFKQLNSANVFNFYEKDVIIKYLKNTKFNFVNKNIPFVP |
| | SFTKLYNKIDDLRNTLKFSWKIPKDKEEKDAQIYLLKNIYYGEFLNKFVKNSKDFFKITDEVIKINKQRN |
| | QKTGYYKYQKFENIEKTVPVEYLAIIQSRDMINNQDKEEKNTYIDFVQQIFLKGFIDYLNKNNLKYIEN |
| | NNNNDNNDIFSKIKIKKDNKEKY |
| UPWA01.1 | MKVTKVDGISHKKYIEEGKLVKSTSEENRTSERLSELLSIRLDIYIKNPDNASEEENRIRRENLKKFFSNK |
| SEQ ID NO: | VLHLKDSVLYLKNRNEKNAVQDKNYSEEDISEYDLKNKNSFSVLKKILLNEDINSEELEIFRKDVEAKL |
| 4118 | NKINSLKYSFEENKANYQKINENNVEKVGGKSKRNIIYDYYRESAKHNDYINNVQEAFDKLYKKEDIE |
| | KLFFFIENSKKHEKYKIRECYHKIIGRKNDKENFAKIIYEEIQNVNNIKELIEKVPDMSELKKSQVFYKYY |
| | LDKEELNDKNIKYAFCHFVEIEMSKLLKNYVYKKPSNISNDKVKRIFEYQSLKKLIENKLLNKLDTYVR |
| | NCGKYNYYLQDGEIATSDFIARNRQNEAFLRNIIGVSSVAYFSLRNILETENENDITGRMRGKTVKNNK |
| | GEEKYVSGEVDKIYNENKQNEVKENLKMFYSYDFNVDNKNEIEDFFVNIDEAISSIRHGIVHFNLELEG |
| | KDIFAFKNIAPSEISKKMFQNEINEKKLKLKIFRQLNSANVFNFYEKDVIIKYLKNTKFNFVNKNIPFVPS |
| | FTKLYNKIDDLRNTLKFSWKIPKDKEEKDAQIYLLKNIYYGEFLNKFVKNSKDFFKITDEVIKINKQRNQ |
| | KTGYYKYQKFENIEKTVPVEYLAIIQSRDTINNQDKEEKNTYIDFVOOIFLKGFIDY |
| UPKY01.1 | MKVTKVDGISHKKYIEEGKLVKSTSEENRTSERLSELLSIRLDIYIKNPDNASEEENRIRRENLKKFFSNK |
| SEQ ID NO: | VLHLKDSVLYLKNRKEKNAVQDKNYSEEDISEYDLKNKNSFSVLKKILLNEDINSEELEIFRKDVEAKL |
| 4119 | NKINSLKYSFEKNKANYQKINENNIEKVGGKSKRNIIYDYYRESAKRNDYINNVQEAFDKLYKKEDIEK |
| | LFFLIENSKKHEKYKIRECYHKIIGRKNDKENFAKIIYEEIQNVNNIKELIEKVPDMSELKKSQVFYKYYL |
| | DKEELNDKNIKYAFCHFVEIEMSQLLKNYVYKRLSNISNDKIKRIFEYQNLKKLIENKLLNKLDTYVRN |
| | CGKYNYYLQDGEIATSDFIAGNRQNEAFLRNIIGVSSVAYFSLRNILETENENDITGRMRGKTVKNNKG |
| | EEKYVSGEVDKIYNENKQNEVKENLKMFYSYDFNMDNKNEIEDFFANIDEAISSIRHGIVHFNLELEGK |
| | DIFAFKNIVPSEISKKMFQNEINEKKLKLKIFRQLNSANVFNFYEKDVIIKYLKNTKFNFVNKNIPFVPSF |
| | TKLYNKIDDLRNTLKFSWKIPKDKEEKDAQIYLLKNIYYGEFLNKFVKNSKDFFKITDEVIKINKQRNQ |
| | KTGYYKYQKFENIEKTVPVEYLAIIQSRDMINNQDKEEKNTYIDFVQQIFLKGFIDYLNKNNLKYIENN |
| | NNNDIFSRIKIKKDSKER |
| UPAK01.1 | MKVTKVDGISHKKYIEEGKLVKSTSEENRTSERLSELLSIRLDIYIKNPDNASEEENRIRRENLKKFFSNK |
| SEQ ID NO: | VLHLKDSVLYLKNRNEKNAVQDKNYSEEDISEYDLKNKNSFLVLKKILLNGDINSEELEIFRNDFEKKL |
| 4120 | DKLNSLKYSLEENKANYQKINENNIKKVEGKSKRNIFYNYYKDSAKRNDYINNIQEAFDKLYKKEDIE |
| | NLFFLIENSKKHEKYKIRECYHKIIGRKNDKENFAKIIYEEIQNVNNIKELIEKVPDMSELKKSQVFYKYY |
| | LDKEELNDENVKYVFCHFVEIEMSKLLKNYVYKKPSNISNDKVKRIFEYQSLKKLIENKLLNKLDTYV |
| | RNCGKYNYYLQDGEIATSDFIAGNRQNEAFLRNIIGVSSVAYFSLRNIEETENENDITGRMRGKTVKNN |
| | KGEEKYVSGEVDKIYNENKQNEVKENLKMFYSYDFNMDNKNEIEDFFANIDEAISSIRHGIVHFNLELE |
| | GKDIFAFKNIAPSEISKKMFQNEINEKKLKLKIFRQLNSANVFRYLEKYKILNYLKRTRFEFVNKNIPFVP |
| | SFTKLYSRIDDLKNSLGIYWKTPKTNDDNKTKEIIDAQIYLLKNIYYGEFLNYFMSNNGNFFEISREIIEL |
| | NKNDKRNLKTGFYKLQKFEDIQEKTPKEYLANIQSLYMINAGNQDEEEKDTYIDFIQKIFLKGFMTYLA |
| | NNGRLSLIYIGSDEETNTSLAEKKQEFDKFLKKYEQNNNIEIPHEINEFVREIKLGKILKY |
| IMG_ | MKVTKVDGISHKKYIEEGKLVKSTSEENRTGERLSELLSIRLDIYIKNPDNASEEENRIRRENLKKFFSNK |
| 3300008635 | VLHLKDSVLYLKNRKEKNAVQDKNYSEEDISEYDLKNKNSFSVLKKILLNEDINSEELEIFRKDVEAKL |
| SEQ ID NO: | NKINSLKYSFEENKANYQKINENNVEKVVGKSKRNIIYDYYRESAKRNDYINNVQEAFDKLYKKEDIE |
| 4121 | KLFFLIENSKKHEKYKIRECYHKIIGRKNDKENFAKIIYEEIQNVNNMKELIEKVPDMSELKKSQVFYKY |
| | YLDKEELNDENVKYVFCHFVEIEMSQLLKNYVYKRLSNISNDKIKRIFEYQNLKKLIENKLLNKLDTYV |
| | RNCGKYNYYLQVGEIATSDFIARNRQNEAFLRNIIGVSSVAYFSLRNILETENENDITGRMRGKTVKNN |
| | KGEEKYVSGEVDKIYNENKKNEVKENLKMFYSYDFNMDNKNEIEDFFANIDEAISSIRHGIVHFNLELE |
| | GKDIFTFKNIVPSQISKKMFQDEINEKKLKLKIFKQLNSANVFNFYEKDVIIKYLKNTFLNLYSFSRPSIL |
| UPVU01.1 | LYMKITKIDGISHKKYIKEGKLVKSTSEENKTDERLSELLTIRLDTYIKNPDNASEEENRIRRENLKEFFS |
| SEQ ID NO: | NKVLYLKDGILYLKDRREKNQLQNKNYSEEDISEYDLKNKNNFLVLKKILLNEDINSEELEIFRNDFEK |
| 4122 | KLDKINSLKYSLEENKANYQKINENNIEKVEGKSKRNIFYNYYKDSAKRNDYINNVQEAFDKLYKKED |
| | IEKLFFLIENSKKHEKYKIRECYHKIIGRKNDKENFAKIIYEEIQNVNNIKELIEKVPDMSELKKSQVFYK |
| | YYLDKEELNDENIKYAFCHFVEIEMSKLLKNYVYKKPSNISNDKVKRIFEYQSLKKLIENKLLNKLDTY |
| | VRNCGKYNYYLQVGEIATSDFIARNRQNEAFLRNIIGVSSVAYFSLRNILETENENDITGRMRGKTVKN |
| | NKGEEKYVFGEVDKIYNENKQNEVKENLKMFYSYDFNMNSKKEIEDFFSNIDEAISSIRHGIVHFNLEL |
| | EGKDIFAFKNIAPSEISKKMFQNEINEKKLKLKIFRQLNSANVFNFYEKDVIIKYLKNTKFNFVNKNIPFV |
| | PSFTKLYNKIDDLRNTLKFSWKIPKDKEEKDAQIYLLKNIYYGEFLNKFVKNSKDFFKITDEVIKINKQR |
| | NQKTGYYKYQKFENIEKTVPVEYLAIIQSRDMINNQDKEEKNTYIDFVQQIFLKGFIDYLNKNNLKYIE |
| | NN |
| UPUV01.1 | LYMKITKIDGISHKKYIKEGKLVKSTSEENKTDERLSELLTIRLDTYIKNPDNASEEEKRIRRETLKEFFS |
| SEQ ID NO: | NKVLHLKDGILYLKDRREKNQLQNKNYSEQDISEYDLKNKNSFSVLKKILLNEDINSEELEIFRNDFEK |
| 4123 | KLDKINSLKYSLEENKANYQKINENNIKKVEGKSKRNIFYNYYKDSAKRNDYINNIQEAFDKLYKKEDI |
| | ENLFFLIENSKKHEKYKIRECYHKIIGRKNDKENFATIIYEEIQNVNNMKELIEKVPDMSELKKSQVFYK |
| | YYLDKEELNDENIKYAFCHFVEIEMSKLLKNYVYKKPSNISNDKVKRIFEYQSLKKLIENKLLNKLDTY |
| | VRNCGKYNYYLQDGEIATSDFIAGNRQNEAFLRNIIGVSSVAYFSLRNILETENKNDITGKIRGKTRIESK |
| | TGEEKYIPGEVDQIYYENKQNEVKNKLKMFYGYDFDMDNKKEIEDFFANIDEAISSIRHGIVHFNLELE |
| | GKDIFAFKNIVPSEISKKMFQNEINEKKLKLKIFRQLNSANVFNFYEKDVIIKYLKNTKFNFVNKNIPFVP |
| | SFTKLYNKIDDLRNTLKFSWKIPKDKEEKDAQIYLLKNIYYGEFLNKFVKNSKDFFKITDEVIKINKQRN |
| | QKTGYYKYQKFENIEKTVPVEYLAIIQSRDMINNQDKEEKNTYI |
| UPDS01.1_2 | MKVTKVDGISHKKYIEEGKLVKSTSEENRTGERLSELLSIRLDIYIKNPDNASEEENRIRRENLKKFFSNK |
| SEQ ID NO: | VLHLKDSVLYLKNRKEKNAVQDKNYSEEDISEYDLKNKNSFSVLKKILLNEDVNSEELEIFRKDVEAK |
| 4124 | LNKINSLKYSFKENKANYQKINENNVEKVGGKSKRNIIYDYYRESAKRDAYVSNVKEAFDKLYKEEDI |
| | AKLVLKIENLTKLEKYKIREFYHEIIGRKNDKENFAKIIYEEIQNVNNMKELIEKVPDMSELKKSQVFYK |
| | YYLDKEELNDKNIKYAFCHFVEIEMSKLLKNYVYKKPSNISNDKVKRIFEYQSLKKLIENKLLNKLDTY |
| | VRNCGKYNYYLQDGEIATSDFIAGNRQNEAFLRNIIGVSSVAYFSLRNILETENKDDITGKIRGKTRIESK |
| | TGEEKYIPGEVDQIYYENKQNEVKNKLKMFYGYDFDMDNKKEIEDFFANIDEAISSIRHGIVHFNLELE |
| | GKDIFAFKNIVPSEISKKMFQNEINEKKLKLKIFRQLNSANVFNFYEKDVIIKYLKNTKFNFVNKNIPFVP |
| | SFTKLYNKIDDLRNTLKFSWKIPKVKEEKDAQIYLLKNIYYGEFLNKFVKNSKDFFKITDEVIKINKQRN |
| | QKT |
| UPXI01.1 | MKITKIDGISHKKYIKEGKLVKSTSEENKTDERLSELLTIRLDTYIKNPDNASEEENRIRRENLKEFFSNK |
| SEQ ID NO: | VLHLKDGILYLKDRREKNQLQNKNYSEEDISEYDLKNKNNFLVLKKILLNEDINSEELEIFRNDFEKKL |
| 4125 | DKINSLKYSLEENKANYQKINENNIKKVEGKSKRNIFYNYYKDSAKRNDYINNIQEAFDKLYKKEDIEN |
| | LFFLIENSKKHEKYKIRECYHKIIGRKNDKENFSKIIYEEIQNVNNMKELIEKVPNVSELKKSQVFYKYY |
| | LNKEKLNDENIKYVFCHFVEIEMSKLLKNYVYKKPSNISNDKVKRIFEYQSLKKLIENKLLNKLDTYVR |
| | NCGKYNYYLQDGEIATSDFIARNRQNEAFLRNIIGVSSVAYFSLRNILETENKDDITGKIRGKTRIDSKTR |
| | EEKYIPGEVDQIYYENKQNEVKNKLKMFYGYDFDMDNKKEIEDFFANIDEAISSIRHGIVHFNLELEGK |
| | DIFAFKNIAPSEISKKMFQNEINEKKLKLKIFKQLNSANVFRYLEKDRILDYLRSTRFEFVNKNIPFVPSFT |
| | KLYDRIDDLKISLNIYWKTPKTNDDIKTKEITDAQIYLLKNIYYGKFLDKFLNEENGIFISIKDKIIELNRN |
| | QNKRTGFYKLEKFETLKANTPTEYLEKLQSLHKINYDREKIEKWIAAGDQNLCVLDAELI |
| IMG_ | MKVTKVGGISHKKYTSEGRLVKSESEENRTDERLSALLNMRLDMYIKNPSSTETKENQKRIGKLKKFF |
| 3300006317 | SNKMVYLKDNTLSLKNGKKENIDREYSETDISEYDVRDSKNFAVLKKIYLNENVNSEELEVFRKDIKK |
| SEQ ID NO: | KLNKINSLKYSFEKNKANYQKINENNIEKVGGKSKRNIIYDYYRESAKRNDYINNVQEAFDKLYKKEDI |
| 4126 | EKLFFLIENSKKHEKYKIRECYHKIIGRKNDKENFAKIIYEEIQNVNNIKELIEKVPNMSELKKSQVFYKY |
| | YLDKEELNDKNIKYAFCHFVEIEMSKLLKNYVYKKPSNISNDKVKRIFEYQSLKKLIENKLLNKLDTYV |
| | RNCGKYNYYLQDGEIATSDFIAGNRQNEAFLRNIIGVSSVAYFSLRNILETKNKDDITGKIRGKTRIESKT |
| | GEEKYIPGEVDQIYYENKQNEVKNKLKMFYGYDFDMDNKKEIEDFFANIDEAISSIRHGIVHFNLELEG |
| | KDIFAFKNIVPSEISKKMFQNEINEKKLKLKIFRQLNSANVFNFYEKDVIIKYLKNTKFNFVNKNIPFVPS |
| | FTKLYNKIDDLRNTLKFSWKIPKDKEEKDAQIYLLKNIYYGKFLDYFMSRNGNFFEISREVIKLNKNNK |
| | KNVKTGFYKLEKFENLEARSPKEYLAKVQSLYIINVANQDEEEKNTYIDFIQKVFLKGFIDYLNKNNLK |
| | YIENNNNNDIFSRIKIKKDSKERYDKILKNYEKNNRNKEIPHEINEFVREIKLGKILKYTESLNMFYLILK |
| | SLNHKEL |
| ODUT01.1 | MKVTKVGGISHKKYTSEGRLVKSESEENRTDERLSALLNMRLDMYIKNPSNTETKENKKRIGKLKKFF |
| SEQ ID NO: | SNKMVYLKDNTLSLKNGKKENIDREYSETDISEYDVRDSKNFAVLKKIYLNENVNSEELEVFRKDIKK |
| 4127 | KLNKINSLKYSFEKNKANYQKINENNIEKVEGKSKRNIIYDYYRESAKRDAYVSNVKEAFDKLYKEEDI |
| | AKLVLKIENLTKLEKSKIREFYHEIIGRKNDKENFAKIIYEEIQNVNNMKELIEKVPDMSELKKSQVFYK |
| | YYLDKEELNDENVKYVFCHFVEIEMSKLLKNYVYKKPSNISNDKVKRIFEYQSLKKLIENKLLNKLDT |
| | YVRNCGKYNYYLQDGEIATSDFIARNRQNEAFLRNIIGVSSVAYFSLRNILETENKDDITGKMRGKTRIE |
| | SKTGEEKYIPGEVDQIYYENKQNEVKNKLKMFYGYDFDMDNKKEIEDFFANIDEAISSIRHGIVHFNLD |
| | LDGKDIFAFKNIVPSEISKKMFQNEINEKKLKLKIFRQLNSANVFRYLEKDRILDYLRSTRFEFVNKNIPF |
| | VPSFTKLYDRIDDLKISLNIYWKTPKTNDDIKTKEITDAQIYLLKNIYYGKFLDYFMSRNGNFFEISREVI |
| | KLNKIGRAV |
| IMG_ | MTYLANNGRLSLIYIGSDEETNTSLAGKKQEFDKFLKKYEQNNNIEIPHEINEFVREIKLGKILKYTESLN |
| 3300011936_2 | MFYLILKLLNHKELTNLKGSLEKYQSANKEEAFSDQLELINLLNLDNNRVIEDFELEADEIGKFLDFNG |
| SEQ ID NO: | NKIKDRKELKKFDTNKIYFDGENIINHRAFYNIKKYGMLNLLEKIADKAKYKISLKELKEYSNKKNEIE |
| 4128 | KNYTMQQNLHRKYARPKKDEKFNDEDYKEYEKAIGNIQKYTHLKNKVEFNELNLLQGLLLKILHRLV |
| | GYTSIWERDLRFRLKGEFPENQYIEEIFNFDNSKNVKYKSGQIVEKYINFYKELYKDNVEKRSIYSDKK |
| | VKKLKQEKKDLYIRNYIAHFNYIPHAEISLLEVLENLRKLLSYDRKLKNAVMKSVVNILKEYGFVAKF |
| | KIGADKKIGIQTLESEKIVHLKNLKKKKLMTDRNSKELCELVKVMFEYKMEEKKSEN |
| UPUH01.1_2 | MSELKKSQVFYKYYLDKEELNDENIKYAFCHFVEIEMSKLLKNYVYKKPSNISNDKVKRIFEYQNLKK |
| SEQ ID NO: | LIENKLLNKLDTYVRNCGKYNYYLQVGEIATSDFIARNRQNEAFLRNIIGVSSVAYFSLRNILETENEND |
| 4129 | ITGRMRGKTVKNNKGEEKYVSGEVDKIYNENKQNEVKENLKMFYSYDFNMDNKNEIEDFFANIDEAI |
| | SSIRHGIVHFNLELEGKDIFAFKNIVPSEISKKMFQNEINEKKLKLKIFRQLNSANVFRYLEKYKILNYLK |
| | RTRFEFVNKNIPFVPSFTKLYSRIDDLKNSLGIYWKTPKTNDDNKTKEIIDAQIYLLKNIYYGEFLNYFM |
| | SNNGNFFEISREIIELNKNDKRNLKTGFYKLQKFEDIQEKTPKEYLANIQSLYMINAGNQDEEEKDTYID |
| | FIQKIFLKGFMTYLANNGRLSLIYIGSDEETNTSLAEKKKEFDKFLKKYEQNNNIEIPHEINEFVREIKLG |
| | KILKYTESLNMFYLILKLLNHKELTNLKGSLEKYQSANKEEAFSDQLELINLLNLDNNRVTEDFELEAD |
| | EIGKFLDFNGNKIKDRKELKKFDTNKIYFDGENIIKHRAFYNIKKYGMLNLLEKIADKAKYKISLKELKE |
| | YSNKKNEIEKNYTMQQNLHRKYARPKKDEKFTDEDYKKYEKAIRNIQQYTHLKNKVEFNELNLLQGL |
| | LLKILHRLVGYTSIWERDLRFRLKGEFPENQYIEEIFNFDNSKNVKYKSGQIVEKYINFYKELYKDNVEK |
| | RSIYSDKKVKELKKEKKDLYIRNYIAHFNYIPNAEVSLLEVLENLRKLLSYDRKLKNAVMKSVVDILKE |
| | YGFVATFKIGADKKIGIQTLESEKIVHLKNLKKKKLMTDRNSEELCELVKVMFEYKMKEKKSEN |
| UPII01.1 | MDLLNRAIYLQDGEIATSDFIARNRQNEAFLRNIIGVSSVAYFSLRNILETENENDITGRMRGKTVKNNK |
| SEQ ID NO: | GEEKYVSGEVDKIYNENKQNEVKENLKMFYSYDFNMDNKNEIEDFFANIDEAISSIRHGIVHFNLELEG |
| 4130 | KDIFAFKNIAPSEISKKMFQNEINEKKLKLKIFRQLNSANVFRYLEKYKILNYLKRTRFEFVNKNIPFVPS |
| | FTKLYSRIDDLKNSLGIYWKTPKTNDDNKTKEIIDAQIYLLKNIYYGEFLNYFMSNNGNFFEISREIIELN |
| | KNDKRNLKTGFYKLQKFEDIQEKTPKEYLANIQSLYMINAGNQDEEEKDTYIDFIQKIFLKGFMTYLAN |
| | NGRLSLMYIGNDEQINTSLAGKKQEFDKFLKKYEQNNNIEIPHEINEFVREIKLGKILKYTESLNMFYLIL |
| | KLLLYLHLLKFLHYMHHIKMLIILYHILQKVL |
| UPDS01.1 | MSWAERLSGLLSGLNIVHSLPPFRRELWALCAIMATMTMTKRRSRTQTTPENNPRHPLAMPATVSIEM |
| SEQ ID NO: | WERFSFYGMQAILAYYLYYATTDGGLGLERAQATTLLGAYGASVYLCTLAGGWIGDRLIGTERTLLT |
| 4131 | GCIALMVGHLSLSTLSGGAGATFGLALIAIGSGFVKTAYIDFVQQIFLKGFIDYLNKNNLKYIENNNNND |
| | IFSRIKIKKDSKERYDKILKNYEKNNRNKEIPYEINEFVREIKLGKILKYTERLNMFYLILKLLNHKELTN |
| | LKGSLEKYQSANKEEAFSDQLELINLLNLDNNRVTEDFELEVNEIGKFLDFNRNKIKDRKELKKFDTKK |
| | lYFDGENIIKHRAFYNIKKYGMLNLLEKIADKAKYKISIEELRNYSNKKNEIEKNHTTQENLHRKYARPR |
| | KDEKFTDEDYENYKRAIKNIEEYTHLKNKVEFNELNLLQGLLLRILHRLVGYTSIWERDLRFRLKGEFP |
| | ENQYIEEIFNFNNKQNVKYKSGQIVEKYIKFYKELYQNDEMKINKYSSANIKVLKQEKKDLYIRNYIAH |
| | FNYIPHAEISLLEVLENLRKLLSYDRKLKNAVMKSVVDILKEYDFVVKFKIGADKKIEIQSLKSEEIVHL |
| | KKLKLKDNDKKKEPIKTYRNSKELCKLVKVMFEYKYGRKKF |
| UPUT01.1 | MINLYKYMGMKSVKNIEDRLFAVIQKIMNESIEASYISQYDNFNKLKNISNKIIAVLDAGDYIDNAKVIR |
| SEQ ID NO: | DLDRLIYKYEIFTMIPNLDNKHIVSIQSDQNSFCEFINKSIVDHLNYDVSINIPYIILPYCESFCANSVYILS |
| 4132 | YCNKIVELTIDEYKLICTELYKYNIDIKKLIKCFFSYQSRVTTNTCFVYFPLDMDIENTVYCQLKDKITVS |
| | VFIGNEIFKNKLYYNSFYFLGSKSEYKKFFHVYKSKYIKCISYKNLIDRIKKFDNVFYNYNIAQEIDLLLL |
| | EVKKFYINSLNRLSNILKGIKTDLLRIQDDKLKEQLQYYYEYKQIEYDELSISKNKFCKFYSEILNYILNN |
| | GLSNDYYDINLLNLDNNRVTEDFELEANEIGKFLDFNGNKIKDRKELKKFDTNKIYFDGENIIKHRAFY |
| | NIKKYGMLNLLEKISDEAKYKISIEELKNYSNKKNEIEKNHTTQENLHRKYARPRKDEKFTDEDYKKY |
| | EKAIRNIQQYTHLKNKVEFNELNLLQSLLLRILHRLVGYTSIWERDLRFRLKGEFPENQYIEEIFNFDNSK |
| | NVKYKNGQIVEKYINFYKELYKDDTEKISIYSDKKVKELKKEKKDLYIRNYIAHFNYIPHAEISLLEVLE |
| | NLRKLLSYDRKLKNAVMKSVVDILKEYGFVVKFKIGADKKIEIQSLKSEEIVHLKKLKLKDNDKKKEPI |
| | KTYRNSKELCKLVKVMFEYKMEEKSSEK |
| UPAU01.1 | MSFSVKKLFSNLFLSVVLEGNECIFFGQVFRNGKLLKTINAKFTDINIDSIDEKIIKYIEEQEKAYFGVYV |
| SEQ ID NO: | SVFFNDDSQGALPSVSFDEYKKFNINTKNLTSLIMQDSWSIYANLNAIKKYKNLQKELEKNDFYKIQEK |
| 4133 | IHRKYNQKPNLISRTENKKDFNDYKKAIENIQNYTQLKNKIEFNDLNLLQGLLFRILHRLAGYTSLWER |
| | DLQFKLKGEFPEDKYIDEIFNSDRNNNQKYKSGGIAYKYVDFLIEKEEGKRAGKNKVKKRSEKEGSFII |
| | RNYIAHFNYIPDAEKSILEMLEELRELLKYDRKLKNAVMKSIKDIFKEYGFIVEFGISHESNSKKIKVLNV |
| | ESEKIKHLKNNGLVTTRNSKDLCKLVKVMLEYKKS |
| UPKT01.1 | MKIDTYEKSYNGTHSLYNLIKLGRNRYTIELRIYEEITEEEEKFFKKLFKEEIKKYENLQKELEKNDFYKI |
| SEQ ID NO: | QENIHRKYNQKPNLILRTENKKDFNDYKKAIENIQNYTQLKNKIEFNDLNLLQSLLFRILHRLAGYTSL |
| 4134 | WERDLQFKLKGEFPEDKYIDEIFNFDNSKNEKYKNGAIVFKYVDFLIEKKEGKRAGTKKINKKSEEKGL |
| | EIRNYIAHFNYIPDATKSILEILEELRNLLKYDRKLKNAVMKSIKDIFKEYGFIVEFTISHTKNGKKIKVCS |
| | VKSEKIKHLKNNELITTRNSEDLCDLVKIMLEYKKLQK |
| UPGE01.1 | LFKILVLPLRKIDFKFAQRPDLLLANSKYSQDEIKKYLENVKIKFTNKNIPFVPEFSKLYNRIENLKGDNA |
| SEQ ID NO: | LKLGQNIIVPKRKEAKDSQLYLLKNIYYGEFVEKFVNDNENFVKIAEEIIEINKTAGTNEKTKFYKLEKF |
| 4135 | KTLSADTPTKYLKKLQSLHKINYDKEKVEESKDVYVDFVQKIFLKGFVNYLQNSNTLRVLNLLKLDKD |
| | EVITTKKSFYDENLKKWEKMGSDLSELPTDIYEFVKKIKVDEINYSDRMSIFYLLLKLLNHKELTSLRG |
| | NLEKYESMNKNNIYEEELEIINLVSLDNNKVQTNFELEADEVGKFLNTATPIKKITQLNDFSDIYADRQN |
| | VIKYRSFYNLKKYSVLDLIAEIVGKGNAKIKEEEIKKYENLQNELEEKGFYRIQENIHKKYNKNPKMIN |
| | KKDLEDYDNAIRKIEEYTQMKNKLEFNDLNLLQSIMFRILHRMAGYTSIWERDLQFKLRGEYPEKSTEI |
| | SEMFTGRIIDNYKNFIKPLKEINKSLKKPTESERKNKKGMYIRNYIAHFNYIPYAELSILEMLERLRALLS |
| | YDRKLKNAVMKSVTDILKEYGFEVEFKISHPEEINQNNNEIVETIEVKKVESVKIEHLKNAKFKKDKKLI |
| | TKKNSEELCKLVKVMLEYKKPE |
| QWBZ01.1_ | MGKDVFSFINRNISFVPSFTKIYNRVQDLANSLEIKEWKIPDESEGKDAQIYLLKNIYYGKFLDKFLNEE |
| 2 | NGIFISIKDKIIELNRNQNKRTGFYKLEKFEKIEETNPKKYLEIIQSLYMINIEEIDSEGKNIFLDFIQKIFLK |
| SEQ ID NO: | GFFEFIKNDYNYLLELKKVQDKKNIFDSKMSEYIAGEKTLEDMEEINEIIQDIKITEIDKILNQTDKINCFY |
| 4136 | LLLKLLNYKEITELKGNLEKYQILSKTNVYEKELMLLNIVNLDNNKVKIENFKISAEEIGKFIEKINIEEIN |
| | KNKKIKTFEELRNFEKGENTGEYYNIYSDDKNIKNIRNLYNIKKYGMLDLLEKISEKINYCIKKKDLEEY |
| | SKLRKQLEDEKTNFYKIQEYLHSKYQQKPKKILWKNNKNDYEKYKKSIENIEKYVHLKNKIEFNELNL |
| | LQSLLLKILHRLVGFTSIWERDLRFRLTGEFSDESDVEDIFDHRKRYKGTGGGICKKYDRFINTYTEYKN |
| | NNKMKNVKFDDNTPVRNYIAHFNYLPNPKYSILKMMEKLRKLLDYDRKLKNAVMKSIKDILEEYGFK |
| | AEFIINSDKEIILNLVKSVEIIHLGKEDLKSHRNSEDLCKLVKAMLEYSK |
| IMG_ | MKVTKIDGISHKKYEEKGKLVKINNEKKDITEERFNDIEVKTMELFQKTLDFYVKNYEKCEEQNKERR |
| 3300007646 | EKAKNYFSKVKLIVDNKKIKICNENPEKMEIEDFNEYDVRNRKYFNILNKILNEENRTEEDLEVFENDL |
| SEQ ID NO: | QKKLNQIQSIKNSLEENKAHFKKESINNTTDRVKGNNKKSLFYEYYRNSSKHQEYVNNIFEAFDKLYSN |
| 4137 | SHEDINNLFLEITKDSNDRNIRKIREAYHEILNKNKTEFGEELYKKIQDNISNFDKLLEIEPEIKELTKSQIF |
| | YKYYIDKVSLDGTNVKHCFSHLVEIEVNQLLKNYVYSKRSTNKEKLENIFEYCKLRNLVKNKLVNKLN |
| | SYIRNCGKYNSYINNNDVVNSEKISEIRTKEAFLRSIIGVSSSAYFSLRNILNTDNTQDITNKVDKEVDKL |
| | YQENKKIELEERLKLFFGNYFDINNQQEIEDFLMNIDKIISSIRHEIIHFKMEANAQNIFDFNNINLGNTAK |
| | NIFNNEINEEKIKFKIFKQLNSANVFDYLSNKDITEYMDKVVFSFTNRNVSFVPSFTKIYNRVQDLANSL |
| | EIKEWKIPDESEGKDAQIYLLKNIYYGKFLDKFLNEENGIFISIK |
| IMG_ | MKITKIGGISHKKYEEKGKLIKSNEIEKDVIEERFSNIEAKTTELFSKTLDFYVKNYEKCEEQNKERREK |
| 3300007320_2 | AKNYFSKVKLIVDNKKITIFNENTEKIEIEGFNEYDVRDEKYFNVLNKILKEENCTEEDLEVFENDLQKK |
| SEQ ID NO: | LNQIQSIKNSLEKNKAHFKKESINNTTDRVKGNNKKSLFYEYYRNSSKHQEYVNNIFEAFDKLYSNSHE |
| 4138 | DINNLFLEITKDSNNRNIRKIREVYNEILNKNKTEFGEELYKKIQDNISNFDKLLEIEPEIKELTKSQIFYK |
| | YYIDKVSLDGTNIKHCFSHLVEIEVNQLLKNYVYSKRSTNKEKLENIFEYCKLRNLVKNKLVNKLNNYI |
| | RNCGKYNSYINNNDVVNSEKISEIRTKEAFLRSIIGVSSSAYFSLRNILNTDNTQDITNKVKGEVEKLYQ |
| | ENKKVKLEERLKLFFGNNFDINNQQEIEDFLMNIDKIISNIRHEIIHFKIEANAHSIFDFNNVTLGNKAKNI |
| | FNNEINEERIKFKIFKQLNSANVFDYLSDENITEYMGKVIFSFTNRNIPFVPSFRKIYNRVQDLANSLKIKE |
| | WKISDESEGKDAQIYLLKNIYYGEFLDDFLNEKNEKFIKIKDEIIELNKNQNKITGFYKLEKFEKIEEKNP |
| | KKYLEIIQSLYMINIEEIDNEEKNIFLDFIQKIFLKGF |
| IMG_ | MKITKIGGISHKKYEEKGKLIKSNEIEKDVIEERFSNIEAKTTELFSKTLDFYVKNYEKCEEQNKERREK |
| 3300014038_2 | AKNYFSKVKLIVDNKKITIFNENTEKIEIEGFNEYDVRDEKYFNVLNKILKEENCTEEDLEVFENDLQKK |
| SEQ ID NO: | LNQIQSIKNSLEKNKAHFKKESINNTTDRVKGNNKKSLFYEYYRNSSKHQEYVNNIFEAFDKLYSNSHE |
| 4139 | DINNLFLEITKDSNNRNIRKIREVYNEILNKNKTEFGEELYKKIQDNISNFDKLLEIEPEIKELTKSQIFYK |
| | YYIDKVSLDGTNIKHCFSHLVEIEVNQLLKNYVYSKRSTNKEKLENIFEYCKLRNLVKNKLVNKLNNYI |
| | RNCGKYNSYINNNDVVNSEKISEIRTKEAFLRSIIGVSSSAYFSLRNILNTDNTQDITNKVKGEVEKLYQ |
| | ENKKVKLEERLKLFFGNNFDINNQQEIEDFLMNIDKIISNIRHEIIHFKIEANAHSIFDFNNVTLGNKAKNI |
| | FNNEINEERIKFKIFKQLNSANVFDYLSDENITEYMGKVIFSFTNRNIPFVPSFRKIYNRVQDLANSLKIKE |
| | WKISDESEGKDAQIYLLKNIYYGEFLDDFLNEKNEKFIKIKDEIIELNKNQNKITGFYKLEKFEKIEEKNP |
| | KKYLEIIQSLYMINIEEIDNEEKNIFLDFIQKIFLKG |
| OEEI01.1 | MKITKIGGISHKKYEEKGKLIKSNEIEKDVIEERFSNIEAKTTELFSKTLDFYVKNYEKCEEQNKERREK |
| SEQ ID NO: | AKNYFSKVKLIVDNKKITIFNENTEKIEIEGFNEYDVRDEKYFNVLNKILKEENCTEEDLEVFENDLQKK |
| 4140 | LNQIQSIKNSLEKNKAHFKKESINNTTDRVKGNNKKSLFYEYYRNSSKHQEYVNNIFEAFDKLYSNSHE |
| | DINNLFLEITKDSNNRNIRKIREVYNEILNKNKTEFGEELYKKIQDNISNFDKLLEIEPEIKELTKSQIFYK |
| | YYIDKVSLDGTNIKHCFSHLVEIEVNQLLKNYVYSKRSTNKEKLENIFEYCKLRNLVKNKLVNKLNNYI |
| | RNCGKYNSYINNNDVVNSEKISEIRTKEAFLRSIIGVSSSAYFSLRNILNTDNTQDITNKVKGEVEKLYQ |
| | ENKKVKLEERLKLFFGNNFDINNQQEIEDFLMNIDKIISNIRHEIIHFKIEANAHSIFDFNNVTLGNKAKNI |
| | FNNEINEERIKFKIFKQLNSANVFDYLSDENITEYMGKVIFSFTNRNIPFVPSFRKIYNRVQDLANSLKIKE |
| | WKISDESEGKDAQIYLLKNIYYGEFLDDFLNEKNEKFIKIKDEIIELNKNQNKITGFYKLEKFEKIEEKNP |
| | KKYLEIIQSLYMINIEEIDNEEKNIFLDFIQKIFLK |
| UPKN01.1 | MKITKIGGISHKKYEEKGKLIKSNEIEKDVIEERFSNIEAKTTELFSKTLDFYVKNYEKCEEQNKERREK |
| SEQ ID NO: | AKNYFSKVKLIVDNKKITIFNENTEKIEIEDFNEYDVRNRKYFNVLNKILNGENYTEEDLEVFENDLQK |
| 4141 | KLNQIQSIKNSLEENKAHFKKESINNTTDRVKGNNKKSLFYEYYRNSSKHQEYVNNIFEAFDKLYSNSH |
| | EDINNLFLEITKDSNDRNIRKIREAYHEILNKNKTEFGEELYKKIQDNINNFDKLLEIEPEIKELTKSQIFY |
| | KYYIDKVSLDGTNIKHCFSHLVEIEVNQLLKNYVYSKRSTNKEKLENIFEYCKLRNLVKNKLVNKLNS |
| | YIRNCGKYNSYINNNDVVNSEKISEIRTKEAFLRSIIGVSSSAYFSLRNILNTDNTQDITNKVKGEVEKLY |
| | QENKKVKLEERLKLFFGNNFDINNQQEIEDFLMNIDKIISNIRHEIIHFKIEANAHSIFDFNNVTLGNKAK |
| | NIFNNEINEERIKFKIFKQLNSANVFDYLSDENITEYMGKVIFSFTNRNIPFVPSFRKIYNRVQDLANSLKI |
| | KEWKKNRK |
| ODUM01.1 | MRGDYMKITKIDGISHKKYKEKGKLIKSNEIEKDVTEERFNDIEVKTTELFQKTLDFYVKNYEKCEEQN |
| SEQ ID NO: | KERREKAKNYFSKVKLIVDNKKITIFNENTEKIEIEGFNEYDVRDEKYFNVLNKILKEENCTEEDLEVFE |
| 4142 | NDLQKKLNQIQSIKNSLEENKAHFKKESVNNTADRVKGNNKKSLFYEYYRNSSKHQEYVNNIFEAFDK |
| | LYSNSHEDMNNLFSAITKDSNDRNIKKIREAYHEILNKNKIEFGEELYKKIQDNINNFDKLLEIEPEIKEL |
| | TKSQIFYKYYIDKVSLDGTNIKHCFSHLVEIEVNQLLKNYVYSKRSTNKEKLENIFEYCKLKNLVKNKL |
| | VNKLNSYIRNCGKYNSYINNNDVVNSEKISEIRTKEAFLRSIIGVSSSAYFSLRNILNTDNTQDITNKVKG |
| | EVEKLYQENKKVKLEERLKLFFGNNFDINNQQEIEDFLMNIDKIISNIRHEIIHFKIEANAHSIFDFNNVTL |
| | GNKAKNIFNNEINEERIKFKIFKQLNSANVFDYLSDENITEYMGKVIFSFTNRNIPFVPSFRKIYNRVQDL |
| | ANSLKIKEWKISDESEGKDAQIYLLKNIYYEEFLDEFLNEENGIFISIKDKIIELNRNQNKRTGFYKLEKFE |
| | KIEEKNPKKYLEIIQSLYMINIEEIDNEEKKIGRAV |
| IMG_ | MRGDYMKITKIDGISHKKYKEKGKLIKSNEIEKDVTEERFNDIEVKTTELFQKTLDFYVKNYEKCEEQN |
| 3300008755 | KERREKAKNYFSKVKLIVDNKKITIFNENTEKIEIEGFNEYDVRDEKYFNVLNKILKEENCTEEDLEVFE |
| SEQ ID NO: | NDLQKKLNQIQSIKNSLEENKAHFKKESVNNTADRVKGNNKKSLFYEYYRNSSKHQEYVNNIFEAFDK |
| 4143 | LYSNSHEDMNNLFSAITKDSNDRNIKKIREAYHEILNKNKIEFGEELYKKIQDNINNFDKLLEIEPEIKEL |
| | TKSQIFYKYYIDKVSLDGTNIKHCFSHLVEIEVNQLLKNYVYSKRSTNKEKLENIFEYCKLKNLVKNKL |
| | VNKLNSYIRNCGKYNSYINNNDVVNSEKISEIRTKEAFLRSIIGVSSSAYFSLRNILNTDNTQDITNKVKG |
| | EVEKLYQENKKVKLEERLKLFFGNNFDINNQQEIEDFLMNIDKIISNIRHEIIHFKIEANAHSIFDFNNVTL |
| | GNKAKNIFNNEINEERIKFKIFKQLNSANVFDYLSDENITEYMGKVIFSFTNRNIPFVPSFRKIYNRVQDL |
| | ANSLKIKEWKISDESEGKDAQIYLLKNIYYEEFLDEFLNEENGIFISIKDKITI |
| IMG_ | MKITKINGISHKKYEEKGKLVKINDEKKNITEERFNDIEAKTTELFQKTLDFYVKNYEKCEDQNKERRE |
| 3300006317_2 | KAKNYFSKVKILVDNKKITICNENTEKMEIEDFNEYDVRNRKFFNVLNKILNRENYTEEDLEVFENDLQ |
| SEQ ID NO: | KRIGRIKSIKNSLEENKAHFKKENVNDNNRVKGNNKKSLFYEYYRVSSKHQEYVDNIFETFDKLYSNS |
| 4144 | HENMNNLFLEITKDSNDRNIRKIREAYHEILNKNKTEFGEELYKKIQDNISNFDKLLEIEPEIKELTKSQIF |
| | YKYYIDKVSLDGTNIKHCFSHLVEIEVNQLLKNYVYSKRSTNKEKLENIFEYCKLRNLVKNKLVNKLN |
| | NYIRNCGKYNSYINNNDVVNSEKISEIRTKEAFLRSIIGVSSSAYFSLRNILNTDNTQDITNKVKGEVEKL |
| | YQENKKVKLEERLKLFFGNNFDINNQQEIEDFLMNIDKIISNIRHEIIHFKIEANAHSIFDFNNVTLGNKA |
| | KNIFNNEINEERIKFKIFKQLNSANVFDYLSDENITEYMGKVIFSFTNRNIPFVPSFRKIYNRVQDLANSLE |
| | SIL |
| IMG_ | MRGGYMKITKIGGISHKKYEEKGKLIKSNEIEKDVIEERFNDIEKKTKELFLKTLDSYVKNYEKCEEQN |
| 3300008481 | KERREKAKNYFSKVKLIIDNEKITICNENTEKMEIEDFNEYDVRNRKYFNVLNKILNGENYTEEDLEVF |
| SEQ ID NO: | ENDLQKKLNQIQSIKNSLEENKAHFKKESINNTTDIVKGNNKKSLFYEYYRNSSKHQEYVNNIFEAFDK |
| 4145 | LYSNSHEDINNLFLEITKDSNDRNIRKIREAYHEILNKNKTEFGEELYKKIQDSISNFDKLLEIEPEIKELT |
| | KSQIFYKYYIDKVNLDETSTKHCFCHLVEIEVNQLLRNYVYSKRNISKEKLKNIFEYCKLKNLIKNKLV |
| | NKLNNYIRNCGKYNGYISNNDVINSEKISEIRTKEAFLRSIIGVSSSAYFSLRNILNTDNTQDITNKVDKE |
| | VDKLYQENKKIELEERLKLFFGNHFDINNQQEIKAFLMNIDKIISSIRHEIIHFKMEANVQNIFDFNNINLG |
| | NKAKNIFSNEINEEKIKFKIFKQLNSANVFDYLSDENITEYMGKAVFSFTNRNIPFVPSFTKIYNKVQDLA |
| | NSLEIKKWKIPNESEGKDAQIYLLKNIYYGKFLDEFLNEENGIFISIKDKIIELNRNQNKRTGFYKLEKFE |
| | KIEETNPKKYLEIIQSLYMINIEEIDSEGKNIFLDFIQKIFLKGFFEFIK |
| IMG_ | VNNIFEAFDKLYSNSHEDINNLFLEITKDSNDRNIRKIREAYHEILNKNKTEFGEELYKKIQDSISNFDKL |
| 3300008743 | LEIEPEIKELTKSQIFYKYYIDKVNLDETSTKHCFCHLVEIEVNQLLRNYVYSKRNISKEKLKNIFEYCKL |
| SEQ ID NO: | KNLIKNKLVNKLNNYIRNCGKYNGYISNNDVINSEKISEIRTKEAFLRSIIGVSSSAYFSLRNILNTDNTQ |
| 4146 | DITNKVDKEVDKLYQENKKIELEERLKLFFGNYFDINNQQEIKVFLMNIDKIISSIRHEIIHFKMEANVQN |
| | IFDFNNINLGNKAKNIFSNEINEEKINVDKDVVVTN |
| IMG_ | MKITKIDGISHKKYKEKGKLIKSNEIEKDITEERFNDIEAKTTELFQKTLDFYVKNYENSEDQNKERREK |
| 3300014024 | AKNYFSKVKILVDNKKITICNENTEKMEIEDFNEYDVRNRKFFNVLNKILNRENCTEEDLEVFENDLQK |
| SEQ ID NO: | RIGRKSIKNSLEENKAHFKKESINNNINYDKVKGNNKRSIFYEYYKNSLKHQEYINNIFEAFDKLYSNS |
| 4147 | HEAMNNLFSEITKDSKDRNIRKIREAYHEILNKNKTEFGEELYKKIQDNRNNFDKLLEIEPEIKELTKSQI |
| | FYKYYIDKVNLDETSIKHCFCHLVEIEVNQLLKNYVYSKRNINKEKLENIFEYCKLRNLVKNKLVNKLN |
| | NYIRNCGKYNAYISNNDVVVNSEKISEIRTKEAFLRSIIGVSSSAYFSLRNILNTDNTQDITNKVDKEVDK |
| | LYQENKKIELEEILKLFFGNYFDINNQQEIKVFLMNIDKIISSIRHEIIHFKMETNAQNIFDFNNVNLGNTA |
| | KNIFSNEINEEKIKFKIFKQLNSANVFDYLSNKDITEYMDKVVFSFTNRNVSFVPSFTKIYNRVQDLANS |
| | LEIKEWKIPDESEGKDAQIYLLKNIYYGKFLDKFLNEENIADIYVKLEKYNIGGSVKDRAALGMIEAAE |
| | KEGKLKPGGTIVEPTSGNTGIALALIGKAKGYRVIIIMPDSMSVERRSILAAYGAELILTEGAKGMKGAI |
| | AEAEKLASENGYFLPQQFENPANPAKHYETTAKEILDDFPQIDAFISGVGTAGTLSGVGKRLKEERPGV |
| | QVFAVEPATSAVLSGEQPGKHSQQGLGAGFIPGNYDANLVDGIIKITNEQAIEFATRASKENGLFVGISS |
| | GSAIAAAYEVAKKLGKGKKVLAVLPDGGEKYLSLEIFRKSL |
| UPLB01.1 | MLRRMCMKITKIDGISHKKYKEKGKLIKSNEIEKDITEERFNDIEAKTTELFQKTLDFYVKNYENSEDQ |
| SEQ ID NO: | NKERREKAKNYFSKVKILVDNKKITICNENTEKMEIEDFNEYDVRSGKYFNVLNKILNGENYTEEDLEV |
| 4148 | FENDLQKRIGRIKSIKNSLEENKAHFKKESINNNIIYDRVKGNNKKSLFYEYYRISSKHQEYVNNIFEAFD |
| | KLYSNSHEAMNNLFSEITKDSKERNIRKTREAYHEILNKNKTEFGEELYKKIQDNISNFDKLLEIEPEIKE |
| | LTKSQIFYKYYIDKVNLDETTIKHCFCHLVEIEVNQLLKNYVYSKRNINKEKLENIFEYCKLKNLVKNK |
| | LVNKLNNYIRNCGKYNAYISNNDVVVNSEKISEIRTKEAFLRSIIGVSSSAYFSLRNILNTDNTQDITNKV |
| | DKEVDKLYQENKKIELEERLKLFFGNYFDINNQQEIKVFLMNIDKIISSIRHEIIHFKMETNAQNIFEFNN |
| | VNLGNTAKNIFSNEINEEKIKFKIFKQLNSANVFDYLSNKDIREYMGKAVFSFTNRNVSFVPSFTKIYNR |
| | VQDLANSLEIKEWKIPDESEGKDAQI |
| QWBZ01.1 | MKISKIDDISHKKYKGKGKLIKSNEIEKDITEERFNDIEAKTKELFQKALDFYVKNYEKCEDQNKERRE |
| SEQ ID NO: | KAKNYFSKVKILVDNKKITICNENTEKMEIEDFNEYDVRSGKYFNVLNKILNGENYTEEDLEVFENDLQ |
| 4149 | KRIGRIKSIKNSLEENKAHFKKESINNNIIYDRVKGNNKKSLFYEYYRISSKHQEYVNNIFEAFDKLYSNS |
| | HEAMNNLFSEITKDSKDRNIRKIREAYHEILNKNKTEFGEELYKKIQDNRNNFDKLLEIEPEIKELTKSQI |
| | FYKYYIDKVNLDETSIKHCFCHLVEIEVNQLLKNYVYSKRNINKEKLENIFEYCKLRNLVKNKLVNKLN |
| | NYIRNCGKYNAYISNNDVVVNSEKISEIRTKEAFLRSIIGVSSSAYFSLRNILNSNNTQDITNDRILKQELD |
| | DIYQENNKKNKLEKNLKLFFGNYFDVMRESEIREFFTNIRDIIKRIRNKIIHFEMEANAQNIFDFNNINLG |
| | NTAKNIFNNEINEEKIKFKIFK |
| UPGN01.1 | MLRRMCMKITKIDGISHKKYKEKGKLIKNNDTAKDVTEERFYDIKTKTTELFQKTLDFYVKNYEQCEE |
| SEQ ID NO: | QNKERREKAKNYFSKVKLIIENRKITIFNENTEKIEIEGFNEYDVRDEKYFNVLNKILKEENCTEEDLEVF |
| 4150 | ENDLQKKLNQIQSIKNSLEENKAHFKKESVNNTADRVKGNNKKSLFYEYYRISSKHQEYANNIFEAFD |
| | KLYSNSHEAMNNLFSEITKDSKNRNIRKIREAYHEILNKNKTEFGEELYKKIQDNRNNFDKLLEIEPEIK |
| | ELTKSQIFYKYYIDKVNLDETSIKHCFCHLVEIEVNQLLKNYVYSKRNINKEKLENIFEYCKLRNLVKN |
| | KLVNKLNNYIRNCGKYNAYISNNDVVVNSEKISEIRTKEAFLRSIIGVSSSAYFSLRNILNSNNTQDITSD |
| | RILKQELDDIYQENNKKNKLEKNLKLFFGNYFDVMRELEIREFFANIRDIIKRIRNKIIHFEMEANAQNIF |
| | DFNNINLGNTAKNIFNNEINEEKMKFKIFKQLNSANVFDYLSNKDIREYMGKA |
| UPAU01.1_2 | LNTDNTQDITNKVKGEVEKLYQENKKVKLEERLKLFFGNNFDINNQQEIEDFLMNIDKIISNIRHEIIHFK |
| SEQ ID NO: | IEANAHNIFDFNNVTLGNKAKNIFNSEINEERIKFKIFKQLNSANVFDYLSDENITEYMGKVIFSFTNRNI |
| 4151 | PFVPSFRKIYNRVQDLANSLKIKEWKISDESEGKDAQIYLLKNIYYGEFLDDFLNEKNEKFIKIKDEIIEL |
| | NKNQNKITGFYKLEKFEKLKANTPTEYLEKLQSLHKINYNREKIEEDKDIYVDFVQKIFLKGFINYLQKS |
| | NSLKPLNLLNLKKDEVINSEKSSYDERKKYEQTDS |
| UPQF01.1 | MKVTKIDGISHKKFEDEGKLVRYTGNFNIKNEMKERLEKLKELKLSNYVKNPENVKNKDKNKEKETK |
| SEQ ID NO: | SRRENLKKYFSEIILRKKEEKYLLKKTRKFKNITEEINYDDIKKRENQQKIFDVLKELLEQRINENDKEEI |
| 4152 | LNFDSVKLKEVFGEDFIKKESKIKAIEESLEKNRADYRKDYVELENEKYEDVKGQNKRSLVFEYYKNP |
| | ENREKFKENIKYAFENLYTEENIKNLYSEIEEIFGKVHLKSKVRDFYQNRIIGESEFSEKDEEGISILYKQII |
| | NSVEKKEKFVEFLQKVKIKDLTKSQIFYKYFLENEELNDENIKYVFSYFVEIEVNKLLKENVYKTKKFN |
| | EGNKYRVKNIFNYDKLKNLVVYKLENKLNNYIRNCGKYNYHMENGCVATSDTNMKNRQTEAFLRSI |
| | LGVSSFGYFSLRNILGVNDNDFYEMEEELTEDERKNENFILKKAKEDITSKNIFEKVVDKSFEKKGIYQI |
| | KENLKMFYGNSFDKVDKDELKKFFVNMLEAITSVRHRIVHYNINTNSENIFDFSNIEVSKLLKNIFEKEI |
| | DTRELKLKIFRQLNSAGVFDYWESWKIKKYLENIEFKF |
| ODGY01.1 | MKVTKIDGLSHKKFEDEGKLVKFKNNKNINEIKERLKKLKELKLDNYIKNPENVKNKDKDAEKETKIR |
| SEQ ID NO: | RTNLKKYFSEIILRKEDEKYILKKTKKFKNINQQEIFDVLKEIKIKETEKEEIITFDSEKLKKVFGEDFVKK |
| 4153 | EAKIKAIEKSLKINKANYKKDSIKIGDDKYSNVKGEKKRSRIYEYYKKSENLKKFEENIREAFEKLYTEE |
| | NIKELYSKIEEVLKKTHLKSIVREFYQNEIIGESEFSKKNGDGISILYNQIKDSIKKEENFIEFIENIGNLKL |
| | KDLTKSQIFYKYFLENEELNDENIKFAFCYFVEIEVNNLLKENVYKIKRFNEGNKKRIKNIFEYGKLKKL |
| | IVYKLENKLNNYVRNCGKYNYHMENGDIATSDINMRNRQTEAFLRSIIGVSSFGYFSLRNILGVNDDDF |
| | YEIEEGLTEEERKNESNVLKKAKEDITSKSIFEKVVDKSFEKKGIHSIRKNVKMFYGDSFDKANEDELK |
| | QFFVNMLNAITSIRHRVVHYNMNTNSENIFNFSDIEVSRLLKSIFEKETDKRELKLKIFRQLNSAGVFDY |
| | WENWKIEKYLKNIEFKFVNKNIPFVPSFTKLYNRIDNLKAGNALKLGNHIIIPKRKEARDSQIYLLKNIY |
| | YGEFVEKFVNNNDNFEKIFREIIKINKNAGTNTKTKFYKLEKFETLKANTPTEYLEKLQSLHKINYDKEK |
| | VEEDKDTYVDFVQKIFLKGFINYLQKSNSLKPLNLLNLKKDEVINSEKSSYDEKLKQWENNGSKLSEM |
| | PKEIYEYIKKIQINKINYSNRMSIFYLLLKLIDHRELTNLRGNLEKYESMNKNEIYSEELNIVNLVSLDNN |
| | KVRANFNLESEDIGKFLKTETSIKNINQLNNFSGIFAD |
| UPKC01.1 | MKVTKIDGLSHKKFEDEGKLVKFRDNKNINEMKERLKKLKELKLDNYIKNPENVKNKDKDAEKETKI |
| SEQ ID NO: | RRTNLKKYFSEIILRKEDEKYILKKTKKFKNINQEIDYYDVKSKKNQQEIFDILKEILELKIKETEKEEIITF |
| 4154 | DSEKLKKVFGEDFVKKETKIKAIEKSLKINKANYKKDSIKIGDDKYSNVKGENKRSCIYEYYKKSENLK |
| | KFEENIREAFEKLYTEENIKELYSKIEEVLKKTHLKSIVREFYQNEIIGESEFSKKNGDGISILYNQIKDSIK |
| | KEENFIEFIENIGNLELKDLTKSQIFYKYFLENEELNDENIKFAFCYFVEIEVNNLLKENVYKIKRFNEGN |
| | KKRIKNIFEYGKLKKLIVYKLENKLNNYVRNCGKYNYHMENGDIATSDINMRNRQTEAFLRSIIGVSSF |
| | GYFSLRNILGVNDDDFYEIEEGLTEEERKNESNVLKKAKEDITSKSIFEKVVDKSFEKKGIHSIKENLKM |
| | FYGDSFDKANGDELKQFFVNMLNAITSIRHSVVHYDMNTNSENIFNFSDIEVSRLLKSIFEKETDKRELK |
| | LKIFRQLNSAGVFDYWENWKIKKYLENIKFEFVNKNVPFVPSFTKLYNRIDNLKGSNALNLGYINIPKR |
| | KEARDSQIYLLKNIYYGEFVEEFIKNNDNFEKIFREIIEINKNAGRNKQTNFYKLEKFEKLKAN |
| UPJV01.1 | MKVTKIDGLSHKKFEDEGKLVKFRNNKNINEIKERLKKLKELKLDNYIKNPENVKNKDKDAEKETKIR |
| SEQ ID NO: | RTNLKKYFSEIILRKEDEKYILKKTKKFKDINQEIDYYDVKSKKNQQEIFDVLKEILELKIKETEKEEIITF |
| 4155 | DSEKLKKVFGEDFVKKEAKIKAIEKSLKINKANYKKDSIKIGDDKYSNVKGENKRSRVYEYYKKSETH |
| | EKFRKNIIEAFEKLYTEENIKELYSKIEEVFKKTHLKSIVREFYQNEIIGESEFSKKDENGKSILYNQIEDSI |
| | KKDENFVEFLENIENLQLKELTKSQIFYKYFLENDLIDIIASDAHNLSTRKPYMKKAYDIIVDKYGKKRA |
| | ENLFYKTPARIMMERD |
| UPAZ01.1 | MKVTKIDGLSHKKFEDEGKLVKIEDASQKNETLERLENLKGIKLGNYIKNPDKTKNKDNKKRRKGLKE |
| SEQ ID NO: | YFSEITLRKENEKYVLLKGKKLKKINNDIKDTDIKAKDKKEEVFDILKEILKLNLLANDAEEKIQFDSIKL |
| 4156 | KNVFGKDFVKKELQIKSIEESLEKNKADYRKEFIETENHKYGNVKGKNKRSRIYEYYKKSENHKKFED |
| | NIREAFEKLYTEENIKELYSKIEQVLKKTHLKSIVREFYKNEIIGESEFSKKNGDRISILYNQIKDSIKKEE |
| | NFIEFIENIGNLELKDLTKSQIFYKNIKKVTGASFHYIILMYNCQLLFHIFWISFNFVV |
| IMG_ | MKVTKIDGLSHKKFEDEGKLVKIEDASQKNETLERLENLKGIKLGNYIKNTDKTKNKDNKKRRKGLK |
| 3300008454 | EYFSEITLRKENEKYVLLKGKKLKKINNDIKDTDIKAKDKKEEVFDILKEILKLNLLANDAEEKIQFDSIK |
| SEQ ID NO: | LKNVFGKDFVKKELQIKSIEESLEKNKADYRKEFIETENHKYGNVKGKNKRSHIYEYYKKSENHKKFE |
| 4157 | DNIREAFEKLYTEENIKELYSKIEQVLKKTHLKSIVWEFYKNEIIGESEFSKKNGDGISILYNQIKDSIKKE |
| | ENFIEFIENIGNLELKDLTKSQIFYKYFLENEELNDENIKFVFCYFVEIEVSDLLKGNVYKASKI |
| UPGO01.1 | MTIHKSKGLEFPVVIIAGMDKKRNIKSSSEMIRTSEKMGIGIDIIDDILKYKYPSIYKEIIGLEKTKEEKEEE |
| SEQ ID NO: | LRILYVAMTRAKEKLIMTAKVKSVEKLLQKLNESVKLNIYNNKLSSKCIMSIDTYLEIIMMSLTEAYNT |
| 4158 | QKVGKELEIKIDKNDFLVYSKSVENVIKINEKSDIKIGDIYIENIGNLELKDLTKSQIFYKYFLENEELNDE |
| | NIKNIFCYFVEIEVSDLLKGNVYKASKIYENKIKNIFEYGKLKNLIVYKLENKLNNYVRNCGKYNYHME |
| | NGDIATSDINMRNRQTEAFLRSMIGVSSFGYFSLRNILGVNDDDFYETEEDLTKAKKDITIKKIFEEVVD |
| | KSFEKKGIHNIKENLEMFYGDSFDKANEDELKQFFVNMLNAITSIRHRVVHYNMNTNSENIFNFSDIEV |
| | SRLLKNIFEKETDKRELKLKIFRQLNSAGVFDYWESWKIKKYLENIKFEFVNKNIPFVPSFTKLYNRIDD |
| | LKAGNALKLGNHIIIPKRKEARDSQIYLLKNIYYGKFVEEFIKNNDNFEKIFREIIEINKNAGTNKQTNFY |
| | KLEKFEKLKANTPTEYLEKLQSLHKINYNREKIEEDNI |
| UPQL01.1 | MKEGKLKKIIKIDWTIFYSKPRIQILGILIFLDIILLFSVTKEMEKGFSIYSVSTSIVLFILFILLNGLFIFYYK |
| SEQ ID NO: | NKFPNIEFYDDYFIFKKEKVYYENLKYFFFKDNRVFQMKKFSKILYKPDGGNWKKIDGSGYDYDLFSV |
| 4159 | FQKCFLEKNFLKAVENIENGGVEIFPFQNQGFVKNKFLFSSEEGLQELTQIFENSPKIQVSNKSVKFDNEI |
| | YDWENYNIEFEIGTITVSDLKKNTILEIETKNTVICQEILLKKLIENKLLNKLDTYVRNCGKYNYYLQVG |
| | EIATSDFIARNRQNEAFLRNIIGVSSVAYFSLRNILETENENDITGRMRGKTVKNNKGEEKYVSGEVDKI |
| | YNENKQNEVKENLKMFYSYDFNMDNKNEIEDFFANIDEAISSIRHGIVHFNLELEGKDIFAFKNIAPSEIS |
| | KKIFQNEINEKKLKLKIFRQLNSANVFN |
| UPUH01.1 | MKVTKVDGISHKKYIEEGKLVKSTSEENRTSERLSELLSIRLDTYIKNPDNASEEENRIRRENLKEFFSNK |
| SEQ ID NO: | VLYLKDGILYLKDRREKNQLQNKNYSEEDISEYDLKNKNSFSVLKKILLNEDINSEELEIFRKDVEAKL |
| 4160 | NKINSLKYSLEENKANYQKINENNIKKSLLPIFIDSYITDSTLTGGINPQIGEDYIKTISILNFPGFSVPGMI |
| | DRLNRTDIEYIWGSRYIMLEKITIKKILDKYYNKWWAARLSFKDMFIEFFSKNETTNPNQSAMNAAIEV |
| | RDEKTKLDEDRDIVGYYTTTVILKNKNRDVVERQAQEVRTLLSSLGFVVQIEDFYTLDCWLGVMPGN |
| | NYFNERRPFMNSKVLSHMLPINSVWAGNKWNKHLDTPPLLYCQTTGNTPFRLNLHYTDVGHTLIVGP |
| | TGSGKTLLAQTLAKILNVPFAIADATSLTEAGYVGEDVENIVLKLVQAADFDIEKAQRGIIYIDEIDKISR |
| | KSDNPSITRDVSGEGVQQALLKILEGTVANVPPTGGRKHPQQELIHIDTTNILFICGGAFVGLDKIVADRI |
| | GKKGIGFNSDVAKNVKEGESELIAKVMPQDLHKFGMIPELLGRIPVITSTRELVEEDLMSILTDPKNALT |
| | KQYKRMFELEGVDLEFTEDSLREIAKKALARGTGARGLRAICESTLQETMFDLPSDLDITKVVVTPESV |
| | GGDNAPEIIRGKKG |
| IMG_ | MKVTKRKGFNIKDVFHEKKEDKGVLSKIDDENDYMENKFKELASISLSTFIKDPVKSTKEENKKRREG |
| 3300000059 | LKEYFKNIEIYLKSEEVKINDKQDNKNTPSEGVEQTDLKESTKEIGKDVFNNIIKGEAHNLECFKKKLEE |
| SEQ ID NO: | HKKYLEKVKKSLNKNKSQYKVEQNQVSGTSKRNKFYDFYAKLNKLGEYKCRIEKAFDSLYSKNDILK |
| 4161 | IKENLTKKEEDNKKEGKNNKEEKFKKKEFFDSCKAILGSKINKDIQTDEGVTLKYIEGLKDHPLTQSRFF |
| | YKYXLSDEKNELTEENIKYCFPHFIEIEMHYLLRSLVKLNAKQRKEKAENIFKSHEIIKCYIKNKLKNKLI |
| | LYIQNSGKIKEYHSKYKGAIESSHLSDIRKGEGFIRNVIGATSSAYFSFRNIVNPKEKDDLLGKCMCCYP |
| | KETEKQKANIDSLDIYRVKQMLAIFYGEYFCGLKDDEVRCFLEVIKNSI |
| IMG_ | MKKILFLVALLPLTLVAQTVIVPNRYAFQKEDNQYQLNMLTKFLLEKQGFKVYMESEAPAELLQNPCD |
| 3300008727 | ALKADVKNESNMMTSKVQFLLTDCTNKAVFTSQIGKSREKEFKKSYQEALRNALSGTELATFKADYQ |
| SEQ ID NO: | APSVASKPSIPSATTAVPELTATAAPISEPLILFLYAKPTNWGYELFDKKTNELQFKLRKINTPDVFLAFD |
| 4162 | VEEQKYGILDLLEKIVTKADLKITKEEIKKYKNLQKELEKNDFYKIQEKIHRKYNQKPNLISRTENKKDF |
| | NDYKKAIENIQNYTQLKNKIEFNDLNLLQGLLFRILH |
| IMG_ | LQDCIKRAVKRTTEAARNINGGKTDEELILARAGKLSAIQKNERVQWFFAGLMADSTSEGRVQKDNY |
| 3300013000 | KHDADEAQKKAEYIEEIKQDVVALAFADYLKQFSFILDIKNILYADRNFPVEALKKTLREERKTAEEKT |
| SEQ ID NO: | KQSGEKADWICAKLYFLLHLIPVEEVSNLRQQIRKWEIVVDKPEVATAADEAENKEIANNGQPLEARQ |
| 4163 | QKALTEPIIQALDLYIFMHDAQYVGEEIGKVTADWAERFFEHGKGAMDRVFPAQDRQKESQAFRDLR |
| | EMRRFGNAVLHDIYAQNKISSKKIEEWRSQKAKVEGKKGLQTELQKLHENWVNNRKNPEWQRKGKD |
| | ESEGEKYKAYRETLAAVEAYRLLAGEVKLQDHLRLHRLLMAVLGRLVDFSGLFERDLYFALLALCHE |
| | KGVKDIKAVFKDSKGDETPFEETDENYGWNRFQNGQIFKAVDQLKEDYASIKNELVKFFGDIEKKGSS |
| | RNIRNRFAHLKMLTPPKEGEFSLHQGVHINLTQEVNKARQLMSYDRKLKNAVTKSIIELLEREGLKLS |
| | WQIQSGDAAEPAAKSGEGAAPASKKVSHNVRNPHIETKWIPHLGGKLLDKKDTDGKIVRDAKGNPVK |
| | EAITERHYGDTYLAMVELLFRG |
| IMG_ | LQDCIKRAVKRTTEAARNINGGKTDEELILARAGKLSAIQKNERVQWFFAGLMADSTSEGRVQKDNY |
| 3300013001 | KHDADEAQKKAEYIEEIKQDVVALAFADYLKQFSFILDIKNILYADRNFPVEALKKTLREERKTAEEKT |
| SEQ ID NO: | KQSGEKADWICAKLYFLLHLIPVEEVSNLRQQIRKWEIVVDKPEVATAADEAENKEIANNGQPLEARQ |
| 4164 | QKALTEPIIQALDLYIFMHDAQYVGEEIGKVTADWAERFFEHGKGAMDRVFPAQDRQKESQAFRDLR |
| | EMRRFGNAVLHDIYAQNKISSKKIEEWRSQKAKVEGKKGLQTELQKLHENWVNNRKNPEWQRKGKD |
| | ESEGEKYKAYRETLAAVEAYRLLAGEVKLQDHLRLHRLLMAVLGRLVDFSGLFERDLYFALLALCHE |
| | KGVKDIKAVFKDSKGDETPFEETDENYGWNRFQNGQIFKAVDQLKEDYASIKNELVKFFGDIEKKGSS |
| | RNIRNRFAHLKMLTPPKEGEFSLHQGVHINLTQEVNKARQLMSYDRKLKNAVTKSIIELLEREGLKLS |
| | WQIQSGDAAEPAAKSGEGAAPASKKVSHNVRNPHIETKWIPHLGGKLLDKKDTDGKIVRDAKGNPVK |
| | EAITERHYGDTYLAMVELLFRG |
| IMG_ | LQDCIKRAVKRTTEAARNINGGKTDEELILARAGKLSAIQKNERVQWFFAGLMADSTSEGRVQKDNY |
| 3300012998 | KHDADEAQKKAEYIEEIKQDVVALAFADYLKQFSFILDIKNILYADRNFPVEALKKTLREERKTAEEKT |
| SEQ ID NO: | KQSGEKADWICAKLYFLLHLIPVEEVSNLRQQIRKWEIVVDKPEVATAADEAENKEIANNGQPLEARQ |
| 4165 | QKALTEPIIQALDLYIFMHDAQYVGEEIGKVTADWAERFFEHGKGAMDRVFPAQDRQKESQAFRDLR |
| | EMRRFGNAVLHDIYVQNKISSKKIEEWRSQKAKVEGKKGLQTELQKLHENWVNNRKNPEWQRKGKD |
| | ESEGEKYKAYRETLAAVEAYRLLAGEVKLQDHLRLHRLLMAVLGRLVDFSGLFERDLYFALLALCHE |
| | KGVKDIKAVFKDSKGDETPFEETDENYGWNRFQNGQIFKAVDQLKEDYASIKNELVKFFGDIEKKGSS |
| | RNIRNRFAHLKMLTPPKEGEFSLHQGVHINLTQEVNKARQLMSYDRKLKNAVTKSIIELLEREGLKLS |
| | WQIQSGDAAEPAAKSGEGAAPASKKVSHNVRNPHIETKWIPHLGGKLLDKKDTDGKIVRDAKGNPVK |
| | EAITERHYGDTYLAMVELLFRG |
| IMG_ | LGHGPRTSPSAARRKPDEIPCRPGRGRATQWCTADPGPGTAWLPPAAPRPGRAGQAAPFSPRPDPFGPS |
| 3300031965 | RPHHSAPYIEDLKCDVVALAFAAWLKEADFDFLLALSADTPKPEIPLCDLDRIDLPAVNTRAADWQKA |
| SEQ ID NO: | LYFLVHLVPVDDIGRLLHQMRKWELLAKDSEPAGGIAMERIRQIQAALELYLYMHDAKFEGGAALAG |
| 4166 | IGEFKALFDSDDAFARIFPLQPGADDDRRVPRRGLREIVRFGHLPALLPVFGKHRIATAEVDEYLRLEHP |
| | QEDGKSEIARLQAHREALHEEWTEKKKDFAGDRLRTYVETLAAVVRHRHLAAHVTLTDHVRLHRLL |
| | MAVLGRLVDYSGLWERDLYFVTLALVHEAGCRPGEVFTDKGRKRLGQGRIVDALRDFQQTPDAGRIK |
| | DGLRRYFSAVWEKGNCSVRRRNNFAHFDMLKPANLPVDLTACVNDSRDLMAYDRKLRNAVSQSVRE |
| | LLHREGLDFEWTMDPAAPHRLGAATMESRGAPHLGGMRVPEKRVPQGRGRARRRQILENLHGDRFIA |
| | MAAALFGRCSPQRPESVVDWRPDAMDWSPPRGKNRNPGGKNRRGNGHGGGRKHGNAGRKPGRPV |
| IMG_ | LAGPEQIAKSRFWTSDWQAKIKRAEAFVRIWRHALALAGLTLKDLVDITDDILGGEGARKKALAALRA |
| 3300032892 | DPSKQAHFDQKRTVLFGEGVRKEEGKKPSLLDVVDRCDLASGLIDGAAKLRHAVFHFKGREYFLDEL |
| SEQ ID NO: | AELPKRFPANVGAAAQQLWQSDVTGRAARLNADLVAVHVPLFLTQEQAAQVFALLAADTIAEVPLPR |
| 4167 | FSRLLERARPWVEDKDAGVRLPEPANRRDLEDPARLCQYTLIKCIYERPFRAWLARQPAAAIAGWYDR |
| | AVARSSAAAKQENAKGDAVAERVITARAAALPKPAKDGDVVTFLFDLSRATASEMRVQRGYESDPD |
| | KARAQAEFIDRLLRDVVILALSAYLTKEKLGWVLDLKPGQIPAEPPLSSLDDVKAPEAAGEAEKWPAA |
| | LYLLLHLLPVEAVGQLLHQLFRWNTAATRETDLPEPEERRRQRLEAAMTLYLDMHDAKFEGGSPLQQ |
| | YEAFRGLFASGRGFERVFPRVSDQKAEQRIPKRGLREIMRFGRLALVKAICRDSTIDDGTVGAVMANE |
| | DSEGKDKSKIAALQERREELHEKWVKQKRLDKDDLRDYCATLNAIAQHRHAANFVYLVDHVRAHRA |
| | IMAVLGRLVDYAGLFERDLYFVTLALLHQNSLRPQEFFNTKGLEDVRNGEIISALHERKGDAPQAAGV |
| | EQKLARHFTKIWGPKNRIRGIRNDLMHLNMLQASPPTPRLTHWINEARELMAYDRKLKNAVSKSIIELL |
| | AREGLAARWTIRTSGGAHDLADGILSSRCAEHLGGMKLKLRGADRRDKGQPIAERLHSDAFVGMVAA |
| | AFDGKPVKADSILDSLSTVNWEASVHTKRHGDRGGPSRPHSPREKLRPGQRRRDREGRSGAKPDVRA |
| | K |
| IMG_ | VNRDDVAWINQHWPDDTTKSRYWTSDGQTEIKRHEIFVRIWRSALAHANRTLADWLDPDGKATDIAE |
| 3300007987 | GGNTFEQVLAATGQATVVQTANLFGSRAAALESHDAIQDLARLVWTVYTQLRHNSFHFKGVDGFKV |
| SEQ ID NO: | ALTPKLAEIAPGALQFTTNLLRGDFRDSEARLRAVLRAAQVEGFLDRGRLAEIWAALHPAGEAGLGPA |
| 4168 | LPRFNRIVQRVDGTGAIAELPCAVNQFDMANPAIHCRYVVTKLLYERGFRAWVAMATTDQINAWIKS |
| | AEDRTQKAKDEIHGHPEDKARMVGALRLRDGQGIMDFLSELTALTATEFRVQAGYEPNRAAAQEQAE |
| | YLFHLQCDVLALAFKEYIRAARLGWLSDTLKPDRVARGVLSDVDKLADPKATPDFEDWQAGIYAVLH |
| | LVPVDEVGRLLHQLRRWANGQPADETSVKIERLLELYLDMHDDKFEGGVPLHDHPDLQALFETPDLL |
| | AQVLPQVGATEDERRRVPLRGLREMLRFGNLRILKGVFAKAPITTAGVAKLAEYEKSRADGLGGIDHA |
| | QQIRQKRHETLAKLRMLGPDSYGDVRDYLFVTKRIIRHRRLANHVRLVNHVRVNQILMSVLGRFADC |
| | AGLFERDLYFTLLALIHELGQKPEAVFDAKALGKFEDGQILTALDRNKTPLPASIACELQRHFGLDAKG |
| | AGPNRKRRNDFAHFNLLRSKTPINLTAAMNDARALLSHDRKLKNAVSASIVTLLEREQIVAHWNMGT |
| | DHQLADAVIGTRRIVHLKSAELAENLRDKRFLTLIAQLFNGRVNNLPDDIAALDRPGIEALAARVTGGG |
| | GR |
| IMG_ | VNRDDVAWINQHWPDDTTKSRYWTSDGQTEIKRHEIFVRIWRSALAHANRTLADWLDPDGKATDIAE |
| 3300009004 | GGNTFEQVLAATGQATVVQTANLFGSRAAALESHEAIQDLARLVWTVYTQLRHNSFHFKGVDGFKV |
| SEQ ID NO: | ALTPKLAEIAPGALQFTTNLLRGDFRDSEARLRAVLRAAQVEGFLDRGRLAEIWAALHPAGEAGLGPA |
| 4169 | LPRFNRIVQRVDGTGAIAELPCAVNQFDMANPAIHCRYVVTKLLYERGFRAWVAMATTDQINAWIKS |
| | AEDRTQKAKDEIHGHPEDKARMVGALRLRDGQGIMDFLSELTALTATEFRVQAGYEPNRAAAQEQAE |
| | YLFHLQCDVLALAFKEYIRAARLGWLSDTLKPDRVARGVLSDVDKLADPKATPDFEDWQAGIYAVLH |
| | LVPVDEVGRLLHQLRRWANGQPADETSVKIERLLELYLDMHDDKFEGGVPLHDHPDLQALFETPDLL |
| | AQVLPQVGATEDERRRVPLRGLREMLRFGNLRILKGVFAKAPITTAGVAKLAEYKKSRADGLGGIDHA |
| | QQIRQKRHETLAKLRMLGPDSYGDVRDYLFVTKRIIRHRRLANHVRLVNHVRVNQILMSVLGRFADC |
| | AGLFERDLYFTLLALIHELGQKPEAVFDAKALGKFEDGQILTALDRNKTPLPASIACELQRHFGLDAKG |
| | AGPNRKRRNDFAHFNLLRSKTPINLTAAMNDARALLSHDRKLKNAVSASIVTLLEREQIVAHWNMGT |
| | DHQLADAVIGTRPIVHLKSAELAENLRDKRFLTLIAQLFNGRVNNLPDDIAALDRPGIEALAARVTGGG |
| | GR |
| IMG_ | VAWINQHWPDDTTKSRYWTSDGQTEIKRHEIFVRIWRSALAHANRTLADWLDPDGKATDIAEGGNTF |
| 3300025017 | EQVLAATGQATVVQTANLFGSRAAALESHEAIQDLARLVWTVYTQLRHNSFHFKGVDGFKVALTPKL |
| SEQ ID NO: | AEIAPGALQFTTNLLRGDFRDSEARLRAVLRAAQVEGFLDRGRLAEIWAALHPAGEAGLGPALPRFNRI |
| 4170 | VQRVDGTGAIAELPCAVNQFDMANPAIHCRYVVTKLLYERGFRAWVAMATTDQINAWIKSAEDRTQ |
| | KAKDEIHGHPEDKARMVGALRLRDGQGIMDFLSELTALTATEFRVQAGYEPNRAAAQEQAEYLFHLQ |
| | CDVLALAFKEYIRAARLGWLSDTLKPDRVARGVLSDVDKLADPKATPDFEDWQAGIYAVLHLVPVDE |
| | VGRLLHQLRRWANGQPADETSVKIERLLELYLDMHDDKFEGGVPLHDHPDLQALFETPDLLAQVLPQ |
| | VGATEDERRRVPLRGLREMLRFGNLRILKGVFAKAPITTAGVAKLAEYEKSRADGLGGIDHAQQIRQK |
| | RHETLAKLRMLGPDSYGDVRDYLFVTKRIIRHRRLANHVRLVNHVRVNQILMSVLGRFADCAGLFER |
| | DLYFTLLALIHELGQKPEAVFDAKALGKFEDGQILTALDRNKTPLPASIACELQRHFGLDAKGAGPNRK |
| | RRNDFAHFNLLRSKTPINLTAAMNDARALLSHDRKLKNAVSASIVTLLEREQIVAHWNMGTDHQLAD |
| | AVIGTRPIVHLKSAELAENLRDKRFLTLIAQLFNGRVNNLPDDIAALDRPGIEALAARVTGGGGR |
| IMG_ | VAWINQHWPDDTTKSRYWTSDGQTEIKRHEIFVRIWRSALAHANRTLADWLDPDGKATDIAEGGNTF |
| 3300025835 | EQVLAATGQATVVQTANLFGSRAAALESHEAIQDLARLVWTVYTQLRHNSFHFKGVDGFKVALTPKL |
| SEQ ID NO: | AEIAPGALQFTTNLLRGDFRDSEARLRAVLRAAQVEGFLDRGRLAEIWAALHPAGEAGLGPALPRFNRI |
| 4171 | VQRVDGTGAIAELPCAVNQFDMANPAIHCRYVVTKLLYERGFRAWVAMATTDQINAWIKSAEDRTQ |
| | KAKDEIHGHPEDKARMVGALRLRDGQGIMDFLSELTALTATEFRVQAGYEPNRAAAQEQAEYLFHLQ |
| | CDVLALAFKEYIRAARLGWLSDTLKPDRVARGVLSDVDKLADPKATPDFEDWQAGIYAVLHLVPVDE |
| | VGRLLHQLRRWANGQPADETSVKIERLLELYLDMHDDKFEGGVPLHDHPDLQALFETPDLLAQVLPQ |
| | VGATEDERRRVPLRGLREMLRFGNLRILKGVFAKAPITTAGVAKLAEYEKSRADGLGGIDHAQQIRQK |
| | RHETLAKLRMLGPDSYGDVRDYLFVTKRIIRHRRLANHVRLVNHVRVNQILMSVLGRFADCAGLFER |
| | DLYFTLLALIHELGQKPEAVFDAKALGKFEDGQILTALDRNKTPLPASIACELQRHFGLDAKGAGPNRK |
| | RRNDFAHFNLLRSKTPINLTAAMNDARALLSHDRKLKNAVSASIVTLLEREQIVAHWNMGTDHQLAD |
| | AVIGTRPIVHLKSAELAENLRDKRFLTLIAQLFNGRVNNLPDDIAALDRPGIEALAARVTGGGGR |
| IMG_ | VAWINQHWPDDTTKSRYWTSDGQTEIKRHEIFVRIWRSALAHANRTLADWLDPDGKATDIAEGGNTF |
| 3300025825 | EQVLAATGQATVVQTANLFGSRAAALESHEAIQDLARLVWTVYTQLRHNSFHFKGVDGFKVALTPKL |
| SEQ ID NO: | AEIAPGALQFTTNLLRGDFRDSEARLRAVLRAAQVEGFLDRGRLAEIWAALHPAGEAGLGPALPRFNRI |
| 4172 | VQRVDGTGAIAELPCAVNQFDMANPAIHCRYVVTKLLYERGFRAWVAMATTDQINAWIKSAEDRTQ |
| | KAKDEIHGHPEDKARMVGALRLRDGQGIMDFLSELTALTATEFRVQAGYEPNRAAAQEQAEYLFHLQ |
| | CDVLALAFKEYIRAARLGWLSDTLKPDRVARGVLSDVDKLADPKATPDFEDWQAGIYAVLHLVPVDE |
| | VGRLLHQLRRWANGQPADETSVKIERLLELYLDMHDDKFEGGVPLHDHPDLQALFETPDLLAQVLPQ |
| | VGATEDERRRVPLRGLREMLRFGNLRILKGVFAKAPITTAGVAKLAEYEKSRADGLGGIDHAQQIRQK |
| | RHETLAKLRMLGPDSYGDVRDYLFVTKRIIRHRRLANHVRLVNHVRVNQILMSVLGRFADCAGLFER |
| | DLYFTLLALIHELGQKPEAVFDAKALGKFEDGQILTALDRNKTPLPASIACELQRHFGLDAKGAGPNRK |
| | RRNDFAHFNLLRSKTPINLTAAMNDARALLSHDRKLKNAVSASIVTLLEREQIVAHWNMGTDHQLAD |
| | AVIGTRPIVHLKSAELAENLRDKRFLTLIAQLFNGRVNNLPDDIAALDRPGIEALAARVTGGGGR |
| IMG_ | MATAVSIGKLIHYQGGIEAIGNKEDLVNSKFLTDAGLTEIKQNESFVRQWLELIAIANTTLSQLVDPDGK |
| 3300008225 | HEDIFAATSFDDALKGLNNISDFDSKFKLLFGENHRLYDDDTERQKLLRIIYDTISALRNASFHFKNIQGF |
| SEQ ID NO: | NKALEDNLSTKGRRQKGVVDKIIEYTKVHQQKQHELLIADLKAANVEDYLSQLQLDYLFEVVCKGER |
| 4173 | ELLDMPKFSKLLLRAGEIGEKIISPVNATAMEHPAYQCCFISLKMLYDQDFVNWLKKQSNKNIASWMD |
| | SAKTRATNAAKKIFRNGTNISSKMARLRNIVEDETLVEYFSFITAETANEFQVQQQKNRYQSNSASAKE |
| | QSNFVEQFKQDFLIYAFKGYIGDIKFGKLDQGEKLLKCNAKGSLLPENNRSDTGAEDIERPWLYLVLHL |
| | VPIEVVNRITLQIKKHSVLTNSTLDDTRAAYTDIHQAFSLYLGVHGAILGLQSLSNEPELQVFFEKESDF |
| | NNLFTDNGEGLVPVKGLRDILRFGNLEQLKKMFSDKKVASDDITNLKEYLEATGGKSKIARAQEKRIE |
| | LHKTLTELPKRLTKPRVKQTGIDTYEKNNNISISGSISEYRKDLKCIVSYRELKNKIYLYNVKQAHQLIM |
| | ATQARLLGYSQIRERDLYFVLLTQLMLRGVTLEKEKKKKDKDKLNALDTDTVLYEEEKKKLEKQIKPE |
| | RSLKDLVEKGLIFLALDQLSSSDKDLKAIHSEIEDMFVGVSPDSDNRNLRNRLAHFKDLGNKNLINITSQ |
| | INEVRKMMSYDRKLKNAVSKSMIDLFERYNLILSFKVQSHKLQLKNLKSKQITHLNNKGITENLLSDD |
| | YVSVIKRLLLTEQNPE |
| IMG_ | MRTKRKQYKIKTKNNRKIDDILSDKSNLRAIFNDLRSNTELQKHFKEKLAFCYPIFIKVKKEKMFDDIEK |
| 5330000407 | LIKLVEEARESVAYLRHRCFHYKDVTITEMLKALNNNTETDKTEDIDYSVAAEYFLRDINNLYDAFRE |
| SEQ ID NO: | QIRSSGIADYYPADIISGCFKKCGLQFVLYSPQNSLMPSFKNIYKRGSNLYKAYQEEKEQKDKEYKRHN |
| 4174 | TNIVQEESKELSWYIEVSDTEQGKTAYRNLLQLIYYHAFLPEVRENESLITVYFAKTKEWNRKVAETKA |
| | KKKNAGKTYKDKPIRAYRYEAIPDYVGERLDDYFKILQREQMAKAKDVNEGNAENNNYIQFIRDVVV |
| | WAFGAYLEERLEKYKKDLQSSHSQKDKKDVNDALKELFPDDKDKRQFFMKCKFTDVLINDVGENNQI |
| | TEMEDLETSKEQQNREIKRKDLLCFYLFLRLLDEREISGLKHQFVRYRCSLKERRLPDNRKDVDEEIVL |
| | LEELEELMELVSYTMPSVPELSGKAESGLDLVISKYFKDFFEKSALKNQDIMKLYYQSDNKTPVFRKY |
| | MALLMRSAPLQLYKDMFRNYYIITEKECQEYIKTSQDIDAFQCKLNELHKELEHVRLKTVEDKKGKIF |
| | YYLAGSDAERVKEYEDTLSKVVRYKRLQHKLTFESLYTIFKIHVDIAARMVGYTEDWERDMLFLFKSL |
| | EYNEKLNEGVVEKIFNNKDEKGHIVKKLKDNLNSEDKEKIGILCWHKEITDKNFVEIIWIRNPIAHLNHF |
| | MQTVKNPKRSLEKMINALCVLLSYDRKRQNSVTKTINDLLLNEYHVKIKWKRWVDKNCNIYPELFMR |
| | VKNHRFTHEIITTVHFRG |
| IMG_ | MMPSFKNVFIRGCNITKGNFNLKECEWFKDKDTYNKDAYLAYKNLLQLIYYHSFLPSVSSDETIITKYI |
| 3300011885 | NKTKAWNQKIAIAKQKGKINKYQYKYNDMPNYQIGIKLSDYLSNLQRLQSIRENDDNIAEKGNYYTDF |
| SEQ ID NO: | VKDVFVFAFNGYLQSKIPNLCGTVKSPCKHNSKTILDDLFVDANLSLKMKTGHNKLSEFAGMYLFLKL |
| 4175 | LDQRELNKLLHQFIRYRTSTNKINEDLSKVEELIALVQFTLPPPTTDENYNENLEDYFSKFIDGNYMTDY |
| | VDLYSQEDKKTPILQRSISLIGRSGAMALYTDIFTQQVKSYTVTKSDYDKYYEYNFGHSSELSVIEKKQ |
| | NELQTLHKDIVTAKKDADIKEKVSKYETLVKEVQEYNQCRQKVTFETLYKVHQIHIDILGRFASFAED |
| | WERDMFFMLAALKRLGKTSLDVNKVFEEGGVVGKLSDALKTSKTLFCNLCWADDSVNERDIKFKIRV |
| | RNILAHLNHMTQYNEKGNQPSIIDIINKLRILLAYDLKRQNAVTKSIQDLLLKDYKIKLVLEPVKTKEEL |
| | KIFKIKSLDSDYIVHLKNIDSANSKKGIAIKANNNFMIELIEKLLVFKY |
| IMG_ | MRVTKVKVKDAGKDKMVLIHRKTTGAQLVYSGQPVSNETNTILPDKKRDSFDLSILNKTIIKFETVRK |
| 3300028769_2 | QKLNIDQYKTLEKIIKYPKQELPTQIKAEEILPFLNHKFQEPVKYWKEGKEEKFNLTLLIVEAVKAQDKR |
| SEQ ID NO: | ILQPYHEWKEWYIKTKSDLLKKSIENNRIDLSDNLSKRKKALQAWETDFTTTGSIDLSHYHKVYMTDV |
| 4176 | LCKMLQEVKPLTDERGKINTNAYHRELKKALQTHQPAIFGTREAPNETNRLNNQLSIYHLEVVKYMEH |
| | YFPIKTSKRRNTADDIVHYLKAQTLKTTIEKQLVNAIRANIIQQGKTNHHELKADTSSSDLTKIKTNEAF |
| | VLNLIGACAFAANNIRNMVDNEQTLDVLGKREFIDSLTGTRISSQLYSFFFGESLSTSKAEKETQLWGN |
| | TWSGTTNTE |
| IMG_ | MRVTKVKVKDAGKDKMVLIHRKTTGAQLVYSGQPVSNETNTILPDKKRDSFDLSILNKTIIKFETVRK |
| 3300028864_2 | QKLNIDQYKTLEKIIKYPKQELPTQIKAEEILPFLNHKFQEPVKYWKEGKEEKFNLTLLIVEAVKAQDKR |
| SEQ ID NO: | ILQPYHEWKEWYIKTKSDLLKKSIENNRIDLSDNLSKRKKALQAWETDFTTTGSIDLSHYHKVYMTDV |
| 4177 | LCKMLQEVKPLTDERGKINTNAYHRELKKALQTHQPAIFGTREAPNETNRLNNQLSIYHLEVVKYMEH |
| | YFPIKTSKRRNTADDIVHYLKAQTLKTTIEKQLVNAIRANIIQQGKTNHHELKADTSSSDLTKIKTNEAF |
| | VLNLIGACAFAANNIRNMVDNEQTLDVLGKREFIDSLTGTRISSQLYSFFFGESLSTSKAEKETQLWGN |
| | TWSGTTNTE |
| IMG_ | MRVTKVKVKDAGKDKMVLIHRKTTGAQLVYSGQPVSNETNTILPDKKRDSFDLSILNKTIIKFETVRK |
| 3300030002 | QKLNIDQYKTLEKIIKYPKQELPTQIKAEEILPFLNHKFQEPVKYWKEGKEEKFNLTLLIVEAVKAQDKR |
| SEQ ID NO: | ILQPYHEWKEWYIKTKSDLLKKSIENNRIDLSDNLSKRKKALQAWETDFTTTGSIDLSHYHKVYMTDV |
| 4178 | LCKMLQEVKPLTDERGKINTNAYHRELKKALQTHQPAIFGTREAPNETNRLNNQLSIYHLEVVKYMEH |
| | YFPIKTSKRRNTADDIVHYLKAQTLKTTIEKQLVNAIRANIIQQGKTNHHELKADTSSSDLTKIKTNEAF |
| | VLNLIGACAFAANNIRNMVDNEQTLDVLGKREFIDSLTGTRISSQLYSFFFGESLSTSKAEKETQLWGN |
| | TWSGTTNTE |
| IMG_ | MRVTKVKVKDAGKDKMVLIHRKTTGAQLVYSGQPVSNETNTILPDKKRDSFDLSILNKTIIKFETVRK |
| 3300031722 2 | QKLNIDQYKTLEKIIKYPKQELPTQIKAEEILPFLNHKFQEPVKYWKEGKEEKFNLTLLIVEAVKAQDKR |
| SEQ ID NO: | ILQPYHEWKEWYIKTKSDLLKKSIENNRIDLSDNLSKRKKALQAWETDFTTTGSIDLSHYHKVYMTDV |
| 4179 | LCKMLQEVKPLTDERGKINTNAYHRELKKALQTHQPAIFGTREAPNETNRLNNQLSIYHLEVVKYMEH |
| | YFPIKTSKRRNTADDIVHYLKAQTLKTTIEKQLVNAIRANIIQQGKTNHHELKADTSSSDLTKIKTNEAF |
| | VLNLIGACAFAANNIRNMVDNEQTLDVLGKREFIDSLTGTRISSQLYSFFFGESLSTSKAEKETQLWGN |
| | TWSGTTNTE |
| UOPF01.1 | MKVSKVKVKVGAGRSSERMVFMRRTSKIGSLVYEDEQRNGKPETDDKTTSILPDKKRDSFILSIVNKTI |
| SEQ ID NO: | PKKEIVKKNLGKGFVNEYYNAIAGIIDSFLEKKIVDRKHYIIVNKLTEEEIKQYLNHRFQEANYKYVRD |
| 4180 | KEEVNFNLPKLLKESAKSNSTAPLQPYKEWAEWHIETKSVRLIRSIQNNRLVIDTQEEAENMSPRKRAL |
| | LKWENEFLLSHKLDLQDVEKTYLIDDLIHALHEVTYTTNDKGFINGNEYHRFLKKALQSHQQNIFGSRE |
| | TPNKVNRENAELYSYNMEVVKYLEHYFPIKKTNRRNTLDTKDYYLNGINIKDRVRKQLENAVRNNLV |
| | RQGKYTLHTLTTDTANSDNLSKIKADEGFALTMLNQCAFAANNVRNIIDPTQVEDILLDRPFNESLEKF |
| | NSAQMLHLSSFFDVKEFNEPLRAIRDAVAKIRHNIIHYKVNALNVIFKIETFGSTEKQYKDTIFGSLLQA |
| | DMMNVSESLAKQLMTGNVLEYYPMLELKSFFSKNSISLYRSVIPFAPGFKRVMKKGENYQNANNKDD |
| | KSKYYNLKIESFLPQESFTKEAYDARYFLLKLIYNNIFLPKFTESTDWFKSTVNGVIALNREENVRKGKK |
| | HKIAFAEIRLMDSRDTIGTYAA |
| JMBX01.1 | LSAESSEKLFGKRAEGYDINRADNQLYVYNTEVVKYMEHYFPVKSSKRRNSTAEIKYYLQTDTIKCCL |
| SEQ ID NO: | HHQIINAVRGLALREGKFNLHGFDDKLIPNERNVSSSILNELKTSEGFVLNMLGGCAFAANCLRNIVDA |
| 4181 | TQRSDLLGFRCFEVSLKKGKSNSDLFALFFGFGREDMDDDSEWEKHLYAARYSVSEIRNRVAHYHKS |
| | AIENIYNITDFKYRENSMCSYTDTKFTTALQNEIYNTPKALSLQLMTGKVLEYYPKEKLVSFFQKYKFS |
| | LYRSVVPFAPGFKNIMRTGVNYQNATQNSLFL |
| IMG_ | MRVSKVKVDKEMVLMHRNNKEGALIIGNSTDNKTNYILPKKKKENFYKSIINKTLVKDIKFIDEYKKT |
| 3300014204 | RTKPRDRDIELTLTNLIEKNNAHPLKNKDIETINKNLRGKFNKYLSYNGNEPFNLAELIYEYSTKNDIKIP |
| SEQ ID NO: | QPYKDWVEWYIETKSKFLIKSIENNRIVIENGEEKLSKRKKVLIGFEEKLKEKGEIDLSDVANKFNITSLV |
| 4182 | KEISPKVEEYIEKDKKRTYKDKNNNKLERELNFAIKDTLQEHQKGIFGTRENPKERDNDKLSIYNLEVV |
| | KYIEHYFPIKKSQRTYNIGSIKHHISEETIKSTIQHQIENAVRLNMIHLGKSIHHEYKNSISSTDLSNTKRQ |
| | EAFVLNMIGACAFATNNIRNIIDSEQGEDILVRKAFTDSLNKGKVDYNLLKLFLGKGSNSNEETLWALR |
| | GSIRGIRNNVIHYKKDAIEKIFKIEVFENPINGNDQNETPYSKSIFGKYLQEDISKLSGLFANQLMTGGVL |
| | SYYSIDDLKAILDKIEFNLCRSSIPFTPSFKKVFKGGRDYQEKKPSLNLNNYITKEKNHETEEEYQARYFL |
| | LKLLYNNIFIPSFEGNYFREAAKYVLEENKNNAL |
| GCA_900114365. | MKVSKVKVSVGNNEKQMMTMFRNSNKGALVYWDDKSRDDQTERIIPGQKMENFALSILNQTLVKKG |
| 1_IMGtaxon_ | VFLSMLRMGTSGKVASKHANGTEMRVTHKEKEKAGKAYESIRALLAFVLSSDFGSREFKKNVPKEIER |
| 2651870357_ | SLLDCMITKKFREEIYLMDEKTGEKRRLTDLILEALSSGDVLILTPYVKWRDDFVALKSSFLRRSIHNNR |
| annotated_ | ITVANGGSKRMSVLEAWSEALISPEKDQTEKNKVQGFSKINAISEVPTRYNIDLLIKNLNKVEMGEFKD |
| assembly_ | NGTLKRGHEFHKRLKVCLQTHQKTIFGTRDNPNLTNRGDNELYCYNLEVVKYLNHFFPINVPSAKRLT |
| genomic | KDRILYYLNEKTMKRTIEAQLHNALRANLIRNGKLRWHDLLGRDDITNKDLITLKMDEGFLLSIIDACA |
| SEQ ID NO: | FAGNNVRNIIDRYQTGDIIYKDILKKSIEKGVSDGPLFGLFFNIEDSQPILTKDLWALRGAVQKIRNDIFH |
| 4183 | YMFNLPNNDGGMHDDRSATKVKTILNVTEFEYDGDNKTDKSSR |
| GCA_000525995. | LSCRLSSRSNPSIDATNPDWAKLFETLKPYTDWVESYIHFKQTTIQKSIEQNKIQSAHSPRKLVLHKYAT |
| 1_PRIP_ | AFLEGRVMGYESLAAKYQLADLAESFKVVDLNKNKNANYEIKKILQQHQRNILGELKTDPELNQYGIE |
| MIRA_assembly_ | VKKYIERYFPIKSKPKRNKHSRADFLKKELIESTVKQQFKNAVYHYVLEQGKLEAYNLTSPKTKDLQNI |
| genomic | RAGEAFSFKFINACAFASNNLKTILNPECEEDILGKNCFIQNLPDSTARPNVVQKMIPFFSDEIQNVNFDE |
| SEQ ID NO: | AIWAIRGSIQKIRNEVYHCKKHAWEKNTQNKRL |
| 4184 | |
| UPBG01.1 | MENNSEKKKYLKTLVGDNVYLSPISLDDVEEYTEMVNNIEVSVGLGCVVYTNIMDFESEKELLNSIKK |
| SEQ ID NO: | EKIFGVRLLENDELLGNVGFKSIGEIHRTAEMGIMLGNPKYQRKGYGMEAINLLLDYGFSFLNLRNISL |
| 4185 | NVFEYNEVAYNLYKKIDISKVTKNDKNIFQVSSLEGKLNVKIPYPVVTENKKQKSYNEETVKFLDEFIK |
| | AEVKAGLPSAQIAVTKDGNLELLSSYGYVNNYKQDGTELKDKVKVTDNTVYDLASNTKMYATNYAI |
| | MKLVSEKKLNLDDYVHKFYPEFKGNGKEKIQISDLLKHQAGFPPDPQYFNDKYDKDDGIPNGKNDLY |
| | AIGKEKVKNAIMKTPLAYEPKTSTKYSDVDYMLLGLIIEKVTSQDLDTYMKENFYNKLNLKRTMFNPL |
| | KNGVSKNETAATELNGNTRDNTIDFINARKYTIQGEVHDEKAYYSMQGVSGHAGLFSNAYEVAKLAQ |
| | VIINEGGYDNVKFFDKTTLDNFIKPKDINASYGLGWRRQGDFIYRWAFSGLASRETVGHTGWTGTLTVI |
| | EPSQNLVIVLLTNAKNSRVIDPSKKPNDFYGNHYYTTNYGVISSIIIDAFSNMNSKKDTNLRMNSILEDM |
| | IKGKFNLIKTDSDYKNSADIRDTVELINLLNLDNNRVTEDFELEADEIGKFLDFNGDKVKDRKELKKFD |
| | TKKIYFDGENIIKHRAFYNIKKYGMLNLLEKIADKAKYKISIEELRKVRT |
| UPGJ01.1 | MLGYYIAILWGVILFIIFPCYPLNKWVLHNKWNHSDWATFLGGFLGAFITLFGVWWQVTKTQKQKEK |
| SEQ ID NO: | DEMKNHLLGLKYNLEKNIKKFDYLYKNIIIFSYTLRSFYDRIDKGFFEEIDSNGVFIDTKIFNLNFTNDIL |
| 4186 | DLKNAIIDAKIAENDEAYIKNYIFESNEEKLKKRLFCEELIDKEDIRKIFEDKNFKFKNFIKKTENENFTIN |
| | FDNLFNLECNSELNVKKVIGQNSQRLNLFIKNTIDEYKSKIKTSFSSEFLEKYKGIIDNLIENENKFEKIYY |
| | PEEHKNELYIYKKNLFLNIGNPNFDKIYGLISNDIKEADAKFLFDSDGEDIRNNKISEIDAILKNLNDKLN |
| | GYSKEYKEKYIKKLKENNDFFKKNIQNENYNSFEEFKEDYNKVSEYKRIRDLVEFNYLNKIESYLIDIN |
| | WKLAIQMARFERDMHYIVNGLDYLYIIRLEKNRNQDRSSPYPKYKNGVLDYTKSYYNFKDYQEFMDI |
| | CSKFGIDLSENSEINKPENESIRNYISHFYIVRNPFVDYSIAEQIDRVSNLLSYSTRYNNSTYASVFEVFKK |
| | DVNLDYDKLKKKFKLIGNNDILKRLMKPKKVSVLELESYNSNYVKNLIIKLLTKIENTNDTL |
| IMG_ | MEMRRLEWEIYLDIKDGMKFLKIKRKVKVKRNYDGNKYILNINENNNKEKIDNNKFIRKYINYKKND |
| 3300008155 | NILKEFTRKFHAGNILFKLKGKEGIIRIENNDDFLETEEVVLYIEAYGKSEKLKALGITKKKIIDEAIRQGI |
| SEQ ID NO: | TKDDKKIEIKRQENEEEIEIDIRDEYTNKTLNDCSIILRIIENDELETKKSIYEIFKNINMSLYKIIEKIIENET |
| 4187 | EKVFENRYYEEHLREKLLKDDKIDVILTNFMEIREKIESNLEIMGFVKFYLNVGGDKKKSENKKILVEKI |
| | LNINVDLTVEDIADFVIKELEFWNITKRIEKVKKVNNEFLEKRRNRTYIKSYVLLDKHEKFKIERENKKD |
| | KIVKFFVENIKNNSIKEKIEKILAEFKIDELIICKLEKELKKGNCDTEIFGIFKKHYKVNFDSKKFSKKSDEE |
| | KELYKIIYRYLKGRIEKILISEEKVRLKKMKKIEIEKILNKSILSKKVLKRVKQYTLEHVMYLGKLVHNDI |
| | DMTTVNTNDFSMLHAKEELDLELIT |
| IMG_ | LFLWIIEEIIYEIIKLYKDLKEEIIMGNLFGYKRWYEVRDKEDYKIKRKVKVKRNYDGNKYILNINENNN |
| 3300014038 | KEKIDDNKFIREFVNYKKNDNVLREFKRKFHAGNILFKLKGKERIKRIENDDDFLETEEVVLYIEVYGK |
| SEQ ID NO: | SEKLKALGITKKKIIDEAIRQGITKDDKKIEIKRQKIEINIRDKYTNKTVDDCSVILRIIENDELETKKSIYEI |
| 4188 | FKNINMNLYKIIEKIIVNKTEKVFENRYYEEHLREKLLKDDKTEVILTNFMEIREKIKSNLEIMGFVKFYL |
| | NVGGDKKKSENKKIFVEKILNINVDLTVEDIVDFIVKELKFWNITKRIEKVKEFNNKFLENKRNRTYIKS |
| | YVLLDKHEKFKIERENKKDKIVKFFVENIKNNSIKEKIEKILAEFKIDELTKKLEKELKKGNCDTEIFGIF |
| | KKHYKVNFDSKKFSNKSDEEKELYKIIYRYLKGRIEKILINGEKVRLKKMEKIEIEKILNESILSEKILKRI |
| | KQYTLEHIMYLGKLVHNKINMATVNTNDFFRLHAKEELDLELITFFASTNMELNKIFSRENINNDENID |
| | FFGGDREKNYVIDKKNLNSKIKIIRDLDFIDNKNNITNDFINKFTKIGTNERNRILHASGKKRDSQGTQD |
| | DYNKVINIIQNLKISDEEVSKALNLDVVFKDKKNIITEINDIKISEENSNDIKYLPSFSKVLPEILNLYRNNP |
| | KNKPFDTIETEKIVLNALIYVNKELYKKLILEDDLKKNRSENIFLQELKKTLGNIDETDENIIENYYKNAQ |
| | ISASKGNNKVIKKYQKKVIECYIGY |
| UPBN01.1 | MGNLFGHKRWYEVRDKEDYKIRRKVKVKRNYDGNKYILNINENNNKEKIDNNKFIREFVNYKKNDN |
| SEQ ID NO: | VLREYKRKFHAGNILFKLKGKEKIKRIENNDDFLETEEVVLYIEVYGKSEKLKALGITKKKIIDEAIRQRI |
| 4189 | TKDDKKIEIKRQENKKKIEINIRDKCTNKTVDDCSVILRIIENDELETKKSIYEIFKNINMNLYKIIEKIIEN |
| | EAEKVFENRYYKEYLKEKLLEDNQINIILTNFMKIREKIESNPEIMGFVKFYFNVGGDKKKSENKKMFV |
| | EKILNINVDLTVEDIVDFIIGELKFYGIIKRIEKLQEKTVNRTDEDVKNTYKNT |
| IMG_ | MGNLFGYKRWYEVSDRGDNKIKRKVKIKRNYDGNKYILNINENNNKEKIENNEFIREFVNYKKNDNV |
| 3300007320 | LREFKRKFHAGNILFKLKGNKRSIGDSNDFLKTEEIILDKEVYGQSEKLRNEKGITKQDILKEIIDKGIDK |
| SEQ ID NO: | SNDKILVKTKLGKEITINFTDEDKKNKKEYQITLKIIPENELKIKREVYNVFKIINMNLYQIIKGIIENKEIF |
| 4190 | KNRYYDEILKEKLSKNNQIINTLTNLNKIRKEIRDNRDNIIGFVKFYLNVSGDKKKSENKKMFVEKILNI |
| | NVDLTVEDIVDFIVKELKFWNI |
| UPVO01.1 | MGNLFGYKKWYKVDKTIEKDGKTNTIKKEVRIKRNYLTDRYILNTNNKDKNNINNGDFVDQFIEYKT |
| SEQ ID NO: | KNDAFKKFTKKFHMGNILFKLKGNKRSIEDTNGFLKTEEIILDKEVYGQSEKLRNEKGITKQDILKEIID |
| 4191 | KGIDKSNDKILVKTKFGKEITINFTDEDKKNKNEYQITLKIIPENELKIKREVYNVFKIINMNLYQIIKGIIE |
| | NKEIFKNRYYDEILKEKLSKNNQIINTLTNLNKIRKEIRDNRDNIIGFVKFYLNVSGDKKKSENKKMFVE |
| | KILNTNVDLTVEDIVDFIVKELKFWNITKRIEKVKEFNNEFLENRRNRTYIKSYVLLDKHEKFKRDREN |
| | KKDIIVKSFIKDIKNNTMEQKINQILRKFKIKELTKKLDEAGIAYGIYYPVPLHLQKVYKNLGYKEGTLP |
| | NAEYLSKRTIAIPVDPELTEEEKEYIVDFLNNLDL |
| OEAE01.1 | LFLWIIEEVIYEIIKLYKNLKEEIIMGNLFGYKRWYEVRDKEDYKIKRKVKVKRNYDGNKYILNINENN |
| SEQ ID NO: | NKEKIDDNKFIREFVNYKKNDNVLIEFKRKFHAGNILFKLKGNKRSIEDSNGFLETGEIILDKEVYGQSE |
| 4192 | KLRNEKGITKQDILKEIIDKGIDKSNDKILVKTKFGKEITINFTDEDKKNKNEYQITLKIIPENELKIKREV |
| | YDVFKMINMDLYQIIKEIIENEVEKVFKNRYYEEHLKEKLLEDNQINVILTNFMKIREKIKSNPEIMGFIK |
| | FYLNVDGDKKKSENKKMFVEKILNINVDLTEEDIVDFIVKELKFWNITKRIEKLQEKKADRTDEDIKKT |
| | YINTYISLDKHEKFKKYDRNKKDTIVKSFIKDIKDNTMKQKINQILRKFKIEELIDKLRIENKNFDTEIFRI |
| | FKDHYQEIFSSEKFEEKSDEEKELYKIIYRYLKGRIEKILINEEKIKTKELKINKILDEKKLSEKVLKRVKQ |
| | YTLEHIMYLGKLRHNDIVKITVNTDDFSRLHAKEELDLELITFFASINMELNKIFEINKEKNDF |
| UPJQ01.1 | LFLWIIEEVIYEIIKLYKNLKEEIIMGNLFGYKKWYKVDKIIKDKKGKESTIKQEVRIKRNYTVDRYTLNT |
| SEQ ID NO: | NNKEKNNINNEDFVNQFIEYKTNNDIFRKFTRKFHAGNILFKLKGNKRSIEDSNGFLKTEEIILDKEVYG |
| 4193 | QSEKLRNEKGITKQDILKEIIDKGIDKSNDKILVKTKFGKEITINFTDEDKKNKNEYQITLKIIPENELKIK |
| | REVYNIFKIINMNLYQIIKEIIENEVQKVFKNRYYEEYLKEKLLEDNQINVILTNFMEIREKIKSNLEIMGF |
| | VKFYLNVGGDKKKSENKKMFVEKILNINVDLTVEDIVDFIVKELKFWNITKRIEKVKEFNNKSLENRRN |
| | RTYIKSYVLLDKHEKFK |
| OECA01.1 | MGNLFGYKKWYKVDKIIKDKKGKKSTIKQEVRIKRNYLTNRYILNTNNKDKNNINNEDFVDQFIEYKT |
| SEQ ID NO: | KNDIFEKFTRKFHMGNILFKLKGNKRSIEDSNDFLKTEEVVLDKEIYGQSEKLRNEKGITKQGILKEIIDK |
| 4194 | GINESNDSILIKTKFGKEIKINFTDESKKNKNEYQITLKVIPENELKIKREVYDVFKMINMDLYQIIKEIIEN |
| | EVQKVFKNRYYEEYLREKLLEDNQINVILTNFMKIREKTKSNSEIMGFVKFYLNVGGDKKKSENKKMF |
| | VEKILNINVDLTEEDIVDFIVKELKFYGIIKRIEKLQEKKADRTDKDIKKTYINTYVSLDKHEKFKKYNR |
| | NKKDTIVKSFIKDIKDNTMKQKINQILRKFKIEELINKLRIENKNFDTEIFRIFKEHYQEIFNSEKFEEKSDE |
| | EKELYKIIYRYLKGRIEKILINEQKVRLKKMEKIEVEKILNESILSEKILKRVKQYTLEHVMYLGKLVHN |
| | DIDRSIVNTNDFSRLHAKEELDLELITFFASTNMELNKIFSRENINNDENIDFFGGDREKNYVLDKKNLN |
| | SKIEIIRDLDFIDNKNSITNNFISKFTKIGTNERNRILHASSKERDLQGTQDDYNKVINIIQNLKISDEEVSK |
| | ALNLDVVFKDKKNIITKINDIEISEENNSIIKYLPSFSKVLPEILNLYKNKNKNNPFDTTETERIMLNALIY |
| | VNKELYKKLILEKNLEENESKNKFLKELKKNLGGTDEIDENIIESYYKNTQISASKGNNKAIKKYQKKII |
| | ECYIKYLEENYRELFDFSDFKMNIQEIKKQIKEINDNKTYKRITIKTSDKSIVINNDFEYIISIFALLNNNIFI |
| | NKIRNRFFSTSVWLNTSEYQNIIDILDEIMQLNTLRNECITENWNL |
| UPBH01.1 | LKGNKRSIEDSNDFLKTEEVVLDKEIYGQSEKLRNEKGITKKDILKEINKQKIDNSVKKISMNTNSGKTI |
| SEQ ID NO: | VINFSDKLKKDKDDYQITLNIISEDELERKRKIYDIFKMINMDLYQIIKEIIENEVQKVFKNRYYEEHLRE |
| 4195 | KLLKDDKIDVILTNFMKIREKIENNPEIMGFIKFYLNVGGDKKKSENKKIFVEKILNTNVDLTVEDVVDF |
| | IVKELKFWNITKRIEKVKEFNNKSLENKRNRTYIKSYVQLDKHEKFKIERENKKDKIVKLFVKDIHNNT |
| | MEEKINQILNKFKIKELIEKLKENTENKNFDTEIFGIFKTHYQNIFSSEKFSNKSDEEKELYKIIYRYLKGR |
| | IEKILINEEKVRLKKMEKIEIEKILNESILSEKILKRVKQYTLEHIMYLGKLIHNKINMATVNTNDFSRLHA |
| | KEELDLELITFFASTNMELNKIFNGKEKVTDFFGSNLNGQKITLKEKVPSFKLNILKKLNFINNENNIDEK |
| | LSHFYSFQKEGYLLRNKILHNSYGNIQETKNLEEKYKNVKNLIDELKVSDEEISKSLNLDVIFEGKNNIII |
| | EINKLQTGKYKDKKYLPSFSKIVPEIMRKFREINKDKSFDIESEKIILNAVQYVNKILYEKITSNEENEFIK |
| | TLPDKLVKKNNNKENKNSLSIEEYYKNAQVSSSK |
| UPFW01.1 | MGNLFGYKKWYKVDKTIEKDGKTNTVKKEVRIKRNYLTDRYILNTNNKDKNNINNGDFVDQFIEYKT |
| SEQ ID NO: | NNDIFRKFTRKFHMGNILFKLKAKESIKKAKESIKKIESYNNFLEKEKAILEIEIYQQSEKLIEEENITKKDI |
| 4196 | IDKAIKEKITEDSNEIKMQIKSKENKLKEIKISINKETEEYHIKLRSINNDELNLKREIYEILKSINANLYIIT |
| | KNAISNADFKKRNYENFLRENIMEHLKKNIGEKSKITFLKSLSNSLKKLQGNIKENDEIINFIKYYSNING |
| | CKTVSENKKNFLEKILNTEVSVSENDIIDFIIGELKFYGIIKRIEKLQEKTVNRTDKDIKNTYKNTYVLLD |
| | KHEKFKKYNRNPKDIIVKSFIKDIKDNTMEQKINQILRKFKIEELIKKLKMEDKNFDTEIFGIFKVHYQEI |
| | FSSEKFEKKSDEEKELYKHYRYLKGRIEKILVNEQKVRLKKMEKIEIEKILNESILSEKILKRVKQYTLEH |
| | IMYLGKLRHNDIVKITVNTDDFSRLHAKEELDLELITFFASTNMELNKIFEINKEKNDFFGDSFKINDTK |
| | VLLKNEVTSSKLYILKNLNFIDNENKVKKEEFISKFIT |
| UPLQ01.1 | MKDKLDMLNKNEAVTDLRFGIVSEKYEKGITSFDYERIKAEEELDRNIAAYVTFAADIFAKSVIKSDYR |
| SEQ ID NO: | TKKDNNSDVLQYSDKEFRNSEVIRDNAEKNILQYWGGYSRWGTENSKLPENNKVSDFGKLDVSDLCI |
| 4197 | DIKKHLAGIRNSSVHYTTKIKNESAADGSNVKILFEKDLADINIIYADKYYSNNVWMFYSLEDINKLIAF |
| | LYKEKRVIRQVQIPSFSRILKRKAMQDVINEIFKDDFDENIVNPELKEKYRNSLYFMLKEIYYNAFIIQPE |
| | LKEKFKDKIKTMKSELYNKLKTIDKKEYKALYCMLSNEESALKNFADRIYSVDGDNVSFADICKILMT |
| | DYNMQNQEKKNIESMEQKKKNKGKDENYKHFPLLLHKVLKELFIEYLKQTHELEFLRNNICIKSDVTM |
| | ESFESQIKGVEIYKDLKEKIDKNNSLLDWYVIAHFLMPKQLNHLIGNIKNYIQFATNIDKRAESVKNLTE |
| | SGMVKRIQYYDDIVRTLEFSAQYIGKISNNINDYFNSEDEYVSFLSKYVGFINDKSEDVLTELKDFCREK |
| | INNGSQIIGIYYGGDNVIINRNVIYAQMYSNAEVFSNIYKKVTKNDIINYYEKQNDLKDVFKSGVCQNE |
| | DEQRSLCEFQQLKNRIELTELSTYADMVNDFMAQFVEWAYLRERDLMYFQLGIHYIRLFYSDNVLDEK |
| | YHKLSDNVIDIEEGALLYQIVAMYDYELRIFETDNSGNAKRIGQGGPGKSIPVFLKKYCNVTDVYECGL |
| | ELFEDINQHEHIIRFRNDIAHMRYMSNQAMNIMSIVSNIYKSFFVYDTKLKKSISLVFKNILMRYGVIAD |
| | LVFSYNNKNQSIKDDMDINIINIKNLKSDKYVYKIVNEDIVKQVEIEIRNQVFLEQLHNLLYFSR |
| UPEL01.1 | MKDKLDMLNKNEAVTDLRFGIVSEKYEKGITSFDYERIKAEEELDRNIAAYVTFAADIFAKSVIKSDYR |
| SEQ ID NO: | TKKDNNSDVLQYSDKEFRNSEVIRDNAEKNILQYWGGYSRWGTENSKLPENNKVSDFGKLDVSDLCI |
| 4198 | DIKKHLAGIRNSSVHYTTKIKNESAADGSNVKILFEKDLADINIIYADKYYSNNVWMFYSLEDINKLIAF |
| | LYKEKRVIRQVQIPSFSRILKRKAMQDVINEIFKDDFDENIVNPELKEKYRNSLYFMLKEIYYNAFIIQPE |
| | LKEKFKDKIKTMKSELYNKLKTIDKKEYKALYCMLSNEESALKNFADRIYSVDGDNVSFADICKILMT |
| | DYNMQNQEKKNIESMEQKKKNKGKDENYKHFPLLLHKVLKELFIEYLKQTHELEFLRNNICIKSDVTM |
| | ESFESQIKGVEIYKDLKEKIDKNNSLLDWYVIAHFLMPKQLNHLIGNIKNYIQFATNIDKRAESVKNLTE |
| | SGMVKRIQYYDDIVRTLEFSAQYIGKISNNINDYFNSEDEYVSFLSKYVGFINDKSEDVLTELKDFCREK |
| | INNGSQIIGIYYGGDNVIINRNVIYAQMYSNAEVFSNIYKKVTKNDIINYYEKQNDLKDVFKSGVCQNE |
| | DEQRSLCEFQQLKNRIELTELSTYADMVNDFMAQFVEWAYLRERDLMYFQLGIHYIRLFYSDNVLDEK |
| | YHKLSDNVIDIEEGALLYQIVAMYDYELRIFETDNSGNAKRIGQGGPGKSIPVFLKKYCNVTDVYECGL |
| | ELFEDINQHEHIIRFRNDIAHMRYMSNQAMNIMSIVSNIYKSFFVYDTKLKKSISLVFKNILMRYGVIAD |
| | LVFSYNNKNQSIKDDMDINIINIKNLKSDKYVYKIVNEDIVKQVEIEIRNQVFLEQLHNLLYFSR |
| OVYE01.1 | MKDKLDMLNKNEAVTDLRFGIVSEKYEKGITSFDYERIKAEEELDRNIAAYVTFAADIFAKSVIKSDYR |
| SEQ ID NO: | TKKDNNSDVLQYSDKEFRNSEVIRDNAEKNILQYWGGYSRWGTENSKLPENNKVSDFGKLDVSDLCI |
| 4199 | DIKKHLAGIRNSSVHYTTKIKNESAADGSNVKILFEKDLADINIIYADKYYSNNVWMFYSLEDINKLIAF |
| | LYKEKRVIRQVQIPSFSRILKRKAMQDVINEIFKDDFDENIVNPELKEKYRNSLYFMLKEIYYNAFIIQPE |
| | LKEKFKDKIKTMKSELYNKLKTIDKKEYKALYCMLSNEESALKNFADRIYSVDGDNVSFADICKILMT |
| | DYNMQNQEKKNIESMEQKKKNKGKDENYKHFPLLLHKVLKELFIEYLKQTHELEFLRNNICIKSDVTM |
| | ESFESQIKGVEIYKDLKEKIDKNNSLLDWYVIAHFLMPKQLNHLIGNIKNYIQFATNIDKRAESVKNLTE |
| | SGMVKRIQYYDDIVRTLEFSAQYIGKISNNINDYFNSEDEYVSFLSKYVGFINDKSEDVLTELKDFCREK |
| | INNGSQIIGIYYGGDNVIINRNVIYAQMYSNAEVFSNIYKKVTKNDIINYYEKQNDLKDVFKSGVCQNE |
| | DEQRSLCEFQQLKNRIELTELSTYADMVNDFMAQFVEWAYLRERDLMYFQLGIHYIRLFYSDNVLDEK |
| | YHKLSDNVIDIEEGALLYQIVAMYDYELRIFETDNSGNAKRIGQGGPGKSIPVFLKKYCNVTDVYECGL |
| | ELFEDINQHEHIIRFRNDIAHMRYMSNQAMNIMSIVSNIYKSFFVYDTKLKKSISLVFKNILMRYGVIAD |
| | LVFSYNNKNQSIKDDMDINIINIKNLKSDKYVYKIVNEDIVKQVEIEIRNQVFLEQLHNLLYFSR |
| OOCS01.1 | MKDKLDMLNKNEAVTDLRFGIVSEKYEKGITSFDYERIKAEEELDRNIAAYVTFAADIFAKSVIKSDYR |
| SEQ ID NO: | TKKDNNSDVLQYSDKEFRNSEVIRDNAEKNILQYWGGYSRWGTENSKLPENNKVSDFGKLDVSDLCI |
| 4200 | DIKKHLAGIRNSSVHYTTKIKNESAADGSNVKILFEKDLADINIIYADKYYSNNVWMFYSLEDINKLIAF |
| | LYKEKRVIRQVQIPSFSRILKRKAMQDVINEIFKDDFDENIVNPELKEKYRNSLYFMLKEIYYNAFIIQPE |
| | LKEKFKDKIKTMKSELYNKLKTIDKKEYKALYCMLSNEESALKNFADRIYSVDGDNVSFADICKILMT |
| | DYNMQNQEKKNIESMEQKKKNKGKDENYKHFPLLLHKVLKELFIEYLKQTHELEFLRNNICIKSDVTM |
| | ESFESQIKGVEIYKDLKEKIDKNNSLLDWYVIAHFLMPKQLNHLIGNIKNYIQFATNIDKRAESVKNLTE |
| | SGMVKRIQYYDDIVRTLEFSAQYIGKISNNINDYFNSEDEYVSFLSKYVGFINDKSEDVLTELKDFCREK |
| | INNGSQIIGIYYGGDNVIINRNVIYAQMYSNAEVFSNIYKKVTKNDIINYYEKQNDLKDVFKSGVCQNE |
| | DEQRSLCEFQQLKNRIELTELSTYADMVNDFMAQFVEWAYLRERDLMYFQLGIHYIRLFYSDNVLDEK |
| | YHKLSDNVIDIEEGALLYQIVAMYDYELRIFETDNSGNAKRIGQGGPGKSIPVFLKKYCNVTDVYECGL |
| | ELFEDINQHEHIIRFRNDIAHMRYMSNQAMNIMSIVSNIYKSFFVYDTKLKKSISLVFKNILMRYGVIAD |
| | LVFSYNNKNQSIKDDMDINIINIKNLKSDKYVYKIVNEDIVKQVEIEIRNQVFLEQLHNLLYFSR |
| OLGD01.1 | MKDKLDMLNKNEAVTDLRFGIVSEKYEKGITSFDYERIKAEEELDRNIAAYVTFAADIFAKSVIKSDYR |
| SEQ ID NO: | TKKDNNSDVLQYSDKEFRNSEVIRDNAEKNILQYWGGYSRWGTENSKLPENNKVSDFGKLDVSDLCI |
| 4201 | DIKKHLAGIRNSSVHYTTKIKNESAADGSNVKILFEKDLADINIIYADKYYSNNVWMFYSLEDINKLIAF |
| | LYKEKRVIRQVQIPSFSRILKRKAMQDVINEIFKDDFDENIVNPELKEKYRNSLYFMLKEIYYNAFIIQPE |
| | LKEKFKDKIKTMKSELYNKLKTIDKKEYKALYCMLSNEESALKNFADRIYSVDGDNVSFADICKILMT |
| | DYNMQNQEKKNIESMEQKKKNKGKDENYKHFPLLLHKVLKELFIEYLKQTHELEFLRNNICIKSDVTM |
| | ESFESQIKGVEIYKDLKEKIDKNNSLLDWYVIAHFLMPKQLNHLIGNIKNYIQFATNIDKRAESVKNLTE |
| | SGMVKRIQYYDDIVRTLEFSAQYIGKISNNINDYFNSEDEYVSFLSKYVGFINDKSEDVLTELKDFCREK |
| | INNGSQIIGIYYGGDNVIINRNVIYAQMYSNAEVFSNIYKKVTKNDIINYYEKQNDLKDVFKSGVCQNE |
| | DEQRSLCEFQQLKNRIELTELSTYADMVNDFMAQFVEWAYLRERDLMYFQLGIHYIRLFYSDNVLDEK |
| | YHKLSDNVIDIEEGALLYQIVAMYDYELRIFETDNSGNAKRIGQGGPGKSIPVFLKKYCNVTDVYECGL |
| | ELFEDINQHEHIIRFRNDIAHMRYMSNQAMNIMSIVSNIYKSFFVYDTKLKKSISLVFKNILMRYGVIAD |
| | LVFSYNNKNQSIKDDMDINIINIKNLKSDKYVYKIVNEDIVKQVEIEIRNQVFLEQLHNLLYFSR |
| OVFU01.1 | MKDKLDMLNKNEAVTDLRFGIVSEKYEKGITSFDYERIKAEEELDRNIAAYVTFAADIFAKSVIKSDYR |
| SEQ ID NO: | TKKDNNSDVLQYSDKEFRNSEVIRDNAEKNILQYWGGYSRWGTENSKLPENNKVSDFGKLDVSDLCI |
| 4202 | DIKKHLAGIRNSSVHYTTKIKNESAADGSNVKILFEKDLADINIIYADKYYSNNVWMFYSLEDINKLIAF |
| | LYKEKRVIRQVQIPSFSRILKRKAMQDVINEIFKDDFDENIVNPELKEKYRNSLYFMLKEIYYNAFIIQPE |
| | LKEKFKDKIKTMKSELYNKLKTIDKKEYKALYCMLSNEESALKNFADRIYSVDGDNVSFADICKILMT |
| | DYNMQNQEKKNIESMEQKKKNKGKDENYKHFPLLLHKVLKELFIEYLKQTHELEFLRNNICIKSDVTM |
| | ESFESQIKGVEIYKDLKEKIDKNNSLLDWYVIAHFLMPKQLNHLIGNIKNYIQFATNIDKRAESVKNLTE |
| | SGMVKRIQYYDDIVRTLEFSAQYIGKISNNINDYFNSEDEYVSFLSKYVGFINDKSEDVLTELKDFCREK |
| | INNGSQIIGIYYGGDNVIINRNVIYAQMYSNAEVFSNIYKKVTKNDIINYYEKQNDLKDVFKSGVCQNE |
| | DEQRSLCEFQQLKNRIELTELSTYADMVNDFMAQFVEWAYLRERDLMYFQLGIHYIRLFYSDNVLDEK |
| | YHKLSDNVIDIEEGALLYQIVAMYDYELRIFETDNSGNAKRIGQGGPGKSIPVFLKKYCNVTDVYECGL |
| | ELFEDINQHEHIIRFRNDIAHMRYMSNQAMNIMSIVSNIYKSFFVYDTKLKKSISLVFKNILMRYGVIAD |
| | LVFSYNNKNQSIKDDMDINIINIKNLKSDKYVYKIVNEDIVKQVEIEIRNQVFLEQLHNLLYFSR |
| OLGB01.1 | MKDKLDMLNKNEAVTDLRFGIVSEKYEKGITSFDYERIKAEEELDRNIAAYVTFAADIFAKSVIKSDYR |
| SEQ ID NO: | TKKDNNSDVLQYSDKEFRNSEVIRDNAEKNILQYWGGYSRWGTENSKLPENNKVSDFGKLDVSDLCI |
| 4203 | DIKKHLAGIRNSSVHYTTKIKNESAADGSNVKILFEKDLADINIIYADKYYSNNVWMFYSLEDINKLIAF |
| | LYKEKRVIRQVQIPSFSRILKRKAMQDVINEIFKDDFDENIVNPELKEKYRNSLYFMLKEIYYNAFIIQPE |
| | LKEKFKDKIKTMKSELYNKLKTIDKKEYKALYCMLSNEESALKNFADRIYSVDGDNVSFADICKILMT |
| | DYNMQNQEKKNIESMEQKKKNKGKDENYKHFPLLLHKVLKELFIEYLKQTHELEFLRNNICIKSDVTM |
| | ESFESQIKGVEIYKDLKEKIDKNNSLLDWYVIAHFLMPKQLNHLIGNIKNYIQFATNIDKRAESVKNLTE |
| | SGMVKRIQYYDDIVRTLEFSAQYIGKISNNINDYFNSEDEYVSFLSKYVGFINDKSEDVLTELKDFCREK |
| | INNGSQIIGIYYGGDNVIINRNVIYAQMYSNAEVFSNIYKKVTKNDIINYYEKQNDLKDVFKSGVCQNE |
| | DEQRSLCEFQQLKNRIELTELSTYADMVNDFMAQFVEWAYLRERDLMYFQLGIHYIRLFYSDNVLDEK |
| | YHKLSDNVIDIEEGALLYQIVAMYDYELRIFETDNSGNAKRIGQGGPGKSIPVFLKKYCNVTDVYECGL |
| | ELFEDINQHEHIIRFRNDIAHMRYMSNQAMNIMSIVSNIYKSFFVYDTKLKKSISLVFKNILMRYGVIAD |
| | LVFSYNNKNQSIKDDMDINIINIKNLKSDKYVYKIVNEDIVKQVEIEIRNQVFLEQLHNLLYFSR |
| UPEO01.1 | MKDKLDMLNKNEAVTDLRFGIVSEKYEKGITSFDYERIKAEEELDRNIAAYVTFAADIFAKSVIKSDYR |
| SEQ ID NO: | TKKDNNSDVLQYSDKEFRNSEVIRDNAEKNILQYWGGYSRWGTENSKLPENNKVSDFGKLDVSDLCI |
| 4204 | DIKKHLAGIRNSSVHYTTKIKNESAADGSNVKILFEKDLADINIIYADKYYSNNVWMFYSLEDINKLIAF |
| | LYKEKRVIRQVQIPSFSRILKRKAMQDVINEIFKDDFDENIVNPELKEKYRNSLYFMLKEIYYNAFIIQPE |
| | LKEKFKDKIKTMKSELYNKLKTIDKKEYKALYCMLSNEESALKNFADRIYSVDGDNVSFADICKILMT |
| | DYNMQNQEKKNIESMEQKKKNKGKDENYKHFPLLLHKVLKELFIEYLKQTHELEFLRNNICIKSDVTM |
| | ESFESQIKGVEIYKDLKEKIDKNNSLLDWYVIAHFLMPKQLNHLIGNIKNYIQFATNIDKRAESVKNLTE |
| | SGMVKRIQYYDDIVRTLEFSAQYIGKISNNINDYFNSEDEYVSFLSKYVGFINDKSEDVLTELKDFCREK |
| | INNGSQIIGIYYGGDNVIINRNVIYAQMYSNAEVFSNIYKKVTKNDIINYYEKQNDLKDVFKSGVCQNE |
| | DEQRSLCEFQQLKNRIELTELSTYADMVNDFMAQFVEWAYLRERDLMYFQLGIHYIRLFYSDNVLDEK |
| | YHKLSDNVIDIEEGALLYQIVAMYDYELRIFETDNSGNAKRIGQGGPGKSIPVFLKKYCNVTDVYECGL |
| | ELFEDINQHEHIIRFRNDIAHMRYMSNQAMNIMSIVSNIYKSFFVYDTKLKKSISLVFKNILMRYGVIAD |
| | LVFSYNNKNQSIKDDMDINIINIKNLKSDKYVYKIVNEDIVKQVEIEIRNQVFLEQLHNLLYFSR |
| OPMQ01.1_ | MYSNAEVFSNIYKKVTKNDIINYYEKQNDLKDVFKSGVCQNEDEQRSLCEFQQLKNRIELTELSTYAD |
| 2 | MVNDFMAQFVEWAYLRERDLMYFQLGIHYIRLFYSDNVLDEKYHKLSDNVIDIEEGALLYQIVAMYD |
| SEQ ID NO: | YELRIFETDNSGNAKRIGQGGPGKSIPVFLKKYCNVTDVYECGLELFEDINQHEHIIRFRNDIAHMRYMS |
| 4205 | NQAMNIMSIVSNIYKSFFVYDTKLKKSISLVFKNILMRYGVIADLVFSYNNKNQSIKDDMDINIINIKNL |
| | KSDKYVYKIVNEDIVKQVEIEIRNQVFLEQLHNLLYFSR |
| UYCD01.1 | MKDKLDMLNKNEAVTDLRFGIVSEKYEKGITSFDYERIKAEEELDRNIAAYVTFAADIFAKSVIKSDYR |
| SEQ ID NO: | TKKDNNSDVLQYSDKEFRNSEVIRDNAEKNILQYWGGYSRWGTENSKLPENNKVSDFGKLDVSDLCI |
| 4206 | DIKKHLAGIRNSSVHYTTKIKNESAADGSNVKILFEKDLADINIIYADKYYSNNVWMFYSLEDINKLIAF |
| | LYKEKRVIRQVQIPSFSRILKRKAMQDVINEIFKDDFDENIVNPELKEKYRNSLYFMLKEIYYNAFIIQPE |
| | LKEKFKDKIKTMKSELYNKLKTIDKKEYKALYCMLSNEESALKNFADRIYSVDGDNVSFADICKILMT |
| | DYNMQNQEKKNIESMEQKKKNKGKDENYKHFPLLLHKVLKELFIEYLKQTHELEFLRNNICIKSDVTM |
| | ESFESQIKGVEIYKDLKEKIDKNNSLLDWYVIAHFLMPKQLNHLIGNIKNYIQFATNIDKRAESVKNLTE |
| | SGMVKRIQYYDDIVRTLEFSAQYIGKISNNINDYFNSEDEYVSFLSKYVGFINDKSEDVLTELKDFCREK |
| | INNGSQIIGIYYGGDNVIINRNVIYAQMYSNAEVFSNIYKKVTKNDIINYYEKQNDLKDVFKSGVCQNE |
| | DEQRSLCEFQQLKNRIELTELSTYADMVNDFMAQFVEWAYLRERDLMYCQLGIHYIRLFYSDNVLDE |
| | KYHKLSDNVIDIEEGALLYQIVAMYDYELRIFETDNSGNAKRIGQGGPGKSIPVFLKKYCNVTDVYECG |
| | LELFEDINQHEHIIRFRNDIAHMRYMSNQAMNIMSIVSNIYKSFFVYDTKLKKSISLVFKNILMRYGVIA |
| | DLVFSYNNKNQSIKDDMDINIINIKNLKSDKYVYKIVNEDIVKQVEIEIRNQVFLEQLHNLLYFSR |
| ORNQ01.1 | MPKQLNHLIGNIKNYIQFATNIDKRAESVKNLTESGMVKRIQYYDDIVRTLEFSAQYIGKISNNINDYFN |
| SEQ ID NO: | SEDEYVSFLSKYVGFINDKSEDVLTELKDFCREKINNGSQIIGIYYGGDNVIINRNVTYAQMYSNAEVFS |
| 4207 | NIYKKVTKNDIINYYEKQNDLKDVFKSGVCQNEDEQRSLCEFQQLKNRIELTELSTYADMVNDFMAQF |
| | VEWAYLRERDLMYFQLGIHYIRLFYSDNVLDEKYHKLSDNVIDIEEGALLYQIVAMYDYELRIFETDNS |
| | GNAKRIGQGGPGKSIPVFLKKYCNGTDVYECGLELFEDINQHEHIIRFRNDIAHMRYMSNQAMNIMSIV |
| | SNIYKSFFVYDTKLKKSISLVFKNILMRYGVIADLVFSYNNKNQSIKDDMDINIINIKNLKSDKYVYKIV |
| | NEDIVKQVEIEIRNQVFLEQLHNLLYFSR |
| ULRY01.1 | MKDKLDMLNKNEAVTDLRFGIVSEKYEKGITSFDYERIKAEEELDRNIAAYVTFAADIFAKSVIKSDYR |
| SEQ ID NO: | TKKDNNSDVLQYSDKEFRNSEVIRDNAEKNILQYWGGYSRWGTENSKLPENNKVSDFGKLDVSDLCI |
| 4208 | DIKKHLAGIRNSSVHYTTKIKNESAADGSNVKILFEKDLADINIIYADKYYSNNVWMFYSLEDINKLIAF |
| | LYKEKRVIRQVQIPSFSRILKRKAMQDVINEIFKDDFDENIVNPELKEKYRNSLYFMLKEIYYNAFIIQPE |
| | LKEKFKDKIKTMTSELYNKLKTIDKKEYKALYCMLSNEESALKNFADRIYSVDGDNVSFADICKILMT |
| | DYNMQNQEKKNIESMEQKKKNKGKDENYKHFPLLLHKVLKELFIEYLKQTHELEFLRNNICIKSDVTM |
| | ESFESQIKGVEIYKDLKEKIDKNNSLLDWYVIAHFLMPKQLNHLIGNIKNYIQFATNIDKRAESVKNLTE |
| | SGMVKKIQYYDDIVRTLEFSAQYIGKISNNINDYFNSEDEYVSFLSKYVGFINDKSEDVLTELKDFCREK |
| | INNGSQIIGIYYGGDNVIINRNVIYAQMYSNAEVFSNIYKKVTKNDIINYYEKQNDLKDVFKSGVCQNE |
| | GEQRSLCEFQQLKNRIELTELSTYADMVNDFMAQFVEWAYLRERDLMYFQLGIHYIRLFYSDNVLDEK |
| | YHKLSDNVIDIEEGALLYQIVAMYDYELRIFETDNSGNAKRIGQGGPGKSIPVFLKKYCNGTDVYECGL |
| | ELFEDINQHEHIIRFRNDIAHMRYMSNQAMNIMSIVSNIYKSFFVYDTKLKKSISLVFKNILMRYGVIAD |
| | FVFSYNNKNQSIKDDMDINIINIKNLKSDKYVYKIVNEDIVKQVEIEIRNQVFLEQLHNLLYFSR |
| ORQX01.1 | MKDKLDMLNKNEAVTDLRFGIVSEKYEKGITSFDYERIKAEEELDRNIAAYVTFAADIFAKSVIKSDYR |
| SEQ ID NO: | TKKDNNSDVLQYSDKEFRNSEVIRDNAEKNILQYWGGYSRWGTENSKLPENNKVSDFGKLDVSDLCI |
| 4209 | DIKKHLAGIRNSSVHYTTKIKNESAADGSNVKILFEKDLADINIIYADKYYSNNVWMFYSLEDINKLIAF |
| | LYKEKRVIRQVQIPSFSRILKRKAMQDVINEIFKDDFDENIVNPELKEKYRNSLYFMLKEIYYNAFIIQPE |
| | LKEKFKDKIKTMTSELYNKLKTIDKKEYKALYCMLSNEESALKNFADRIYSVDGDNVSFADICKILMT |
| | DYNMQNQEKKNIESMEQKKKNKGKDENYKHFPLLLHKVLKELFIEYLKQTHELEFLRNNICIKSDVTM |
| | ESFESQIKGVEIYKDLKEKIDKNNSLLDWYVIAHFLMPKQLNHLIGNIKNYIQFATNIDKRAESVKNLTE |
| | SGMVKKIQYYDDIVRTLEFSAQYIGKISNNINDYFNSEDEYVSFLSKYVGFINDKSEDVLTELKDFCREK |
| | INNGSQIIGIYYGGDNVIINRNVIYAQMYSNAEVFSNIYKKVTKNDIINYYEKQNDLKDVFKSGVCQNE |
| | GEQRSLCEFQQLKNRIELTELSTYADMVNDFMAQFVEWAYLRERDLMYFQLGIHYIRLFYSDNVLDEK |
| | YHKLSDNVIDIEEGALLYQIVAMYDYELRIFETDNSGNAKRIGQGGPGKSIPVFLKKYCNGTDVYECGL |
| | ELFEDINQHEHIIRFRNDIAHMRYMSNQAMNIMSIVSNIYKSFFVYDTKLKKSISLVFKNILMRYGVIAD |
| | FVFSYNNKNQSIKDDMDINIINIKNLKSDKYVYKIVNEDIVKQVEIEIRNQVFLEQLHNLLYFSR |
| OXAA01.1 | MKDKLDMLNKNEAITDLRFGIVSEKYEKGITSFDYERIKAEEELDRNIAAYVTFAADIFAKSVIKSDYRT |
| SEQ ID NO: | KKDNNSDVLQYSDKEFRNSEVIRDNAEKNILQYWGGYSRWGTENSKLPENNKVSDFGKLDVSDLCIDI |
| 4210 | KKHLAGIRNSSVHYTTKIKNESAADGSNVKILFEKDLADINIIYADKYYSNNVWMFYSLEDINKLIAFL |
| | YKEKRVIRQVQIPSFSRILKRKAMQDVINEIFKDDFDENIVNPELKEKYRNSLYFMLKEIYYNAFIIQPEL |
| | KEKFKDKIKTMTSELYNKLKTIDKKEYKALYCMLSNEESALKNFADRIYSVDGDNVSFADICKILMTD |
| | YNMQNQEKKNIESMEQKKKNKGKDENYKHFPLLLHKVLKELFIEYLKQTHELEFLRNNICIKSDVTME |
| | SFESQIKGVEIYKDLKEKIDKNNSLLDWYVIAHFLMPKQLNHLIGNIKNYIQFATNIDKRAESVKNLTES |
| | GMVKKIQYYDDIVRTLEFSAQYIGKISNNINDYFNSEDEYVSFLSKYVGFINDKSEDVLTELKDFCREKI |
| | NNGSQIIGIYYGGDNVIINRNVIYAQMYSNAEVFSNIYKKVTKNDIINYYEKQNDLKDVFKSGVCQNEG |
| | EQRSLCEFQQLKNRIELTELSTYADMVNDFMAQFVEWAYLRERDLMYFQLGIHYIRLFYSDNVLDEKY |
| | HKLSDNVIDIEEGALLYQIVAMYDYELRIFETDNSGNAKRIGQGGPGKSIPVFLKKYCNGTDVYECGLE |
| | LFEDINQHEHIIRFRNDIAHMRYMSNQAMNIMSIVSNIYKSFFVYDTKLKKSISLVFKNILMRYGVIADF |
| | VFSYNNKNQSIKDDMDINIINIKNLKSDKYVYKIVNEDIVKQVEIEIRNQVFLEQLHNLLYFSR |
| UZKN01.1 | LKNFADRIYSVDGDNVSFADICKILMTDYNMQNQEKKNIESMEQKKKNKGKDENYKHFPLLLHKVLK |
| SEQ ID NO: | ELFIEYLKQTHELEFLRNNICIKSDVTMESFESQIKGVEIYKDLKEKIDKNNSLLDWYVIAHFLMPKQLN |
| 4211 | HLIGNIKNYIQFATNIDKRAESVKNLTESGMVKRIQYYDDIVRTLEFSAQYIGKISNNINDYFNSEDEYV |
| | SFLSKYVGFINDKSEDVLTELKDFCREKINNGSQIIGIYYGGDNVIINRNVIYAQMYSNAEVFSNIYKKV |
| | TKNDIINYYEKQNDLKDVFKSGVCQNEDEQRSLCEFQQLKNRIELTELSTYADMVNDFMAQFVEWAY |
| | LRERDLMYFQLGIHYIRLFYSDNVLDEKYHKLSDNVIDIEEGALLYQIVAMYDYELRIFETDNSGNAKR |
| | IGQGGPGKSIPVFLKKYCNVTDVYECGLELFEDINQHEHIIRFRNDIAHMRYMSNQAMNIMSIVSNIYKS |
| | FFVYDTKLKKSISLVFKNILMRYGVIADLVFSYNNKNQSIKDDMDINIINIKNLKSDKYDIK |
| OOUM01.1 | MQGIFQKENTDKALKYGIYRHLPTYEKIIRNLVSFLSKYVGFINDKSEDVLTELKDFCREKINNGSQIIGI |
| SEQ ID NO: | YYGGDNVIINRNVIYAQMYSNAEVFSNIYKKVTKNDIINYYEKQNDLKDVFKSGVCQNEDEQRSLCEF |
| 4212 | QQLKNRIELTELSTYADMVNDFMAQFVEWAYLRERDLMYFQLGIHYIRLFYSDNVLDEKYHKLSDNV |
| | IDIEEGALLYQIVAMYDYELRIFETDNSGNAKRIGQGGPGKSIPVFLKKYCSGTDVYECGLELFEDINQH |
| | EHIIRFRNDIAHMRYMSNQAMNIMSIVSNIYKSFFAYDTKLKKSISLVFKNILMRYGVIADLVFSYNNKN |
| | QSIKDDMDINIINIKNLKSDKYVYKIVNEDIVKQVEIEIRNQVFLEQLHNLLYFSR |
| OPMQ01.1 | MKDKLDMLNKNEAVTDLRFGIVSEKYEKGITSFDYERIKAEEELDRNIAAYVTFAADIFAKSVIKSDYR |
| SEQ ID NO: | TKKDNNSDVLQYSDKEFRNSEVIRDNAEKNILQYWGGYSRWGTENSKLPENNKVSDFGKLDVSDLCI |
| 4213 | DIKKHLAGIRNSSVHYTTKIKNESAADGSNVKILFEKDLADINIIYADKYYSNNVWMFYSLEDINKLIAF |
| | LYKEKRVIRQVQIPSFSRILKRKAMQDVINEIFKDDFDENIVNPELKEKYRNSLYFMLKEIYYNAFIIQPE |
| | LKEKFKDKIKTMKSELYNKLKTIDKKEYKALYCMLSNEESALKNFADRIYSVDGDNVSFADICKILMT |
| | DYNMQNQEKKNIESMEQKKKNKGKDENYKHFPLLLHKVLKELFIEYLKQTHELEFLRNNICIKSDVTM |
| | ESFESQIKGVEIYKDLKEKIDKNNSLLDWYVIAHFLMPKQLNHLIGNIKNYIQFATNIDKRAESVKNLTE |
| | SGMVKRIQYYDDIVRTLEFSAQYIGKISNNINDYFNSEDEYVSFLSKYVGFINDKSEDVLTELKDFCREK |
| | INNGSQIWCATCQ |
| UXLM01.1 | MKDKLDMLNKNEAVTDLRFGIVSEKYEKGITSFDYERIKAEEELDRNIAAYVTFAADIFAKSVIKSDYR |
| SEQ ID NO: | TKKDNNSDVLQYSDKEFRNSEVIRDNAEKNILQYWGGYSRWGTENSKLPENNKVSDFGKLDVSDLCI |
| 4214 | DIKKHLAGIRNSSVHYTTKIKNESAADGSNVKILFEKDLADINIIYADKYYSNNVWMFYSLEDINKLIAF |
| | LYKEKRVIRQVQIPSFSRILKRKAMQDVINEIFKDDFDENIVNPELKEKYRNSLYFMLKEIYYNAFIIQPE |
| | LKEKFKDKIKTMKSELYNKLKTIDKKEYKALYCMLSNEESALKNFADRIYSVDGDNVSFADICKILMT |
| | DYNMQNQEKKNIESMEQKKKNKGKDENYKHFPLLLHKVLKELFIEYLKQTHELEFLRNNICIKSDVTM |
| | ESFESQIKGVEIYKDLKEKIDKNNSLLDWYVIAHFLMPKQLNHLIGNIKNYIQFATNIDKRAESVKNLTE |
| | SGMVKRIQYYDDIVRTLEFSAQYIGKISNNINDYFNSEDEYVSFLSKYVGFINDKSEDVLTELKDFCREK |
| | INNGSQIWCATCQ |
| CDTY01.1 | MKDKLDMLNKNEAVTDLRFGIVSEKYEKGITSFDYERIKAEEELDRNIAAYVTFAADIFAKSVIKSDYR |
| SEQ ID NO: | TKKDNNSDVLQYSDKEFRNSEVIRDNAEKNILQYWGGYSRWGTENSKLPENNKVSDFGKLDVSDLCI |
| 4215 | DIKKHLAGIRNSSVHYTTKIKNESAADGSNVKILFEKDLADINIIYADKYYSNNVWMFYSLEDINKLIAF |
| | LYKEKRVIRQVQIPSFSRILKRKAMQDVINEIFKDDFDENIVNPELKEKYRNSLYFMLKEIYYNAFIIQPE |
| | LKEKFKDKIKTMKSELYNKLKTIDKKEYKALYCMLSNEESALKNFADRIYSVDGDNVSFADICKILMT |
| | DYNMQNQEKKNIESMEQKKKNKGKDENYKHFPLLLHKVLKELFIEYLKQTHELEFLRNNICIKSDVTM |
| | ESFESQIKGVEIYKDLKEKIDKNNSLLDWYVIAHFLMPKQLNHLIGNIKNYIQFATNIDKRAESVKNLTE |
| | SGMVKRIQYYDDIVRTLEFSAQYIGKISNNINDYFNSEDEYVSFLSKYVGFINDKSEDVLTELKDFCREK |
| | INNGSQIWCATCQ |
| OGMB01.1 | LSYLAAKYIDLGKGVYHFTMKDKLDMLNKNEAVTDLRFGIVSEKYEKGITSFDYERIKAEEELDRNIA |
| SEQ ID NO: | AYVTFAADIFAKSVIKSDYRTKKDNNSDVLQYSDKEFRNSEVIRDNAEKNILQYWGGYSRWGTENSKL |
| 4216 | PENNKVSDFGKLDVSDLCIDIKKHLAGIRNSSVHYTTKIKNESAADGSNVKILFEKDLADINIIYADKYY |
| | SNNVWMFYSLEDINKLIAFLYKEKRVIRQVQIPSFSRILKRKAMQDVINEIFKDDFDENIVNPELKEKYR |
| | NSLYFMLKEIYYNAFIIQPELKEKFKDKIKTMKSELYNKLKTIDKKEYKALYCMLSNEESALKNFADRI |
| | YSVDGDNVSFA |
| OWET01.1 | MKDKLDMLNKNEAVTDLRFGIVSEKYEKGITSFDYERIKAEEELDRNIAAYVTFAADIFAKSVIKSDYR |
| SEQ ID NO: | TKKDNNSDVLQYSDKEFRNSEVIRDNAEKNILQYWGGYSRWGTENSKLPENNKVSDFGKLDVSDLCI |
| 4217 | DIKKHLAGIRNSSVHYTTKIKNESAADGSNVKILFEKDLADINHYADKYYSNNVWMFYSLEDINKLIAF |
| | LYKEKRVIRQVQIPSFSRILKRKAMQDVINEIFKDDFDENIVNPELKEKYRNSLYFMLKEIYYNAFIIQPE |
| | LKEKFKDKIKTMKSELYNKLKTIDKKEYKALYCMLSNEESALKNFADRIYSVDGDNVSFADICKILMT |
| | DYNMQNQEKKNIESMEQKKKNRNSRQIVRILKLIHFRMKWNQMQIQTDLWMRQQKHPQVQRNRMR |
| | MDLHMNILKSLIHTA |
| OWCB01.1 | MKVSKVKHRRTAVSVNKKNNTVKGILYDDPIKKDSKGDGASAYVSTKYVVDDVVRNSSRLYSPFNSK |
| SEQ ID NO: | KLIIDDKTKVVANSLRQHFKNFVKIYLNCESIDEQQMKFTPDNKYLMDNRVRISLPSDVNEEKLVEAIV |
| 4218 | NSSLRKSLNKKCNIQIKAGLRETFDIPELIKKAIKIYCIDEKRNLNDAEKLDMYALFSFMYEDKYKNRQ |
| | KKLIINSISNQVTKVKVCENGNRLLKLSIADTKKKPLWDFMIEYSNSDKKKQDTMLRNIRKSIVLFVCG |
| | VENYKNIENDNKLDICSWDGYDINENQQFVCVNTNNSNDDYFISSTELRRANLDHYMKAVAKLNDDR |
| | NKFWFQHFESVIETFFSKKAKRNIERIKSAYLCEYLWRDFCSYVALKYVDLGKGVYHFTMADKLALIN |
| | RNKYEKSIIFGEIESRYNNGISSFDYERIKAEELFERNISTYTTFATNIFSKAVVQDDYIKNHNKASDVLQ |
| | YSDKEFSDSKVLRNDAMKRILQYWGGQSRWNNTLNKINVDTLCIDIKEHLSNIRNSSVHYTSKVSLSG |
| | DKNESIVYMLFKKDFAEIRNIFASKYYSNNVWMFYSIEKINGLMEYLYGDNSTVIDAQIPAYNNIIKRK |
| | NIADVIEKIIKKNSYKTINELELIKKYRACLYFILKEIYYNRFIKQENLKEQFIQFVDNDNNLLDDNKNTF |
| | YIQKRHLRSPNNHK |
| ORVG01.1 | MTEYNQQNNQIKKVRSSNDSIFDQPIYQHYKVLLKKAIANAFADYLKNNKDLFGFIGKPFKANEIREID |
| SEQ ID NO: | KEQFLPDWTSRKYEALCIEVSGSQELQKWYIVGKFLNAMSLNLMVGSMRSYIQYVTDIKRRAASIGNE |
| 4219 | LHVSVQDVEKVEKWVQVIEVCSLLASRTSNQFEDYFNDKDDYARYLKSYVDFSNVDMPSEYSALVDF |
| | SNEEQSDLYVDPKNPKVNRNIVHSKLFAADHILRDIVEPVSKDNIEEFYSQKAEIAYCKIKGKEITAEEQ |
| | KAVLKYQKLKNRVELRDIVEYGEIINELLGQLINWSFMRERDLLYFQLGFHYDCLRNDSKKPERYKNI |
| | KVDENSIKDAILYQIIGMYVNGVTVYAPEKDDDKLKEQCVKGGVGVKVSAFHRYSKYLGLNEKTLYN |
| | AGLEIFEVVAEHEDIINLRNGIDHFKYYLGDYRSMLSIYSEVFDRFFTYDIKYQKNVLNLLQNILLRHNV |
| | IVEPILESGFKTIGEQTKPGAKLSIRSIKSDTFQYKVKGGTLITDAKDERYLETIRKILYYAENEEDNLKKS |
| | VVVTNADKYEKNKESDDQNKQKEKKNKDNKGKKNEETKSDAEKNNNERLSYNPFANLNFKLSN |
| ULZH01.1_2 | VCSLLASRTSNQFEDYFNDKDDYARYLKSYVDFSNVDMPSEYSALVDFSNEEQSDLYVDPKNPKVNR |
| SEQ ID NO: | NIVHSKLFAADHILRDIVEPVSKDNIEEFYSQKAEIAYCKIKGKEITAEEQKAVLKYQKLKNRVELRDIV |
| 4220 | EYGEIINELLGQLINWSFMRERDLLYFQLGFHYDCLRNDSKKPERYKNIKVDENSIKDAILYQIIGMYVN |
| | GVTVYAPEKDDDKLKEQCVKGGVGVKVSAFHRYSKYLGLNEKTLYNAGLEIFEVVAEHEDIINLRNGI |
| | DHFKYYLGDYRSMLSIYSEVFDRFFTYDIKYQKNVLNLLQNILLRHNVIVEPILESGFKTIGEQTKPGAK |
| | LSIRSIKSDTFQYKVKGGILITDAKDERYLETIRKILYYAENEEDNLKKSVVVTNADKYEKNKESDDQN |
| | KQKEKKNKDNKGKKNEETKSDAEKNNNERLSYNPFANLNFKLSN |
| IMG_ | VSAVKEISTGNSNGNVIGAAVKNNSGKMGIIDSNGQNKVEQAYDSKKPEGYKNIKVDENSIKDAILYQI |
| 3300014770_2 | IGMYVNGVTVYAPEKDGDKLKEQCVKGGVGVKVSAFHRYSKYLGLNEKTLYNAGLEIFEVVAEHEDI |
| SEQ ID NO: | INLRNGIDHFKYYLGDYRSMLSIYSEVFDRFFTYDIKYQKNVLNLLQNILLRHNVIVEPILESGFKTIGEQ |
| 4221 | TKPGAKLSIRSIKSDTFQYKVKGGILITDAKDERYLETIRKILYYAENEEDNLKKSVVVTNADKYEKNK |
| | ESDDQNKQKEKKNKDNKGKKNEEIKSDAEKNNNERLSYNPFANLNFKLSN |
| OQVO01.1 | LSLGIKEERICETKEDNWWPNLEMPGLCGPDSEMFYFRSDDEIPEKFDPDDNRWVEIWNDVFMQYNH |
| SEQ ID NO: | KEDGTIEILKHKNVDTGMGLERVTAILEGVNDNYLSSIWKDVIEKICEISNTKYEDNKESIRIIADHIRTS |
| 4222 | VFISADYSGIKPSNVGQGYILRRLIRRSIRHAKKLNIDISSNWDIEIAKLIINKYKKYYKELEENENVVYE |
| | VLTNEKNKFNKTIEKGLREFEKVTKDNNDIDASTAFKLYDTYGFPLELTVELAHEKNIKVDENSIKDAI |
| | LYQIIGMYVNGVTVYAPEKDGDKLKEQCVKGGVGVKVSAFHRYSKYLGLNEKTLYNAGLEIFEVVAE |
| | HEDIINLRNGIDHFKYYLGDYRSMLSIYSEVFDRFFTYDIKYQKNVLNLLQNILLRHNVIVEPILESGFKT |
| | IGEQTKPGAKLSIRSIKSDTFQYKVKGGILITDAKDERYLETIRKILYYAENEEDNLKKSVVVTNADKYE |
| | KNKESDDQNKQKEKKNKDNKGKKNEEIKSDAEKNNNERLSYNPFANLNFKLSN |
| OQCX01.1_ | LIKSSFCLNGHQKNTYHYARKLEKAQNSKKWYIVGKFLNSRSLNLMAGSMRSYIQYVNDIKRRADGIG |
| 2 | NELHVIAQNLDVVDKWVQVIEVCLLLSSRVSNEFEDYFYDKDDYAAYLKSYVDFDNSDMPSEYSALV |
| SEQ ID NO: | EFSDQGKVDLYVDPSNPKVNRNIVQSKLFAADYILRDIIEPVSKDEIEDFYNQKDEITTCKIKGAELTDE |
| 4223 | EQKKILKYQKLKNRVELRDVVEYGEIINELLGQLINWSFMRERDLLYFQLGFHYNCLRNDSAKPEEYK |
| | NLVLDDVSIKDAILHQIIGMYVNGVAIYAPGKDKNKLESQCVKGRVGGKIGAFCGYSLYLKLAADTLY |
| | NAGLEVFEVLPEHEDIINLRNGIDHFKFYLGGYRSIISLYSEVFDRFFTYDMKYQKNVLNLLQNILLRHN |
| | VIIEPIFESGIKKIGKDTKPCAKLCISSIKSDSFEYKIKDGTLITDAKDKRYLETIKKLLYYPDIESNVKILLR |
| | KDNFNQNKDKKNVNNRKTKNN |
| OPHK01.1 | MLDHLYNNKVSRAAQVPSYNSVMVRKYFPENITSTLKYQKPGYDEDTLEKWYSACYYLLKEIYYNSF |
| SEQ ID NO: | LQSDEALALFEESVNNLKGDNKDQELAVKNFRNNYKNIKSSCTSFSQVCQMYMTEYNQQNNQFKKV |
| 4224 | RSSKDSIVDKPIYQHYKLLLKKVIANAFASYLQHNEELFGFIGKPLKVNCLKEIDKEQFLPEWTSKKYVS |
| | LCEEVRKSPELQKWYIVGKFLNSRSLNLMAGSMRSYIQYVNDIKRRADGIGNELHVIAQNLDVVNKW |
| | VQVIEVCLLLSSRVSNEFEDYFYDKDDYAAYLKSYVDFDNSDMPSEYSALVEFSDQGKVDLYVDPSNP |
| | KVNRNIVQSKLFAADYILRDIIEPVSKDEIEDFYNQKDEITTCKIKGAELTDEEQKKILKYQKLKNRVEL |
| | RDVVEYGEIINELLGQLINWSFMRERDLLYFQLGFHYNCLRNDSAKPEEYKNLVLDDISIKDAILHQIIG |
| | VYVNGVAIYAPGKDKNKLESQCVKGRVGGKIGAFCGYSLYLKLAADTLYNAGLEVFEVLPEHEDIINL |
| | RNGIDHFKFYLGGYRSIISLYSEVFDRFFTYDMKYQKNVLNLLQNILLRHNVIIEPIFESGIKKIGKDTKP |
| | CAKLSIRSIISDSFEYKIKDGNLIADAKDKRYLETIKKILFYPEVEPEVRILSSKDSFEQNNQYGYMKEKS |
| | ENNKNKKNKKNNGNRDEKKNSDGLTYNPFLNLPFELPE |
| UXRR01.1 | MIKAQEALQRELAVNVAFAANNLARAVCDMTNLKDKESDFLIWNKKDIANKLKNKDDMASVSVVLQ |
| SEQ ID NO: | FFGGKSSWDIDAFREAYKGNKYNYEVCFIDDLRKAVYAARNESFHFKTALVNNDIWNTEFFGKLFIKE |
| 4225 | TEICLDIEKDRFYSNNLPVFYSDNDLKKMLDHLYNNKVSRAAQVPSYNSVMVRKYFPENITSTLKYQK |
| | PGYDEDTLEKWYSACYYLLKEIYYNSFLQSDEALALFEESVNNLKGDNKDQELAVKNFRNNYKNIKSS |
| | CTSFSQVCQMYMTEYNQQNNQFKKVRSSKDSIVDKPIYQHYKLLLKKVIANAFASYLQHNEELFGFIG |
| | KPLKVNCLKEIDKEQFLPEWTSKKYVSLCEEVRKSPELQKWYIVGKFLNSRSLNLMAGSMRSYIQYVN |
| | DIKRRADGIGNELHVIAQNLDVVNKWVQVIEVCLLLSSRVSNEFEDYFYDKDDYAAYLKSYVDFDNS |
| | DMPSEYSALVEFSDQGKVDLYVDPSNPKVNRNIVQSKLFAADYILRDIIEPVSKDEIEDFYNQKDEITTC |
| | KIKGAELTDEEQKKILKYQKLKNRVELRDVVEYGEIINELLGQLINWSFMRERDLLYFQLGFHYNCLR |
| | NDSAKPEEYKNLVLDDISIKDAILHQIIGVYVNGVAIYAPGKDKNKLESQCVKGRVGGKIGAFCGYSLY |
| | LKLAADTLYNAGLEVFEVLPEHEDIINLRNGIDHFKFYLGGYRSIISLYSEVFDRFFTYDMKYQKNVLN |
| | LLQNILLRHNVIIEPIFESGIKKIGKDTKPCAKLSIRSIISDSFEYKIKDGNLIADAKDKRYLETIKKILFYPE |
| | VEPEVRILSSKDSFEQNNQYGYMKEKSENNKNKKNKKNNGNRDEKKNSDGLTYNPFLNLPFELPE |
| UZJD01.1 | MVRKYFPENITSTLKYQKPGYDEDTLEKWYSACYYLLKEIYYNSFLQSDEALALFEESVNNLKGDNKD |
| SEQ ID NO: | QELAVKNFRNNYKNIKSSCTSFSQVCQMYMTEYNQQNNQFKKVRSSKDSIVDKPIYQHYKLLLKKVIA |
| 4226 | NAFASYLQHNKELFGFIGKPLKVNCLKEIDKEQFLPEWTAKKYVSLCEEVRKSPELQKWYIVGKFLNS |
| | RSLNLMAGSMRSYIQYVNDIKRRADGIGNELHVIAQNLDVVDKWVQVIEVCLLLSSRVSNEFEDYFYD |
| | KDDYAAYLKSYVDFDNSDMPSEYSALVEFSDQGKVDLYVDPSNPKVNRNIVQSKLFAADYILRDIIEP |
| | VSKDEIEDFYNQKDEITICKIKGAELTDEEQKKILKYQKLKNRVELRDVVEYGEIINELLGQLINWSFMR |
| | ERDLLYFQLGFHYNCLRNDSAKPEEYKNLVLDDISIKDAILHQIIGMYVNGVAIYAPGKDENKLESQCA |
| | QGGAGGKIGAFCRYSLYLKLAADTLYNAGLEVFEVLPEHEDIIKLRNGIDHFKFYLGGYRSIMSLYSEV |
| | FDRFFTYDMKYQKNVLNLLQNILLRHNVIIEPIFEFGIKKIGKDTKPCAKLCISSIKSDSFEYKIKDGTLIT |
| | DAKDKRYLETIKKILFYPEVESEVRILSSKDSFEQNNQYGYMKGKSENNKNKKNKKNNGNRDEKKNS |
| | DGLTYNPFLNLPFELPE |
| OGYB01.1 | LQHNKELFGFIGKPLKVNCLKEIDKEQFLPEWTAKKYVSLCEEVRKSPELQKWYIVGKFLNSRSLNLM |
| SEQ ID NO: | AGSMRSYIQYVNDIKRRADGIGNELHVIAQNLDVVDKWVQVIEVCLLLSSRVSNEFEDYFYDKDDYA |
| 4227 | AYLKSYVDFDNSDMPSEYSALVEFSDQGKVDLYVDPSNPKVNRNIVQSKLFAADYILRDIIEPVSKDEI |
| | EDFYNQKDEITICKIKGAELTDEEQKKILKYQKLKNRVELRDVVEYGEIINELLGQLINWSFMRERDLL |
| | YFQLGFHYNCLRNDSAKPEEYKNLVLDDISIKDAILHQIIGMYVNGVAIYAPGKDKNKLESQCVKGRV |
| | GGKIGAFCGYSLYLKLAADTLYNAGLEVFEVLPEHEDIINLRNGIDHFKFYLGGYRSIISLYSEIFDRFFT |
| | YDMKYQKNVLNLLQNILLRHNVIIEPIFESGIKKIGKDTKLCAKLCISSLKSDSFEYKIKDGTLITDAKDK |
| | RYLETUCKILFYPEVESEVRILSSKDSFEQNNQYGYMKGKSENNKNKKNKKNNGNRDEKKNSDGLTYN |
| | PFLDLPFELPE |
| OYDY01.1 | MGKLVMNVLVKSSNGITQVSADAKLLSQRKVFIEGEISPETACEFIKKIIVLNAENQEKFIDVLINSPGGE |
| SEQ ID NO: | INSGLAMYDVIQSSKAPIRVFCIGRAYSMAKYLGLNEKTLYNAGLEIFEVVAEHEDIINLRNGIDHFKYY |
| 4228 | LGDYRSMLSIYSEVFDRFFTYDIKYQKNVLNLLQNILLRHNVIVEPILESGFKTIGEQTKPGAKLSIRSIKS |
| | DTFQYKVKGGTLITDAKDERYLETIRKILYYAENEEDNLKKSVVVTNADKYEKNKESDDQNKQKEKK |
| | NKDNKGKKNEETKSDAEKNNNERLSYNPFANLNFKLSN |
| ORVG01.1_ | MKLSKEKHTRSAVANEEQNIGGILYRFPGKSIDGVKDQMLRRDKEVKKLYNVFNQIQVGTKPKKWNN |
| 2 | DEKLSPEENERRAQQKNIKIENYKWREACSKYVKSSQKTINYVIFYSYGKAENKLRYMRKNEDILKKM |
| SEQ ID NO: | QEEEKLPKFSGGKLEDFVAYTLRKSLVVSKYDTQEFDSVAAMVVFLECIGKSNISDHEKEIVCKLLELIR |
| 4229 | KDFSKLDPNVKGSQGANIVRSVRNQNMIVQPQGDRFLFPQVYAKENETVTNKNVEKEGLNEFLLNYA |
| | NLDDEKRAESLRKLRRILDVYFSAPNYYEKDMDITLSDNIEKGKFNVWEKHECGKKVTDLFVDIPDVL |
| | MEAGAENIKLDAVVEKRERKVLNDRVRKQNIICYRYTRAVVEKYNSNEPLFFENNAINQYWIHHIENA |
| | VERILKNCKAGKLFKLRKGYLAEKVWKDAINLISIKYIALGKAVYNFALDDIWKDKKNKELGIVDERIR |
| | NGITSFDYEMIKAHENLQRELAVDIAFSVNNLARAVCDMSNLGNKESDFLLWKRNDIADKLKNKDDM |
| | ASVSAVLQFFGGKSSWDINIFKEAYKGKKKYNYEVRFIDDLRKAIYCARNENFHFKTALVNDEKWNTE |
| | LFGKIFKRETEFCLNVEKDRFYSNNLYMFYQVSELRNMLDHLYSRSVSRAAQVPSYNSVIVRTAFPEYI |
| | TNVLGYQKPGYDADTLGKWYSACYYLLKEIYYNSFLQSDRALQLFEKSVKTLSWDDEEQKRAVDNF |
| | KKYFSDIKSACTSLAQVCQIYILDSRKRDEDTTSRIAAN |
| OHCP01.1 | MKLSKEKHTRSAVANEEQNIGGILYRFPGKSIDGVKDQMLRRDKEVKKLYNVFNQIQVGTKPKKWNN |
| SEQ ID NO: | DEKLSPEENERRAQQKNIKMKNYKWREACSKYVESSQRIINDVIFYSYRKAKNKLRYMRKNEDILKK |
| 4230 | MQEAEKLSKFSGGKLEDFVAYTLRKSLVVSKYDTQEFDSVAAMVVFLECIGKNNISDHEREIVCKLLE |
| | LIRKDFSKLDPNVKGSQGANIVRSVRNQNMIVQPQGDRILFPQVYAKENETVTNKNVEKEGLNEFLLN |
| | YANLDDEKRAESLRKLRRILDVYFSAPNHYEKDMDITLSDNIEKEKFNVWEKHECGKKETGLFVDIPD |
| | VLMEAEAENIKLDAVVEKRERKVLNDRVRKQNIICYRYTRAVVEKYNSNEPLFFENNAINQYWIHHIE |
| | NAVERILKNCKAGKLFKLRKGYLAEKVWKDAINLISIKYIALGKAVYNFALDDIWKDKKNKELGIVDE |
| | RIRNGITSFDYEMIKAHENLQRELAVDIAFSVNNLARAVCDMSNLGNKESDFLLWKRNDIADKLKNKD |
| | DMASVSAVLQFFGGKSSWDINIFKDAYKGKKKYNYEVRFIDDLRKAIYCARNENFHFKTALVNDEKW |
| | NTELFGKIFERETEFCLNVEKDRFYSNNLYMFYQVSELRNMLDHLYSRSVSRAAQVPSYNSVIVRTAFP |
| | EYITNVLGYQKPSYDADTLGKWYSACYYLLK |
| OPVG01.1 | MKLSKEKHTRSAVANEEQNIGGILYRFPGKSIDGVKDQMLRRDKEVKKLYNVFNQIQVGTKPKKWNN |
| SEQ ID NO: | DEKLSPEENERRAQQKNIKMKNYKWREACSKYVESSQRIINDVIFYSYRKAKNKLRYMRKNEDILKK |
| 4231 | MQEAEKLSKFSGGKLEDFVAYTLRKSLVVSKYDTQEFDSVAAMVVFLECIGKNNISDHEREIVCKLLE |
| | LIRKDFSKLDPNVKGSQGANIVRSVRNQNMIVQPQGDRFLFPQVYAKENETVTNKNVEKEGLNEFLLN |
| | YANLDDEKRAESLRKLRRILDVYFSAPNHYEKDMDITLSDNIEKEKFNVWEKHECGKKETGLFVDIPD |
| | VLMEAEAENIKLDAVVEKRERKVLNDRVRKQNIICYRYTRAVVEKYNSNEPLFFENNAINQYWIHHIE |
| | NAVERILKNCKAGKLFKLRKGYLAEKVWKDAINLISIKYIALGKAVYNFALDDIWKDKKNKELGIVDE |
| | RIRNGITSFDYEMIKAHENLQRELAVDIAFSVNNLARAVCDMSNLGNKESDFLLWKRNDIADKLKNKD |
| | DMASVSAVLQFFGGKSSWDINIFKDAYKGKKKYNYEVRFIDDLRKAIYCARNENFHFKTALVNDEKW |
| | NTELFGKIFERETEFCLNVEKDRFYSNNLYMFYQVSELRNMLDHLYSRSVSRAAQVPSYNSVIVRTAFP |
| | EYITNVLGYQKPSYDADTLGKWYSACYYLLKEIYYNSFLQSDRALQLFEKSVKTLSWDDKKQQRAVD |
| | NFKDHFSDIKSACTSLAQVCQIYMTEYNQQNNQIKKVRSSNDSIFDQPVYQHYKVLLKKAIANAFADY |
| | LKNNKDLFGFIGKPFKANEIREIDKEQFLPDWTSRKYEALCIEVSG |
| OHRU01.1 | MKLSKEKHTRSAVANEEQNIGGILYRFPGKSIDGVKDQMLRRDKEVKKLYNVFNQIQVGTKPKKWNN |
| SEQ ID NO: | DEKLSPEENERRAQQKNIKMKNYKWREACSKYVESSQRIINDVIFYSYRKAKNKLRYMRKNEDILKK |
| 4232 | MQEAEKLSKFSGGKLEDFVAYTLRKSLVVSKYDTQEFDSVAAMVVFLECIGKNNISDHEREIVCKLLE |
| | LIRKDFSKLDPNVKGSQGANIVRSVRNQNMIVQPQGDRFLFPQVYAKENETVTNKNVEKEGLNEFLLN |
| | YANLDDEKRAESLRKLRRILDVYFSAPNHYEKDMDITLSDNIEKEKFNVWEKHECGKKETGLFVDIPD |
| | VLMEAEAENIKLDAVVEKRERKVLNDRVRKQNIICYRYTRAVVEKYNSNEPLFFENNAINQYWIHHIE |
| | NAVERILKNCKAGKLFKLRKGYLAEKVWKDAINLISIKYIALGKAVYNFALDDIWKDKKNKELGIVDE |
| | RIRNGITSFDYEMIKAHENLQRELAVDIAFSVNNLARAVCDMSNLGNKESDFLLWKRNDIADKLKNKD |
| | DMASVSAVLQFFGGKSSWDINIFKEAYKGKKKYNYEVRFIDDLRKAIYCARNENFHFKTALVNDEKW |
| | NTELFGKIFKRETEFCLNVEKDRFYSNNLYMFYQVSELRNMLDHLYSRSVSRAAQVPSYNSVIVRTAFP |
| | EYITNVLGYQKPGYDADTLGKWYSACYYLLKEIYYNSFLQS |
| OHIL01.1 | MKLSKEKHTRSAVANEEQNIGGILYRFPGKSIDGVKDQMLRRDKEVKKLYNVFNQIQVGTKPKKWNN |
| SEQ ID NO: | DEKLSPEENERRAQQKNIKMKNYKWREACSKYVESSQRIINDVIFYSYRKAKNKLRYMRKNEDILKK |
| 4233 | MQEAEKLSKFSGGKLEDFVAYTLRKSLVVSKYDTQEFDSVAAMVVFLECIGKNNISDHEREIVCKLLE |
| | LIRKDFSKLDPNVKGSQGANIVRSVRNQNMIVQPQGDRFLFPQVYAKENETVTNKNVEKEGLNEFLLN |
| | YANLDDEKRAESLRKLRRILDVYFSAPNHYEKDMDITLSDNIEKEKFNVWEKHECGKKETGLFVDIPD |
| | VLMEAEAENIKLDAVVEKRERKVLNDRVRKQNIICYRYTRAVVEKYNSNEPLFFENNAINQYWIHHIE |
| | NAVERILKNCKAGKLFKLRKGYLAEKVWKDAINLISIKYIALGKAVYNFALDDIWKDKKNKELGIVDE |
| | RIRNGITSFDYEMIKAHENLQRELAVDIAFSVNNLARAVCDMSNLGNKESDFLLWKRNDIADKLKNKD |
| | DMASVSAVLQFFGGKSSWDINIFKEAYKGKKKYNYEVRFIDDLRKAIYCARNENFHFKTALVNDEKW |
| | NTELFGKIFKRETEFCLNVEKDRFYSNNLYMFYQVSELRNMLDHLYSRSVSRAAQVPSYNSVIVRTAFP |
| | EYITNVLGYQKPGYDADTLGKWYSACY |
| OKSW01.1 | MKLSKEKHTRSAVANEEQNIGGILYRFPGKSIDGVKDQMLRRDKEVKKLYNVFNQIQVGTKPKKWNN |
| SEQ ID NO: | DEKLSPEENERRAQQKNIKMKNYKWREACSKYVESSQRIINDVIFYSYRKAKNKLRYMRKNEDILKK |
| 4234 | MQEAEKLSKFSGGKLEDFVAYTLRKSLVVSKYDTQEFDSVAAMVVFLECIGKNNISDHEREIVCKLLE |
| | LIRKDFSKLDPNVKGSQGANIVRSVRNQNMIVQPQGDRFLFPQVYAKENETVTNKNVEKEGLNEFLLN |
| | YANLDDEKRAESLRKLRRILDVYFSAPNHYEKDMDITLSDNIEKEKFNVWEKHECGKKETGLFVDIPD |
| | VLMEAEAENIKLDAVVEKRERKVLNDRVRKQNIICYRYTRAVVEKYNSNEPLFFENNAINQYWIHHIE |
| | NAVERILKNCKAGKLFKLRKGYLAEKVWKDAINLISIKYIALGKAVYNFALDDIWKDKKNKELGIVDE |
| | RIRNGITSFDYEMIKAHENLQRELAVDIAFSVNNLARAVCDMSNLGNKESDFLLWKRNDIADKLKNKD |
| | DMASVSAVLQFFGGKSSWDINIFKEAYKGKKKYNYEVRFIDDLRKAIYCARNENFHFKTALVNDEKW |
| | NTELFGKIFKRETEFCLNVEKDRFYSNNLYMFYQVSELRNMLDHLYSRSVSRAAQVPSYNSVIVRTAFP |
| | EYITNVLGYQKPGYDADTLGKWYSACYYLLKEI |
| OHSM01.1 | MKLSKEKHTRSAVANNGDIKSAEVNNGNTKSEEVNNGDTRSAVANEEQNIGGILYRFPGKSIDGVKDQ |
| SEQ ID NO: | MLRRDKEVKKLYNVFNQIQVGTKPKKWNNDEKLSPEENERRAQQKNIKMKNYKWREACSKYVESSQ |
| 4235 | RIINDVIFYSYRKAKNKLRYMRKNEDILKKMQEAEKLSKFSGGKLEDFVAYTLRKSLVVSKYDTQEFD |
| | SVAAMVVFLECIGKNNISDHEREIVCKLLELIRKDFSKLDPNVKGSQGANIVRSVRNQNMIVQPQGDRI |
| | LFPQVYAKENETVTNKNVEKEGLNEFLLNYANLDDEKRAESLRKLRRILDVYFSAPNHYEKDMDITLS |
| | DNIEKEKFNVWEKHECGKKETGLFVDIPDVLMEAEAENIKLDAVVEKRERKVLNDRVRKQNIICYRYT |
| | RAVVEKYNSNEPLFFENNAINQYWIHHIENAVERILKNCKAGKLFKLRKGYLAEKVWKDAINLISIKYI |
| | ALGKAVYNFALDDIWKDKKNKELGIVDERIRNGITSFDYEMIKAHENLQRELAVDIAFSVNNLARAVC |
| | DMSNLGNKESDFLLWKRNDIADKLKNKDDMASVSAVLQFFGGKSSWDINIFKDAYKGKKKYNYEVR |
| | FIDDLRKAIYCARNENFHFKTALVNDEKWNTELFGKIFERETEFCLNVEKDRFYSNNLYMFYQVSELR |
| | NMLDHLYSRSVSRAAQVPSYNSVIVRTAFPEYITNVLGYQ |
| OZCB01.1 | MKLSKEKHTRSAVANNGDIKSAEVNNGNTKSEEVNNGDTRSAVANEEQNIGGILYRFPGKSIDGVKDQ |
| SEQ ID NO: | MLRRDKEVKKLYNVFNQIQVGTKPKKWNNDEKLSPEENERRAQQKNIKMKNYKWREACSKYVESSQ |
| 4236 | RIINDVIFYSYRKAKNKLRYMRKNEDILKKMQEAEKLSKFSGGKLEDFVAYTLRKSLVVSKYDTQEFD |
| | SVAAMVVFLECIGKNNISDHEREIVCKLLELIRKDFSKLDPNVKGSQGANIVRSVRNQNMIVQPQGDRF |
| | LFPQVYAKENETVTNKNVEKEGLNEFLLNYANLDDEKRAESLRKLRRILDVYFSAPNHYEKDMDITLS |
| | DNIEKEKFNVWEKHECGKKETGLFVDIPDVLMEAEAENIKLDAVVEKRERKVLNDRVRKQNIICYRYT |
| | RAVVEKYNSNEPLFFENNAINQYWIHHIENAVERILKNCKAGKLFKLRKGYLAEKVWKDAINLISIKYI |
| | ALGKAVYNFALDDIWKDKKNKELGIVDERIRNGITSFDYEMIKAHENLQRELAVDIAFSVNNLARAVC |
| | DMSNLGNKESDFLLWKRNDIADKLKNKDDMASVSAVLQFFGGKSSWDINIFKDAYKGKKKYNYEVR |
| | FIDDLRKAIYCARNENFHFKTALVNDEKWNTELFGKIFERETEFCLNVEKDRFYSNNLYMFYQVSELR |
| | NMLDHLYSRSVSRAAQVPSYNSVIVRTAFPEYITNVLGYQKPGYDADTLGKWYSACSVSYTHLTLPTI |
| | A |
| CDYI01.1 | MKLSKEKHTRSAVANNGDIKSAEVNNGNTKSEEVNNGDTRSAVANEEQNIGGILYRFPGKSIDGVKDQ |
| SEQ ID NO: | MLRRDKEVKKLYNVFNQIQVGTKPKKWNNDEKLSPEENERRAQQKNIKMKNYKWREACSKYVESSQ |
| 4237 | RIINDVIFYSYRKAKNKLRYMRKNEDILKKMQEAEKLSKFSGGKLEDFVAYTLRKSLVVSKYDTQEFD |
| | SVAAMVVFLECIGKNNISDHEREIVCKLLELIRKDFSKLDPNVKGSQGANIVRSVRNQNMIVQPQGDRF |
| | LFPQVYAKENETVTNKNVEKEGLNEFLLNYANLDDEKRAESLRKLRRILDVYFSAPNHYEKDMDITLS |
| | DNIEKEKFNVWEKHECGKKETGLFVDIPDVLMEAEAENIKLDAVVEKRERKVLNDRVRKQNIICYRYT |
| | RAVVEKYNSNEPLFFENNAINQYWIHHIENAVERILKNCKAGKLFKLRKGYLAEKVWKDAINLISIKYI |
| | ALGKAVYNFALDDIWKDKKNKELGIVDERIRNGITSFDYEMIKAHENLQRELAVDIAFSVNNLARAVC |
| | DMSNLGNKESDFLLWKRNDIADKLKNKDDMASVSAVLQFFGGKSSWDINIFKDAYKGKKKYNYEVR |
| | FIDDLRKAIYCARNENFHFKTALVNDEKWNTELFGKIFERETEFCLNVEKDRFYSNNLYMFYQVSELR |
| | NMLDHLYSRSVSRAAQVPSYNSVIVRTAFPEYITNVLGYQKPGYDADTLGKWYSACYYLLKEIYYNSF |
| | LQSD |
| OZYB01.1 | MKLSKEKHTRSAVANNGDIKSAEVNNGNTKSEEVNNGDTRSAVANEEQNIGGILYRFPGKSIDGVKDQ |
| SEQ ID NO: | MLRRDKEVKKLYNVFNQIQVGTKPKKWNNDEKLSPEENERRAQQKNIKMKNYKWREACSKYVESSQ |
| 4238 | RIINDVIFYSYRKAKNKLRYMRKNEDILKKMQEAEKLSKFSGGKLEDFVAYTLRKSLVVSKYDTQEFD |
| | SVAAMVVFLECIGKNNISDHEREIVCKLLELIRKDFSKLDPNVKGSQGANIVRSVRNQNMIVQPQGDRF |
| | LFPQVYAKENETVTNKNVEKEGLNEFLLNYANLDDEKRAESLRKLRRILDVYFSAPNHYEKDMDITLS |
| | DNIEKEKFNVWEKHECGKKETGLFVDIPDVLMEAEAENIKLDAVVEKRERKVLNDRVRKQNIICYRYT |
| | RAVVEKYNSNEPLFFENNAINQYWIHHIENAVERILKNCKAGKLFKLRKGYLAEKVWKDAINLISIKYI |
| | ALGKAVYNFALDDIWKDKKNKELGIVDERIRNGITSFDYEMIKAHENLQRELAVDIAFSVNNLARAVC |
| | DMSNLGNKESDFLLWKRNDIADKLKNKDDMASVSAVLQFFGGKSSWDINIFKDAYKGKKKYNYEVR |
| | FIDDLRKAIYCARNENFHFKTALVNDEKWNTELFGKIFERETEFCLNVEKDRFYSNNLYMFYQVSELR |
| | NMLDHLYSRSVSRAAQVPSYNSVIVRTAFPEYITNVLGYQKPGYDADTLGKWYSACYYLLKEIYYNSF |
| | LQSDRACLLYTSPSPRDGLLSR |
| OIPQ01.1 | MKLSKEKHTRSAVANNGDIKSAEVNNGNTKSEEVNNGDTRSAVANEEQNIGGILYRFPGKSIDGVKDQ |
| SEQ ID NO: | MLRRDKEVKKLYNVFNQIQVGTKPKKWNNDEKLSPEENERRAQQKNIKMKNYKWREACSKYVESSQ |
| 4239 | RIINDVIFYSYRKAKNKLRYMRKNEDILKKMQEAEKLSKFSGGKLEDFVAYTLRKSLVVSKYDTQEFD |
| | SVAAMVVFLECIGKNNISDHEREIVCKLLELIRKDFSKLDPNVKGSQGANIVRSVRNQNMIVQPQGDRF |
| | LFPQVYAKENETVTNKNVEKEGLNEFLLNYANLDDEKRAESLRKLRRILDVYFSAPNHYEKDMDITLS |
| | DNIEKEKFNVWEKHECGKKETGLFVDIPDVLMEAEAENIKLDAVVEKRERKVLNDRVRKQNIICYRYT |
| | RAVVEKYNSNEPLFFENNAINQYWIHHIENAVERILKNCKAGKLFKLRKGYLAEKVWKDAINLISIKYI |
| | ALGKAVYNFALDDIWKDKKNKELGIVDERIRNGITSFDYEMIKAHENLQRELAVDIAFSVNNLARAVC |
| | DMSNLGNKESDFLLWKRNDIADKLKNKDDMASVSAVLQFFGGKSSWDINIFKDAYKGKKKYNYEVR |
| | FIDDLRKAIYCARNENFHFKTALVNDEKWNTELFGKIFERETEFCLNVEKDRFYSNNLYMFYQVSELR |
| | NMLDHLYSRSVSRAAQVPSYNSVIVRTAFPEYITNVLGYQKPSYDADTLGKWYSACYYLLKEIYYNSF |
| | LQSDRALQLFEKSVKTLSWDDKKQQ |
| UPNA01.1 | MKLSKEKHTRSAVANNGDIKSAEVNNGNTKSEEVNNGDIRSAVANEEQNIGGILYRFPGKSIDGVKDQ |
| SEQ ID NO: | MLRRDKEVKKLYNVFNQIQVGTKPKKWNNDEKLSPEENERRAQQKNIKMKNYKWREACSKYVESSQ |
| 4240 | RIINDVIFYSYRKAENKLRYMRKNEDILKKMQEAEKLSKFSGGKLEDFVAYTLRKSLVVSKYDTQEFD |
| | SVAAMVVFLECIGKNNISDHEREIVCKLLELIRKDFSKLDPNVKGSQGANIVRSVRNQNMIVQPQGDRF |
| | LFPQVYAKENETVTNKNVEKEGLNEFLLNYANLDDEKRAESLRKLRRILDVYFSAPNHYEKDMDITLS |
| | DNIEKEKFNVWEKHECGKKETGLFVDIPDVLMEAEAENIKLDAVVEKRERKVLNDRVRKQNIICYRYT |
| | RAVVEKYNSNEPLFFENNAINQYWIHHIENAVERILKNCKAGKLFKLRKGYLAEKVWKDAINLISIKYI |
| | ALGKAVYNFALDDIWKDKKNKELGIVDERIRNGITSFDYEMIKAHENLQRELAVDIAFSVNNLARAVC |
| | DMSNLGNKESDFLLWKRNDIADKLKNKDDMASVSAVLQFFGGKSSWDINIFKEAYKGKKKYNYEVR |
| | FIDDLRKAIYCARNENFHFKTALVNDEKWNTELFGKIFERETEFCLNVEKDRFYSNNLYMFYQVSELR |
| | NMLDHLYSRSVSRAAQVPSYNSVIVRTAFPEYITNVLGYQKPGYDADTLG |
| OPAV01.1 | MKLSKEKHTRSAVANNGDIKSAEVNNGNTKSEEVNNGDIRSAVANEEQNIGGILYRFPGKSIDGVKDQ |
| SEQ ID NO: | MLRRDKEVKKLYNVFNQIQVGTKLKKWNNDEKLSPEENERRAQQKNIKMKNYKWREACSKYVESSQ |
| 4241 | RIINDVIFYSYRKAKNKLRYMRKNEDILKKMQEAEKLSKFSGGKLEDFVAYTLRKSLVVSKYDTQEFD |
| | SVAAMVVFLECIGKNNISDHEREIVCKLLELIRKDFSKLDPNVKGSQGANIVRSVRNQNMIVQPQGDRF |
| | LFPQVYAKENETVTNKNVEKEGLNEFLLNYANLDDEKRAESLRKLRRILDVYFSAPNHYEKDMDITLS |
| | DNIEKEKFNVWEKHECGKKETGLFVDIPDVLMEAEAENIKLDAVVEKRERKVLNDRVRKQNIICYRYT |
| | RAVVEKYNSNEPLFFENNAINQYWIHHIENAVERILKNCKAGKLFKLRKGYLAEKVWKDAINLISIKYI |
| | ALGKAVYNFALDDIWKDKKNKELGIVDERIRNGITSFDYEMIKAHENLQRELAVDIAFSVNNLARAVC |
| | DMSNLGNKESDFLLWKRNDIADKLKNKDDMASVSAVLQFFGGKSSWDINIFKEAYKGKKKYNYEVR |
| | FIDDLRKAIYCARNENFHFKTALVNDEKWNTELFGKIFERETEFCLNVEKDRFYSNNLYMFYQVSELR |
| | NMLDHLYSRSVSRAAQVPSYNSVIVRTAFPEYITNVLGYQKPGYDADTLGKWYSA |
| ULZH01.1 | MKLSKEKHTRSAVANEEQNIGGILYRFPGKSIDGVKDQMLRRDKEVKKLYNVFNQIQVGTKPKKWNN |
| SEQ ID NO: | DEKLSPEENERRAQQKNIKIENYKWREACSKYVKSSQKTINYVIFYSYGNAENKLRYMRKNEDILKKM |
| 4242 | QEEEKLPKFSGGKLEDFVAYTLRKSLWSKYDTQEFDSVAAMWFLECIGKNNISDHEREIVCKLLELI |
| | RKDFSKLDPNVKGSQGANIVRSVRNQNMIVQPQGDRFLFPQVYAKENETVTNKNVEKEGLNEFLLNY |
| | ANLDDEKRAESLRKLRRILDVYFSAPNHYEKDMDITLSDNIEKEKFNVLEKHECGKKETGLFVDIPDVL |
| | MEAEAENIKLDAVVEKRERKVLNDRVRKQNIICYRYTRAVVEKYNSNEPLFFENNAINQYWIHHIENA |
| | VERILKNCKAGKLFKLRKGYLAEKVWKDAINLISIKYIALGKAVYNFALDDIWKDKKNKELGIVDERIR |
| | NGITSFDYEMIKAHENLQRELAVDIAFSVNNLARAVCDMSNLGNKESDFLLWKRNDIADKLKNKDDM |
| | ASVSAVLQFFGGKSSWDINIFKEAYKGKKKYNYEVRFIDDLRKAIYCARNENFHFKTALVNDEKWNTE |
| | LFGKIFKRETEFCLNVEKDRFYSNNLYMFYQVSELRNMLDHLYSRSVSRAAQVPSYNSVIVRTAFPEYI |
| | TNVLGYQKPGYDADTLGKWYSACYYLLKEIYYNSFLQSDRALQLFEKSVKTLSWDDKKQQRAVDNF |
| | KDHFSDIKSACTSLAQVCQIYMTEYNQQNNQIKKVRSSNDSIFDQPIYQHYKVLLKKAIANAFADYLK |
| | NNKDLFGFIGKPFKANEIREIDKEQFLPDWTSRKYEALCIEVSGSQELQKWYIVGKFLNAMSLNLMVGS |
| | MRSYIQYVTDIKR |
| IMG_ | MKLSKEKYTRSAVANNGDIKSAEVNNGNTKSEEVNNEYIRSAVANEKQNIGGVLYHAHGTDTIDLQD |
| 3300014770 | QMLRRDKEVKKLYNVFNQIQVGTKPKKWNNDEKLSPEENERRAQQKNIKMKNYKWREACSKYVESS |
| SEQ ID NO: | QRIINDVIFYSYRKAENKLRYMRKNEDILKKMQEAEKLSKFSGGKLEDFVAYTLRKSLVVSKYDTQEF |
| 4243 | DSVAAMVVFLECIGKNNISDHEREIVCKLLELIRKDFSKLDPNVKGSQGANIVRSVRNQNMIVQPQGDR |
| | FLFPQVYAKENETVTNKNVEKEGLNEFLLNYANLDDEKRAESLRKLRRILDVYFSAPNHYEKDMDITL |
| | SDNIEKGKFNVWEKHECGKKVTDLFVDIPDVLMEAEAENIKLDAVVEKRERKVLTDRVRRQNIICYRY |
| | TRAVIEKYNSNEPLFFENNAINQYWIHHIENAVERILKNCKAGKLFKLRKGYLAEKVWKDAINLISIKYI |
| | ALGKAVYNFALDDIWKDKENKELGIVDERIRNGITSFDYEMIKAHENLQRELAVDIAFSVNNLARAVC |
| | DMSNLGNKESDFLLWKRNDIADKLKNKDDMASVSAVLQFFGGKSSWDINIFKEAYKGKKKYNYEVR |
| | FIDDLRKAIYCARNENFHFKTALVNDEKWNTELFGKIFERETEFCLNVEKDRFYSNNLYMFYQVSELR |
| | NMLDHLYSRSVSRAAQVPSYNSVIVRTAFPEYITNVLGYQKPGYDADTLGKWYSACYYLLKEIYYNSF |
| | LQSDRALQLFEKSVKTLSWDDKKQQRAVY |
| mgm4560421. | MKLSKEKYTRSAVANNGDIKSAEVNNGNTKSEEVNNEYIRSAVANEKQNIGGVLYHAHGTDTIDLQD |
| 3 | QMLRRDKEVKKLYNVFNQIQVGTKPKKWNNDEKLSPEENERRAQQKNIKMKNYKWREACSKYVESS |
| SEQ ID NO: | QRIINDVIFYSYRKAENKLRYMRKNEDILKKMQEAEKLSKFSGGKLEDFVAYTLRKSLVVSKYDTQEF |
| 4244 | DSVAAMVVFLECIGKNNISDHEREIVCKLLELIRKDFSKLDPNVKGSQGANIVRSVRNQNMIVQPQGDR |
| | FLFPQVYAKENETVTNKNVEKEGLNEFLLNYANLDDEKRAESLRKLRRILDVYFSAPNHYEKDMDITL |
| | SDNIEKGKFNVWEKHECGKKVTDLFVDIPDVLMEAEAENIKLDAVVEKRERKVLTDRVRRQNIICYRY |
| | TRAVIEKYNSNEPLFFENNAINQYWIHHIENAVERILKNCKAGKLFKLRKGYLAEKVWKDAINLISIKYI |
| | ALGKAVYNFALDDIWKDKENKELGIVDERIRNGITSFDYEMIKAHENLQRELAVDIAFSVNNLARAVC |
| | DMSNLGNKESDFLLWKRNDIADKLKNKDDMASVSAVLQFFGGKSSWDINIFKEAYKGKKKYNYEVR |
| | FIDDLRKAIYCARNENFHFKTALVNDEKWNTELFGKIFERETEFCLNVEKDRFYSNNLYMFYQVSELR |
| | NMLDHLYSRSVSRAAQVPSYNSVIVRTAFPEYITNVLGYQKPGYDADTLGKWYSACYYLLKEIYYNSF |
| | LQSDRALQLFEKSVKTLSWDDKKQQRAVYKIVDTVSDAKLY |
| OVTY01.1 | MKLSKEKHIRSAVANEEQNIGGVLYHVLGTDTIGLKDQMLIRDRDVKQLYNVFNQIQVGDKPKKWKN |
| SEQ ID NO: | DEKLSPEENERRAQQKNIKMKNYKWREACSKYVESSQRTINDVLFYSYMEADKKIRNMRKNEDILIK |
| 4245 | MQEVTKLPKFSGGKLEDFVAYTLRKSLVVSKNSTQEFDSVAAMVVFLECIGKSNISDHEKEIVCKLLEL |
| | IRKDFSKLDPNVEGSQGANIVRSVRNQNMIVQPQGDRFSFPQVSDKEKKTVTNKNVEKEGLNEFLLNY |
| | ANLDDEKRAEILRKLRRILDVYFSAPNHYEKDMDITLSDNIDKEKFNVWKKYECGKKVTDLFVDIPDV |
| | LMEAEAENIKLDAVVEKRERKVLADRVRRQNIICYRYTRAVVEKYNSNESLFFENDAINQYWIHHIEN |
| | AVERILKNCKAGKLFKLRMGYLAEKVWKDAINLISIKYIALGKAVYNFALDDIWKDKKDKELGIVDER |
| | IRNGITSFDYEMIKAYENLQRELSVDIAFSVNNLARAVCDMSNLKDRESDFLLWKKEDIADKLKNKDD |
| | MASVSAVLQFFGGKSSWDINIFKEAYKGKNKYNYEVRFIDDLRKAIYCARNENFHFKTALVNNEKWN |
| | TELFGKIFERETEFCLNVEKDRFYSNNLYMFYPVSELRNMLDQLYSRSVSRAAQVPSYNSVFIRKNFPE |
| | DITNVLRYQKPGYDADTLDKWYSACYYLL |
| OOCM01.1 | MKLSKEKHIRSAVANEEQNIGGVLYHVLGTDTIGLKDQMLIRDRDVKQLYNVFNQIQVGDKPKKWKN |
| SEQ ID NO: | DEKLSPEENERRAQQKNIKMKNYKWREACSKYVESSQRTINDVLFYSYMEADKKIRNMRKNEDILIK |
| 4246 | MQEVTKLPKFSGGKLEDFVAYTLRKSLVVSKNSTQEFDSVAAMVVFLECIGKSNISDHEKEIVCKLLEL |
| | IRKDFSKLDPNVEGSQGANIVRSVRNQNMIVQPQGDRFSFPQVSDKEKKTVTNKNVEKEGLNEFLLNY |
| | ANLDDEKRAEILRKLRRILDVYFSAPNHYEKDMDITLSDNIDKEKFNVWKKYECGKKVTDLFVDIPDV |
| | LMEAEAENIKLDAVVEKRERKVLADRVRRQNIICYRYTRAVVEKYNSNESLFFENDAINQYWIHHIEN |
| | AVERILKNCKAGKLFKLRMGYLAEKVWKDAINLISIKYIALGKAVYNFALDDIWKDKKDKELGIVDER |
| | IRNGITSFDYEMIKAYENLQRELSVDIAFSVNNLARAVCDMSNLKDRESDFLLWKKEDIADKLKNKDD |
| | MASVSAVLQFFGGKSSWDINIFKEAYKGKNKYNYEVRFIDDLRKAIYCARNENFHFKTALVNNEKWN |
| | TELFGKIFERETEFCLNVEKDRFYSNNLYMFYPVSELRNMLDQLYSRSVSRAAQVPSYNSVFIRKNFPE |
| | DITNVLRYQKPGYDADTLDKWYSACYYLL |
| OVGC01.1 | MKLSKEKHIRSAVANEEQNIGGVLYHVLGTDTIGLKDQMLIRDRDVKQLYNVFNQIQVGDKPKKWKN |
| SEQ ID NO: | DEKLSPEENERRAQQKNIKMKNYKWREACSKYVESSQRTINDVLFYSYMEADKKIRNMRKNEDILIK |
| 4247 | MQEVTKLPKFSGGKLEDFVAYTLRKSLVVSKNSTQEFDSVAAMVVFLECIGKSNISDHEKEIVCKLLEL |
| | IRKDFSKLDPNVEGSQGANIVRSVRNQNMIVQPQGDRFSFPQVSDKEKKTVTNKNVEKEGLNEFLLNY |
| | ANLDDEKRAEILRKLRRILDVYFSAPNHYEKDMDITLSDNIDKEKFNVWKKYECGKKVTDLFVDIPDV |
| | LMEAEAENIKLDAVVEKRERKVLADRVRRQNIICYRYTRAVVEKYNSNESLFFENDAINQYWIHHIEN |
| | AVERILKNCKAGKLFKLRMGYLAEKVWKDAINLISIKYIALGKAVYNFALDDIWKDKKDKELGIVDER |
| | IRNGITSFDYEMIKAYENLQRELSVDIAFSVNNLARAVCDMSNLKDRESDFLLWKKEDIADKLKNKDD |
| | MASVSAVLQFFGGKSSWDINIFKEAYKGKNKYNYEVRFIDDLRKAIYCARNENFHFKTALVNNEKWN |
| | TELFGKIFERETEFCLNVEKDRFYSNNLYMFYPVSELRNMLDQLYSRSVSRAAQVPSYNSVFIR |
| OOBZ01.1 | MKLSKEKHIRSAVANEEQNIGGVLYHVLGTDTIGLKDQMLIRDRDVKQLYNVFNQIQVGDKPKKWKN |
| SEQ ID NO: | DEKLSPEENERRAQQKNIKMKNYKWREACSKYVESSQRTINDVLFYSYMEADKKIRNMRKNEDILIK |
| 4248 | MQEVTKLPKFSGGKLEDFVAYTLRKSLVVSKNSTQEFDSVAAMVVFLECIGKSNISDHEKEIVCKLLEL |
| | IRKDFSKLDPNVEGSQGANIVRSVRNQNMIVQPQGDRFSFPQVSDKEKKTVTNKNVEKEGLNEFLLNY |
| | ANLDDEKRAEILRKLRRILDVYFSAPNHYEKDMDITLSDNIDKEKFNVWKKYECGKKVTDLFVDIPDV |
| | LMEAEAENIKLDAVVEKRERKVLADRVRRQNIICYRYTRAVVEKYNSNESLFFENDAINQYWIHHIEN |
| | AVERILKNCKAGKLFKLRMGYLAEKVWKDAINLISIKYIALGKAVYNFALDDIWKDKKDKELGIVDER |
| | IRNGITSFDYEMIKAYENLQRELSVDIAFSVNNLARAVCDMSNLKDRESDFLLWKKEDIADKLKNKDD |
| | MASVSAVLQFFGGKSSWDINIFKEAYKGKNKYNYEVRFIDDLRKAIYCARNENFHFKTALVNNEKWN |
| | TELFGKIFERETEFCLNVEKDRFYSNNLYMFYPVSELRNMLDQLYSRSVSRAAQVPSYNSVFIR |
| OKRX01.1 | MKLSKEKHIRSAVANEEQNIGGVLYHVPGTDTIDLKDQMLIRDRDVKQLYKVFNQIQVGNKPKKWKK |
| SEQ ID NO: | DEKLSPEENERRAQQKNIKMKNYKWREACSEYVESSQRTINDVLFYSYMEADKKIRNMRKNEDILKK |
| 4249 | MQEVTKLPKFSGGKLEDFVAYTLRKSLVVSKNSTQEFDSVAAMVVFLECIGKSNISDHEKEIVYKLLEL |
| | IRKDFSKLDPNVKDSQGANIVRSVRNQNMIVQPQGDRFLFPQVSDKEKKTVTNKNVEKEGLNEFLLNY |
| | ANLDDEKRAEILRKLRRILDVYFSAPNHYEKDMEITLSDNIDKEKFNVWKKYECGKKVTGLFVNIPDV |
| | LMEAEAENIKLDAVVEKRERKILADRVRRQNIICYRYTRAVVEKYNSNESLFFENDAINQYWIHHIENA |
| | VERILKNCKAGKLFKLRKGYLAEKVWKDAINLISIKYIALGKAVYNFALDDIWKDKKDKELGIVDERIR |
| | NGITSFDYEMIKAYENLQRELAVDIAFSVNNLARAVCDMSNLKDRESDFLLWKKEDIADKLKNKDDM |
| | ASVSAVLQFFGGKSSWDINIFKEAYKGKNKYNYEVRFIDDLRKAIYCARNENFHFKTALVNNEKWNTE |
| | LFGKIFERETEFCLNVEKDRFYSNNLYMFYPVSELRNMLDQLYSRSVSRAAQVPSYNSVFIRKNFPEDIT |
| | NVLRYQKPGYDADTLGKWYSACYYLLKEIYYNSFLQSDKALQLFEK |
| UERC01.1 | MKLSKEKHIRSAVANEEQNIGGVLYHVPGTDTIDLKDQMLIRDRDVKQLYKVFNQIQVGNKPKKWKK |
| SEQ ID NO: | DEKLSPEENERRAQQKNIKMKNYKWREACSEYVESSQRTINDVLFYSYMEADKKIRNMRKNEDILKK |
| 4250 | MQEVTKLPKFSGGKLEDFVAYTLRKSLVVSKNSTQEFDSVAAMVVFLECIGKSNISDHEKEIVYKLLEL |
| | IRKDFSKLDPNVKDSQGANIVRSVRNQNMIVQPQGDRFLFPQVSDKEKKTVTNKNVEKEGLNEFLLNY |
| | ANLDDEKRAEILRKLRRILDVYFSAPNHYEKDMEITLSDNIDKEKFNVWKKYECGKKVTGLFVNIPDV |
| | LMEAEAENIKLDAVVEKRERKILADRVRRQNIICYRYTRAVVEKYNSNESLFFENDAINQYWIHHIENA |
| | VERILKNCKAGKLFKLRKGYLAEKVWKDAINLISIKYIALGKAVYNFALDDIWKDKKDKELGIVDERIR |
| | NGITSFDYEMIKAYENLQRELAVDIAFSVNNLARAVCDMSNLKDRESDFLLWKKEDIADKLKNKDDM |
| | ASVSAVLQFFGGKSSWDINIFKEAYKGKNKYNYEVRFIDDLRKAIYCARNENFHFKTALVNNEKWNTE |
| | LFGKIFERETEFCLNVEKDRFYSNNLYMFYPVSELRNMLDQLYSRSVSRAAQVPSYNSVFIRKNFPEDIT |
| | NVLRYQKPGYDADTLGKWYSACYYLLKEIYYNSL |
| UESQ01.1 | MKLSKEKHIRSAVANEEQNIGGVLYHVPGTDTIDLKDQMLIRDRDVKQLYKVFNQIQVGNKPKKWKK |
| SEQ ID NO: | DEKLSPEENERRAQQKNIKMKNYKWREACSEYVESSQRTINDVLFYSYMEADKKIRNMRKNEDILKK |
| 4251 | MQEVTKLPKFSGGKLEDFVAYTLRKSLVVSKNSTQEFDSVAAMVVFLECIGKSNISDHEKEIVYKLLEL |
| | IRKDFSKLDPNVKDSQGANIVRSVRNQNMIVQPQGDRFLFPQVSDKEKKTVTNKNVEKEGLNEFLLNY |
| | ANLDDEKRAEILRKLRRILDVYFSAPNHYEKDMEITLSDNIDKEKFNVWKKYECGKKVTGLFVNIPDV |
| | LMEAEAENIKLDAVVEKRERKILADRVRRQNIICYRYTRAVVEKYNSNESLFFENDAINQYWIHHIENA |
| | VERILKNCKAGKLFKLRKGYLAEKVWKDAINLISIKYIALGKAVYNFALDDIWKDKKDKELGIVDERIR |
| | NGITSFDYEMIKAYENLQRELAVDIAFSVNNLARAVCDMSNLKDRESDFLLWKKEDIADKLKNKDDM |
| | VSVAASLPVE |
| ULSX01.1 | MKLSKEKQIRSAVANKEKNTEGVLYRFPGDDIGGVQAQMLVRDRDVKQLYNVFNQIQLGNKPKEWM |
| SEQ ID NO: | NDEKLSPEENERRAQQKNIKMKNYKWRKACSKYVESSQRAINDILFYSYKEADKKIRNMSKNEDILIK |
| 4252 | MQNAEKLSKFSSGKLEDFVAYTLRKSLVVSKYGNQEFDSIAAMVVFLECIGKSNISDHEKEIVYKLLDL |
| | IRKDFSKLDPSIQDSQGANIVRSIRNQNMIVQPQGDRFSFPQVSDEEKKTVTNKNVEKDGLNEFMLNYA |
| | NLDEEKRAEVLRKLRRILDVYFSAPSHYEKDMDITLSDNVNKGKFYVWKKHECGKKENGLFVDIPDV |
| | LVEAEAESIKLDAVVEKRERKVLADRVRRQNIICYRYTRAVVEKYNSNEPIFFENDTINQYWIHHIENA |
| | VERILKNCKTGTLFKLRKGYLAEKVWKDAINLISIKYIALGKAVYNFALDDIWKDKKDKKLGIVDERIR |
| | NGITSFDYEMIKAHENLQRELAVNIAFSVNNLARAVCDMSNLGDKESDFLLWKRNDIADKLKNKDDM |
| | ASVSAVLQFFGGKSSWDINIFKEAYKGKKKYNYEVQFIDDLRKAIYCARNENFHFKTALVNNEKWNT |
| | ELFGKIFERETEFCLNVEKDRFYSNNLYMFYPVSELRNMLDHLYSRSVSRAAQVPSYNSVLVRTVFPEY |
| | ITNVLRYQKPGYDADTLGKWYNACYYLLKEIYYNSFLQSDKALQLFEKSVRTLRWDDKKQQRAVDN |
| | FKNHFSDIKSACTSLAQVCQIYMTEYNQ |
| OLXW01.1 | LKWRKNMKLSKVTYRVKDKNAKYKKEYNVRAAVANNSENAGGVLYHVPGVDLIDLREQMLDRDRS |
| SEQ ID NO: | VRLLYNIFNHIQTGTKPKKWGNDETLSVDENERKAKEQNIKIMNYKWREACSEYIEKSQSTINSVLFYS |
| 4253 | YEESGYKTKRMNDNEAIIVKMQYENRLSHFTGGKLEDFVAYTLRNSLVVSRYDNQEFDSVNAMVVFI |
| | NNIGNGNISDKDKKTICKLADLIRNDFSKLNPNVQSSQGANMVRSVRNQNMVVQPQGDKVSFPLVSDE |
| | GKNTVTNKNVEKKGLNEFLLNYANLDDEERMEKLRKLRRIIDVYFSSPSHYQKDMDISLSDNIDKTKF |
| | DVWKKHETGKKNTELFVDIPDELLTAETEKIKLDAVLEKKARKRLTDSIRKQNMICYRYTRAVVEKYN |
| | STENLFFENDSINQYWIHHIENAVERILKSCKAETLFKLRRGYLTEKVWKDAINLISIKYIALGKVIYNFT |
| | VDDIWKDKKVKNLGSIDEKIKHGITSFDYEMIKAQEALQRELAVNVAFAANNLARAVCDMTNLKDKE |
| | SDFLIWNKKDIANKLKNKDDMASVSVVLQFFGGKSSWDIDAFREAYKGNKYNYEVCFIDDLRKAVYA |
| | ARNESFHFKTALVNNDIWNTEFFGKLFIKETEICLDIEKDRFYSNNLPVFYSD |
| OPHK01.12 | MKLSKVTYRVKDKNAKYKKEYNVRAAVANNSENAGGVLYHVPGVDLIDLREQMLDRDRSVRLLYNI |
| SEQ ID NO: | FNHIQTGTKPKKWGNDETLSVDENERKAKEQNIKIMNYKWREACSEYIEKSQSTINSVLFYSYEESGYK |
| 4254 | TKRMNDNEAIIVKMQYENRLSHFTGGKLEDFVAYTLRNSLVVSRYDNQEFDSVNAMVVFINNIGNGNI |
| | SDKDKKTICKLADLIRNDFSKLNPNVQSSQGANMVRSVRNQNMVVQPQGDKVSFPLVSDEGKNTVTN |
| | KNVEKKGLNEFLLNYANLDDEERMEKLRKLRRIIDVYFSSPSHYQKDMDISLSDNIDKTKFDVWKKHE |
| | TGKKNTELFVDIPDELLTAETEKIKLDAVLEKKARKRLTDSIRKQNMICYRYTRAVVEKYNSTENLFFE |
| | NDSINQYWIHHIENAVERILKSCKAETLFKLRRGYLTEKVWKDAINLISIKYIALGKVIYNFTVDDIWKD |
| | KKVKNLGSIDEKIKHGITSFDYEMIKAQEALQRELAVNVAFAANNLARAVCDMTNLKDKESDFLIWN |
| | KKDIANKLKNKDDMASVSVVLQFFGGKSSWDIDAFREAYKGNKYNYEVCFIDDLRKAVYAARNESF |
| | HFKTALVNNDIWNTEFFGKLFIKETEICLDIEKDRFYSN |
| OLNZ01.1 | LKWRKNMKLSKVTYRVKDKNAKYKKEYNVRAAVANNSENAGGVLYHVPGVDLIDLREQMLDRDRS |
| SEQ ID NO: | VRLLYNIFNHIQTGTKPKKWGNDETLSVDENERKAKEQNIKIMNYKWREACSEYIEKSQSTINSVLFYS |
| 4255 | YEESGYKTKRMNDNEAIIVKMQYENRLSHFTGGKLEDFVAYTLRNSLVVSRYDNQEFDSVNAMVVFI |
| | NNIGNGNISDKDKKTICKLADLIRNDFSKLNPNVQSSQGANMVRSVRNQNMVVQPQGDKVSFPLVSDE |
| | GKNTVTNKNVEKKGLNEFLLNYANLDDEERMEKLRKLRRIIDVYFSSPSHYQKDMDISLSDNIDKTKF |
| | DVWKKHETGKKNTELFVDIPDELLTAETEKIKLDAVLEKKARKRLTDSIRKQNMICYRYTRAVVEKYN |
| | STENLFFENDSINQYWIHHIENAVERILKSCKAETLFKLRRGYLTEKVWKDAINLISIKYIALGKVIYNFT |
| | VDDIWKDKKVKNLGSIDEKIKHGITSFDYEMIKAQEALQRELAVNVAFAANNLARAVCDMTNLKDKE |
| | SDFLIWNKKDIANKLKNKDDMASVSVVLQFFGGKSSWDIDAFREAYKGNKYNYEVCFIDDLRKAVYA |
| | ARNESFHFKTALVNNDIWNTEFFGKLFIKETEICLDIEKDRFYSNNLPVFYSDNDLKKMLDHLYNNKVS |
| | RAAQVPSYNSVMVRKYFPENITSTLKYQKPGYDEDTLEKWYSACYYLLKEIYYNSFLQSDEALALFEE |
| | SVNNLKGDNKDQEL |
| OYAA01.1 | LKWRKNMKLSKVTYRVKDKNAKYKKEYNVRAAVANNSENAGGVLYHVPGVDLIDLREQMLDRDRS |
| SEQ ID NO: | VRLLYNIFNHIQTGTKPKKWGNDETLSVDENERKAKEQNIKIMNYKWREACSEYIEKSQSTINSVLFYS |
| 4256 | YEESGYKTKRMNDNEAIIVKMQYENRLSHFTGGKLEDFVAYTLRNSLVVSRYDNQEFDSVNAMVVFI |
| | NNIGNGNISDKDKKTICKLADLIRNDFSKLNPNVQSSQGANMVRSVRNQNMVVQPQGDKVSFPLVSDE |
| | GKNTVTNKNVEKKGLNEFLLNYANLDDEERMEKLRKLRRIIDVYFSSPSHYQKDMDISLSDNIDKTKF |
| | DVWKKHETGKKNTELFVDIPDELLTAETEKIKLDAVLEKKARKRLTDSIRKQNMICYRYTRAVVEKYN |
| | STENLFFENDSINQYWIHHIENAVERILKSCKAETLFKLRRGYLTEKVWKDAINLISIKYIALGKVIYNFT |
| | VDDIWKDKKVKNLGSIDEKIKHGITSFDYEMIKAQEALQRELAVNVAFAANNLARAVCDMTNLKDKE |
| | SDFLIWNKKDIANKLKNKDDMASVSVVLQFFGGKSSWDIDAFREAYKGNKYNYEVCFIDDLRKAVYA |
| | ARNESFHFKTALVNNDIWNTEFFGKLFIKAVSYTHLRAHETSQ |
| OQHH01.1 | MDISLSDNIDKTKFDVWKKHETGKKNTGLFVDIPDELLTAETEKIKLDAVLEKQARKRLTDSIRKQNM |
| SEQ ID NO: | VCYRYTRAVVEKYNLTENLFFENDYINQYWIHHIENAVERILKSCKAETLFKLRMGYLTEKVWKDAIN |
| 4257 | LISIKYIALGKVIYNFAVDDIWKDKKVKNLGSIDEKIKHGITSFDYEMIKAQEALQRELAVNVAFAANN |
| | LARAVCDMTNLKDKESDFLIWNKKDIANKLKNKDDMASVSVVLQFFGGKSSWDIDAFREAYKGNKY |
| | NYEVCFIDDLRKAVYAARNESFHFKTALVNNDIWNTEFFGKLFIKETEICLDIEKDRFYSNNLPVFYSDN |
| | DLKKC |
| OGNS01.1 | MEADKKIRNMRKNEDILKKMQEVTKLPKFSGGKLEDFVAYTLRKSLVVSKNSTQEFDSVAAMVVFLE |
| SEQ ID NO: | CIGKSNISDHEKEIVYKLLELIRKDFSKLDPNVKDSQGANIVRSVRNQNMIVQPQGDRFLFPQVSDKEK |
| 4258 | KTVTNKNVEKEGLNEFLLNYANLDDEKRAEILRKLRRILDVYFSAPNHYEKDMEITLSDNIDKEKFNV |
| | WKKYECGKKVTGLFVNIPDVLMEAEAENIKLDAVVEKRERKILADRVRRQNIICYRYTRAVVEKYNS |
| | NESLFFENDAINQYWIHHIENAVERILKNCKAGKLFKLRKGYLAEKVWKDAINLISIKYIALGKAVYNF |
| | ALDDIWKDKKDKELGIVDERIRNGITSFDYEMIKAYENLQRELAVDIAFSVNNLARAVCDMSNLKDRE |
| | SDFLLWKKEDIADYAIMLEVYKKYGYCKFLAQKLGFYNYDIGKYTYRMINEEYGLENYLEKMVADE |
| | VVLLQQKDRSELISMINAKQDGKLLKKVATLNQVLEERELDYRIKEFETTRYIEDSDGNKKKKKYKNA |
| | WKIVRF |
| OQCX01.1 | MILLINIGYIILKMLLNVYLRVVKQKHCLKLRRGYLTEKVWKDAINLISIKYIALGKVIYNFTVDDIWKD |
| SEQ ID NO: | KKVKNLGSIDEKIKHGITSFDYEMIKAQEALQRELAVNVAFAANNLARAVCDMTNLKDKESDFLIWN |
| 4259 | KKDIANKLKNKDDMASVSVVLQFFGGKSSWDIDAFREAYKGNKYNYEVCFIDDLRKAVYAARNESF |
| | HFKTALVNNDIWNTEFFGKLFIKETEICLDIEKDRFYSNNLPVFYSDNDLKKMLDHLYNNKVSRAAQV |
| | PSYNSVMVRKYFPENITSTLKYQKPGYDEDTLEKWYSACYYLLKEIYYNSFLQSDEALALFEESVNNL |
| | KGDNKDQELAVKNFRNNYKNIKSSCTSFSQVCQMYMTEYNQQNNQFKKVRSSKDSIVDKPIYQHYKL |
| | LLKKVIANAFASYLQHNKELFGFIGKPLKVNCLKEIDKEQFLPEWTSKKYVSLCEEVRKSPELQKMVY |
| | CWKVFKFKVSKSYGRFYEILYTICK |
| IMG_ | LSKYLDYGTSDSGLSTWAELGRFCNDGEVNYGIYRDALNPIPNRNIVMSKLYGADTIIPKVINRVNEDII |
| 3300010998 | KEYYQMIKEIDQYRIKGKCDSEDEQKKLLHFQKIKNKIEFRDIVEYSELINDLLGQLINWSFLRERDLLY |
| SEQ ID NO: | FQLGFHYACLHNKSRKPEGYDIVKRNNGTTVKGTILRQIAGLYINGIGILDKTTSGDYKEAAQAGGSFG |
| 4260 | RFYSYSNKVMESTGFYAPDDEEGRKNSLYLAGLELFENLNEHESIVKKRNDIDHFKYYMGKAGSLLDL |
| | YSEVFDRFFTYDMKYQKNVINMLENILMRYFVIISPKVGSGTKLLDNNGKKERAQIEIISSGICSDEFSYE |
| | YSGGNVKTPARNTEFLNTVARILYYPEEIESYSLVKVQGEFSVTRTDGKNRYPEKKNGNNNNQKNRGN |
| | RQNYQRNKNHNNKKSSMSETVYTSSSPNESFGYNPFRDLPRDFKM |
| GCA_002349225.1_ | MVSDYFEDEDDYARYLAGFLDYESSLGDYSVSPSGMLKDFCRTAVDSSDDETINIYYDGENPILQRNIV |
| ASM234922v1_ | LAKLYGNGQIISDVLKANRVNVGDIQEYYRSKDKLTAYKTTGTFNSIDELKQIKKYQELKNHVEFIDIV |
| genomic | EYSEILNELQAQLVNYTFLRERDLLYFQLGFHFSCLKNDSYKPSDYVRIEAGDKVISNAILHQIASLYIN |
| SEQ ID NO: | GISLYIKDEADTYVKDKDKSAGGNIRVFFKYCKNTFTEYSDSQTVYSAGLELFENLDEHGQIIDLRNYID |
| 4261 | HFKYYISDKSVNSGRSMIDIYSEVFDRFFTYDLKYHKNIPNTLYNILMGHFIETNFDFSTGTKDXXXXXX |
| | XXXXXXXXXXXXXXXXXXXXXXXXXXXXXXXXX |
| IMG_3300024272 | MGDISKVSKGESVAFGTVNEGFETGISSFDYERMKAEDSLNRAMIKYISFAVNIFDASVRNPEQRTGGK |
| SEQ ID NO: | EDILLLKPENIVMYEDAVKRVLRYFGGISKFSESSLDVSDKNGFFTALKDELYAARNYAFHYVTGEAE |
| 4262 | KREKPVVTTLLDTEYMLVGSIFRKKYFSNNVPMFYRTADIDNLMSRLYKSNRVILAQMPSFNKVLSRN |
| | AVVDFANAYLAGDSKREMSQPEISEQFRSSFYFLLKEIYYYDFILKEDLLERFKNGVECAQASAIKKEN |
| | NSRKHVAMKNAYRDFMSRADKLTKTKGITFGQFCQEIMTEYNQQNSQKQKKPSAVEKTYVVKGQTR |
| | TSVREVEDKEQIYKHYRTLLYAGIREAFLIYLKEEAAFGFLRSPKDGREKFRDLKEEDFSQGWTTECYT |
| | KLKDAIIEDKELSSWYVTAHFMNQKHLNHLIGEIKNYVQFIDDIEKRAKVTGNRVCSTEEKMGKFTSLL |
| | EVLEFCKLFCGQVSNNLEDYFANNEEYAKYVAGFVDYGGTSAALLQAFCRENKELNYYDELNPIPNR |
| | NIILSLLYGNTAVLSSSMKKVTLQEVKGYQKNKESLSGVFKNGACKDENEQRKMSNYQKQKNRIEFV |
| | DVLTLTELLNDLYGQLISYSYLRERDLMFMQLGFYYTKLFHTSSVPAQDKLRVLSGDCDIKDGAVLYQ |
| | IAAMYSYDLPIYGISKQGVAVRKKSGVSTGAKLNQFSTEYCGGKWDIYTNGLYFFEDVDGRHKDYVE |
| | VRNYIEHFKYFADHKKSILDLYSDLYNGFFSYDTKLKKSMSFVLPNILLSHFVNAKLSYEKDVVQKNSE |
| | SYRRARIVIREKDIKSDFLTYKNKENSKAFYVPARNDVFLKEVLDMISFKR |
| IMG_ | MGDISKVSKGESVAFGTVNEGFETGISSFDYERMKAEDSLNRAMIKYISFAVNIFDASVRNPEQRTGGK |
| 3300018878 | EDILLLKPENIVMYEDAVKRVLRYFGGISKFSESSLDVSDKNGFFTALKDELYAARNYAFHYVTGEAE |
| SEQ ID NO: | KREKPVVTTLLDTEYMLVGSIFRKKYFSNNVPMFYRTADIDNLMSRLYKSNRVILAQMPSFNKVLSRN |
| 4263 | AVVDFANAYLAGDSKREMSQPEISEQFRSSFYFLLKEIYYYDFILKEDLLERFKNGVECAQASAIKKEN |
| | NSRKHVAMKNAYRDFMSRADKLTKTKGITFGQFCQEIMTEYNQQNSQKQKKPSAVEKTYVVKGQTR |
| | TSVREVEDKEQIYKHYRTLLYAGIREAFLIYLKEEAAFGFLRSPKDGREKFRDLKEEDFSQGWTTECYT |
| | KLKDAIIEDKELSSWYVTAHFMNQKHLNHLIGEIKNYVQFIDDIEKRAKVTGNRVCSTEEKMGKFTSLL |
| | EVLEFCKLFCGQVSNNLEDYFANNEEYAKYVAGFVDYGGTSAALLQAFCRENKELNYYDELNPIPNR |
| | NIILSLLYGNTAVLSSSMKKVTLQEVKGYQKNKESLSGVFKNGACKDENEQRKMSNYQKQKNRIEFV |
| | DVLTLTELLNDLYGQLISYSYLRERDLMFMQLGFYYTKLFHTSSVPAQDKLRVLSGDCDIKDGAVLYQ |
| | IAAMYSYDLPIYGISKQGVAVRKKSGVSTGAKLNQFSTEYCGGKWDIYTNGLYFFEDVDGRHKDYVE |
| | VRNYIEHFKYFADHKKSILDLYSDLYNGFFSYDTKLKKSMSFVLPNILLSHFVNAKLSYEKDVVQKNSE |
| | SYRRARIVIREKDIKSDFLTYKNKENSKAFYVPARNDVFLKEVLDMISFKR |
| mgm4547164.3_ | LXXXXXXXXXXXXXXXXXXXXXXXXXXXXXXXXPLKWYVLAHFLSPKHLNHLTGAFKSYGVFIND |
| 3 | IERRAGDTGNRTEKEIIRAESGRIKSIVDMLVFSSTFCGMTTNIIEDYFEDKEEYDKMLIRFVEQDKDNAS |
| SEQ ID NO: | EDVVVTKKSCGEKKHLIGIYYDAANPIINRNMIRALMYGDLRMLCQIWNTVTIREIKNYNKLKENLSG |
| 4264 | VFEKGTCTSKEEQKKLREFQSEKNRIELHDLLTFTEIISDLNGQLVNWSYFRERDLMYMQLGVQYTKLF |
| | FTNTIGPEDIRRKISGKGFSITDGAMLYQIVALYNFGLPLYGFDETKKGRIVSNAGASVGKTISKFITNYC |
| | DEDVYYEGLFFFENIGEHEAITETRNYIDHFKYYADHKRSLLDLYSEVYERFFNYSVNYRKSVSYILPNI |
| | LERYFIVLNTEMDKGERLGRNGKESRYHTVAGIRVKKVSSANFTYKLKVGNEEKKYQIPAHSGEFLTT |
| | VKKILEYKAEN |
| OPDA01.1 | MISFRNRKIRKRIYGNDFYGYWQEKESGQAKDGKEQKAWESFENRIDQIGRERSFGAICQGLMVEYML |
| SEQ ID NO: | QNRDISMVQTETGDGKTNKKQIYKHYRTLLYICIRSAFTEYLREKWEELRTPVLTVKEWSKEEFCQTD |
| 4265 | GLKHLSLFDHLKETFNDAESGSFWYMAAHFINQKYLNHLIGSIRNYLQFTEDIEDRALSLGDCVDNKRE |
| | EKNLRYRNTLEILEFVAQFCERTTNVMEDYFESNQEYAAYLSGFVDYNVSKKETDIEKALYGFCRQKF |
| | KVDGKEYMAGIYYDGENLIPNRNIIRANMYGNVSCLKPYMDRITLKEIRTMYADQNKLDIVLKEGVCR |
| | TEEEQKALKEFQNEKNRIELFDLCTYTQILNDMQAKLIGWSYMRERDLMYYQLGYYYTKLFWTDAIS |
| | EEDARRRLVGELVNVEDGVILYQILAFNSYNLPMIANKNNTVTFLKGEGSIGGKAITAFLKNYENAERI |
| | YEEALDLFENTDEHAAIINTRNYIEHFKYFIKSDRSMMDLYSEVYDRFFRHDHNRKKNVPDSLKNVLA |
| | DNFMIADISMELGSKKVGEKKKGFREHKSARIEFTDKGIRSTDMTYTVKPDPKDSKKDEKVLVPAHSE |
| | VFLKQFQKILEYRI |
| OYBV01.1 | LYSGEDLYKEIRKELYAIRNITFHYTTKADKDQTQKHDLAEYLFEEEFSDITELFREKYYANNVWKYY |
| SEQ ID NO: | DVEVINTIMENIYCGRKYRAAQVPAFKNIISRPELPQVMNGFVKGNSLRRLMNCPDRDVINKYWSALF |
| 4266 | FVLKELYYYDFLQEQKKPEDNVKERFFRAIEKLSGQENDDKKQKAWESFGNRIDQIGRDRSFGAICQG |
| | LMIEYMLQNSDISMVQTETDNGKANNKKQIYKHYRTLLYNCIREAFIEYLREKWEELRTPVLTVKEWS |
| | KEEFCRADGLKHLSLFDHLKKTFNDAESGSSWYMAAHFINQKYLNHLLGSIRNYLQFTEDIEDRAISLG |
| | DCVDNKREEKNLRYRNTLEILEFVAQFCERTTNVMEDYFESNQEYAEYLSGFVDYNTTKKETDIEKAL |
| | YSFCKQKFKVDGKEYMAGIYYDGENLIPNRNIIRANMYGNTSCLKPCMDRITLKEIRTMYADQNKLDL |
| | VLKEGVCHTEEEQKAYREYQNEKNRIELFDVCTYTQILNDMQARLIGWSYMRERDLMYYQLGYYYT |
| | KLFWTDSISEEDARRRLVGNLVNVEDGAILYQILAFNSYNLPIIANKNNTVTLLKDEGSIGGKAITAFFK |
| | NYENAEMIYEEALDLFENMDEHAAIINTRNYIEHFKYFIKSDRSMMDLYSEIYDRFFRHDHNRKKNVP |
| | DSLKNVLADNFMIVDIDMELGSKKVGEKKKGFREHKAARIEFTDSGIRSTDMTYTIKPDIKDNKKDKK |
| | VLVPARSEVFLKQFRKILEYRIQDKIQ |
| OQDP01.1 | LYSGEDLYKEIRKELYAIRNITFHYTTKAEKDQTQKHDLAEYLFEEEFSDITELFREKYYANNVWKYYD |
| SEQ ID NO: | AEVINTIMENIYCGRKYRAAQVPAFKNIISRPELPQVMNGFVKGNSLRRLMNCPDRDVINKYWSALFF |
| 4267 | VLKELYYYDFLQEQKRPEDNVKERFFRAIKKLSGQEKGDKEQKAWESFENRIDQIGRDRSFGAICQGL |
| | MIEYMLQNSDISMVQTETDNGKANNKKQIYKHYRTLLYNCISEAFIEYLREKWKELRTPVLTAKEWSK |
| | EEFCRVDGLKHLSLFDHLKETFNDAESGSSWYMAAHFINQKYLNHLLGSIRNYLQFTEDIEDRAISLGD |
| | CVDNKREEKNLRYRNTLEILEFVAQFCERTTNVMEDYFESNQEYAEYLSGFVDYNTTKKETDIEKALY |
| | SFCKQKFKVDGKEYMAGIYYDGENLIPNRNIIRANMYGNTSCLKPCMDRITLKEIRTMYADQNKLDM |
| | VLKEGVCHTEEEQKAYREYQNEKNRIELFDVCTYTQILNDMQARLIGWSYMRERDLMYYQLGYYYT |
| | KLFWTDSISEEDARRRLVGNLVNVEDGAILYQILAFNSYNLPIIANKNNTVTLLKDEGSIGGKAITAFFK |
| | NYENAEMIYEEALDLFENMDEHAAIINTRNYIEHFKYFIKSDRSMMDL |
| OQFB01.1 | MENIYCGRKYRAAQVPAFKNIISRPELPQVMNGFVKGNSLRRLMNCPDRDVINKYWSALFFVLKELYY |
| SEQ ID NO: | YDFLQEQKKPEDNVKERFFRAIEKLSGQENDDKKQKAWESFGNRIDQIGRDRSFGAICQGLMIEYMLQ |
| 4268 | NSDISMVQTETDNGKANNKKQIYKHYRTLLYNCIREAFIEYLREKWEELRTPVLTVKEWSKEEFCRAD |
| | GLKHLSLFDHLKKTFNDAESGSSWYMAAHFINQKYLNHLLGSIRNYLQFTEDIEDRAISLGDCVDNKR |
| | EEKNLRYRNTLEILEFVAQFCERTTNVMEDYFESNQEYAEYLSGFVDYNTTKKETDIEKALYSFCKQKF |
| | KVDGKEYMAGIYYDGENLIPNRNIIRANMYGNTSCLKPCMDRITLKEIRTMYADQNKLDLVLKEGVC |
| | HTEEEQKAYREYQNEKNRIELFDVCTYTQILNDMQARLIGWSYMRERDLMYYQLGYYYTKLFWTDSI |
| | SEEDARRRLVGNLVNVEDGAILYQILAFNSYNLPIIANKNNTVTLLKDEGSIGGKAITAFFKNYENAEMI |
| | YEEALDLFENMDEHAAIINTRNYIEHFKYFIKSDRSMMDLYSEIYDRFFRHDHNRKKNVPDSLKNVLA |
| | DNFMIVDIDMELGSKKVGEKKKGFREHKAARIEFTDSGIRSTDMTYTIKPDIKIIKMIKKFSYLHAQKYF |
| OGMW01.1 | MENILETISAKLIKGESIEELTQEALDKGISPKDILTKSLLEGMTRAGEMFKEKTLTMYDVLESAKNMEK |
| SEQ ID NO: | SVKILKPLLRDEDIVKKGKILTASVQGDFHDIGKNLCILMLESNGFQVIDMGVDVPQEKIEECIKKESPNI |
| 4269 | LMLSAMIAPTMEVMKMTIEYLREKWKELRTPVLTAKEWSKEEFCRVDGLKHLSLFDHLKETFNDAES |
| | GSSWYMAAHFINQKYLNHLLGSIRNYLQFTEDIEDRAISLGDCVDNKREEKNLRYRNTLEILEFVAQFC |
| | ERTTNVMEDYFESNQEYAEYLSGFVDYNTTKKETDIEKALYSFCKQKFKVDGKEYMAGIYYDGENLIP |
| | NRNIIRANMYGNTSCLKPCMDRITLKEIRTMYADQNKLDMVLKEGVCHTEEEQKAYREYQNEKNRIE |
| | LFDVCTYTQIQHDMQARLIGWSYMRERDLMYYQLGYYYTKLFWTDSISEEDARRRLVGNLVNVEDG |
| | AILYQILAFNSYNLPIIANKNNTVTLLKDVGSIGGKAITAFFKNYENAEMIYEEALDLFENMDEHAAIIN |
| | TRNYIEHFKYFIKSDRSMMDLYSEIYDRFFRHDHNRKKNVPDSLKNVLADNFMIVDIDMELGSKKVGE |
| | KKKGFREHKAARIEFTDSADMTYTIKPDIKDNKKVLVPARSEVFLKQFRKILEYRIQDKTQ |
| CEAE01.1 | MVAHFMTPKHLNHLRGEIKSYFAYIHGIEDRRYMAMGVRVPVNEVKRTQYRKILEILDLAAEYNGRIS |
| SEQ ID NO: | AKWEDYYTSEQEYAENIHQYLNFSNPHDRRDLKEQLRSFCNEKNNNSPSGYIGIFYNEKGPILNRNVAR |
| 4270 | ARMYGTEMILARALVNDKVQKEEILEYYRSLKMLKKNVFKKCKCENIGQEKKRRSYQQQKNRIELVD |
| | ILKYSEILNDLMSQLISWCYLRERDRMYFQIGFYYVALSAEASKIPEDSKLRILKGKGDSSGTEINITDNA |
| | VLYQMAAVYTYELPVYCLDEEGNAIVSRSAPRNTLTANGVRAFCQEYCREEWANKDTSIYENGLELF |
| | ESPQDERDIIELRNYIDHFKYYARRDRSILELYSKVFERFFKHDVKLKKSVTVILSNILARYFVIPKLSINY |
| | REEEEGEEKHKITEIDITELKTDVTIHKYEKKEADNQTKIYKKTLDYYNEKFLNRLKKVLTYNQG |
| mgm4547164. | LXXXXXXXXXXXXXXXXXXXXXXXXXXXXXXXXXXXXXXXXXXXXXXXXXXXXXXXXXXXXX |
| 3 | XXXXXXXXXXXXXXXXXXXXXXXDAESYFGEHQGISDEMKLASFCRQPIDELKADGTPQIIGLYHDG |
| SEQ ID NO: | TNEILNRNIVRASLYGTDKIIQGAADKVTETDIRDFYRMQTAVSQEELADRAKDQAEKAKRIKEVQNK |
| 4271 | KNRVELVNVKIYSDILNDLMTQLVSWAYFRERDLMYLALGAQYMRIFHGKKISEESVLRKLKWRDVV |
| | NIQEGAVLYQIVAMYTYHLPLYQVKYAADGRGIEEVKERIGMYGYKKDYFEKYCHREDILRPVLYFFE |
| | VEKDQEKIRSIRNYIDHFSYFVKADKSILDLYSDFYNMFFSYSENFRKSISFILPNILSKYFVLADIHLSKK |
| | TREAVTMNNVRVMRNCAGFDIDKELKSYQFTYNIKASVEDEDSTDGKEECTENTLNHIDEKTDLTTCK |
| | QSKILPVKIDARDAQFLKDIKQILRYSNV |
| OWDR01.1 | MAYQKLTKQRYYANNVGLFYRAEEIQELVQELYSQKNITEAQIPAFRTVLKRKDLPGYMEELGILFPD |
| SEQ ID NO: | NTQEKSKGDFEGTLYFLMKEIYYRDFIVKDKAAAYFFKAVDQNKEQSKKEDKHTERAAENFHRYVKS |
| 4272 | LEKKYNKKEISFGTVCQYIMMEYNQQNTTKQETEIYKHFKMLISLCIRKAFGNYIKETYRFLFHPIYSKQ |
| | QGEPEYLDTLELESGVKEKNYEWFTLAHFLHPVQLNHLVGDLKSYIQYREDILRRIVFAEQRVYADQQ |
| | KEVQQKVKTAKEILEVLEFVREVSGRVSNEYTDYYENEEEYAEFLYQYIDFRKREGKSAFESLKYFCQ |
| | NILDSGTVVDLYADTENPKVLRNIELTRMYAGSNVKIPEYEKITEDEIKMYYQEKNSVALILSRGLCRN |
| | EKEQKKVIEFNWKKKRLTLNEITDVFSLVNDLLGKMISFSYLRERSNVSSSWILLYGIMC |
| OHZY01.1 | VVDLYADTENPKVLRNIELTRMYAGSNVKIPEYEKITEDEIKMYYQEKNSVALILSRGLCRNEKEQKK |
| SEQ ID NO: | VIEFNWKKKRLTLNEIVNDLLGKMISFSYLRERDQMYLLLGFYYMALCAENKSENHLGWKGETLDKL |
| 4273 | ESSDSKFDIGGGLVLYQIVSAFNFGSKLLYISEDGRWKMAGGAFPGKYGRFENDYNHRTSLSKVIRLFE |
| | NESYEREIIYWRDYVDHMKYYVNQNQSIMEIYSAFYSKVLGYSAKLRKSVVFNLQAALEKHHINPECI |
| | WMTSDGKCADUCLMKNLESQKFTYKLAKREGEKTERKICMNALNENFLKTIRTSLEYKK |
| OLPG01.1 | MKISKVDHVKSGIDQKLSSQRGMLYKQPQKKYEGKQLEEHVRNLSRKAKALYQVFPVSGNSKMEKE |
| SEQ ID NO: | LQIINSFIKNILLRLDSGKTSEEIVGYINTYSVASQISGDHIQELVDQHLKESLRKYTCVGDKRIYVPDIIV |
| 4274 | ALLKSKFNSETLQYDNSELKILIDFIREDYLKEKQIKQIVHSIENNSTPLRIAEINGQKRLIPANVDNPKKS |
| | YIFEFLKEYAQSDPKGQESLLQHMRYLILLYLYGPDKITDDYCEEIEAWNFGSIVMDNEQLFSEEASMLI |
| | QDRIYVNQQIEEGRQSKDTAKVKKNKSKYRMLGDKIEHSINESVVKHYQEACKAVEEKDIPWIKYISD |
| | HVMSVYSSKNRVDLDKLSLPYLAKNTWNTWISFIAMKYVDMGKGVYHFAMSDVDKVGKQDNLIIGQ |
| | IDPKFSDGISSFDYERIKAEDDLHRSMSGYIAFAVNNFARAICSDEFRKKNRKEDVLTVGLDEIPLYDNV |
| | KRKLLQYFGGASNWDDSIIDIIDDKDLVACIKENLYVARNVNFHFAGSEKVQKKQDDILEEIVRKETRD |
| | IGKHYRKVFYSNNVAVFYCDEDIIKLMNHLYQREKPYQAQIPSYNKVISKTYLPDLIFMLLKGKNRTKI |
| | SDPSIMNMFRGTFYFLLKEIYYNDFLQASNLKEMFCEGLKNNVKNKTKKTKKI |
| mgm454716 | MIKNLIQDWIRALFXXXXXXXXXXXXXXXXXXXXXXXXXXXXXXXXXXXXXXXXXXXXXXXXXX |
| 4.3_2 | XXXXXXXXXXXXXXXXXXXXXXXXXXXXXXXXXXXXXXXXXXXKSADFIKKLRYIGEDINKEFGQ |
| SEQ ID NO: | LLKKGIEQYKNIEEPDHTIISKVYDYFGDSYIEAKALRKWDDLKDHEIEALIYVMVSYYLRKSLCGTIDL |
| 4275 | DEGKIRKVLGTDVSVHADTENAITCHTNVGDMVDKKSVSIRSTIQKLLISMLQQDPEQRRKMFGQIGK |
| | MDVYIFILVLHKDFSKIRQMQNLEKSIRNQNVPVQCRRIYSKKATAGRGGVSSEDKVVRLMPSSAVFD |
| | NQPINEISRRSYEFSFLQKYAAAEDKHDRDKILIEVNSLLVLFLYGEQAYGDRSEGKATDLEIVPCDQRE |
| | DWKHFSPDAYQKLNDYLSQDDKRASDSKVFWSSLKSELRKAMLIHYQESLRVLAGKYKAEGKKKEE |
| | WPAEMKEAMYWITWFEDCVERILRIQRANTRLSLYKLESGYLYKKSWREFLSFMGQKYIALGKAVYH |
| | IILPHNYMQGCKYDLGQVPAFYKERGITGFDYEYIKAVEALQRETSAYVASAAGNFIRSVSRQQDESKD |
| | LLLESQSAYFRNMTPENLSRAYIRVMRYFGGESAWQDWDALSKASDIEQFKRELLNIIRSCLYVLRNQS |
| | FHYAEGIVNELGGLSQDEAAVIESIIERRIDSISGVIREKYYSNNAWMFYADENIKGLLNVLYKKTGEIP |
| | AQVPSFHSACKKDQLLRLFMGETYKRAD |
| IMG_ | VFNIYRNFIDEIFEIIDKFDFKESNSISYLFPKFHKIYKRICKSENINDRQNGARKYLLQTIYYYYFQYEIEN |
| 3300008271 | NKNDIFKYLNLYKSKIKAKKISYSHIIDNKDVNNKNIEILYRNIQREGMLNNRLLQMNNEWIEFIMIQFIE |
| SEQ ID NO: | FISTKKLNWILDDLSEYRKKEKLDEKNKNKLLENLKQKMNKNITYSNDSYVFISLAQFLDLKEISNLIH |
| 4276 | DIKKFVQFREKNISKYKPEKNKVYIEELRKISYILKVMLEHKERVIQKHYLESYDEGISIMYGKDIEKKGI |
| | KDIKIKIKNENQEVINQPLYKSGNDENSSWIVLYGIEQAKRNGTFKFFKEFFNTNEDIKLCKEDIQKYEH |
| | LYNEKEENQRKVDEYISSEENNNIEEIKEINNNKKQLFYYYKNMINGDGLKKGYDFINDIYSHCLSWAY |
| | RIERDCSIYKVEAYNGKIKNFRNEIAHFNYFQKTDKSLLDLLNDFYNIFDYNLKYQRDVQKVINNIFEK |
| | YQVVREDGGPVIFYCKVDKKLKLSENLVPKKHSKYPEIELVHKKYVIFFKKLFEHKK |
| IMG_ | MKVVRPYGVSKTDHMRADVRVRRIHPNSFRNEAQDVANFAVSHSKLILAQWISLIDKVITKPSKGGAP |
| 3300005916 | SVDQFNLRNGIGESVWKLFLSKDLLNAPTTKRLKRLEREWWSKIHPYGSDIDPTGIMNFKGRWFKVFC |
| SEQ ID NO: | EDIEPAKVDFELIALALHDHLYSRERRLGESSTARARGLILARADSIGCNVLKERQQLLSFGTPWNNDEI |
| 4277 | KQYKTATNLVDELKSAAKKYEGQRAARTKRAIGQVFHNHYGKLFVDDDGKPINVAMAQRAFPGLFA |
| | LHEAAKSNIKRILKAPQDHWLKKFPDSPGSFMEGLSDDWRNKEINHLIRLGKVIHYEAAKLGGAYRPS |
| | QIFDNWSGNFSTSAFWSTDGQIAIKQSEAFVRNWRTIVSFASRSITNWADPNSAEEKDILGEREILRAVE |
| | SLSIAEFDRLASrYFGNSVERFATTSRAYRQDVMKLALLGLSRLRHSTFHFSGLSSFLDALHSLPEDCNE |
| | AVAEAVRGLYKDDINAHAQHLSEKLRSVDVERFLEQDQVDSLCHVLIDSEVYFNDLPNFQ SILHRGQD |
| | AYLFRKIDMRLPSVATRLSLNNQSTKCQYLILKLLYEGPFAKWLCDLPSDILHEFVKQHMDRATNEAR |
| | RIGENDKHIARAAGTIKIQENDTIFDLFSMLRRLSLSESRESQKQSVSKRNMGKYLRKLELDVIAQTFQY |
| | FVEANYFDWIFDLRVGPESYSF |
| IMG_ | MKVVRPYGVSKTDHMRADVRVRRIHPNSFRNEAQDVANFAVSHSKLILAQWISLIDKVITKPSKGGAP |
| 3300022856 | SVDQFNLRNGIGESVWKLFLSKDLLNAPTTKRLKRLEREWWSKIHPYGSDIDPTGIMNFKGRWFKVFC |
| SEQ ID NO: | EDIEPAKVDFELIALALHDHLYSRERRLGESSTARARGLILARADSIGCNVLKERQQLLSFGTPWNNDEI |
| 4278 | KQYKTATNLVDELKSAAKKYEGQRAARTKRAIGQVFHNHYGKLFVDDDGKPINVAMAQRAFPGLFA |
| | LHEAAKSNIKRILKAPQDHWLKKFPDSPGSFMEGLSDDWRNKEINHLIRLGKVIHYEAAKLGGAYRPS |
| | QIFDNWSGNFSTSAFWSTDGQIAIKQSEAFVRNWRTIVSFASRSITNWADPNSAEEKDILGEREILRAVE |
| | SLSIAEFDRLASrYFGNSVERFATTSRAYRQDVMKLALLGLSRLRHSTFHFSGLSSFLDALHSLPEDCNE |
| | AVAEAVRGLYKDDINAHAQHLSEKLRSVDVERFLEQDQVDSLCHVLIDSEVYFNDLPNFQSILHRGQD |
| | AYLFRKIDMRLPSVATRLSLNNQSTKCQYLILKLLYEGPFAKWLCDLPSDILHEFVKQHMDRATNEAR |
| | RIGENDKHIARAAGTIKIQENDTIFDLFSMLRRLSLSESRESQKQSVSKRNMGKYLRKLELDVIAQTFQY |
| | FVEANYFDWIFDLRVGPESYSF |
| IMG_ | MKVVRPYGVSKTDHMRADVRVRRIHPNSFRNEAQDVANFAVSHSKLILAQWISLIDKVITKPSKGGAP |
| 3300025642 | SVDQFNLRNGIGESVWKLFLSKDLLNAPTTKRLKRLEREWWSKIHPYGSDIDPTGIMNFKGRWFKVFC |
| SEQ ID NO: | EDIEPAKVDFELIALALHDHLYSRERRLGESSTARARGLILARADSIGCNVLKERQQLLSFGTPWNNDEI |
| 4279 | KQYKTATNLVDELKSAAKKYEGQRAARTKRAIGQVFHNHYGKLFVDDDGKPINVAMAQRAFPGLFA |
| | LHEAAKSNIKRILKAPQDHWLKKFPDSPGSFMEGLSDDWRNKEINHLIRLGKVIHYEAAKLGGAYRPS |
| | QIFDNWSGNFSTSAFWSTDGQIAIKQSEAFVRNWRTIVSFASRSITNWADPNSAEEKDILGEREILRAVE |
| | SLSIAEFDRLASrYFGNSVERFATTSRAYRQDVMKLALLGLSRLRHSTFHFSGLSSFLDALHSLPEDCNE |
| | AVAEAVRGLYKDDINAHAQHLSEKLRSVDVERFLEQDQVDSLCHVLIDSEVYFNDLPNFQSILHRGQD |
| | AYLFRKIDMRLPSVATRLSLNNQSTKCQYLILKLLYEGPFAKWLCDLPSDILHEFVKQHMDRATNEAR |
| | RIGENDKHIARAAGTIKIQENDTIFDLFSMLRRLSLSESRESQKQSVSKRNMGKYLRKLELDVIAQTFQY |
| | FVEANYFDWIFDLRVGPESYSF |
| IMG_ | MRIIRPYGRSAVIVQQVKDGTARERRIERNGAAQPEGKAAAGSPVQPVAALLAEGEPMLRQWLSIIDKI |
| 3300012994 | IAKPAADRAVKNIADARKRERLEKENREKQKIRQVREVLGQAVWEYLEAEQLLTEEEKQKLKEYWDS |
| SEQ ID NO: | KISAAAAKQGRRGDFPKGKLYRLFAGEAEWRDIDKNKAETIVNKIYRHLYGQACKIVPPHKAGADRA |
| 4280 | QYGHKQHSNQDKRAKSEGLIADRARAIAANVLQPRRVLANTDFSERDIERYRDKLRSHKDGDLAARIR |
| | QAVLAEQEKADKQPAYNIAVGELRAIWPVIFGEAKKYAEAQEADKALLAVHNALKEAYKQRLKGKP |
| | LFVDKQKAFLPQGAEAKNKLKELVVERLEKLLPADDEALFALLRNRRKNQDISHFIRLGKIIHYTAADK |
| | ARAAEADKAGADVTDFAGDETSFIARYWPKAEEVTDSRYWGSAGQTEIKQNEAFVRVWRRALAFAA |
| | RTVKDWVDPDNKIKGDILFSISEALSADRFNAAKAEHKYNLLFADDGDISDKKPSIAQQDWCFFALKA |
| | LYSLRNAAFHFKGMGEFVGALQKMGKLHEITGKETAEEKAKKEAENNIIKAVCPVLTKRYQQHRQKY |
| | QERLKDRLENIQLAYYLGGADIRFLWHKIATSNSSLLPLPRLRRVLERAEKAWKGGKQGEDSSGKLLP |
| | EIALPDYVPAQNREGEEGEAANCQWTVLKLLYDGAFKTWLDALPYGKVQGYIDEAICRATGAAQNLN |
| | KKNAKGEPKSAEELALTVSRNDGLYKLQPGDTIETFFYQLTAATATEMRVQNHYESNGAKAREQAAY |
| | IEDLKCDVVALALAAYLQVEDEGQRKNLAFVLDIPQRKKTENPSIDVHKQL |
| OQJI01.1 | MPSARGTDIYAREELRAEIASAFAAQAFGIDYTQNKYMENHEAYIQDYIKVLENEPNELFAAIKDAEKI |
| SEQ ID NO: | SDYLIEKGEFGLEKETEMSRDASFIKNMDTYVALHREYIEEVSQNKEPIVINGYGGPGAGKSTACMEIT |
| 4281 | AALKKEGYNAEYVQEYAKELVYEKDMEMLDGSPEHQYEILKEQTRRMDRLYDQVDFIVTDSPVMLN |
| | TIYNKQLTPEYESLVNELQGEYINYSFFMERDVSNFEEEGRIHNLTESIEKDNEIKDMLQKNEIKYKTYN |
| | HENVNEIVNDAIDFYEKINEGKSNEKEVVRDAENIQLTGAEAARFRMAMKGQERALDMFMNDESIPE |
| | HN |
| IMG_ | LAKAYRPAKQKKKHSYGAIRGAVQQIRNNVNHYKKDALNTIFNISEFENPSTTDNKNQTNYAETIYKN |
| 3300028769 | LFVTELKKIPEAFAQQLKTGGVLSYYTLDNLKTLLTTFQFSLCRSVIPFAPGFKKVFNGGINYQNATKDE |
| SEQ ID NO: | SFYELMLERYLPKENFAEEAYNARYFLLKLIYNNLFLPQFTTSKNAFADSVSFVQQQNKKQAEHSKRP |
| 4282 | KAFAFEAVRPMTNADSIAGYMAYVQSELMQEQNKKEEKATDETRINFEKFMLQVYIKGFDSFLKAQE |
| | FDFIQLPQPQLSATDNNQQKADKLNQLETAITGDCKLTPHYAKADVATHIAFYVFCKLLDAGHLSNLR |
| | NELIKFRESVDEFQFGHLLEIIEICLLSADIVPTDYRKLYSNEADCLARLTPFIEDGADITNWSDLFVQTD |
| | KHTPVIHANIELSVKYGTTKLLEQIVSKDPLFKTTEANFTAWNTAQKSIEQLIKQREDHHEKWVKAKN |
| | ADDKEKQEKRRDKSNWAQQYINEHGDDYLDICDYINTYNWLDNKMHFVHLNRLHSLTIELLGRMAG |
| | FVALFDRDFQFVDAQRSNDKFKIEEFVNLKRMDEKLNAVPRKKIKEIQDIRYKISQRNGNKIDESVRDIL |
| | IQSIHEKRNYYNSTFLLVNNDEKKENKVYDIRNHLAHFNYLTKNAADYSLLDLINELRELLNYDRKLK |
| | NAVSKAFIDLFDKHGMKLTLKLNAQHKLEVENLESKQLYHLGTSAKDKPEYRLTTNQVPTKYCAMCR |
| | SLLEMKN |
| IMG_ | LAKAYRPAKQKKKHSYGAIRGAVQQIRNNVNHYKKDALNTIFNISEFENPSTTDNKNQTNYAETIYKN |
| 3300028864 | LFVTELKKIPEAFAQQLKTGGVLSYYTLDNLKTLLTTFQFSLCRSVIPFAPGFKKVFNGGINYQNATKDE |
| SEQ ID NO: | SFYELMLERYLPKENFAEEAYNARYFLLKLIYNNLFLPQFTTSKNAFADSVSFVQQQNKKQAEHSKRP |
| 4283 | KAFAFEAVRPMTNADSIAGYMAYVQSELMQEQNKKEEKATDETRINFEKFMLQVYIKGFDSFLKAQE |
| | FDFIQLPQPQLSATDNNQQKADKLNQLETAITGDCKLTPHYAKADVATHIAFYVFCKLLDAGHLSNLR |
| | NELIKFRESVDEFQFGHLLEIIEICLLSADIVPTDYRKLYSNEADCLARLTPFIEDGADITNWSDLFVQTD |
| | KHTPVIHANIELSVKYGTTKLLEQIVSKDPLFKTTEANFTAWNTAQKSIEQLIKQREDHHEKWVKAKN |
| | ADDKEKQEKRRDKSNWAQQYINEHGDDYLDICDYINTYNWLDNKMHFVHLNRLHSLTIELLGRMAG |
| | FVALFDRDFQFVDAQRSNDKFKIEEFVNLKRMDEKLNAVPRKKIKEIQDIRYKISQRNGNKIDESVRDIL |
| | IQSIHEKRNYYNSTFLLVNNDEKKENKVYDIRNHLAHFNYLTKNAADYSLLDLINELRELLNYDRKLK |
| | NAVSKAFIDLFDKHGMKLTLKLNAQHKLEVENLESKQLYHLGTSAKDKPEYRLTTNQVPTKYCAMCR |
| | SLLEMKN |
| IMG_ | LAKAYRPAKQKKKHSYGAIRGAVQQIRNNVNHYKKDALNTIFNISEFENPSTTDNKNQTNYAETIYKN |
| 3300030002_2 | LFVTELKKIPEAFAQQLKTGGVLSYYTLDNLKTLLTTFQFSLCRSVIPFAPGFKKVFNGGINYQNATKDE |
| SEQ ID NO: | SFYELMLERYLPKENFAEEAYNARYFLLKLIYNNLFLPQFTTSKNAFADSVSFVQQQNKKQAEHSKRP |
| 4284 | KAFAFEAVRPMTNADSIAGYMAYVQSELMQEQNKKEEKATDETRINFEKFMLQVYIKGFDSFLKAQE |
| | FDFIQLPQPQLSATDNNQQKADKLNQLETAITGDCKLTPHYAKADVATHIAFYVFCKLLDAGHLSNLR |
| | NELIKFRESVDEFQFGHLLEIIEICLLSADIVPTDYRKLYSNEADCLARLTPFIEDGADITNWSDLFVQTD |
| | KHTPVIHANIELSVKYGTTKLLEQIVSKDPLFKTTEANFTAWNTAQKSIEQLIKQREDHHEKWVKAKN |
| | ADDKEKQEKRRDKSNWAQQYINEHGDDYLDICDYINTYNWLDNKMHFVHLNRLHSLTIELLGRMAG |
| | FVALFDRDFQFVDAQRSNDKFKIEEFVNLKRMDEKLNAVPRKKIKEIQDIRYKISQRNGNKIDESVRDIL |
| | IQSIHEKRNYYNSTFLLVNNDEKKENKVYDIRNHLAHFNYLTKNAADYSLLDLINELRELLNYDRKLK |
| | NAVSKAFIDLFDKHGMKLTLKLNAQHKLEVENLESKQLYHLGTSAKDKPEYRLTTNQVPTKYCAMCR |
| | SLLEMKN |
| IMG_ | LAKAYRPAKQKKKHSYGAIRGAVQQIRNNVNHYKKDALNTIFNISEFENPSTTDNKNQTNYAETIYKN |
| 3300031722 | LFVTELKKIPEAFAQQLKTGGVLSYYTLDNLKTLLTTFQFSLCRSVIPFAPGFKKVFNGGINYQNATKDE |
| SEQ ID NO: | SFYELMLERYLPKENFAEEAYNARYFLLKLIYNNLFLPQFTTSKNAFADSVSFVQQQNKKQAEHSKRP |
| 4285 | KAFAFEAVRPMTNADSIAGYMAYVQSELMQEQNKKEEKATDETRINFEKFMLQVYIKGFDSFLKAQE |
| | FDFIQLPQPQLSATDNNQQKADKLNQLETAITGDCKLTPHYAKADVATHIAFYVFCKLLDAGHLSNLR |
| | NELIKFRESVDEFQFGHLLEIIEICLLSADIVPTDYRKLYSNEADCLARLTPFIEDGADITNWSDLFVQTD |
| | KHTPVIHANIELSVKYGTTKLLEQIVSKDPLFKTTEANFTAWNTAQKSIEQLIKQREDHHEKWVKAKN |
| | ADDKEKQEKRRDKSNWAQQYINEHGDDYLDICDYINTYNWLDNKMHFVHLNRLHSLTIELLGRMAG |
| | FVALFDRDFQFVDAQRSNDKFKIEEFVNLKRMDEKLNAVPRKKIKEIQDIRYKISORNGNKIDESVRDIL |
| | IQSIHEKRNYYNSTFLLVNNDEKKENKVYDIRNHLAHFNYLTKNAADYSLLDLINELRELLNYDRKLK |
| | NAVSKAFIDLFDKHGMKLTLKLNAQHKLEVENLESKQLYHLGTSAKDKPEYRLTTNQVPTKYCAMCR |
| | SLLEMKN |
| GCA_900114365.1_ | VEFRDSIFKSLLQKEIEKAPLCFAEKLISGGVFSYYPSERLKEFVGNHPFSLFRKTMPFSPGFKRVMKSG |
| IMGtaxon_ | GNYQNANRDGRFYDLDIGVYLPKDGFGDEEWNARYFLMKLIYNQLFLPYFADAENHLFRECVDFVKR |
| 2651870357_ | VNRDYNCKNNNSEEQAFIDIRSMREDESIADYLAFIQSNIIIEENKKKETNKEGQINFNKFLLQVFVKGF |
| annotated_ | DSFLKDRTELNFLQLPELQGDGTRGDDLESLDKLGAVVAVDLKLDATGIDADLNENISFYTFCKLLDS |
| assembly_ | NHLSRLRNEIIKYQSANSDFSHNEDFDYDRIISIIELCMLSADHVSTNDNESIFPNNDKDFSGIRPYLSTDA |
| genomic_2 | KVETFEDLYVHSDAKTPITNATMVLNWKYGTDKLFERLMISDQDFLVTEKDYFVWKELKKDIEEKIKL |
| SEQ ID NO: | REELHSLWVNTPKGKKGAKKKNGRETTGEFSEENKKEYLEVCREIDRYVNLDNKLHFVHLKRMHSLL |
| 4286 | IELLGRFVGFTYLFERDYQYYHLEIRSRRNKDAGVVDKLEYNKIKDQNKYDKDDFFACTFLYEKANKV |
| | RNFIAHFNYLTMWNSPQEEEHNSNLSGAKNSSGRQNLKCSLTELINELREVMSYDRKLKNAVTKAVID |
| | LFDKHGMVIKFRIVNNNNNDNKNKHHLELDDIVPKKIMHLRGIKLKRQDGKPIPIQTDSVDPLYCRMW |
| | KKLLDLKPTPF |
| JMBV01.1 | VNADKLSHFFAEGVNVDDDENVIHASMETFRKYGTRDLFHKLMLQDDRFLVSSDDYREWEEMKEKIE |
| SEQ ID NO: | GGKVKQRELLHAEWCEAKEKDKKSRKVKSNSRTCFEKKFMGAKAEEYYSLCKVIDKYNWLDNKLHL |
| 4287 | VHLNKLHNLVIEILGRMVGFTALFERDFQYICKSDSEYEQLYNLDFNMGLPKFKNSIKGSGKAKNSTQ |
| | NIDHNATGIGNSSNLLKENSNGTHYCKNLSGDGVEDKLKRLFLYDDYRNVRNFVAHFNYLTRVEDDL |
| | GGNDAVKLSGTRYSLIELINELRNLLKYDRKLKNAVSKSFIDMFERHGMHVKMKLNHNHKLFVDSISP |
| | RKIKHLGGVVIRSGEG |
| GCA_000525995.1_ | MKLFGQLGVRFKKLEMKYTIVKSMLGKKILKIKGFEYRPNMKYADTEMKDLMDNDIAKIPVFIEEKLK |
| PRIP_MIRA_ | SSGVMRFYKQEDLQSIWERKQGFSLLTTNAPFVPSFKRVFAKGHDYQTSRNRKYDLALTIFDRLEYGE |
| assembly_ | EKFRARYFLTKLVYYQQFMPWFTTDSSAFREAANFVLHLNKNRQQDAKAFTNIREVEKNELPRDYMS |
| genomic_ | YVQGQIAIHEDATEDTPNHFEKFISQIFIKGFDKYMIASDLVFIQSPENQELEQSEIEEMRFDIQVTPSFLK |
| 2 | NKDDYISFWTFCKMLDAKHLSELRNEMIKYNGDLTEEQEIIGLALLGVDSRENDWTQFFSSEQEYEDV |
| SEQ ID NO: | MKGYVGDALYEREPYRQSDGKTPVLFRGVEQARKYGTETVIQRLFDANPEFKVSQSNIAEWERQKETI |
| 4288 | EGTIKRKKKFA |
| IMG_ | MAVLVSFAANSYYNLFGSASEDILGTEVVKNRRTNVIKVKSYIFKEKMLNYFFDSEDFDVNKTIEVLES |
| 3300008734 | ISYSIYNIRNGVGHFNKLVLGKYKKKDINTNKRVEEDLNNNEEIKGYFIKKRGEIEKKIKERFLSNNLQY |
| SEQ ID NO: | YYAKERIENYFEVYEFEILKEKIPFAPNFKRIIKKGENLLNNKKNKKYEYFKNFDKNSVEEKKEFLKTRN |
| 4289 | FLLKELYYNNFYKEFLSKKEEFKKIVIEVKEEKKNRGNNKKSGVSFQSIDDYDTKINISDYIASIHKKEM |
| | ERVEKYNEEKQKDTAKYIRDFVEEIFLTGFINYLEKDKRLHFLKEEFSILCNNNNVVDFNININEEKIKEF |
| | LKENDSKTLNLYLFFNMIDSKRISEFRNELIKYKQFTKKRLDEEKEFLGIKIELYETLIEFVILTREKLDTK |
| | KSEETDAWLVDKLYVKEKNECNEYEYKEYEEILKLFVDEKILSSKEAPYYATNNKTPILLSNFEKTRKY |
| | GTQSFLSEVQSNYKYSKVEKENIEDYNKKEEIEKKKKSNIEKLQDLKVELHKKWEQNKITEKEIKKYN |
| | DTIKEIREYNYLKNKEELQNVYLLHEILSDLLARNVAFFNKWERDFKFIVIAIKQFLRENDKEKVENFLN |
| | PPDNSKGKKVYFSVSKYKNTVENIDGIHKNFMNLIFLNNKFMNRKIDKMNCTIWVYFRNYIAHFLHLH |
| | TKNEKISLINQMNLLIKLFSYDKKVQNHILKSTKTLLEKYNIQINFEISNDKNEVFKYKIKNRLYSKKGK |
| | MLGKNNKFEILENEFLENVKAMLEYSE |
| IMG_ | MAVLVSFAANSYYNLFGSASEDILGTEVVKNRRTNVIKVKSYIFKEKMLNYFFDSEDFDVNKTIEVLES |
| 3300007648 | ISYSIYNIRNGVGHFNKLVLGKYKKKDINTNKRVEEDLNNNEEIKGYFIKKRGEIEKKIKERFLSNNLQY |
| SEQ ID NO: | YYAKERIENYFEVYEFEILKEKIPFAPNFKRIIKKGENLLNNKKNKKYEYFKNFDKNSVEEKKEFLKTRN |
| 4290 | FLLKELYYNNFYKEFLSKKEEFKKIVIEVKEEKKNRGNNKKSGVSFQSIDDYDTKINISDYIASIHKKEM |
| | ERVEKYNEEKQKDTAKYIRDFVEEIFLTGFINYLEKDKRLHFLKEEFSILCNNNNVVDFNININEEKIKEF |
| | LKENDSKTLNLYLFFNMIDSKRISEFRNELIKYKQFTKKRLDEEKEFLGIKIELYETLIEFVILTREKLDTK |
| | KSEETDAWLVDKLYVKEKNECNEYEYKEYEEILKLFVDEKILSSKEAPYYATNNKTPILLSNFEKTRKY |
| | GTQSFLSEVQSNYKYSKVEKENIEDYNKKEEIEKKKKSNIEKLQDLKVELHKKWEQNKITEKEIKKYN |
| | DTIKEIREYNYLKNKEELQNVYLLHEILSDLLARNVAFFNKWERDFKFIVIAIKQFLRENDKEKVENFLN |
| | PPDNSKGKKVYFSVSKYKNTVENIDGIHKNFMNLIFLNNKFMNRKIDKMNCTIWVYFRNYIAHFLHLH |
| | TKNEKISLINQMNLLIKLFSYDKKVQNHILKSTKTLLEKYNIQINFEISNDKNEVFKYKIKNRLYSKKGK |
| | MLGKNNKFEILENEFLENVKAMLEYSE |
| IMG_ | MLNYFFDSEDFDINKTIEVLESISYSIYNIRNGVGHFNKLVLGKYKKKDINTNKRVEEDLNNNEEIKGYF |
| 3300011981 | IQKRGEIEKKIKERFLSNNLQYYYAKERIENYFEVYEFEILKEKIPFAPNFKRIIKKGEDLFNNKKNKKYE |
| SEQ ID NO: | YFKNFDKNSAEEKKEFLKTRNFLLKELYYNNFYKEFLSKKEELKKIVIEVKEEKKNRGNNKKSGVSFQ |
| 4291 | NIDDYDTKINISDYIASIHKKEMERVEKYNEEKQKDTAKYIRDFVEEIFLTGFINYLEKDERLHFLKEEFS |
| | VLCNSNNNVIDFNVNINEEKIKEFLKENDSKTLNLYLFFNMIDSKRISEFRNELIKYKQFTKKRLDEEKE |
| | FLGIKIELYETLIEFVILTREKLDTKKSEETDAWLVDKLYVKEKNECNEYEYKEYEEILKLFVDEKILISK |
| | EAPYYATNNKTPIILSNFEKTRKYGTQNLLAKIQSSYKYNEIEKQKIENYNEKKESEKKKKSNIEKLQDL |
| | KVELHKKWEQNKITEKEIKKYNDTIKEIREYNYLKNKEELQNVYLLHEILSDLLARNVAFFNKWERDF |
| | KFIVIAIKQFLRENDKEKVENFLNPPDNSKGKKVYFSVSKYKNTVENIDGIHKNFMNLIFLNNKFMNRK |
| | IDKMNCTIWVYFRNYIAHFLHLHTKNEKISLINQMNLLIKLFSYDKKVQNHILKSTKTLLEKYNIQINFEI |
| | SNDKNEVFKYKIKNRLYSKKGKMLGKNNKFEILENEFLENVKAMLEYSE |
| UPKO01.1 | LKFLKKVLFIDDNNRISIEKLKSRIDDNFKNLLIQHVIEYGKIKYYVENDDYIRNIVKNGELKLETKDLEY |
| SEQ ID NO: | IKTKETLIRKMAVLVSFAANSYYNLFGSVSEDILGTEVVKNRRTNVIKVKSYIFKEKMLNYFFDSEDFDI |
| 4292 | NKTIEVLESISYSIYNVRNGVGHFNKLILGKYKKKDINTNKRVEEDLNNNEEIKGYFIQKRGEIEKKIKE |
| | RFLSNNLQYYYAKEKIENYFKVYEFEILKEKIPFAPNFKRIIKKGEDLFNDKNNKKYEYFKNFDKNNDD |
| | EKKEFLRTRNFLLKELYYNNFYKEFFSERKKYEFKKIITEVKEEKKNRGNNKKSGVSFQNIDDYDTKINI |
| | SDYIASIHKKEMERVEKYNEEKQKDTAKYIRDFVEEIFLTGFINYLEKDERLHFLKEEFSVLCNSNNNVI |
| | DFNVNINEEKIKEFLKENDSKTLNLYLFFNMIDSKRISEFRNELIKYKQFTKKRLDEEKEFLGIKIELYET |
| | LIEFVILTREKLDTKKSEETDVWLADKLYVKENNGYKEYEEILKLFVDEKILSSKEAPYYATDNKTPILL |
| | SNFEKIRKYGTQSFLSKIQSNYRYSEVEKQKIENNNEKKDSEKKKKSNIEKLQDLKVELHKKWEQNKIT |
| | EKEIEKYNDTIKEIREYNYLKNKEELQNVYLLHEILSDLLARNVAFFNKWERDFKFIVIAIKQFLRENDK |
| | EKVENFLNPPDNSKGKKVYFSVSKYKNTVENIDGIHKNFMNLIFLNNKFMNRKIDKMNCTIWVYFRNY |
| | IAHFLHLHTKNEKISLINQMNLLGRV |
| IMG_ | LKFLKKVLFIDDNNRISIEKLKSRIDDNFKNLLIQHVIEYGKIKYYVENDDYIKNIVKNGELKLETKDLEY |
| 3300006254 | IKTKETLIRKMALLVSFAVNSYYNLFGSVSEDILGTEVVKNRRTNVIKVKSYIFKEKMLNYFFDSEDFD |
| SEQ ID NO: | VNKTIEVLESISYSIYNIRNGVGHFNKLVLEKYKKKDIDTNKRVEEDLNNNKEIKGYFIKKRDEIEKKIK |
| 4293 | ERFLSNNLQYYYAKERIENYFEVYEFEILKEKIPFAPNFKRIIKKGEDLFNNKKNKKYEYFKNFDKNSAE |
| | EKKEFLKTRNFLLKELYYNNFYKEFLSKKEEFKKIVIEVKEEKKNRGNNKKSGVSFQSIDDYDTKINISD |
| | YIASIHKKEMERVEKYNEEKQKDTAKYIRDFVEEIFLTGFINYLEKDERLHFLKEEFSVLCNSNNNVIDF |
| | NVNINEEKIKEFLKENDSKTLNLYLFFNMIDSKRISEFRNELIKYKQFTKKRVDEEKEFLGIKIELYETLIE |
| | FVTLTREKLDTKKSEETDAWLADKLYVKENNGYKEYEEILKLFVDEKILSSKEAPYYATDNKTPILLSN |
| | FEKIRKYGTQSFLSKIQSNYRYSEVEKQKIENYNEKKESEKKKKSNIEKLQDLKVELHKKWEQNKITEK |
| | EUCKYNDTIKEIREYNYLKNKEELQNVYLLHEILSDLLARNVAFFNKWERDFKFIVIAIKQFLRENDKEK |
| | VNEFLNPPDDSKGKKVYFSVSKYKNTVENIDGIHKNFMNLIFLNNKFMNRKIDKMNCTIWVYFRNYIA |
| | HFLHLHTKNEKISLINQMNLLIKLFSYDKKVQNHILKSTKTLLEKYNIQINFEISNDKNEVFKYKIKNRL |
| | YSKKGKMLGKNNEFEILEKEFLKNVKAMLEYSE |
| UPKD01.1 | LYYNNFYKEFLSKKEEFKKIVIEVKEEKKNRGNNKKSGVSFQSIDDYDTKINISDYIASIHKKEMERVEK |
| SEQ ID NO: | YNEEKQKDTAKYIRDFVEETFLTGFINYLEKDKRLHFLKEEFSILCNNNNNVVDFNININEEKIKEFLKE |
| 4294 | NDSKTLNLYLFFNMIDSKRISEFRNELIKYKQFTKRRLDEEKEFLGIKIELYETLIEFVILTREKLDTKKSE |
| | EIDAWLVDKLYVKDNNEYKEYEEILKLFVDEKILSSKEAPYYATDNKTPILLSNFEKTRKYGTQSFLSEI |
| | QSNYKYSKVEKENIEDYNKKEEIEQKKKSNIEKLQDLKVELHKKWEQNKITEKEIKKYNDTIKEIREYN |
| | YLKNKEELQNVYLLHEMLSDLLARNVAFFNKWERDFKFIVIAIKQFLRENDKEKVNEFLNPHKSDGSR |
| | DNFSVTNYRSKMKSIINNIHENFMSLLFLNNNFTWGNLRNYIAHFEYLHKEKDTISFIGQANLLIKLFSY |
| | DKKVQNHIIKSMKTLLEKYNIEIRFEISNDSEEIFEYKIKYINSKKGKMLGKNNEFEILKNEFVRNVKALL |
| | EYSKL |
| UPCC01.1 | MGSGKLINKFSQHSIKSLISIFFSYLKCILLNPYYLFIPFNLSSKKTSATMEKQPRQILISATLNTGEKKESE |
| SEQ ID NO: | KKKKSNIEKLQDLKVELHKKWEQNKITEKEIEKYNDTIKEIREYNYLKNKEELQNVYLLHEILSDLLAR |
| 4295 | NVAFFNKWERDFKFIVIAIKQFLRENDKEKVNEFLNPHKSDGSKDNFSVTNYRSKMKSIINNIHENFMS |
| | LLFLNNNLATGGIQMGRNNNFTWGNLRNYIAHFEYLHKEKDTISFLNQANLLIKLFSYDKKVQNHIIKS |
| | MKTLLEKYNIEIGFEISNDSEEIFEYKIKYINSKKGKMLGKNNEFEILENEFVRNVKALLEYSKL |
| IMG_ | MNALFNKFYSSESEYDEKLKKFIEETILGDKKNTSFYSTDGKTPIVHSNLEKMRKYGTENFLSKVLKNS |
| 33000081612 | KYTLNNITAKEKFEAKVSDELKEYKILEKVNKFNKNEKRKKLIEYYNDCRCYLHKKWIENKKNKEEFE |
| SEQ ID NO: | YKEIYKKIIEEIRKYNYLENKEKLQNVYLLHEILSDLLARNVAFLNKWERDFKFIVIAIKQFLRENDKEK |
| 4296 | VDEFLNPHKSDGSRDNFSVTNYRSKIRLVINNIHENFMSLLFLNDNLATGGIQMGRNNNFTWGNLRNYI |
| | AHFEYLHKEKDTISFIGQANLLIKLFSYDKKVQNHIIKSMKTLLEKYNIEIRFEISNDSEEIFEYKIKYINSK |
| | KGKMLGKNNEFEILENEFVRNVKALLEYSE |
| IMG_ | MKGGSMKITKVDGLSHYKKQDKGILKKKWRDLDERKQREKIEERYNKQIESKIYKEFFRLKNKKRIEK |
| 3300008664 | EEDQNIKSLYFFIKEMYLNEENEEWELKNINLEILDDKERVIKGYKFKEDVYFFKEGDKKYYLRTLLNN |
| SEQ ID NO: | LIEKIQNENRDKVRKNKEFSDLKEIFKKYKDRKIKLLLESINNNKINLEYKKENVNEEIYGINPTNDREM |
| 4297 | TFHELLKEIIEKKDEQKSILEEKLDNFDITNFLENIEKIFNEETEINIIKGKVLNELREYIREKEENNSDYKL |
| | KQIYNLELKKYIENNFSYKKQKSKSKNGKNDYLYLNFLKKIMFIEEVDEKKGINKEKFKNKINSNFKNL |
| | FVQHILDYGKLLYYKENDEYIKNTGQLETKDLEYIKTKETLIRKMAVLVSFAANSYYNLFGRTENNILT |
| | QEISDDLLLGKIENEIYIKGEKNRRYVFKEKMLNYFFNPEIFGDNKIVEVLSAISSSIYNIRNGVNHFDKIN |
| | LGQYNNLDLSEIKKYFIEKRDKIKEKVKEKFSSNNLQYYYAKKEIENYFKAYEFEILKEKIPFAPNFKRII |
| | KKGEDLFNNKKNKKYEYFKNFDKNIAEEKKEFLKTRNFLLKELYYNNFYKEFLSKKEEFKKVVIEVKE |
| | EKKNRGNINNKKSGVSFQSIDDYDTKINISDYIASIHKKEMERVEKYNEEKQKDTAKYIRDFVEEIFLTG |
| | FINYLEKDKRLHFLKEEFSILCNNNNNVVDFNININEEKIKEFLKENDSKTLNLY |
| IMG_ | MKITKIDGVSHYKEKEKGVLKGKDILNGKIEKIVKKRYDATIESKIYKEFIKLRKNRIEQNNEKSILKLIK |
| 3300008408 | LNIDKNEKEIKTLLLNKFKIKEKNKKNDKYMLDENKLDNDIKIYESVESLYFLIKEIYLGQNNKKWNIS |
| SEQ ID NO: | KIDLEKIMEEDNNLIMLGYKLKKNITENDYPYLYSDKNGQESTSVYKLLKKLIEENKDRNQDIRKSQEY |
| 4298 | EKIRKNFEEYKNRKINLLVKSIKNNKINIQYINNEIKSHNNSREENIIKFFKKMIEEKNESILKDKLKLFKL |
| | EVFFDEEFLEEIKKLLDSDDFDKSYNKKISELRGKIFNRIREEIKNNKNRDELENIYFLELKKYIENNLSH |
| | KKEKNKNNNNTGEEKSKELYLKFKKKVLFIDDNNRINIEKLKSRIDDNFKNLLIQHVIEYGKIKYYVEN |
| | DDYIRNIVKNGELKLETKDLEYIKTKETLIRKMAVLVSFAVNSYYNLFGSVSEDILGTEVVKNRRTNVI |
| | KVKSYIFKEKMLNYFFDSEDFDVNKTIEVLESISYSIYNIRNGVGHFNKLVLEKYKKKDINTNKRVEED |
| | LNNNKEIKGYFIKKRDEIEKKIKERFLSNNLQYYYAKERIENYFEVYEFEILKEKIPFAPNFKRIIKKGEDL |
| | FNNKKNKKYEYFKNFDKNSAEEKKEFLKTRNFLLKELYYNNFYKEFLSKKEEFKKIVIEVKEEKKNRG |
| | NNKKSGVSFQSIDDYDTKINISDYIASIHKKEMERVEKYNEEKQKDTAKYIRDFVEEIFLTGFINYLEKD |
| | ERLHFLKEEFSVLCNSNNNVIDFNVNINEEKIKEFLKENDSKTLNLYLFFNMIDSKRISEFRNELI |

[0329] In some embodiments, the small Cas proteins are small Cas 13b. Examples of small Cas13b are shown in Table 2 below.

TABLE 2

| Accession | |
|---|---|
| No. | Sequences |
| GCA_ | MTEQNERPYNGTYYTLEDKHFWAAFLNLARHNAYITLTHIDRQLAYSKADITNDEDILFFKGQWKNLDND |
| 002206085.1_ | LERKARLRSLILKHFSFLEGAAYGKKLFENKSSGNKSSKNKELTKKEKEELQANALSLDNLKSILFDFLQKL |
| SJD4_genomic | KDFRNYYSHYRHPESSELPLFDGNMLQRLYNVFDVSVQRVKRDHEHNDKVDPHCHFNHLVRKGKKDRCG |
| SEQ ID NO: | NNDNPFFKHHFVDREGKVTEAGLLFFVSLFLEKRDAIWMQKKIRGFKGGTETYQQMTNEVFCRSRISLPKL |
| 4299 | KLESLRTDDWMLLDMLNELVRCPKSLYDRLREEDRARFRVPVDILSDEDDTDGTEEDPFKNTLVRHQDRF |
| | PYFALRYFDLKKVFTSLRFHIDLGTYHFAIYKKNIGEQPEDRHLTRNLYGFGRIQDFAEEHRPEEWKRLVRD |
| | LDYFETGDKPYITQTTPHYHIEKGKIGLRFVPEGQHLWPSPEVGATRTGRSKYAQDKRLTAEAFLSVHELM |
| | PMMFYYFLLREKYSEEASAERVQGRIKRVIEDVYAVYDAFARDEINTRDELDACLADKGIRRGHLPRQMIA |
| | ILSQEHKDMEEKVRKKLQEMIADTDHRLDMLDRQTDRKIRIGRKNAGLPKSGVIADWLX |
| GCA_ | MTEQNEKPYNGTYYTLEDKHFWAAFFNLARHNAYITLTHIDRQLAYSKADITNDEDILFFKGQWKNLDND |
| 002204455.1_ | LERKARLRSLILKHFSFLEGAAYGKKLFESQSSGNKSSKKKELTKKEKEELQANALSLDNLKSILFDFLQKL |
| ASM220445v1_ | KDFRNYYSHYRHPESSELPLFDGNMLQRLYNVFDVSVQRVKRDHEHNDKVDPHRHFNHLVRKGKKDRCG |
| genomic | NNDNPFFKHHFVDREEKVTEAGLLFFVSLFLEKRDAIWMQKKIRGFKGGTETYQQMTNEVFCRSRISLPKL |
| SEQ ID NO: | KLESLRTDDWMLLDMLNELVRCPKSLYDRLREEDRARFRVPVDILSDEDDTDGAEEDPFKNTLVRHQDRF |
| 4300 | PYFALRYFDLKKVFTSLRFHIDLGTYHFAIYKKNIGEQPEDRHLTRNLYGFGRIQDFAEEHRPEEWKRLVRD |
| | LDYFETGDKPYITQTTPHYHIEKGKIGLRFVPEGQHLWPSPEVGATRTGRSKYAQDKRLTAEAFLSVHELM |
| | PMMFYYFLLREKYSEEASAERVQGRIKRVIEDVYAVYDAFARGEIDTLDRLDACLADKGIRRGHLPRQMIA |
| | ILSQEHKDMEEKVRKKLQEMIADTDHRLDMLDRQTDRKIRIGRKNAGLPKSGVIADWLVRDMMRFQPVA |
| | KDTSGKPLNNSKANSTEYRMLQRALALFGGEKERLTPYFRQMNLTGGNNPHPFLHETRWESHTNILSFYRS |
| | YLKARKAFLQSIGRSDRVENHRFLLLKEPKTDRQTLVAGWKGEFHLPRGIFTEAVRDCLIEMGHDEVASY |
| UPHW01.1 | MTEQNEKPYNGTYYTLEDKHFWAAFLNLARHNAYITLTHIDRQLAYSKADITNDEDILFFKGQWKNLDND |
| SEQ ID NO: | LERKARLRSLILKHFSFLEGAAYGKKLFESQSSGNKSSKKKELTKKEKEELQANALSLDNLKSILFDFLQKL |
| 4301 | KDFRNYYSHYRHPESSELPLFDGNMLQRLYNVFDVSVQRVKRDHEHNHKVDPHRHFNHLVRKGKKDRY |
| | GNNDNPFFKHHFVDREEKVTEAGLLFFVSLFLEKRDAIWMQKKIRGFKGGTEAYQQMTNEVFCRSRISLPK |
| | LKLESLRTDDWMLLDMLNELVRCPKSLYDRLREEDRACFRVPVDILSVEDDTDGAEEDPFKNTLVRHQDR |
| | FPYFALRYFDLKKVFTSLRFHIDLGTYHFAIYKKNIGEQPEDRHLTRNLYGFGRIQDFAEEHRPEEWKRLVR |
| | DLDYFETGDKPYITQTTPHYHIEKGKIGLRFVPEGQHLWPSPEVGATRTGRSKYAQDKRLTAEAFLSVHEL |
| | MPMMFYYFLLRENYSDEASAERVQGRIKRVIEDVYAVYDAFARGEIDTLDRLDACLADKGIRRGHLPRQM |
| | IAILSQEHKDMEEKVRKKLQEMIADTDHRLDMLDRQTDRKIRIGRKNAGLPKSGVIADWLVRDMMRFQPV |
| | AKDTSGKPLNNSKANSTEYRMLQRALALFGGEKERLTPYFRQMNLTGGNNPHPFLHETRWESHTNILSFY |
| | RSYLEARKAFLQSIG |
| UPGW01.1 | MTEQNERPYNGTYYTLEDKHFWAAFLNLARHNAYITLAHIDRQLAYSKADITNDEDILFFKGQWKNLDND |
| SEQ ID NO: | LERKARLRSLILKHFSFLEGAAYGKKLFESQSSGNKSSKKKELTKKEKEVLQANALSLDNLKSILFDFLQKL |
| 4302 | KDFRNYYSHYRHPESSELPLFDGNMLQRLYNVFDVSVQRVKRDHEHNDKVDPHRHFNHLVRKGKKDRY |
| | GNNDNPFFKHHFVDREGKVTEAGLLFFVSLFLEKRDAIWMQKKIRGFKGGTETYQQMTNEVFCRSRISLPK |
| | LKLESLRTDDWMLLDMLNELVRCPKSLYDRLREEDRARFRVPVDILSDEDDTDGTEEDPFKNTLVRHQDR |
| | FPYFALRYFDLKKVFTS |
| UPIH01.1 | MTEQNERPYNGTYYTLEDKHFWAAFFNLARHNAYITLAHIDRQLAYSKADITNDEDILFFKGQWKNLDND |
| SEQ ID NO: | LERKARLRSLILKHFSFLEGAAYGKKLFESQSSGNKSSKKKELTKKEKEELQANALSLDNLKSILFDFLQKL |
| 4303 | KDFRNYYSHYRHPESSELPLFDGNMLQRLYNVFDVSVQRVKRDHEHNDKVDPHRHFNHLVRKGKKDKY |
| | GNNDNPFFKHHFVDREGTVTEAGLLFFVSLFLEKRDAIWMQKKIRGFKGGTETYQQMTNEVFCRSRISLPK |
| | LKLESLRTDDWMLLDMLNELVRCPKSLYDRLREEDRARFRVPVDILSDEDDTDGTEEDPFKNTLVRHQDR |
| | FPYFALRYFDLKKVFTSLRFHIDLGTYHFAIYKKNIGEQPEDRHLTRNLYGFGRIQDFAEEHRPEEWKRLVR |
| | DLDYFETGDKPYISQTTPHYHIEKGKIGLRFVPEGQHLWPSPEVGATRTGRSKYAQDKRLTAEAFLSVHEL |
| | MPMMFYYFLLREKYSDEASAEMVQGRIKRVIEDVYAVYDAFARDEINTRDELDACLADKGIRRGHLPRQ |
| | MIAILSQEHKDMEEKVRKKLQEMIADTDHRLDMLDRQTDRKIRIGRKNAGLPKSGVIADWLVRDMMRFQ |
| | PVAKDTSGKPLNNSKANSTEYRMLQRALALFGGEKERLTPYFRQMNLTGGNNPHPFLHETRWESHTNILSF |
| | YR |
| OWLX01.1 | MTEQNERPYNGTYYTLEDKHFWAAFLNLARHNAYITLAHIDRQLAYSKADITNDEDILFFKGQWKNLDND |
| SEQ ID NO: | LERKARLRSLILKHFSFLEGAAYGKKLFESQSSGNKSSKKKELTKKEKEELQANALSLDNLKSILFDFLQKL |
| 4304 | KDFRNYYSHYRHPESSELPMFDGNMLQRLYNVFDVSVQRVKRDHEHNDKVDPHRHFNHLVRKGKKDRC |
| | GNNDNPFFKHHFVDREGTVTEAGLLFFVSLFLEKRDAIWMQKKIRGFKGGTEAYQQMTNEVFCRSRISLPK |
| | LKLESLRTNDWMLLDMLNELVRCPKSLYDRLREEDRARFRVPVDILSDEDDTDGTEEDPFKNTLVRHQDR |
| | FPYFALRYFDLKKVFTSLRFHIDLGTYHFAIYKKNIGEQPEDRHLTRNLYGFGRIQDFAEEHRPEEWKRLVR |
| | DLDYFETGDKPYITQTTPHYHIEKGKIGLRFVPEGQLLWPSPEVGATRTGRSKYAQDKRFTAEAFLSVHEL |
| | MPMMFYYFLLREKYSEEVSAEKVQGRIKRVIEDVYAVYDAFARDEINTRDELDACLADKGIRRGHLPRQM |
| | IAILSQEHKDMEEKVRKKLQEMMADTDHRLDMLDRQTDRKIRIGRKNAGLPKSGVIADWLVRDMMRFQP |
| | VAKDTSGKPLNNSKANSTEYRMLQRALALFGGEKERLTPYFRQMNLTGGNNPHPFLHETRWESHTNILSF |
| | YRSYLKARKAFLQSIGRSDRVENHRFLLLKEPKTDRQTLVAGWKGEFHLPRGIFTEAVRDCLIEMGYDEVG |
| | SYKEVGFMAKAVPLYFERASKDRVLNLNQLPLIFFQSD |
| OWLO01.1_2 | MTEQNERPYNGTYYTLEDKHFWAAFFNLARHNAYITLAHIDRQLAYSKADITNDEDILFFKGQWKNLDND |
| SEQ ID NO: | LERKARLRSLILKHFSFLEGAAYGKKLFENKSSGNKSSKKKELTKKEKEELQANALSLDNLKSILFDFLQKL |
| 4305 | KDFRNYYSHYRHPESSELPLFDGNMLQRLYNVFDVSVQRVKRDHEHNDKVDPHRHFNHLVRKGKKDRY |
| | GNNDNPFFKHHFVDREEKVTEAGLLFFVSLFLEKRDAIWMQKKIRGFKGGTETYQQMTNEVFCRSRISLPK |
| | LKLESLRTDDWMLLDMLNELVRCPKSLYDRLREEDRACFRVPVDILSDEDDTDGAEEDPFKNTLVRHQDR |
| | FPYFALRYFDLKKVFTSLRFHIDLGTYHFAIYKKNIGEQPEDRHLTRNLYGFGRIQDFAEEHRPEEWKRLVR |
| | DLDYFETGDKPYLRLRLIQSLGKRTHLHLLPPS |
| GCA_ | MTEQNEKPYNGTYYTLEDKHFWAAFLNLARHNAYITLTHIDRQLAYSKADITNDEDILFFKGQWKNLDND |
| 000503975.1_ | LERKARLRSLILKHFSFLEGAAYGKKLFESQSSGNKSSKKKELTKKEKEELQANALSLDNLKSILFDFLQKL |
| SJD2_ | KDFRNYYSHYRHPESSELPLFDGNMLQRLYNVFDVSVQRVKRDHEHNHKVDPHRHFNHLVRKGKKDKY |
| genomic_2 | GNNDNPFFKHHFVDREGKVTEAGLLFFVSLFLEKRDAIWMQKKIRGFKGGTETYQQMTNEVFCRSRISLPK |
| SEQ ID NO: | LKLESLRTDDWMLLDMLNELVRCPKSLYDRLREEDRARFRVPVDILSDEDDTDGTEEDPFKNTLVRHQDR |
| 4306 | FPYFAILRSEESLHFPPLPYRFGHLPLRHIQEEHRRAAGRPPSDAQPVRLRPNTGFRRGA |
| GCA_ | MTEQNEKPYNGTYYTLEDKHFWAAFLNLARHNAYITLTHIDRQLAYSKADITNDEDILFFKGQWKNLDND |
| 002206065.1_ | LERKARLRSLILKHFSFLEGAAYGKKLFESQSSGNKSSKKKELTKKEKEELQANALSLDNLKSILFDFLQKL |
| SJD5_ | KDFRNYYSHYRHPESSELPLFDGNMLQRLYNVFDVSVQRVKRDHEHNHKVDPHRHFNHLVRKGKKDKY |
| genomic_2 | GNNDNPFFKHHFVDREGKVTEAGLLFFVSLFLEKRDAIWMQKKIRGFKGGTETYQQMTNEVFCRSRISLPK |
| SEQ ID NO: | LKLESLRTDDWMLLDMLNELVRCPKSLYDRLREEDRARFRVPVDILSDEDDTDGTEEDPFKNTLVRHQDR |
| 4307 | FPYFAILRSEESLHFPPLPYRFGHLPLRHIQEEHRRAAGRPPSDAQPVRLRPNTGFRRGA |
| IMG_ | MENDKKLEESACYTLNDKHFWAAFLNLARHNVYITVNHINKTLGEGEINRDGYETTLENTWNEIKDINKK |
| 3300011985 | ARLRELIIKHFPFLEAATYQQRSTDSTKQKEEKQAEAQSLESLKHCLFPFLKKLQKSRDHYSHYKHSKSLER |
| SEQ ID NO: | PKFEEDLQKKMYNIFDVSIRLVKEDYKHNTDINLKEDFKHLNRTGKFKYSFADNKGNITESGLLFFISLFLEK |
| 4308 | KDAIWMQKKLKGFKDSREKYQKMTNEVFCRSRILLPKLRLESTQTQDWILLDMLNELIRCPKSLYERLREK |
| | ERKEFKVPIEIADEDYDAEQEPFRNTLVRHQDRFPYFALRYFDYNEIFTNLRFQIDLGTYHFSIYKKLIGGNK |
| | EDRHLTHKLYGFERIQEFAKQNRPDEWKALVKDLDTFNKEEEKLYISETTPHYHLENEKIGIVFKNHNIWPS |
| | TQTELTNNNRKKYNLGVSIKAEAFLSVHELLPMMFYYLLLKTKNTHNGNEVEAKKKGTKNKKQEKHKIE |
| | AIIESKIKDIYNLYDAFANGEINSIEELEEHCKGKDIEIGHLPKQMIAILKDEHKDMAKKAETKQEKMILATE |
| | NRLKTLDKKLKGKIRNGKRCNSALKSGEIASWLVNDMMRFQPV |
| GCA_ | MEDDKKTTDSISYELKDKHFWAAFLNLARHNVYITVNHINKILEEDEINRDGYENTLENSWNEIKDINKKD |
| 002204405.1_ | RLSKLIIKHFPFLEAATYRQNPTDTTKQKEEKQAEAQSLESLKKSFFVFIYKLRDLRNHYSHYKHSKSLERPK |
| ASM220440v1_ | FEEGLLEKMYNIFNASIRLVKEDYQYNKDINPDEDFKHLDRTEEEFNYYFTKDNEGNITESGLLFFVSLFLEK |
| genomic | KDAIWLQQKLRGFKDNRESKKKMTNEVFCRSRMLLPKLRLESTQTQDWILLDMLNELIRCPKSLYERLQG |
| SEQ ID NO: | EDREKFRVPIEIADEDYDAEQEPFKNTLVRHQDRFPYFALRYFDYNEIFTNLRFQIDLGTYHFSIYKKLIGGQ |
| 4309 | KEDRHLTHKLYGFERIQEFDKQNRPDEWKAIVKDSDTFKKKEEKEEEKPYISETTPHYHLENKKIGIAFKNH |
| | NIWPSTQTELTNNKRKKYNLGTSIKAEAFLSVHELLPMMFYYPVVKDGKY |
| QWCT01.1 | VKMEDDKKTTDSISYALKDKHFWAAFLNLARHNVYITVNHINKILEEDEINRDGYENTLENSWNEIKDINK |
| SEQ ID NO: | KDRLSKLIIKHFPFLEAATYRQNPTDTTKQKEEKQAEAQSLESLKKSFFVFIYKLRDLRNHYSHYKHSKSLE |
| 4310 | RPKFEEDLQNKMYNIFDVSIQFVKEDYKHNTDINPKKDFKHLDRKRKGKFHYSFADNEGNITESGLLFFVSL |
| | FLEKKDAIWVQKKLEGFKCSNESYQKMTNEVFCRSRMLLPKLRLESTQTQDWILLDMLNELIRCPKSLYER |
| | LQGVNRKKFYVSFDPADEDYDAEQEPFKNTLVRHQDRFPYFALRYFDYNEIFTNLRFQIDLGTYHFSIYKKL |
| | IGGQKEDRHLTHKLYGFERIQEFDKQNRPDEWKAIVKDSDTFKKKEEKEEEKPYISETTPHYHLEN |
| IMG_ | MENDKRLEESACYTLNDKHFWAAFLNLARHNVYITINHINKLLEIRQIDNDEKVLDIKALWQKVDKDINQK |
| 3300008152 | ARLRELMIKHFPFLEFAIYNNNKDGKQEEKQAKAQSFESLKDCLFLFLKKLQESRNYYSHYKYSESSQEPKL |
| SEQ ID NO: | EKELRKKMYNIFDASIRLVKEDYQYNKDIDPEKDFKHLERKEDFNYLFTDKDNKGKITKNGLLFFVSLFLE |
| 4311 | KKDAIWMQQKLRGFKDNRGNKEKMTHEVFCRSRMLLPKIRLESTQTQDWILLDMLNELIRCPKSLYERLQ |
| | GAYREKFKVPFDSIDEDYDAEQEPFRNTLVRHQDRFPYFALRYFDYNEIFKNLRFQIDLGTYHFSIYKKLIGG |
| | QKEDRHLTHKLYGFERIQEFAKQNRPDEWKAIVKDLDTYETSNERYISETTPHYHLENQKIGIRFRNGNKEI |
| | WPSLKTNGENNEKSKYKLDKQYQAEAFLSVHELLPMMFYYLLLKKEEPNNDKKNASIVEGFIKREIR |
| UPIY01.1 | VRMENDKRLEESTCYTLNDKHFWAAFLNLARHNVYITINHINKLLEIRQIDNDEKVLDIKALWQKVDKDIN |
| SEQ ID NO: | QKARLRELMIKHFPFLEFAIYNNNKDGKQEEKQAKAQSFESLKRCLFLFLEKLQEARNYYSHYKYSESSKE |
| 4312 | PEFEEGLLEKMYNIFDENIQLVINDYQHNKDINPEKDFKHLDRTEEEFNYYFTKDKKGNITESGLLFFVSLFL |
| | EKKDAIWMQQKFRGFKDNRGNKEKMTHEVFCRSRMLLPKIRLESTQTQDWILLDMLNELIRCPKSLYERL |
| | QGAYREKFKVPFDSIDEDYDAEQEPFRNTLVRHQDRFPYFALRYFDYNEIFKNLRFQIDLGTYHFSIYKKLIG |
| | GQKEDRHLTHKLYGFERIQEFAKQNRPDEWKAIVKDLDTYETSNERYISETTPHYHLENQKIGIRFRNGNKE |
| | IWPSLKTNGENNEKSKYKLDKQYQAEAFLSVPELLPMMFYYLLLKKEEPNNDKKNASIVEGFIKREIRYIYK |
| | LYDAFANGEINNIDDLEKYCEDKGIPKRHLPKQMVAILYDEHKDMVEEAKRKQKEMVKDTKKLLATLEK |
| | QTQGEIEDGGRNIRLLKSGEIARWLVNDMMRFQPVQKDNEGNPLNNSKANSTEYQMLQRSLALYNKEEKP |
| | TRYFRQVNLINSSNPHPFLKWTKWEECNNILSFYRSYLTKKIEFLNKLKPEDWEKNQYFLKLKEPKTNRETL |
| | VQGWKNGFNLPRGIFTEPIREWFKRHQNDSKEYKNVEALDRVGLVTKVIPLFFKEEYFKEDAQKEINNCVQ |
| | PFYSFPYNVGNIHKPDEKDFLPSEERKKLWGDKKYKFKGYKAKVKSKKLTDKEKEEY |
| OWLO01.1 | VKMEDDKKTTESTNMLDNKHFWAAFLNLARHNVYITVNHINKVLELKNKKDQDIIIDNDQDILAIKTHWE |
| SEQ ID NO: | KVNGDLNKTERLRELMTKHFPFLETAIYTKNKEDKEEVKQEKQAKAQSFDSLKHCLFLFLEKLQEARNYY |
| 4313 | SHYKYSESTKEPMLEKELLKKMYNIFDDNIQLVIKDYQHNKDINPDEDFKHLDRTEEEFNYYFTRNKKGNI |
| | TASGLLFFVSLFLEKKDAIWMQQKLRGFKDNRESKKKMTHEVFCRRRMLLPKLRLESTQTQDWILLDMLN |
| | ELIRCPKSLYERLQGEDREKFKVPFDPADEDYDAEQEPFKNTLVRHQDRFPYFALRYFDYNEIFTNLRFQID |
| | LGTYHFSIYKKLIGGQKEDRHLTHKLYGFERIQEFNKQNRPDE |
| OWLL01.1 | MEDDKKTKESTNMLDNKHFWAAFLNLARHNVYITVNHINKVLELKNKKDQDIIIDNDQDILAIKTHWEKV |
| SEQ ID NO: | DGDLNKTERLRELMTKHFPFLETAIYTKNKEDKEEVKQEKQAEAQSLESLKDCLFLFLEKLQEARNYYSHY |
| 4314 | KYSEFSKEPEFKEELLEKMYNIFDANIQLVINDYQHNKDIDPEEDFKHLDTIEDSSYSFTVKDNKEKITASGL |
| | LFFVSLFLEKKDAIWMQQKLRGFKDNRESKKKMTHEVFCRSRILLPKLRLESTQTQDWILLDMLNELIRCP |
| | KSLYERLQGEDREKFKVPFDPADENYDAEQEPFKNTLVRHQDRFPYFALRYFDYNEIFTNLRFQIDLGTYHF |
| | SIYKKLIGGQKEDRHLTHKLYGFERIQEFAKQNRPDEWKAIVKDSDTFKKKEELKGKTIGVQLGSIQEQFAK |
| | DNGSVPKLYNNFTEALLDLQNQKIDAVIIAEVSGNEYLKTMKGIKKIDTIKDKLPSASIAFRKADSKLTKEFS |
| | DAILKLKDSQKISATVEIAAIFSEKTTELNSSRCLIP |
| UPJU01.1 | VKMKEEEEKGKTPVVSTYNKDDKHFWAAFLNLARHNVYITINHINKLLEIREIDNDEKVLDIKALWQKVN |
| SEQ ID NO: | KDLNQKARLRELMTKHFPFLETAIYTKNKEDKKEVKEEKQAKAQSFDSLNHCLFLFLEKLQEARNYYSHY |
| 4315 | KYSESSKEPMLEKELLKKMYNIFDNNIQLVIKDYQHNKDINPDEDFKHLDRTEEDFNYYFARNKKGNITAS |
| | GLLFFVSLFLEKKDAIWMQQKLTGFKDNRENKKKMTHEVFCRSRMLLPKLRLESTQTQDWILLDMLNELI |
| | RCPKSLYERLKGEDRKKFEVPFDSTDEDYDAEQDPFKNTLIRHQDRFPYFVLRYFDYNEIFKNLRFQIDLGT |
| | YHFSIYKKLIGGQKEDRHLTHKLYGFERIQEFTKQHRPDDWKAIVKDFDTYETSEEPYISETTPHYHLENQKI |
| | GIRFRNGNNDIWPSLETNGENNEKSKYKLDKPYQAEAFLSVHELLPMMFYYLLLKKEEPNNDKKNASRVE |
| | GFIKREIRDIFKLYDAFANDEINNIDDLKKYCKDKHIEIRHLPKQMIAILESKPKDMAKEAKRKQKEMVKDT |
| | KKLLATLEKQTQKEKEDDGRNVKLLKSGEIARWLVNDMMRFQPVQKDNEGKPLNNSKANSTEYQMLQR |
| | SLALYNKEENPTRYFRQVNLIESSNPHPFLKWTKWEECNNILTFYYTYLTKKIEFLNKLKPEDWKKNQYFL |
| | KLKEPKTNRKTLVQGWKNGFNLPRGIFTEPIREWFERHQNDSEEYKKVEKLNKAGLVTKVIPL |
| UPKI01.1 | VKMKEEETPVVSTYNKDDKHFWAAFLNLARHNVYITINHINKLLEIREIDNDEKILDIKTLWEKVNGDLNK |
| SEQ ID NO: | TERLRELMTKHFPFLETAIYSKNKEDKEEVKQEKQATAQSFKSLEHCLFLFLKKLQEARNYYSHYKYSEST |
| 4316 | KEPMLEKELLKKMYNIFDDNIQLVIKDYQHNKDINPDEDFKHLNRTEKEFNYYFTTNKKGNITASGLLFFVS |
| | LFLEKKDAIWMQQKLRGFKDNRESKKKMTHEVFCRSRMLLPKLRLESTQTQDWILLDMLNELIRCPKSLY |
| | ERLQGVDREKFRVPIEIADEDYDAEQEPFKNTLVRHQDRFPYFALRYFDYNEIFTNLRFQIDLGTYHFSIYKK |
| | LIGGQKEDRHLTHKLYGFERIQEFNKQNRPDEWKALVKDLDTYETSEEPYISETTPHYHLENQKIGIRFRNG |
| | NNDIWPSLETNGENNEKSKYKLDKQYQAEAFLSVHELLPMMFYYLLLKKEKPNNDEINASIVEGFIKREIR |
| | YIYKLYDAFANGEINSIGDLEKYCEDKGIPKRHLPKQMVAILYDEHKDMVKEAKRKQRKMVKETEKLLAA |
| | LEKQTQEEIEDGGRNIRLLKSGEIARWLVNDMMRFQPVQKDNEGNPLNNSKANSTEYQMLQRSLALYNKE |
| | EKPTRYF |
| UPIM01.1 | MEDDKKTTGSISYELKDKHFWAAFLNLARHNVYITINHINKLLEIREIDNDEKVLDIKALWEKVNGDLNKT |
| SEQ ID NO: | ERLRELMTKHFPFLETAIYTKNKEDKKEVKQEKQAEAQSLESLKDCLFLFLEKLQEARNYYSHYKYSEFSK |
| 4317 | EPEFEEGLLEKMYNIFDDNIQLVIKDYQHNKDINPDEDFKHLDRKGQFKYSFADNEGNITESGLLFFVSLFLE |
| | KKDAIWMQQKLRGFKDNRESKKKMTHEVFCRSRMLLPKLRLESTQTQDWILLDMLNELIRTNACKENTE |
| | KSSISPSTPQTKTTMQSKSLSKTHW |
| OGJT01.1 | LQKQDKLFVDRKKNAIFAFPKYITIMENKEKTEPIYYELTDKHFWAAFLNLARHNVYTTVNHINKLLEIAEL |
| SEQ ID NO: | KNDEDVLNIKDSWNKQAEKLDKKVRLRNLLMRHFPFLEAAAYEKTTSKDSNSKEQKEKEQAEALSLDNL |
| 4318 | KNVLFIFLEKLQSLRNYYSHYKYSEEAQKPTFENDLLKNMYKIFDTNVRLVKRDYMHHENVDMQRDFSHL |
| | NRKKQEGQTRKIIANPNFRYHFADEKGNMTIAGLLFFISLFLDKKDAIWMQKKLKGFKDGRNLREQMTNE |
| | VFCRSRISLPKLKLENVQTKDWMQLDMLNELVRCPKSLYERLREKDRESFKVPFDIFSDDYDAEEEPFKNT |
| | LVRHQDRFPYFVLRYFDLNEIFEQLRFQIDLGTYHFSIYNKLIGDEDEVRHLTHHLYGFARIQDFAPQNQPEE |
| | WRKLVKDLDHFETSQKPYISKTAPHYHLENEKIGIKFCSTHNNLFPSLKREKTCNGRSKFNLGTQFTAEAFL |
| | SVHELLPMMFYYLLLTKDYSRKESADKVEGIIRKEISNIYAIYDAFANGEINSIADLTCRLQKTNILQGHLPK |
| | QMISILEGRQKDMEKEAERKIGEMIDDTQRRLDLLCKQTNQKIRIGKRNAGLLKSGKIADWLVNDMMRFQ |
| | PVQKDQNNIPINNSKANSTEYRMLQRALALFGSENFRLKAYFNQMNLVGNDNPHPFLAETQWEHQTNILSF |
| | YRNYLEARKKYLKGLKPQNWKQYQHFLILKVQKTNRNTLVTGWKNSFNLPRGIFTQPIREWFEKHNNSKR |
| | IYDQILSFDRVGFVAKAIPLYFAEEYKDNVQPFYDYPFNIGNRLKPKKGNS |
| GCA_ | MRTIRTVRKKTPSKTRWSGIRIASPTSRYFDLKKVFTSLRFHIDLGTYHFAIYKKNIGEQPEDRHLTRNLYGF |
| 000503975.1_ | GRIQDFAEEHRPEEWKRLVRDLDYFETGDKPYITQTTPHYHIEKGKIGLRFVPEGQHLWPSPEVGATRTGRS |
| SJD2_genomic | KYAQDKRFTAEAFLSVHELMPMMFYYFLLREKYSDEASAERVQGRIKRVIEDVYAVYDAFARGEIDTLDR |
| SEQ ID NO: | LDACLADKGIRRGHLPRQMIAILSQEHKDMEEKVRKKLQEMIADTDHRLDMLDRQTDRKIRIGRKNAGLP |
| 4319 | KSGVIADWLVRDMMRFQPVAKDTSGKPLNNSKANSTEYRMLQRALALFGGEKERLTPYFRQMNLTGGNN |
| | PHPFLHETRWESHTNILSFYRSYLKARKAFLQSIGRSDRVENHRFLLLKEPKTDRQTLVAGWKGEFHLPRGI |
| | FTEAVRDCLIEMGLDEVGSYKEVGFMAKAVPLYFERASKDRVQPFYGYPFNVGNSLKPKKGRFLSKEKRA |
| | EEWESGKERFRDLEAWSHSAARRIEDAFVGIEYASWENKTKIEQLLQDLSLWEAFESKLKVKADKINIAKL |
| | KKEILEAKEHPYLDFKSWQKFERELRLVKNQDIITWMMCRDLMEENKVEGLDTGTLYLKDIRTDVYEQGS |
| | LNVLNRVKPMRLPVVVYRADSRGHVHKEQAPLATVYIEERDTKLLKQGNFKSFVKDRRLNGLFSFVDTGG |
| | LAMEQYPISKLRVEYELAKYQTARVCAFEQTLELEESLLTRYPHLPDKNFRKMLESWSDPLLDKWPDLHR |
| | KVRLLIAVRNAFSHNQYPMYDEAVFSSIRKYDPSSLDAIEERMGLNIAHRLSEEVKQAKEMVERIIQV |
| GCA_ | MRTIRTVRKKTPSKTRWSGIRIASPTSRYFDLKKVFTSLRFHIDLGTYHFAIYKKNIGEQPEDRHLTRNLYGF |
| 002206065.1_ | GRIQDFAEEHRPEEWKRLVRDLDYFETGDKPYITQTTPHYHIEKGKIGLRFVPEGQHLWPSPEVGATRTGRS |
| SJD5_genomic | KYAQDKRFTAEAFLSVHELMPMMFYYFLLREKYSDEASAERVQGRIKRVIEDVYAVYDAFARGEIDTLDR |
| SEQ ID NO: | LDACLADKGIRRGHLPRQMIAILSQEHKDMEEKVRKKLQEMIADTDHRLDMLDRQTDRKIRIGRKNAGLP |
| 4320 | KSGVIADWLVRDMMRFQPVAKDTSGKPLNNSKANSTEYRMLQRALALFGGEKERLTPYFRQMNLTGGNN |
| | PHPFLHETRWESHTNILSFYRSYLKARKAFLQSIGRSDRVENHRFLLLKEPKTDRQTLVAGWKGEFHLPRGI |
| | FTEAVRDCLIEMGLDEVGSYKEVGFMAKAVPLYFERASKDRVQPFYGYPFNVGNSLKPKKGRFLSKEKRA |
| | EEWESGKERFRDLEAWSHSAARRIEDAFVGIEYASWENKTKIEQLLQDLSLWEAFESKLKVKADKINIAKL |
| | KKEILEAKEHPYLDFKSWQKFERELRLVKNQDIITWMMCRDLMEENKVEGLDTGTLYLKDIRTDVYEQGS |
| | LNVLNRVKPMRLPVVVYRADSRGHVHKEQAPLATVYIEERDTKLLKQGNFKSFVKDRRLNGLFSFVDTGG |
| | LAMEQYPISKLRVEYELAKYQTARVCAFEQTLELEESLLTRYPHLPDKNFRKMLESWSDPLLDKWPDLHR |
| | KVRLLIAVRNAFSHNQYPMYDEAVFSSIRKYDPSSLDAIEERMGLNIAHRLSEEVKQAKEMVERIIQV |
| IMG_ | MQKKIRGFKGGTETYQQMTNEVFCRSRISLPKLKLESLRTDDWMLLDMLNELVRCPKSLYDRLHEEDRAR |
| 3300007499 | FRVPVDILSDEDDTDGTEEDPFKNTLVRHQDRFPYFALRYFDLKKVFTSLRFHIDLGTYHFAIYKKNIGEQPE |
| SEQ ID NO: | DRHLTRNLYGFGRIQDFAEEHRPEEWKRLVRDLDYFETGDKPYITQTTPHYHIEKGKIGLRFVPEGQHLWP |
| 4321 | SPEVGATRTGRSKYAQDKRLTAEAFLSVHELMPMMFYYFLLREKYSDEASAERVQGRIKRVIEDVYAVYD |
| | AFARDEINTRDELDACLADKGIRRGHLPRQMIAILSQEHKDMEEKIRKKLQEMIADTDHRLDMLDRQTDRK |
| | IRIGRKNAGLPKSGVIADWLVRDMMRFQPVAKDTSGKPLNNSKANSTEYRMLQRALALFGGEKERLTPYF |
| | RQMNLTGGNNPHPFLHETRWESHTNILSFYRSYLKARKAFLQSIGRSDRVENHRFLLLKEPKTDRQTLVAG |
| | WKSEFHLPRGIFTEAVRDCLIEMHDEVGSYKEVGFMAKAVPLYFERACKDRVQPFYDYPFNVGNSLKPKK |
| | GRFLSKEDRAEEWESGKERFRLAKLKKEILEAKEHPYLDFKSWQKFERELRLVKNQDIITWMMCRDLMEE |
| | NKVEGLDTGTLYLKDIRTEVQEQGSLNVLNRVKSMRLPVVVYRADSRGHVHKEQAPLATVYIEERDTKLL |
| | KQGNFKSFVKDRRLNGLFSFVDTGGLAMEQYPISKLRVEYELAKYQTARVCAFEQMLELEESLLTRYPHLP |
| | DKNFRKMLESWSDPLLDKWPDLHRKVRLLIAVRNAFSHNQYPMYDEAVFSSIRKYDPSSLDAIEERMGLNI |
| | AHRLSEEVKQAKEMVERIIQV |
| UZOZ01.1 | VPFDIFSDDYNAEEEPFKNTLVRHQDRFPYFVLRYFDLNEIFTQLRFQIDLGTYHFSIYNKRIGDEDEVRHLT |
| SEQ ID NO: | HHLYGFARIQDFAQQNQPEVWRKLVKDLDYFEASQEPYISKTTPHYHLENEKIGIKFCSAHNNLFPSLQTDK |
| 4322 | TCNGRSKFNLGTQFTAEVFLSVHELLPMMFYYLLLTKDYSRKESANKVEGIIRKEISNIYDIYDAFANGEINS |
| | IADLTCRLQKTNILQGHLPKQMISILEGRQKDMEKEAERKIGEMIDDTQRRLDLLCKQTNQKIRIGKRNAGL |
| | LKSGKIADWLVSDMMRFQPVQKDTNNAPINNSKANSTEYRMLQHALALFGSESSRLKAYFRQMNLVGNA |
| | NPHPFLAETQWEHQNNILSFYRKYLEARKKYLGSLKPKDWKQYQHFLMLKEQKSNRNTLVAGWKNGFNL |
| | PRGIFTEPIRKWFEEHNNSEGLYDQILSFGRVGFVAKAIPLYFAEECKDCVQPFYDYPFNVGNKLKPKKGQF |
| | LDKKEHVELWQKNKELFKNYPPEKRKTDLAYLDFLSWKKFERELRLIKNQDIVTWLMFKELFKTTTVEGL |
| | KIGEIHLRDIDTNTANEESNNILNRIMPMKLPVKTYETDNKGNILKERPLATFYIEETETKVLKQGNFKVLAK |
| | DRRLNGLLSFAETTDIDLEKNPITKLSVDHELIKYQTTRISIFEMTLGLEKKLIDKYSTLPTDSFRNMLERWL |
| | QCKANRPELKNYVNSLIAVRNAFSHNQYPMYDATLFAEVKKFTLFPSVDTKKIELNIAPQLLEIVGKAIKEIE |
| | KSENKN |
| IMG_ | MQKKIKGFKGGTENYMRMTNEVFCRNRMVIPKLRLETDYDNHQLMFDMLNELVRCPLSLYKRLKQEDQ |
| 3300014026 | DKFRVPIEFLDEDNEADNSYQENANSDENPTEETDPLKNTLVRHQHRFPYFVLRYFDLNEVFKQLRFQINLG |
| SEQ ID NO: | CYHFSIYDKTIGERTEKCHLTRTLFGFDRLQNFSVKLQPEHWKNMVKHLDTEESSDKPYLSDAMPHYQIEN |
| 4323 | EKIGIHFLKTDTEKKETVWPSLEVEEVSSNRNKYKSEKNLTVDAFLSTHELLPMMFYYQLLSSEEKTRAAA |
| | GDKVQGVLQSYRKKIFDIYDDFANGTINSMQKLDERLAKDNLLRGNMPQQMLAILERQEXXXXICS |
| IMG_ | MQKKIPGFKKASENYMKMTNEVFCRNHILLPKIRLETVYDKDWMLLDMLNEVVRCPLSLYKRLTPADQN |
| 3300006479 | KFKVPEKSSDNANRQEDDNPFSRILVRHQNRFPYFVLRFFDLNEVFTTLRFQINLGCYHFAICKKQIGDKKE |
| SEQ ID NO: | VHHLTRTLYGFSRLQNFTQNTRPEEWNTLVKTTEPSSGNDGKTVQGVPLPYISYTIPHYQIENEKIGIKIFDG |
| 4324 | DTAVDTDIWPSVSTEKQLNKPDKYTLTPGFKADVFLSVHELLPMMFYYQLLLCEGMLKTDAGNAVEKVLI |
| | DTRNAIFNLYDAFVQEKINTITDLENYLQDKPILIGHLPKQMIDLLKGHQRDMLKAAEQKKAMLIKDTERR |
| | LERLNKQPEQKPNVAAKNIGALLRNGQIADWLVKDMMRFQPVKRDKEGNPINCSKANSTEYQMLQRAFA |
| | FYATDSCRLPRYFEQLHLINCDNSHLFLSRFEYDKQPNLIAFYAAYLKAKLDFLNELQPQNWVSDNYFLLL |
| | RAPKNNRQKLAEGWKNGFNLPRGLFTEKIKTWFNEHKTIVDISDCDIFKNRVGQVARLIPVFFDKKFKDHS |
| | QPFYRYNFNVGNVSKPTEAKYLSKEKREELFKSYQNKFKNNIPAEKTKEYREYKNFSLWKKFERELRLIKN |
| | QDILTWLMCKNLFDEKIEQGIDIPYIKLDSLQTNTSTKGSLNALAQVLPMVLAIYIGNSESNNGTGANEEEN |
| | KGPMVYIKEEGTKLLKWGNFKTLLADRRIKGLFSYIEHDDIDLKQHPLTKRRVDLELDLYQTCRIDIFQQTL |
| | GLEAQLLNKYSDLNTDNFYQMLIGWRKKEGIPRDIKEDTDFLKDVRNAFSHNQYPDSKKIAFSRIRKFNPK |
| | KTILNEKKGLGIAKQMYEEVEKVVNRIKGIELFD |
| GCA_ | MEKPLPPNVYTLKHKFFWGAFLNIARHNAFITICHINEQLGLTTPPNDDKIADVVCGTWNNILNNDHDLLK |
| 002025185.1_ | KSQLTELILKHFPFLAAMCYHPPKKEGKKKGSQKEQQKEKENEAQSQAEALNPSELIKALKTLVKQLRTLR |
| ASM202518v1_ | NYYSHYKHKKPDAEKDIFKHLYKAFDASLRMVKEDYKAHFTVNLTQDFAHLNRKGKNKQDNPKFDRYR |
| genomic_2 | FEKDGFFTESGLLFFTNLFLDKHDAYWMLKKVSGFKASHKQSEKMTTEVFCRSRILLPKLRLESRYDHNQ |
| SEQ ID NO: | MLLDMLSELSRCPKLLYEKLSEKDKKHFQVEADGFLDEIEEEQNPFKDALIRHQDRFPYFALRYLDLNESFK |
| 4325 | SIRFQVDLGTYHYCIYDKKIGDEQEKRHLTRTLLSFGRLQDFTEINRPQEWKALTKDLDYKETSKQPFISKTT |
| | PHYHITDNKIGFRLGTSKELYPSLEVKDGANRIAKYPYNSDFVAHAFISVHELLPLMFYQHLTGKSEDLLKE |
| | TVRHIQRIYKDFEEERINTIEDLEKANQGRLPLGAFPKQMLGLLQNKQPDLSEKAKIKIEKLIAETKLLSHRL |
| | NTKLKSSPKLGKRREKLIKTGVLADWLVKDFMRFQPVAYDVQNQPIESSKANSTEFQLIQRALALYGGEKN |
| | RLEGYFKQTNLIGNTNPHPFLNKFNWKACRNLVDFYQQYLEQREKFLEAIKNQPWEPYQYCLLLKIPKENK |
| | KIWLKVGNKEALACQEGCLPKRLERSFRKTSRYPNLLERRLKNTVEWALSPEPLHCTLGKDTKTTTRVFTT |
| | FRTS |
| GCA_ | MEKPLPPNVYTLKHKFFWGAFLNIARHNAFITICHINEQLGLKIPSNDDKIADVVCGTWNNILNNDHDLLKK |
| 001670645.1_ | SQLTELILKHFPFLAAMCYHPPKKEGKKKGSDKEQQKEKENEAQSDAEALNPSELIKALETLVNQLHNLRN |
| RCAD0181_ | YYSHYKHKKPDAEKDIFKHLYKAFDASLRMVKEDYKAHFTVNLTRDFAHLNRKGKNKQDNPKFDRYRFE |
| genomic_2 | KDGFFTESGLLFFTNLFLDKRDAYWMLKKVSGFKASHKQSEKMTTEVFCRSRILLPKLRLESRYDHNQML |
| SEQ ID NO: | LDMLSELSRCPKLLYEKLSEENKKHFQVEADGFLDEIEEEQNPFKDALIRHQDRFPYFALRYLDLNESFKSIN |
| 4326 | SLCILNNTDF |
| GCA_ | MEKPLPPNVYTLKHKFFWGAFLNIARHNAFITICHINEQLGLKIPSNDDKIADVVCGTWNNILNNDHDLLKK |
| 001670765.1_ | SQLTELILKHFPFLAAMCYHPPKKEGKKKGSQKEQQKEKENEAQSQAEALNPSELIKALETLVNQLHNLRN |
| RCAD0133_ | YYSHYKHKKPDAEKDIFKHLYKAFDASLRMVKEDYKAHFTVNLTRDFAHLNRKGKNKQDNPKFDRYRFE |
| genomic_2 | KDGFFTESGLLFFTNLFLDKRDAYWMLKKVSGFKASHKQSEKMTTEVFCRSRILLPKLRLESRYDHNQML |
| SEQ ID NO: | LDMLSELSRCPKLLYEKLSEENKKHFQVEADGFLDEIEEEQNPFKDALIRHQDRFPYFALRYLDLNESFKSIN |
| 4327 | SLCILNNTDF |
| GCA_ | LPRGLFTEAIREILSEDLTLSKPIRKEIKKHGRVGFISRAITLYFRERYQDDHQSFYNLPYELEAKASTPKPPLP |
| 002025185.1_ | KKREYVLRAEHYEYWQQNKPQSPTELQRLELHTSDRWKDYLLYKRWQHLEKKLRLYRNQDVMLWLMT |
| ASM202518v1_ | LELTKNHFKELKLNYHQLKLENLAVNVQEADAKLNPLNQTLPMVLPVKVYPATAFGEVQYQETPIRTVYI |
| genomic | REEHTKALKMGNFKALVKDRRLNGLFSFIKEENDTQKHPISQLRLRRELEIYQSLRVDAFKETLDLEEKLLK |
| SEQ ID NO: | KHTSLSSLENKFRILLEEWKKEYAASSMITDEHIAFIASVRNAFCHNQYPFYEEALHAPIPLFTVAQPTTEEK |
| 4328 | DGLGIAEALLRVLREYCEIVKSQI |
| GCA_ | SIRFQVDLGTYHYCIYDKKIGDEQEKRHLTRTLLSFGRLQDFTEINRPQEWKALTKDLDYKETSKQPFISKTT |
| 001670645.1_ | PHYHITDNKIGFRLGTSKELYPSLEVKDGANRIAKYPYNSDFVAHAFISVHELLPLMFYQHLTGKSEDLLKE |
| RCAD0181_ | TVRHIQRIYKDFEEERINTIEDLEKANQGRLPLGAFPKQMLGLLQNKQPDLSEKAKIKIEKLIAETKLLSHRL |
| genomic | NTKLKSSPKLGKRREKLIKTGVLADWLVKDFMRFQPVAYDVQNQPIESSKANSTEFQLIQRALALYGGEKN |
| SEQ ID NO: | RLEGYFKQTNLIGNTNPHPFLNKFNWKACRNLVDFYQQYLEQREKFLEAIKNQPWEPYQYCLLLKIPKENR |
| 4329 | KNLVKGWEQGGISLPRGLFTEAIRETLSEDLTLSKPIRKEIKKHGRVGFISRAITLYFRERYQDDHQSFYNLP |
| | YELEAKASTPKPPLPKKREYVLRAEHYEYWQQNKPQSPTELQRLELHTSDRWKDYLLYKRWQHLEKKLR |
| | LYRNQDVMLWLMTLELTKNHFKELKLNYHQLKLENLAVNVQEADAKLNPLNQTLPMVLPVKVYPATAF |
| | GEVQYQETPIRTVYIREEQTKALKMGNFKALVKDRRLNGLFSFIKEENDTQKHPISQLRLRRELEIYQSLRV |
| | DAFKETLSLEEKLLNKHASLSSLENEFRTLLEEWKKKYAASSMVTDEHIAFIASVRNAFCHNQYPFYKETL |
| | HAPILLFTVAQPTTEEKDGLGIAEALLRVLREYCEIVKSQI |
| GCA_ | SIRFQVDLGTYHYCIYDKKIGDEQEKRHLTRTLLSFGRLQDFTEINRPQEWKALTKDLDYKETSKQPFISKTT |
| 001670765.1_ | PHYHITDNKIGFRLGTSKELYPSLEVKDGANRIAKYPYNSDFVAHAFISVHELLPLMFYQHLTGKSEDLLKE |
| RCAD0133_ | TVRHIQRIYKDFEEERINTIEDLEKANQGRLPLGAFPKQMLGLLQNKQPDLSEKAKIKIEKLIAETKLLSHRL |
| genomic | NTKLKSSPKLGKRREKLIKTGVLADWLVKDFMRFQPVAYDVQNQPIESSKANSTEFQLIQRALALYGGEKN |
| SEQ ID NO: | RLEGYFKQTNLIGNTNPHPFLNKFNWKACRNLVDFYQQYLEQREKFLEAIKNQPWEPYQYCLLLKIPKENR |
| 4330 | KNLVKGWEQGGISLPRGLFTEAIRETLSEDLTLSKPIRKEIKKHGRVGFISRAITLYFRERYQDDHQSFYNLP |
| | YELEAKASTPKPPLPKKREYVLRAEHYEYWQQNKPQSPTELQRLELHTSDRWKDYLLYKRWQHLEKKLR |
| | LYRNQDVMLWLMTLELTKNHFKELKLNYHQLKLENLAVNVQEADAKLNPLNQTLPMVLPVKVYPATAF |
| | GEVQYQETPIRTVYIREEQTKALKMGNFKALVKDRRLNGLFSFIKEENDTQKHPISQLRLRRELEIYQSLRV |
| | DAFKETLSLEEKLLNKHASLSSLENEFRTLLEEWKKKYAASSMVTDEHIAFIASVRNAFCHNQYPFYKETL |
| | HAPILLFTVAQPTTEEKDGLGIAEALLRVLREYCEIVKSQI |
| IMG_ | MNNLINVNFKKFDLESDKYFFAAYLNKATQNVYIILKDISESLGLGFELLNDNNIMTANMWSYLQSNKEPE |
| 3300025308_3 | VSIRIIEKLNKQFPFINYLAKRNSFVKRNEFVATPYDYYEVFELIIEQLVKFRNYYSHPLSEKVVMKQSIIEGM |
| SEQ ID NO: | RVLFDSSRREVKKRFAFKTKEINHLVRLSSRKINDKKESYESEFFEYRFADKFNLISEKGFAFFVSMWLPRTD |
| 4331 | AQFFLKNIKGFSRTDTISQKAILEIFTFYSLRIPQTKFECDYSNEIYFSEMINELQRCPKELYHLLNQEDREKFE |
| | SLNNSRFNNNEYEALPILKRNDNRFFYFALRYLDNIFKNTKFNIDLGYYCFHVYNQEIDGIARKRRWVKHIS |
| | VFGNLKDFTLNNRPKEWIEKINKNQDSQNENNEIYVTETVPHYHINEHNIGLKIINNYSDLKNSNKIWPELQ |
| | KFKFENKEKLKPRNEKPDCWLSLYELPAIVFYEILRRKNNKGDSAEKIINNHCNNIKSFFEDIEKGLFHSNYT |
| | EDALKKELENRNLEKSHIPKAIIKYLTSAKTESFEVKAQNKLDELYYETCEMLNKINRQKSSFCEKPGSKDY |
| | VEMKCEVLADFLARDMIRLQKPIRNDFGKANGTEFSLLHAKLAFFGINKNTLLDTFKLCNLSESSNPHPFLD |
| | KINIKQSNNLLDFYEIYLNNRKDYFKSCLTEKKYNEYHFLKLGERRKKSGEKYIIKLAKELKDENVINLPRG |
| | LFLNPIIETLLIDDKTKSLAQEVKKMKRVNVSFIIEKYFSEIRKDQPQEFYRYKKSYEILNKLFDNREKFEKRE |
| | ALTKKQFDTNELEKLTTKIYEKTSDNELTRLLAQKIKSDI |
| MWWF01.1 | LFMPFYHSTIDKALFGAYLNMARNNLRMVLTNIEEKVYGKSGNWKEDNMRHSPVIKALEKNEQPDISKRIT |
| SEQ ID NO: | DMLLRDLPFLKLTVKSKINPSPNDYAKSLIGFIEQLSDLRNFNCHYLHNSYKTNPEIIESLRHIFDAARRRVKI |
| 4332 | RFNNTTEEVEHLVRKTARMVNGKRVGIEKKNYSFAFADAHEEITEIGIAFFTCLFLDKKYITLFLKQLKGFK |
| | DSRTRKTRATINTFGFFNIRIPQPKLQSNDTKEGLLMDILEDLKRCPNELFEHLSAKDQERFRVKADNLIEEN |
| | EVLQKRFSDRFPYLALRYFELTDHVKDFQFHTDLGKYNFKHYKKQVGGEERIRQLQKNMKGTGRLKDFTE |
| | DKMPEEWNVLVKRSDELPEGYMEPHIVFTIPHYHFVNNQIGVCINDVAKYPDAKTRKNPEPDIWLSIYELP |
| | ALIFLHLLTKRDDGSSEIKWVLYRHDQNIKRFFKALVEDKLQPGFTKETLQSELNKYNLEYSHIPKVLIEYLL |
| | KKTVKNVQQKAEDKLHVLLSETIVLLRKFDEDVEKAKEKEGGKRYKPIQSGKIADFIARDMLFLQPPVNEK |
| | DGKANSTLFQVLQARLAYYGRDKNLLNSLYKECNLIDSANAHPFLNNVPLAYSIVDYYKNYLLKRKEYLE |
| | KLLEKCMKGKINSNEFHFLHLGAREKRSGDSYYKNLAKTFSEKPINFPRGLFLNAIKQQSKNKNGESIKKFL |
| | EEHERVNTIFLIQEHFKTVEEDEAQPF |
| IMG_ | MDTPSSIERKHIVLTDKYYFAAYLNMARHNVYMVLTDINTRLGFEKVPGDDAGAVSVIVLQKLKEDSTKK |
| 3300030508 | NVIAPDIQLKIIKELHAHFSFLKPMMFAWKKPIGEATEEEIQKMEYAPGDYYTFFAVFLKALNDLRNEYTHV |
| SEQ ID NO: | ATQPFDFPADLLHALRVTFDAGVRKAKARFSFEAKDVEHLVRQVKGGKEKPAFKYKFQLKGSKSLTTYGL |
| 4333 | SFFICLLLERKYASLFTQKLEGLKDKRTRAFKATYEVFAVHCITLPKARYTSDSGEGSLLLDMLNELKRCPD |
| | ILFPHLQAKNQDVFRIPVEDVPGMEQEEDNNFVLLKRYEDRFPYLALRFMDEVKWFQKLHFPVDLGNYHY |
| | HLYDKTVDGMPRVGSLWEKMIGYGRLPDYQQAFLEKKVPDSWLRLWKNHEVRTEGAKAPYIPPAMPHY |
| | HLPDNNIAIRITTENGWPDLTINEADADKNKPGKKH |
| IMG_ | MNNEQNLEQRIFAQAKNIRDDKAYFGAHLNLARHNAFIILHHINQRLGFIDQNVQDDAQFKKFKCLTILKQ |
| 3300007465 | SSKPDLIAKSLDLIRFHFPFLQILTDKLSDIRSSNGERKILTPQEEGEIIESLLTDLNGYRNEYCHGENKSHVPD |
| SEQ ID NO: | SYLIKNLKSIYDASLRMVKERFKLEPHKIKHLERNNKDGEKLNFKYALSNNSSISEKGLVFFINLFLEVKDSY |
| 4334 | SFIKKIEGFKNAGTNSLNATTYCFTIQHVRLPNPKITSQEYTKEELLLRMMNYLEKVPDQIFKTLSPADQENC |
| | KSNVDVFETPIEGDLIEKSLHKRYRDQFPEFALNYIDYYKLFPNIRFQINLGKFIFSVKDKEILGETRKRRQIQ |
| | MLRGFGQIQDYQNKKNIPEIWQSLINKSHEIPEDFPDPYINDMEPHYHIENNNIYFKFMEPDTTHWPRIDARI |
| | ENQNNINAHPRPRLLQADGILSVYELAPLLFYEMIRSDKSKSAETILSIQKSNIERLLNDIKSGELTKVALDKI |
| | PNPYSPSTKKFNTAKQVILKEKIEKRKIELNEKLKKYKLALDDLPKMILYYLLNIEHEDISLKVIPIIKSITVIL |
| | NTQTHPANFEYLAVPKKSKHAYLKAMITNWEELNISTGPMGIYFANTFVGTTTLNPESIEDTLSISLGPDIAT |
| | QLKRTKIAENTKKETFSAKKHSNIAWEIDIKNSKTRDIEVRIEDQIPLSKLNEVEVETKELSGGMLDQSTGIIT |
| | WNVKIPAGKSIKKILKYQVRYPKSMKLILE |
| IMG_ | METEEQIIENRIRTLANDPQYFGGYLNMARHNIYLIINNLTKTFSYLNFKEIADDAEIASDTHILSNIFDTSNSII |
| 3300028769 | DEERIKVYNYLIKRHYLPFLKIFNAENIIEIGNEYTIDFKRLHNFIIKSFKKITDLRNAYSHYLSIDDDGNIANS |
| SEQ ID NO: | NKKELDSSIKGDIDLLFKYAPQYSYIRNNQTQTGTDYTHLENYLLFEISENNTLTDQGLYFFINLFLTREHAT |
| 4335 | KFLKRFKGFKNETTPPFRATIQAFTSYALKLPDERLGNENPIHSLLMEILAELNKCPKELFIHLTDEWKKEFE |
| | PVLSENGRKNIVLNSINYNELNNEDIEEVTKELSTLKRYDDRYPYFALRYLEDTNCLKRIRFQITLGKLIVNR |
| | YDKKIIGINQDRRVLKTVNTFGKLSDFVDKESDVLEILKHHVINTENIVFEQYAPHYNTNNNKIAFYIFDEED |
| | EKMRR |
| IMG_ | METEEQIIENRIRTLANDPQYFGGYLNMARHNIYLIINNLTKTFSYLNFKEIADDAEIASDTHILSNIFDTSNSII |
| 3300028862_3 | DEERIKVYNYLIKRHYLPFLKIFNAENIIEIGNEYTIDFKRLHNFIIKSFKKITDLRNAYSHYLSIDDDGNIANS |
| SEQ ID NO: | NKKELDSSIKGDIDLLFKYAPQYSYIRNNQTQTGTDYTHLENYLLFEISENNTLTDQGLYFFINLFLTREHAT |
| 4336 | KFLKRFKGFKNETTPPFRATIQAFTSYALKLPDERLGNENPIHSLLMEILAELNKCPKELFIHLTDEWKKEFE |
| | PVLSENGRKNIVLNSINYNELNNEDIEEVTKELSTLKRYDDRYPYFALRYLEDTNCLKRIRFQITLGKLIVNR |
| | YDKKIIGINQDRRVLKTVNTFGKLSDFVDKESDVLEILKHHVINTENIVFEQYAPHYNTNNNKIAFYIFDEED |
| | EKMRR |
| IMG_ | METEEQIIENRIRTLANDPQYFGGYLNMARHNIYLIINNLTKTFSYLNFKEIADDAEIASDTHILSNIFDTSNSII |
| 3300028767_5 | DEERIKVYNYLIKRHYLPFLKIFNAENIIEIGNEYTIDFKRLHNFIIKSFKKITDLRNAYSHYLSIDDDGNIANS |
| SEQ ID NO: | NKKELDSSIKGDIDLLFKYAPQYSYIRNNQTQTGTDYTHLENYLLFEISENNTLTDQGLYFFINLFLTREHAT |
| 4337 | KFLKRFKGFKNETTPPFRATIQAFTSYALKLPDERLGNENPIHSLLMEILAELNKCPKELFIHLTDEWKKEFE |
| | PVLSENGRKNIVLNSINYNELNNEDIEEVTKELSTLKRYDDRYPYFALRYLEDTNCLKRIRFQITLGKLIVNR |
| | YDKKIIGINQDRRVLKTVNTFGKLSDFVDKESDVLEILKHHVINTENIVFEQYAPHYNTNNNKIAFYIFDEED |
| | EKMRR |
| IMG_ | METEEQIIENRIRTLANDPQYFGGYLNMARHNIYLIINNLTKTFSYLNFKEIADDAEIASDTHILSNIFDTSNSII |
| 3300028774_2 | DEERIKVYNYLIKRHYLPFLKIFNAENIIEIGNEYTIDFKRLHNFIIKSFKKITDLRNAYSHYLSIDDDGNIANS |
| SEQ ID NO: | NKKELDSSIKGDIDLLFKYAPQYSYIRNNQTQTGTDYTHLENYLLFEISENNTLTDQGLYFFINLFLTREHAT |
| 4338 | KFLKRFKGFKNETTPPFRATIQAFTSYALKLPDERLGNENPIHSLLMEILAELNKCPKELFIHLTDEWKKEFE |
| | PVLSENGRKNIVLNSINYNELNNEDIEEVTKELSTLKRYDDRYPYFALRYLEDTNCLKRIRFQITLGKLIVNR |
| | YDKKIIGINQDRRVLKTVNTFGKLSDFVDKESDVLEILKHHVINTENIVFEQYAPHYNTNNNKIAFYIFDEED |
| | EKMRR |
| IMG_ | METEEQIIENRIRTLANDPQYFGGYLNMARHNIYLIINNLTKTFSYLNFKEIADDAEIASDTHILSNIFDTSNSII |
| 3300028738 | DEERIKVYNYLIKRHYLPFLKIFNAENIIEIGNEYTIDFKRLHNFIIKSFKKITDLRNAYSHYLSIDDDGNIANS |
| SEQ ID NO: | NKKELDSSIKGDIDLLFKYAPQYSYIRNNQTQTGTDYTHLENYLLFEISENNTLTDQGLYFFINLFLTREHAT |
| 4339 | KFLKRFKGFKNETTPPFRATIQAFTSYALKLPDERLGNENPIHSLLMEILAELNKCPKELFIHLTDEWKKEFE |
| | PVLSENGRKNIVLNSINYNELNNEDIEEVTKELSTLKRYDDRYPYFALRYLEDTNCLKRIRFQITLGKLIVNR |
| | YDKKIIGINQDRRVLKTVNTFGKLSDFVDKESDVLEILKHHVINTENIVFEQYAPHYNTNNNKIAFYIFDEED |
| | EKMRR |
| IMG_ | METEEQIIENRIRTLANDPQYFGGYLNMARHNIYLIINNLTKTFSYLNFKEIADDAEIASDTHILSNIFDTSNSII |
| 3300028739 | DEERIKVYNYLIKRHYLPFLKIFNAENIIEIGNEYTIDFKRLHNFIIKSFKKITDLRNAYSHYLSIDDDGNIANS |
| SEQ ID NO: | NKKELDSSIKGDIDLLFKYAPQYSYIRNNQTQTGTDYTHLENYLLFEISENNTLTDQGLYFFINLFLTREHAT |
| 4340 | KFLKRFKGFKNETTPPFRATIQAFTSYALKLPDERLGNENPIHSLLMEILAELNKCPKELFIHLTDEWKKEFE |
| | PVLSENGRKNIVLNSINYNELNNEDIEEVTKELSTLKRYDDRYPYFALRYLEDTNCLKRIRFQITLGKLIVNR |
| | YDKKIIGINQDRRVLKTVNTFGKLSDFVDKESDVLEILKHHVINTENIVFEQYAPHYNTNNNKIAFYIFDEED |
| | EKMRR |
| IMG_ | METEEQIIENRIRTLANDPQYFGGYLNMARHNIYLIINNLTKTFSYLNFKEIADDAEIASDTHILSNIFDTSNSII |
| 3300029998_3 | DEERIKVYNYLIKRHYLPFLKIFNAENIIEIGNEYTIDFKRLHNFIIKSFKKITDLRNAYSHYLSIDDDGNIANS |
| SEQ ID NO: | NKKELDSSIKGDIDLLFKYAPQYSYIRNNQTQTGTDYTHLENYLLFEISENNTLTDQGLYFFINLFLTREHAT |
| 4341 | KFLKRFKGFKNETTPPFRATIQAFTSYALKLPDERLGNENPIHSLLMEILAELNKCPKELFIHLTDEWKKEFE |
| | PVLSENGRKNIVLNSINYNELNNEDIEEVTKELSTLKRYDDRYPYFALRYLEDTNCLKRIRFQITLGKLIVNR |
| | YDKKIIGINQDRRVLKTVNTFGKLSDFVDKESDVLEILKHHVINTENIVFEQYAPHYNTNNNKIAFYIFDEED |
| | EKMRR |
| IMG_ | METEEQIIENRIRTLANDPQYFGGYLNMARHNIYLIINNLTKTFSYLNFKEIADDAEIASDTHILSNIFDTSNSII |
| 3300030055_2 | DEERIKVYNYLIKRHYLPFLKIFNAENIIEIGNEYTIDFKRLHNFIIKSFKKITDLRNAYSHYLSIDDDGNIANS |
| SEQ ID NO: | NKKELDSSIKGDIDLLFKYAPQYSYIRNNQTQTGTDYTHLENYLLFEISENNTLTDQGLYFFINLFLTREHAT |
| 4342 | KFLKRFKGFKNETTPPFRATIQAFTSYALKLPDERLGNENPIHSLLMEILAELNKCPKELFIHLTDEWKKEFE |
| | PVLSENGRKNIVLNSINYNELNNEDIEEVTKELSTLKRYDDRYPYFALRYLEDTNCLKRIRFQITLGKLIVNR |
| | YDKKIIGINQDRRVLKTVNTFGKLSDFVDKESDVLEILKHHVINTENIVFEQYAPHYNTNNNKIAFYIFDEED |
| | EKMRR |
| IMG_ | METEEQIIENRIRTLANDPQYFGGYLNMARHNIYLIINNLTKTFSYLNFKEIADDAEIASDTHILSNIFDTSNSII |
| 3300028864 | DEERIKVYNYLIKRHYLPFLKIFNAENIIEIGNEYTIDFKRLHNFIIKSFKKITDLRNAYSHYLSIDDDGNIANS |
| SEQ ID NO: | NKKELDSSIKGDIDLLFKYAPQYSYIRNNQTQTGTDYTHLENYLLFEISENNTLTDQGLYFFINLFLTREHAT |
| 4343 | KFLKRFKGFKNETTPPFRATIQAFTSYALKLPDERLGNENPIHSLLMEILAELNKCPKELFIHLTDEWKKEFE |
| | PVLSENGRKNIVLNSINYNELNNEDIEEVTKELSTLKRYDDRYPYFALRYLEDTNCLKRIRFQITLGKLIVNR |
| | YDKKIIGINQDRRVLKTVNTFGKLSDFVDKESDVLEILKHHVINTENIVFEQYAPHYNTNNNKIAFYIFDEED |
| | EKMRR |
| IMG_ | METEEQIIENRIRTLANDPQYFGGYLNMARHNIYLIINNLTKTFSYLNFKEIADDAEIASDTHILSNIFDTSNSII |
| 3300030047_2 | DEERIKVYNYLIKRHYLPFLKIFNAENIIEIGNEYTIDFKRLHNFIIKSFKKITDLRNAYSHYLSIDDDGNIANS |
| SEQ ID NO: | NKKELDSSIKGDIDLLFKYAPQYSYIRNNQTQTGTDYTHLENYLLFEISENNTLTDQGLYFFINLFLTREHAT |
| 4344 | KFLKRFKGFKNETTPPFRATIQAFTSYALKLPDERLGNENPIHSLLMEILAELNKCPKELFIHLTDEWKKEFE |
| | PVLSENGRKNIVLNSINYNELNNEDIEEVTKELSTLKRYDDRYPYFALRYLEDTNCLKRIRFQITLGKLIVNR |
| | YDKKIIGINQDRRVLKTVNTFGKLSDFVDKESDVLEILKHHVINTENIVFEQYAPHYNTNNNKIAFYIFDEED |
| | EKMRR |
| IMG_ | METEEQIIENRIRTLANDPQYFGGYLNMARHNIYLIINNLTKTFSYLNFKEIADDAEIASDTHILSNIFDTSNSII |
| 3300030491_2 | DEERIKVYNYLIKRHYLPFLKIFNAENIIEIGNEYTIDFKRLHNFIIKSFKKITDLRNAYSHYLSIDDDGNIANS |
| SEQ ID NO: | NKKELDSSIKGDIDLLFKYAPQYSYIRNNQTQTGTDYTHLENYLLFEISENNTLTDQGLYFFINLFLTREHAT |
| 4345 | KFLKRFKGFKNETTPPFRATIQAFTSYALKLPDERLGNENPIHSLLMEILAELNKCPKELFIHLTDEWKKEFE |
| | PVLSENGRKNIVLNSINYNELNNEDIEEVTKELSTLKRYDDRYPYFALRYLEDTNCLKRIRFQITLGKLIVNR |
| | YDKKIIGINQDRRVLKTVNTFGKLSDFVDKESDVLEILKHHVINTENIVFEQYAPHYNTNNNKIAFYIFDEED |
| | EKMRR |
| IMG_ | METEEQIIENRIRTLANDPQYFGGYLNMARHNIYLIINNLTKTFSYLNFKEIADDAEIASDTHILSNIFDTSNSII |
| 3300030048_2 | DEERIKVYNYLIKRHYLPFLKIFNAENIIEIGNEYTIDFKRLHNFIIKSFKKITDLRNAYSHYLSIDDDGNIANS |
| SEQ ID NO: | NKKELDSSIKGDIDLLFKYAPQYSYIRNNQTQTGTDYTHLENYLLFEISENNTLTDQGLYFFINLFLTREHAT |
| 4346 | KFLKRFKGFKNETTPPFRATIQAFTSYALKLPDERLGNENPIHSLLMEILAELNKCPKELFIHLTDEWKKEFE |
| | PVLSENGRKNIVLNSINYNELNNEDIEEVTKELSTLKRYDDRYPYFALRYLEDTNCLKRIRFQITLGKLIVNR |
| | YDKKIIGINQDRRVLKTVNTFGKLSDFVDKESDVLEILKHHVINTENIVFEQYAPHYNTNNNKIAFYIFDEED |
| | EKMRR |
| IMG_ | METEEQIIENRIRTLANDPQYFGGYLNMARHNIYLIINNLTKTFSYLNFKEIADDAEIASDTHILSNIFDTSNSII |
| 3300030001_2 | DEERIKVYNYLIKRHYLPFLKIFNAENIIEIGNEYTIDFKRLHNFIIKSFKKITDLRNAYSHYLSIDDDGNIANS |
| SEQ ID NO: | NKKELDSSIKGDIDLLFKYAPQYSYIRNNQTQTGTDYTHLENYLLFEISENNTLTDQGLYFFINLFLTREHAT |
| 4347 | KFLKRFKGFKNETTPPFRATIQAFTSYALKLPDERLGNENPIHSLLMEILAELNKCPKELFIHLTDEWKKEFE |
| | PVLSENGRKNIVLNSINYNELNNEDIEEVTKELSTLKRYDDRYPYFALRYLEDTNCLKRIRFQITLGKLIVNR |
| | YDKKIIGINQDRRVLKTVNTFGKLSDFVDKESDVLEILKHHVINTENIVFEQYAPHYNTNNNKIAFYIFDEED |
| | EKMRR |
| IMG_ | METEEQIIENRIRTLANDPQYFGGYLNMARHNIYLIINNLTKTFSYLNFKEIADDAEIASDTHILSNIFDTSNSII |
| 3300031918_2 | DEERIKVYNYLIKRHYLPFLKIFNAENIIEIGNEYTIDFKRLHNFIIKSFKKITDLRNAYSHYLSIDDDGNIANS |
| SEQ ID NO: | NKKELDSSIKGDIDLLFKYAPQYSYIRNNQTQTGTDYTHLENYLLFEISENNTLTDQGLYFFINLFLTREHAT |
| 4348 | KFLKRFKGFKNETTPPFRATIQAFTSYALKLPDERLGNENPIHSLLMEILAELNKCPKELFIHLTDEWKKEFE |
| | PVLSENGRKNIVLNSINYNELNNEDIEEVTKELSTLKRYDDRYPYFALRYLEDTNCLKRIRFQITLGKLIVNR |
| | YDKKIIGINQDRRVLKTVNTFGKLSDFVDKESDVLEILKHHVINTENIVFEQYAPHYNTNNNKIAFYIFDEED |
| | EKMRR |
| IMG_ | METEEQIIENRIRTLANDPQYFGGYLNMARHNIYLIINNLTKTFSYLNFKEIADDAEIASDTHILSNIFDTSNSII |
| 3300030000 | DEERIKVYNYLIKRHYLPFLKIFNAENIIEIGNEYTIDFKRLHNFIIKSFKKITDLRNAYSHYLSIDDDGNIANS |
| SEQ ID NO: | NKKELDSSIKGDIDLLFKYAPQYSYIRNNQTQTGTDYTHLENYLLFEISENNTLTDQGLYFFINLFLTREHAT |
| 4349 | KFLKRFKGFKNETTPPFRATIQAFTSYALKLPDERLGNENPIHSLLMEILAELNKCPKELFIHLTDEWKKEFE |
| | PVLSENGRKNIVLNSINYNELNNEDIEEVTKELSTLKRYDDRYPYFALRYLEDTNCLKRIRFQITLGKLIVNR |
| | YDKKIIGINQDRRVLKTVNTFGKLSDFVDKESDVLEILKHHVINTENIVFEQYAPHYNTNNNKIAFYIFDEED |
| | EKMRR |
| IMG_ | METEEQIIENRIRTLANDPQYFGGYLNMARHNIYLIINNLTKTFSYLNFKEIADDAEIASDTHILSNIFDTSNSII |
| 3300030002 | DEERIKVYNYLIKRHYLPFLKIFNAENIIEIGNEYTIDFKRLHNFIIKSFKKITDLRNAYSHYLSIDDDGNIANS |
| SEQ ID NO: | NKKELDSSIKGDIDLLFKYAPQYSYIRNNQTQTGTDYTHLENYLLFEISENNTLTDQGLYFFINLFLTREHAT |
| 4350 | KFLKRFKGFKNETTPPFRATIQAFTSYALKLPDERLGNENPIHSLLMEILAELNKCPKELFIHLTDEWKKEFE |
| | PVLSENGRKNIVLNSINYNELNNEDIEEVTKELSTLKRYDDRYPYFALRYLEDTNCLKRIRFQITLGKLIVNR |
| | YDKKIIGINQDRRVLKTVNTFGKLSDFVDKESDVLEILKHHVINTENIVFEQYAPHYNTNNNKIAFYIFDEED |
| | EKMRR |
| IMG_ | METEEQIIENRIRTLANDPQYFGGYLNMARHNIYLIINNLTKTFSYLNFKEIADDAEIASDTHILSNIFDTSNSII |
| 3300030673_2 | DEERIKVYNYLIKRHYLPFLKIFNAENIIEIGNEYTIDFKRLHNFIIKSFKKITDLRNAYSHYLSIDDDGNIANS |
| SEQ ID NO: | NKKELDSSIKGDIDLLFKYAPQYSYIRNNQTQTGTDYTHLENYLLFEISENNTLTDQGLYFFINLFLTREHAT |
| 4351 | KFLKRFKGFKNETTPPFRATIQAFTSYALKLPDERLGNENPIHSLLMEILAELNKCPKELFIHLTDEWKKEFE |
| | PVLSENGRKNIVLNSINYNELNNEDIEEVTKELSTLKRYDDRYPYFALRYLEDTNCLKRIRFQITLGKLIVNR |
| | YDKKIIGINQDRRVLKTVNTFGKLSDFVDKESDVLEILKHHVINTENIVFEQYAPHYNTNNNKIAFYIFDEED |
| | EKMRR |
| IMG_ | METEEQIIENRIRTLANDPQYFGGYLNMARHNIYLIINNLTKTFSYLNFKEIADDAEIASDTHILSNIFDTSNSII |
| 3300029981_2 | DEERIKVYNYLIKRHYLPFLKIFNAENIIEIGNEYTIDFKRLHNFIIKSFKKITDLRNAYSHYLSIDDDGNIANS |
| SEQ ID NO: | NKKELDSSIKGDIDLLFKYAPQYSYIRNNQTQTGTDYTHLENYLLFEISENNTLTDQGLYFFINLFLTREHAT |
| 4352 | KFLKRFKGFKNETTPPFRATIQAFTSYALKLPDERLGNENPIHSLLMEILAELNKCPKELFIHLTDEWKKEFE |
| | PVLSENGRKNIVLNSINYNELNNEDIEEVTKELSTLKRYDDRYPYFALRYLEDTNCLKRIRFQITLGKLIVNR |
| | YDKKIIGINQDRRVLKTVNTFGKLSDFVDKESDVLEILKHHVINTENIVFEQYAPHYNTNNNKIAFYIFDEED |
| | EKMRR |
| IMG_ | METEEQIIENRIRTLANDPQYFGGYLNMARHNIYLIINNLTKTFSYLNFKEIADDAEIASDTHILSNIFDTSNSII |
| 3300030943_2 | DEERIKVYNYLIKRHYLPFLKIFNAENIIEIGNEYTIDFKRLHNFIIKSFKKITDLRNAYSHYLSIDDDGNIANS |
| SEQ ID NO: | NKKELDSSIKGDIDLLFKYAPQYSYIRNNQTQTGTDYTHLENYLLFEISENNTLTDQGLYFFINLFLTREHAT |
| 4353 | KFLKRFKGFKNETTPPFRATIQAFTSYALKLPDERLGNENPIHSLLMEILAELNKCPKELFIHLTDEWKKEFE |
| | PVLSENGRKNIVLNSINYNELNNEDIEEVTKELSTLKRYDDRYPYFALRYLEDTNCLKRIRFQITLGKLIVNR |
| | YDKKIIGINQDRRVLKTVNTFGKLSDFVDKESDVLEILKHHVINTENIVFEQYAPHYNTNNNKIAFYIFDEED |
| | EKMRR |
| IMG_ | METEEQIIENRIRTLANDPQYFGGYLNMARHNIYLIINNLTKTFSYLNFKEIADDAEIASDTHILSNIFDTSNSII |
| 3300030685_2 | DEERIKVYNYLIKRHYLPFLKIFNAENIIEIGNEYTIDFKRLHNFIIKSFKKITDLRNAYSHYLSIDDDGNIANS |
| SEQ ID NO: | NKKELDSSIKGDIDLLFKYAPQYSYIRNNQTQTGTDYTHLENYLLFEISENNTLTDQGLYFFINLFLTREHAT |
| 4354 | KFLKRFKGFKNETTPPFRATIQAFTSYALKLPDERLGNENPIHSLLMEILAELNKCPKELFIHLTDEWKKEFE |
| | PVLSENGRKNIVLNSINYNELNNEDIEEVTKELSTLKRYDDRYPYFALRYLEDTNCLKRIRFQITLGKLIVNR |
| | YDKKIIGINQDRRVLKTVNTFGKLSDFVDKESDVLEILKHHVINTENIVFEQYAPHYNTNNNKIAFYIFDEED |
| | EKMRR |
| IMG_ | METEEQIIENRIRTLANDPQYFGGYLNMARHNIYLIINNLTKTFSYLNFKEIADDAEIASDTHILSNIFDTSNSII |
| 3300028853 | DEERIKVYNYLIKRHYLPFLKIFNAENIIEIGNEYTIDFKRLHNFIIKSFKKITDLRNAYSHYLSIDDDGNIANS |
| SEQ ID NO: | NKKELDSSIKGDIDLLFKYAPQYSYIRNNQTQTGTDYTHLENYLLFEISENNTLTDQGLYFFINLFLTREHAT |
| 4355 | KFLKRFKGFKNETTPPFRATIQAFTSYALKLPDERLGNENPIHSLLMEILAELNKCPKELFIHLTDEWKKEFE |
| | PVLSENGRKNIVLNSINYNELNNEDIEEVTKELSTLKRYDDRYPYFALRYLEDTNCLKRIRFQITLGKLIVNR |
| | YDKKIIGINQDRRVLKTVNTFGKLSDFVDKESDVLEILKHHVINTENIVFEQYAPHYNTNNNKIAFYIFDEED |
| | EKMRR |
| IMG_ | METEEQIIENRIRTLANDPQYFGGYLNMARHNIYLIINNLTKTFSYLNFKEIADDAEIASDTHILSNIFDTSNSII |
| 3300029995_2 | DEERIKVYNYLIKRHYLPFLKIFNAENIIEIGNEYTIDFKRLHNFIIKSFKKITDLRNAYSHYLSIDDDGNIANS |
| SEQ ID NO: | NKKELDSSIKGDIDLLFKYAPQYSYIRNNQTQTGTDYTHLENYLLFEISENNTLTDQGLYFFINLFLTREHAT |
| 4356 | KFLKRFKGFKNETTPPFRATIQAFTSYALKLPDERLGNENPIHSLLMEILAELNKCPKELFIHLTDEWKKEFE |
| | PVLSENGRKNIVLNSINYNELNNEDIEEVTKELSTLKRYDDRYPYFALRYLEDTNCLKRIRFQITLGKLIVNR |
| | YDKKIIGINQDRRVLKTVNTFGKLSDFVDKESDVLEILKHHVINTENIVFEQYAPHYNTNNNKIAFYIFDEED |
| | EKMRR |
| IMG_ | METEEQIIENRIRTLANDPQYFGGYLNMARHNIYLIINNLTKTFSYLNFKEIADDAEIASDTHILSNIFDTSNSII |
| 3300030294 | DEERIKVYNYLIKRHYLPFLKIFNAENIIEIGNEYTIDFKRLHNFIIKSFKKITDLRNAYSHYLSIDDDGNIANS |
| SEQ ID NO: | NKKELDSSIKGDIDLLFKYAPQYSYIRNNQTQTGTDYTHLENYLLFEISENNTLTDQGLYFFINLFLTREHAT |
| 4357 | KFLKRFKGFKNETTPPFRATIQAFTSYALKLPDERLGNENPIHSLLMEILAELNKCPKELFIHLTDEWKKEFE |
| | PVLSENGRKNIVLNSINYNELNNEDIEEVTKELSTLKRYDDRYPYFALRYLEDTNCLKRIRFQITLGKLIVNR |
| | YDKKIIGINQDRRVLKTVNTFGKLSDFVDKESDVLEILKHHVINTENIVFEQYAPHYNTNNNKIAFYIFDEED |
| | EKMRR |
| IMG_ | METEEQIIENRIRTLANDPQYFGGYLNMARHNIYLIINNLTKTFSYLNFKEIADDAEIASDTHILSNIFDTSNSII |
| 3300029923_3 | DEERIKVYNYLIKRHYLPFLKIFNAENIIEIGNEYTIDFKRLHNFIIKSFKKITDLRNAYSHYLSIDDDGNIANS |
| SEQ ID NO: | NKKELDSSIKGDIDLLFKYAPQYSYIRNNQTQTGTDYTHLENYLLFEISENNTLTDQGLYFFINLFLTREHAT |
| 4358 | KFLKRFKGFKNETTPPFRATIQAFTSYALKLPDERLGNENPIHSLLMEILAELNKCPKELFIHLTDEWKKEFE |
| | PVLSENGRKNIVLNSINYNELNNEDIEEVTKELSTLKRYDDRYPYFALRYLEDTNCLKRIRFQITLGKLIVNR |
| | YDKKIIGINQDRRVLKTVNTFGKLSDFVDKESDVLEILKHHVINTENIVFEQYAPHYNTNNNKIAFYIFDEED |
| | EKMRR |
| IMG_ | METEEQIIENRIRTLANDPQYFGGYLNMARHNIYLIINNLTKTFSYLNFKEIADDAEIASDTHILSNIFDTSNSII |
| 3300029989 | DEERIKVYNYLIKRHYLPFLKIFNAENIIEIGNEYTIDFKRLHNFIIKSFKKITDLRNAYSHYLSIDDDGNIANS |
| SEQ ID NO: | NKKELDSSIKGDIDLLFKYAPQYSYIRNNQTQTGTDYTHLENYLLFEISENNTLTDQGLYFFINLFLTREHAT |
| 4359 | KFLKRFKGFKNETTPPFRATIQAFTSYALKLPDERLGNENPIHSLLMEILAELNKCPKELFIHLTDEWKKEFE |
| | PVLSENGRKNIVLNSINYNELNNEDIEEVTKELSTLKRYDDRYPYFALRYLEDTNCLKRIRFQITLGKLIVNR |
| | YDKKIIGINQDRRVLKTVNTFGKLSDFVDKESDVLEILKHHVINTENIVFEQYAPHYNTNNNKIAFYIFDEED |
| | EKMRR |
| IMG_ | METEEQIIENRIRTLANDPQYFGGYLNMARHNIYLIINNLTKTFSYLNFKEIADDAEIASDTHILSNIFDTSNSII |
| 3300030339_2 | DEERIKVYNYLIKRHYLPFLKIFNAENIIEIGNEYTIDFKRLHNFIIKSFKKITDLRNAYSHYLSIDDDGNIANS |
| SEQ ID NO: | NKKELDSSIKGDIDLLFKYAPQYSYIRNNQTQTGTDYTHLENYLLFEISENNTLTDQGLYFFINLFLTREHAT |
| 4360 | KFLKRFKGFKNETTPPFRATIQAFTSYALKLPDERLGNENPIHSLLMEILAELNKCPKELFIHLTDEWKKEFE |
| | PVLSENGRKNIVLNSINYNELNNEDIEEVTKELSTLKRYDDRYPYFALRYLEDTNCLKRIRFQITLGKLIVNR |
| | YDKKIIGINQDRRVLKTVNTFGKLSDFVDKESDVLEILKHHVINTENIVFEQYAPHYNTNNNKIAFYIFDEED |
| | EKMRR |
| IMG_ | METEEQIIENRIRTLANDPQYFGGYLNMARHNIYLIINNLTKTFSYLNFKEIADDAEIASDTHILSNIFDTSNSII |
| 3300028676_2 | DEERIKVYNYLIKRHYLPFLKIFNAENIIEIGNEYTIDFKRLHNFIIKSFKKITDLRNAYSHYLSIDDDGNIANS |
| SEQ ID NO: | NKKELDSSIKGDIDLLFKYAPQYSYIRNNQTQTGTDYTHLENYLLFEISENNTLTDQGLYFFINLFLTREHAT |
| 4361 | KFLKRFKGFKNETTPPFRATIQAFTSYALKLPDERLGNENPIHSLLMEILAELNKCPKELFIHLTDEWKKEFE |
| | PVLSENGRKNIVLNSINYNELNNEDIEEVTKELSTLKRYDDRYPYFALRYLEDTNCLKRIRFQITLGKLIVNR |
| | YDKKIIGINQDRRVLKTVNTFGKLSDFVDKESDVLEILKHHVINTENIVFEQYAPHYNTNNNKIAFYIFDEED |
| | EKMRR |
| IMG_ | METEEQIIENRIRTLANDPQYFGGYLNMARHNIYLIINNLTKTFSYLNFKEIADDAEIASDTHILSNIFDTSNSII |
| 3300029983_3 | DEERIKVYNYLIKRHYLPFLKIFNAENIIEIGNEYTIDFKRLHNFIIKSFKKITDLRNAYSHYLSIDDDGNIANS |
| SEQ ID NO: | NKKELDSSIKGDIDLLFKYAPQYSYIRNNQTQTGTDYTHLENYLLFEISENNTLTDQGLYFFINLFLTREHAT |
| 4362 | KFLKRFKGFKNETTPPFRATIQAFTSYALKLPDERLGNENPIHSLLMEILAELNKCPKELFIHLTDEWKKEFE |
| | PVLSENGRKNIVLNSINYNELNNEDIEEVTKELSTLKRYDDRYPYFALRYLEDTNCLKRIRFQITLGKLIVNR |
| | YDKKIIGINQDRRVLKTVNTFGKLSDFVDKESDVLEILKHHVINTENIVFEQYAPHYNTNNNKIAFYIFDEED |
| | EKMRR |
| IMG_ | METEEQIIENRIRTLANDPQYFGGYLNMARHNIYLIINNLTKTFSYLNFKEIADDAEIASDTHILSNIFDTSNSII |
| 3300030019_2 | DEERIKVYNYLIKRHYLPFLKIFNAENIIEIGNEYTIDFKRLHNFIIKSFKKITDLRNAYSHYLSIDDDGNIANS |
| SEQ ID NO: | NKKELDSSIKGDIDLLFKYAPQYSYIRNNQTQTGTDYTHLENYLLFEISENNTLTDQGLYFFINLFLTREHAT |
| 4363 | KFLKRFKGFKNETTPPFRATIQAFTSYALKLPDERLGNENPIHSLLMEILAELNKCPKELFIHLTDEWKKEFE |
| | PVLSENGRKNIVLNSINYNELNNEDIEEVTKELSTLKRYDDRYPYFALRYLEDTNCLKRIRFQITLGKLIVNR |
| | YDKKIIGINQDRRVLKTVNTFGKLSDFVDKESDVLEILKHHVINTENIVFEQYAPHYNTNNNKIAFYIFDEED |
| | EKMRR |
| IMG_ | METEEQIIENRIRTLANDPQYFGGYLNMARHNIYLIINNLTKTFSYLNFKEIADDAEIASDTHILSNIFDTSNSII |
| 3300029990_2 | DEERIKVYNYLIKRHYLPFLKIFNAENIIEIGNEYTIDFKRLHNFIIKSFKKITDLRNAYSHYLSIDDDGNIANS |
| SEQ ID NO: | NKKELDSSIKGDIDLLFKYAPQYSYIRNNQTQTGTDYTHLENYLLFEISENNTLTDQGLYFFINLFLTREHAT |
| 4364 | KFLKRFKGFKNETTPPFRATIQAFTSYALKLPDERLGNENPIHSLLMEILAELNKCPKELFIHLTDEWKKEFE |
| | PVLSENGRKNIVLNSINYNELNNEDIEEVTKELSTLKRYDDRYPYFALRYLEDTNCLKRIRFQITLGKLIVNR |
| | YDKKIIGINQDRRVLKTVNTFGKLSDFVDKESDVLEILKHHVINTENIVFEQYAPHYNTNNNKIAFYIFDEED |
| | EKMRR |
| IMG_ | METEEQIIENRIRTLANDPQYFGGYLNMARHNIYLIINNLTKTFSYLNFKEIADDAEIASDTHILSNIFDTSNSII |
| 3300028772 | DEERIKVYNYLIKRHYLPFLKIFNAENIIEIGNEYTIDFKRLHNFIIKSFKKITDLRNAYSHYLSIDDDGNIANS |
| SEQ ID NO: | NKKELDSSIKGDIDLLFKYAPQYSYIRNNQTQTGTDYTHLENYLLFEISENNTLTDQGLYFFINLFLTREHAT |
| 4365 | KFLKRFKGFKNETTPPFRATIQAFTSYALKLPDERLGNENPIHSLLMEILAELNKCPKELFIHLTDEWKKEFE |
| | PVLSENGRKNIVLNSINYNELNNEDIEEVTKELSTLKRYDDRYPYFALRYLEDTNCLKRIRFQITLGKLIVNR |
| | YDKKIIGINQDRRVLKTVNTFGKLSDFVDKESDVLEILKHHVINTENIVFEQYAPHYNTNNNKIAFYIFDEED |
| | EKMRR |
| IMG_ | METEEQIIENRIRTLANDPQYFGGYLNMARHNIYLIINNLTKTFSYLNFKEIADDAEIASDTHILSNIFDTSNSII |
| 3300030838_2 | DEERIKVYNYLIKRHYLPFLKIFNAENIIEIGNEYTIDFKRLHNFIIKSFKKITDLRNAYSHYLSIDDDGNIANS |
| SEQ ID NO: | NKKELDSSIKGDIDLLFKYAPQYSYIRNNQTQTGTDYTHLENYLLFEISENNTLTDQGLYFFINLFLTREHAT |
| 4366 | KFLKRFKGFKNETTPPFRATIQAFTSYALKLPDERLGNENPIHSLLMEILAELNKCPKELFIHLTDEWKKEFE |
| | PVLSENGRKNIVLNSINYNELNNEDIEEVTKELSTLKRYDDRYPYFALRYLEDTNCLKRIRFQITLGKLIVNR |
| | YDKKIIGINQDRRVLKTVNTFGKLSDFVDKESDVLEILKHHVINTENIVFEQYAPHYNTNNNKIAFYIFDEED |
| | EKMRR |
| IMG_ | METEEQIIENRIRTLANDPQYFGGYLNMARHNIYLIINNLTKTFSYLNFKEIADDAEIASDTHILSNIFDTSNSII |
| 3300031521_4 | DEERIKVYNYLIKRHYLPFLKIFNAENIIEIGNEYTIDFKRLHNFIIKSFKKITDLRNAYSHYLSIDDDGNIANS |
| SEQ ID NO: | NKKELDSSIKGDIDLLFKYAPQYSYIRNNQTQTGTDYTHLENYLLFEISENNTLTDQGLYFFINLFLTREHAT |
| 4367 | KFLKRFKGFKNETTPPFRATIQAFTSYALKLPDERLGNENPIHSLLMEILAELNKCPKELFIHLTDEWKKEFE |
| | PVLSENGRKNIVLNSINYNELNNEDIEEVTKELSTLKRYDDRYPYFALRYLEDTNCLKRIRFQITLGKLIVNR |
| | YDKKIIGINQDRRVLKTVNTFGKLSDFVDKESDVLEILKHHVINTENIVFEQYAPHYNTNNNKIAFYIFDEED |
| | EKMRR |
| IMG_ | METEEQIIENRIRTLANDPQYFGGYLNMARHNIYLIINNLTKTFSYLNFKEIADDAEIASDTHILSNIFDTSNSII |
| 3300031722 | DEERIKVYNYLIKRHYLPFLKIFNAENIIEIGNEYTIDFKRLHNFIIKSFKKITDLRNAYSHYLSIDDDGNIANS |
| SEQ ID NO: | NKKELDSSIKGDIDLLFKYAPQYSYIRNNQTQTGTDYTHLENYLLFEISENNTLTDQGLYFFINLFLTREHAT |
| 4368 | KFLKRFKGFKNETTPPFRATIQAFTSYALKLPDERLGNENPIHSLLMEILAELNKCPKELFIHLTDEWKKEFE |
| | PVLSENGRKNIVLNSINYNELNNEDIEEVTKELSTLKRYDDRYPYFALRYLEDTNCLKRIRFQITLGKLIVNR |
| | YDKKIIGINQDRRVLKTVNTFGKLSDFVDKESDVLEILKHHVINTENIVFEQYAPHYNTNNNKIAFYIFDEED |
| | EKMRR |
| IMG_ | METEEQIIENRIRTLANDPQYFGGYLNMARHNIYLIINNLTKTFSYLNFKEIADDAEIASDTHILSNIFDTSNSII |
| 3300028763 | DEERIKVYNYLIKRHYLPFLKIFNAENIIEIGNEYTIDFKRLHNFIIKSFKKITDLRNAYSHYLSIDDDGNIANS |
| SEQ ID NO: | NKKELDSSIKGDIDLLFKYAPQYSYIRNNQTQTGTDYTHLENYLLFEISENNTLTDQGLYFFINLFLTREHAT |
| 4369 | KFLKRFKGFKNETTPPFRATIQAFTSYALKLPDERLGNENPIHSLLMEILAELNKCPKELFIHLTDEWKKEFE |
| | PVLSENGRKNIVLNSINYNELNNEDIEEVTKELSTLKRYDDRYPYFALRYLEDTNCLKRIRFQITLGKLIVNR |
| | YDKKIIGINQDRRVLKTVNTFGKLSDFVDKESDVLEILKHHVINTENIVFEQYAPHYNTNNNKIAFYIFDEED |
| | EKMRR |
| IMG_ | METEEQIIENRIRTLANDPQYFGGYLNMARHNIYLIINNLTKTFSYLNFKEIADDAEIASDTHILSNIFDTSNSII |
| 3300030230 | DEERIKVYNYLIKRHYLPFLKIFNAENIIEIGNEYTIDFKRLHNFIIKSFKKITDLRNAYSHYLSIDDDGNIANS |
| SEQ ID NO: | NKKELDSSIKGDIDLLFKYAPQYSYIRNNQTQTGTDYTHLENYLLFEISENNTLTDQGLYFFINLFLTREHAT |
| 4370 | KFLKRFKGFKNETTPPFRATIQAFTSYALKLPDERLGNENPIHSLLMEILAELNKCPKELFIHLTDEWKKEFE |
| | PVLSENGRKNIVLNSINYNELNNEDIEEVTKELSTLKRYDDRYPYFALRYLEDTNCLKRIRFQITLGKLIVNR |
| | YDKKIIGINQDRRVLKTVNTFGKLSDFVDKESDVLEILKHHVINTENIVFEQYAPHYNTNNNKIAFYIFDEED |
| | EKMRR |
| IMG_ | METEEQIIENRIRTLANDPQYFGGYLNMARHNIYLIINNLTKTFSYLNFKEIADDAEIASDTHILSNIFDTSNSII |
| 3300028734_2 | DEERIKVYNYLIKRHYLPFLKIFNAENIIEIGNEYTIDFKRLHNFIIKSFKKITDLRNAYSHYLSIDDDGNIANS |
| SEQ ID NO: | NKKELDSSIKGDIDLLFKYAPQYSYIRNNQTQTGTDYTHLENYLLFEISENNTLTDQGLYFFINLFLTREHAT |
| 4371 | KFLKRFKGFKNETTPPFRATIQAFTSYALKLPDERLGNENPIHSLLMEILAELNKCPKELFIHLTDEWKKEFE |
| | PVLSENGRKNIVLNSINYNELNNEDIEEVTKELSTLKRYDDRYPYFALRYLEDTNCLKRIRFQITLGKLIVNR |
| | YDKKIIGINQDRRVLKTVNTFGKLSDFVDKESDVLEILKHHVINTENIVFEQYAPHYNTNNNKIAFYIFDEED |
| | EKMRR |
| IMG_ | METKEQIGKNVYKTSENDPLYFGGYLNMARHNVFLIINHLTEVFDSLGYTKINDDEDIVNQDHILSQIFDPS |
| 3300023244 | KKELENERIRIYNYMIKRHHLPFLKVFNSEILNDEDGENMGIDFKSLHNFIIKSFKTLNDLRNSYSHYLAIDD |
| SEQ ID NO: | DGNKIEKRSNIVDVSIKSDIKQLFKHAPKFSFIRNQETQHEEDYNHLDRYRIFENETNILTDQGLYFFINLFLE |
| 4372 | RNHATKFLKKIKGFKNETTPPFRATIQSFTSFALKLPDIRLSNERPLFSLLMNMLTELNKCPKELFNHLTQKD |
| | KKEFEPLLNDEEKHNVVLNSTNYSEISDDELDEAIREITALKRYNDRFPYFALRFLDETNALKNIRFQITLGK |
| | LIIKRYDKEIAGIEENRRVIKTINAFGKLSDFIDNEEVVLKELKKNLADNNDIRFEQYSPHYNTNNIKIAFYVF |
| | DEGDDKTKYPFVFENKENNSDIQNNPSGFLSIHDLPKMLLFECLDINLKPENIIIDFIRSTNLEMFDLSELEKIR |
| | KQANYEPEYFSKRINKEKYLISKKGIKYLSKEVENNMLEDLGLSKDELILKDKDSFMKLTNSKKYIEYFSQI |
| | KYQ |
| IMG_ | MEQNRKEGSLRTQEDIQYFGSYFNMARHNLYLITNHLTSVFSHLNFSQLDDDEDIWSDKPEVNEKNILLNIF |
| 3300007584 | DTKNERLQDERIRVFRYLMRRHHLPCLRIFTNDFKVLETTGNTIKKDELEVDFDAVHKFLNIAFKEINLFRN |
| SEQ ID NO: | SYTHYLSINEEGKRLKKKKKISSKLVPVLNSLFSYAPEYSFLRHNIDKANKDVKIYKEEVKEYYDNIKSKYK |
| 4373 | LFENDSNELTDQGMYFFITLFLERAHGIKFLKRFRGFKNETTPPFKATIQAFTTYTLKIPDVRLDNDIPEQTMI |
| | MEVLNELNKCPEELFKFLKKEDKDRFQPVISDESLTNIINSSNYEEISDEDIDRLIKENSVLKRREDRFPYFAL |
| | QYLEIMSKLKNIRFQIYLGKLVLKTYDKENPNIERRVITDIHAFGKLSDFVGKEAEVLDTFNSQLKDYGYSV |
| | AWDQYKPSYAIEMNRIGFYLFNDQGDKVENKILPSLCKNKNLERKVEIKVNKIQPTGFISTHMLPKFLISYL |
| | MGDVNEKNGEKTITHFLEKVNVSILDQNIINQIKSEIQNLDPIEFTKRCPKLSAIKNVKKLRVAGAIDKKIVE |
| | YQYINDTDIAKLVQKTGLAYDTMVTYSKDKFKEKTNHLNLSKKELETFAHIKYKYYLSERRKALDSVLKA |
| | YFPEIGSQDIPKELYNYLLNINEQDNKKLEHRRIKDEVTKTKKLIKDVNRSLKFEDKILLGDLATKIARD |
| IMG_ | MEQNRKEGSLRTQEDIQYFGSYFNMARHNLYLITNHLTSVFSHLNFSQLDDDEDIWSDKPEVNEKNILLNIF |
| 3300007483_2 | DTKNERLQDERIRVFRYLMRRHHLPCLRIFTNDFKVLETTGNTIKKDELEVDFDAVHKFLNIAFKEINLFRN |
| SEQ ID NO: | SYTHYLSINEEGKRLKKKKKISSKLVPVLNSLFSYAPEYSFLRHNIDKANKDVKIYKEEVKEYYDNIKSKYK |
| 4374 | LFENDSNELTDQGMYFFITLFLERAHGIKFLKRFRGFKNETTPPFKATIQAFTTYTLKIPDVRLDNDIPEQTMI |
| | MEVLNELNKCPEELFKFLKKEDKDRFQPVISDESLTNIINSSNYEEISDEDIDRLIKENSVLKRREDRFPYFAL |
| | QYLEIMSKLKNIRFQIYLGKLVLKTYDKENPNIERRVITDIHAFGKLSDFVGKEAEVLDTFNSQLKDYGYSV |
| | AWDQYKPSYAIEMNRIGFYLFNDQGDKVENKILPSLCKNKNLERKVEIKVNKIQPTGFISTHMLPKFLISYL |
| | MGDVNEKNGEKTITHFLEKVNVSILDQNIINQIKSEIQNLDPIEFTKRCPKLSAIKNVKKLRVAGAIDKKIVE |
| | YQYINDTDIAKLVQKTGLAYDTMVTYSKDKFKEKTNHLNLSKKELETFAHIKYKYYLSERRKALDSVLKA |
| | YFPEIGSQDIPKELYNYLLNINEQDNKKLEHRRIK |
| IMG_ | MEQNRKEGSLRTQEDIQYFGSYFNMARHNLYLITNHLTSVFSHLNFSQLDDDEDIWSDKPEVNEKNILLNIF |
| 3300007483 | DTKNERLQDERIRVFRYLMRRHHLPCLRIFTNDFKVLETTGNTIKKDELEVDFDAVHKFLNIAFKEINLFRN |
| SEQ ID NO: | SYTHYLSINEEGKRLKKKKKISSKLVPVLNSLFSYAPEYSFLRHNIDKANKDVKIYKEEVKEYYDNIKSKYK |
| 4375 | LFENDSNELTDQGMYFFITLFLERAHGIKFLKRFRGFKNETTPPFKATIQAFTTYTLKIPDVRLDNDIPEQTMI |
| | MEVLNELNKCPEELFKFLKKEDKDRFQPVISDESLTNIINSSNYEEISDEDIDRLIKENSVLKRREDRFPYFAL |
| | QYLEIMSKLKNIRFQIYLGKLVLKTYDKENPNIERRVITDIHAFGKLSDFVGKEAEVLDTFNSQLKDYGYSV |
| | AWDQYKPSYAIEMNRIGFYLFNDQGDKVENKILPSLCKNKNLERKVEIKVNKIQPTGFISTHMLPKFLISYL |
| | MGDVNEKNGEKTITHFLEKVNVSILDQNIINQIKSEIQNLDPIEFTKRCPKLSAIKNVKKLRVAGAIDKKIVE |
| | YQYINDTDIAKLVQKTGLAYDTMVTYSKDKFKEKTNHLNLSKKELETFAHIKYKYYLSERRKALDSVLKA |
| | YFPEIGSQDIPKELYNYLLNINEQDNKKLEHRRIKXXXXXXXXXXXXXXXXXXXXXXCKS |
| GCA_ | MEKNSLQDTTRTKDDVLYFGSYLNMGRHNVYLIINHVTEVFKHLGFRKLNDDEDIWSEKEQVNEGNILLNI |
| 003457245.1_ | FDPKKEKYQDERFRVFNYLIKRHHLPFLRIFTNQVLNDSGEIQNPEKKDMLIDFEGAHVFINKIFRELNEFRN |
| ASM345724v1_ | SYTHYLSLSNEGTPLPKKLQINVELIKDLKTLFYYAPEFSFIRHNVLKQESKEEYETKVKAYYNDIRRKYRLF |
| genomic | EGDESAGKLTDQGLFFFVNLFLERSNAIKFLKRFRGFKNETLPPFKATIQSFTTYALKIPDVRLDNDFPKQAL |
| SEQ ID NO: | LMEILTELNRCPKELYQVLGKEDKAKFDPKLEQSAINNILENVNYDELSDEHLEQAIKELVVLKRHDDRFPY |
| 4376 | FALRYLDEMNLLSQIRFQVYLGKVELKSYFKDDLGIERRILKPIYAFGKLSDFDNKEEDILRELKKNLPPDCQ |
| | DIHWDQYKPHYNISQNN |
| IMG_ | MDIIPKLTYTIESTPWYFGAYLNMARHNVYLLINHLTEKFSHLKYEKLKDDKEIKGKNILTEIFDTTKSDLDE |
| 3300022741 | ERFRIYKYLVRGHYLPFIKVYSDSKGNALENNPLVYYDRLHQFINNSFALLVKFRDAFSHYLALDEHGNSID |
| SEQ ID NO: | SRQLNIDHEIAHDLETIFQDSLSLSASRFYLTQQESDFEHLKHYALFKETETKLSENGFYFFICLFLEKQYAIK |
| 4377 | FLKKIKGFKNETIPAFRATLLAFTHYTIRIPDIRLDNDEPRMGVLMEMLNELQKCPIELYKRLTDEDKKKFEP |
| | ALDEESQLNLILNSTANSENLSDEQTDSLLIDLTTLKRHQNRFSYFALRCIDELNLLPGIHFQITVGKIELRAY |
| | PKVIGKVATNRRILKEVNAFGKLSAYEGKENWFSQQLKMIYEDENLVFDQYNPHYNIQENKIAFYVLDSGT |
| | SGTLLPLKKKNTLPTGFLSLNDLPKLIVRALNSPGRTVSLIKDFIAKNENIILNEDALVAWKEQLHLDPAVFT |
| | RRIIKENALRGKEGIAYLTQRKTDALFKRYKALSIKIDSLAGLKKLIDQLHSKKDKEYISQIVYTHFLNKRKD |
| | ALAGILPKGLPVNQLPLKVINYLLSLETVGHKKKFLHYIKEEKRTCKTRLKALNKQENNAPKIGEIATFLAR |
| | DIINMVVNEETKQNITSAYYNRLQNKIAYFSISKPEIAEMLTELNLFDKKTGHPFLDKGSIMASSGILAFYEY |
| | YLVEKAAWIDKQILHKNQLKKDLESHLNKLPFAYARRYQKNNEVN |
| IMG_ | MDIIPKLTYTIESTPWYFGAYLNMARHNVYLLINHLTEKFSHLKYEKLKDDKEIKGKNILTEIFDTTKSDLDE |
| 3300022741_2 | ERFRIYKYLVRGHYLPFIKVYSDSKGNALENNPLVYYDRLHQFINNSFALLVKFRDAFSHYLALDEHGNSID |
| SEQ ID NO: | SRQLNIDHEIAHDLETIFQDSLSLSASRFYLTQQESDFEHLKHYALFKETETKLSENGFYFFICLFLEKQYAIK |
| 4378 | FLKKIKGFKNETIPAFRATLLAFTHYTIRIPDIRLDNDEPRMGVLMEMLNELQKCPIELYKRLTDEDKKKFEP |
| | ALDEESQLNLILNSTANSENLSDEQTDSLLIDLTTLKRHQNRFSYFALRCIDELNLLPGIHFQITVGKIELRAY |
| | PKVIGKVATNRRILKEVNAFGKLSAYEGKENWFSQQLKMIYEDENLVFDQYNPHYNIQENKIAFYVLDSGT |
| | SGTLLPLKKKNTLPTGFLSLNDLPKLIVRALNSPGRTVSLIKDFIAKNENIILNEDALVAWKEQLHLDPAVFT |
| | RRIIKENALRGKEGIAYLTQRKTDALFKRYKALSIKIDSLAGLKKLIDQLHSKKDKEYISQIVYTHFLNKRKD |
| | ALAGILPKGLPVNQLPLKVINYLLSLETVGHKKKFLHYIKEEKRTCKTRLKALNKQENNAPKIGEIATFLAR |
| | DIINMVVNEETKQNITSAYYNRLQNKIAYFSISKPEIAEMLTELNLFDKKTGHPFLDKGSIMASSGILAFYEY |
| | YLVEKAAWIDKQILHKNQLKKDLESHLNKLPFAYARRYQKNNEVN |
| IMG_ | MEILTIPEVIKCRTLSDDPQYFGGYLNMARLNVLNISNHIAKEFKLPLLPEEAHLKNSFLCKKENKKIDWNH |
| 3300028769_3 | VYARTIRFLSVMKVFDAESLPKEEQKTIDWEGKDFASMCDTLNIVFSELQEFSNDYSHYYSTEKETKRKTT |
| SEQ ID NO: | VSDELALFLRTNFKRAIEYTKVRFKGILNDEDYQLVVSKKMLETNHTITHEGLVFLTSMFLEREYAFRFIRKI |
| 4379 | HGLSGPKDNSFIATCEVLMAFCLKLPQEQFRSDNRRQAISLELMNELKKCPKVLYHVITEEWKQKLKSVPE |
| | ELETKNLHYNTKKEAIIEFEDYDLYIESLTKQVRYNNRFSEFALKYIDETGIFSEFRFQLDLGKILVDEYLKNF |
| | NDERVQRCIIENAKAFGKLNDYTNETKVMSLIVNGPPLKSFDRFAPHYNIESNKIGISTHEVTAKLVPNSKGE |
| | PAKKLHQPLPEAFLSLHELPKIILLEYLQKGEPEKLINEFILVNNSKLMNMSFIEEVKNQLPKEWDKFQRRTN |
| | AKHELAYDENTLAFLLQRKQILNKTLLAYQLNDKQIPTRILDYWLNISDADEERAISNRLKSIK |
| IMG_ | MEILTIPEVIKCRTLSDDPQYFGGYLNMARLNVLNISNHIAKEFKLPLLPEEAHLKNSFLCKKENKKIDWNH |
| 3300029983 | VYARTIRFLSVMKVFDAESLPKEEQKTIDWEGKDFASMCDTLNIVFSELQEFSNDYSHYYSTEKETKRKTT |
| SEQ ID NO: | VSDELALFLRTNFKRAIEYTKVRFKGILNDEDYQLVVSKKMLETNHTITHEGLVFLTSMFLEREYAFRFIRKI |
| 4380 | HGLSGPKDNSFIATCEVLMAFCLKLPQEQFRSDNRRQAISLELMNELKKCPKVLYHVITEEWKQKLKSVPE |
| | ELETKNLHYNTKKEAIIEFEDYDLYIESLTKQVRYNNRFSEFALKYIDETGIFSEFRFQIDLGK |
| IMG_ | MEILTIPEVIKCRTLSDDPQYFGGYLNMARLNVLNISNHIAKEFKLPLLPEEAHLKNSFLCKKENKKIDWNH |
| 3300028767_3 | VYARTIRFLSVMKVFDAESLPKEEQKTIDWEGKDFASMCDTLNIVFSELQEFSNDYSHYYSTEKETKRKTT |
| SEQ ID NO: | VSDELALFLRTNFKRAIEYTKVRFKGILNDEDYQLVVSKKMLETNHTITHEGLVFLTSMFLEREYAFRFIRKI |
| 4381 | HGLSGPKDNSFIATCEVLMAFCLKLPQEQFRSDNRRQAISLELMNELKKCPKVLYHVITEEWKQKLKSVPE |
| | ELETKNLHYNTKRETKIEFEDYDLYIESLTKQVRYNNRFSEFALKYIDETGIFSEFRFQLDLGKILVDEYLKN |
| | FNDERVQRCIIENAKAFGKLNDYTNETKVMSLIVNGPPLKSFDRFAPHYNIESNKIGISTHEVTAKLVPNSKG |
| | EPAKKLHQPLPEAFLSLHELPKIILLEYLQKGEPEKLINEFILVNNSKLMNMSFIEEVKNQLPKEWDKFQRRT |
| | NAKHELAYDENTLAFLLQRKQILNKTLLAYQLNDKQIPTRILDYWLNISDADEERAISNRL |
| IMG_ | MEILTIPEVIKCRTLSDDPQYFGGYLNMARLNVLNISNHIAKEFKLPLLPEEAHLKNSFLCKKENKKIDWNH |
| 3300029989_5 | VYARTIRFLSVMKVFDAESLPKEEQKTIDWEGKDFASMCDTLNIVFSELQEFSNDYSHYYSTEKETKRKTT |
| SEQ ID NO: | VSDELALFLRTNFKRAIEYTKVRFKGILNDEDYQLVVSKKMLETNHTITHEGLVFLTSMFLEREYAFRFIRKI |
| 4382 | HGLSGPKDNSFIATCEVLMAFCLKLPQEQFRSDNRRQAISLELMNELKKCPKVLYHVITEEWKQKLKSVPE |
| | ELETKNLHYNTKRETKIEFEDYDLYIESLTKQVRYNNRFSEFALKYIDETGIFSEFRFQLDLGKILVDEYLKN |
| | FNDERVQRCIIENAKAFGKLNDYTNETKVMSLIVNGPPLKSFDRFAPHYNIESNKIGISTHEVTAKLVPNSKG |
| | EPAKKLHQPLPEAFLSLHELPKIILLEYLQKGEPEKLINEFILVNNSKLMNMSFIEEVKNQLPKEWDKFQRRT |
| | NAKHELAYDENTLAFLLQRKQILNKTLLAYQLNDKQIPTRILDYWLNISDADEERAISNRLKSIKRDCMSRL |
| | KALSKFNENGNRNKIPGIGEMATFLAKDII |
| IMG_ | MEILTIPEVIKCRTLSDDPQYFGGYLNMARLNVLNISNHIAKEFKLPLLPEEAHLKNSFLCKKENKKIDWNH |
| 3300031918_5 | VYARTIRFLSVMKVFDAESLPKEEQKTIDWEGKDFASMCDTLNIVFSELQEFSNDYSHYYSTEKETKRKTT |
| SEQ ID NO: | VSDELALFLRTNFKRAIEYTKVRFKGILNDEDYQLVVSKKMLETNHTITHEGLVFLTSMFLEREYAFRFIRKI |
| 4383 | HGLSGPKDNSFIATCEVLMAFCLKLPQEQFRSDNRRQAISLELMNELKKCPKVLYHVITEEWKQKLKSVPE |
| | ELETKNLHYNTKRETKIEFEDYDLYIESLTKQVRYNNRFSEFALKYIDETGIFSEFRFQLDLGKILVDEYLKN |
| | FNDERVQRCIIENAKAFGKLNDYTNETKVMSLIVNGPPLKSFDRFAPHYNIESNKIGISTHEVTAKLVPNSKG |
| | EPAKKLHQPLPEAFLSLHELPKIILLEYLQKGEPEKLINEFILVNNSKLMNMSFIEEVKNQLPKEWDKFQRRT |
| | NAKHELAYDENTLAFLLQRKQILNKTLLAYQLNDKQIPTRILDYWLNISDADEERAISNRLKSIKRDCMSRL |
| | KALSKFNENGNRNKIPGIGEMATFLAKDIIEMVVSEGKKRKITSFYYDKMQECLALFGDPDKKQLFIHIVTK |
| | ELKLNDPGGHPFLDKLDLQKINSTTGFYEIYLQEKGHKMVPENNPKTGKVIYTDHSWMALTFYKIEFNDKV |
| | DMLMTVVKLPLKKLNI |
| IMG_ | MEILTIPEVIKCRTLSDDPQYFGGYLNMARLNVLNISNHIAKEFKLPLLPEEAHLKNSFLCKKENKKIDWNH |
| 3300030000_4 | VYARTIRFLSVMKVFDAESLPKEEQKTIDWEGKDFASMCDTLNIVFSELQEFSNDYSHYYSTEKETKRKTT |
| SEQ ID NO: | VSDELALFLRTNFKRAIEYTKVRFKGILNDEDYQLVVSKKMLETNHTITHEGLVFLTSMFLEREYAFRFIRKI |
| 4384 | HGLSGPKDNSFIATCEVLMAFCLKLPQEQFRSDNRRQAISLELMNELKKCPKVLYHVITEEWKQKLKSVPE |
| | ELETKNLHYNTKRETKIEFEDYDLYIESLTKQVRYNNRFSEFALKYIDETGIFSEFRFQIDLGKILVDEYLKNF |
| | NDERVQRCIIENAKAFGKLNDYTNETKVMSLIVNGPPLKSFDRFAPHYNIESNKIGISTHEVTAKLVPNSKGE |
| | PAKKLHQPLPEAFLSLHELPKIILLEYLQKGEPEKLINEFILVNNSKLMNMSFIEEVKNQLPKEWDKFQRRTN |
| | AKHELAYDENTLAFLLQRKQILNKTLLAYQLNDKQIPTRILDYWLNISDADEERAISNRLKSIKRDCMSRLK |
| | ALSKFNENGNRNKIPGIGEMATFLAKDIIDMVVSEGKKRKITSFYYDKMQECLALFGDPDKKQLFIHIVTKE |
| | LKLNDPGGHPFLDKLDLQKINSTTGFYEIYLQEKGHKMVPENNPKTGKVIYTDHSWMALTFYKIEFNDKV |
| | DMLMTVVKLPLKKLNI |
| IMG_ | MEILTIPEVIKCRTLSDDPQYFGGYLNMARLNVLNISNHIAKEFKLPLLPEEAHLKNSFLCNKENKKIDWNH |
| 3300030294_3 | VYARTIRFLSVMKVFDAESLPKEEQKTIDWEGKDFASMCDTLNIVFSELQEFSNDYSHYYSTEKETKRKTT |
| SEQ ID NO: | VSDELALFLRTNFKRAIEYTKVRFKGILNDEDYQLVVSKKMLETNHTITHEGLVFLTSMFLEREYAFRFIRKI |
| 4385 | HGLSGPKDNSFIATCEVLMAFCLKLPQEQFRSDNRRQAISLELMNELKKCPKVLYHVITEEWKQKLKSVPE |
| | ELETKNLHYNTKRETKIEFEDYDLYIESLTKQVRYNNRFSEFALKYIDETGIFSEFRFQLDLGKILVDEYLKN |
| | FNDERVQRCIIENAKAFGKLNDYTNETKVMSLIVNGPPLKSFDRFAPHYNIESNKIGISTHEVTAKLVPNSKG |
| | EPAKKLHQPLPEAFLSLHELPKIILLEYLQKGEPEKLINEFILVNNSKLMNMSFIEEVKNQLPKEWDKFQRRT |
| | NAKHELAYDENTLAFLLQRKQILNKTLLAYQLNDKQIPTRILDYWLNISDADEERAISNRLKSIKRDCMSRL |
| | KALSKFNENGNRNKIPGIGEMATFLAKDIIEMVVSEGKKRKITSFYYDKMQECLALFGDPDKKQLFIHIVTK |
| | ELKLNDPGGHPF |
| IMG_ | METLTIPEVIKCRTLSDDPQFFGGYLNMARLNVFNISNHIAKEFNLSLLSEEAHLKDSFLCKKENKKINWNH |
| 3300025153 | VYSQTKRFLSVLKVFDAACLPKEEQKTINWEGKDFASMCDTLNIVFGELQEFSNDYSHYYSTEKGTIRKTT |
| SEQ ID NO: | VSEEMALFLKINFNRAIEYTKEKFKGVLNDEDYLLVASIELFGAENRITTEGLVFLISMFLEREYAFRLIGKIK |
| 4386 | ELLGTQNNCFIAIREVLMAFCLKLPHNRFQSDNTRQAFSLDLINELNRCPKVLYNAIAEEGKKKLRSIPGEPE |
| | NKNLHDNNTKKEAKIEAEAYELYIESLTRQIRYSNRFPDFALKFIDETDIFSEFRFQIDLGKLLVDEYLKFFNG |
| | EQVQRRIIENVKAFGKINDFNDEAKVMNRIGNGHSLKRFEQFAPHYNTENNKIGISRHQSTAKLGSGSKGET |
| | EQKLHQPLPEAFLSLHELPKVILLDYLQKGEPEKLINDFILINNSKLMNMSFIEAVKTQLPPEWDEFQRRTDA |
| | KKEMAYNEKTLAYLLQRKQILNQVLTAYQLNDKQIPGRILDYWLNVTDAEEERAISNRIKSIKRDCMSRLK |
| | ALGKFAENGNRNKIPGIGEMATFLAKDIIDMVVSEGKKRKITSFYYNKMQECLALFADPEKKQLFIHIVTNE |
| | LKLNDSGGHPFLDKLDLQKINSTSNFYEIY |
| IMG_ | METQISNIENKYRILNDDPQYFGGYLNMARLNVFNISNHIAKEFNLPLLPEEGHLKNSFLCQKENKKVNWN |
| 3300028767_6 | HIFSKTNRFLSILKVFDVESLPKEEQKMTDSEGKEFALMSDSLKIVFGELQEFRNDYSHYYSTENGTSRKTT |
| SEQ ID NO: | VSDEMSLFLRTNFLRAIQYTKERFKGVLNDEDYQLVASKKVLEADNTITVEGLVFLTSMFLEREYAFQFIGK |
| 4387 | ITGLKGTQNNSFISTREVLMAFCLKLPHDRFQSDDTRQAFSLDLINELTRCPKELYNAITEEGKMKFQPKLD |
| | EPGIKNLLDNSTNNKKKIDAEDYDEYIESLTKRIRYNNRFSDFALKYIEETDILGDFRFQIDLGKLFVDEYDK |
| | FFNGEEVPRRIIENVKAFGKLNDFNDESILLAQIENGYPSKGFEQFAPHYNTENNKIGISVKVDTAKLRSNSK |
| | GEPGKNLNQPLPEAFLSLNELPKIILLDYLQKGEPEQLINDFILINNSKLMKMSFIEEIKNLLPKEWNEFRKRA |
| | DTRKQAAYNNETLAYLLERKQILNQVLVSYQLNDKQIPGRILDYWLNIKEVEEGRAVSDRLKLMKRDCMS |
| | RLKALEKFKIDRN |
| IMG_ | METQISNIENKYRILNDDPQYFGGYLNMARLNVFNISNHIAKEFNLPLLPEEGHLKNSFLCQKENKKVNWN |
| 3300029998 | HIFSKTNRFLSILKVFDVESLPKEEQKMIDSEGKDFALMSDSLKIVFGELQEFRNDYSHYYSTENGTSRKTT |
| SEQ ID NO: | VSDEMSLFLRTNFLRAIQYTKERFKGVLNDEDYQLVASKKVLEADNTITVEGLVFLTSMFLEREYAFQFIGK |
| 4388 | ITGLKGTQNNSFISTREVLMAFCLKLPHDRFQSDDTRQAFSLDLINELTRCPKELYNAITEEGKMKFQPKLD |
| | EPGIKNLLDNSTNNKKKIDAEDYDEYIESLTKRIRYNNRFSDFALKYIEETDILGDFRFQIDLGKLFVDEYDK |
| | FFNGEEVPRRIIENVKAFGKLNDFNDESILLAQIENGYPSKGFEQFAPHYNTENNKIGISVKVDTAKLRSNSK |
| | GEPGKNLNQPLPEAFLSLNELPKIILLDYLQKGEPEQLINDFILINNSKLMKMSFIEEIKNLLPKEWNEFRKRA |
| | DTRKQAAYNNETLAYLLERKQILNQVLVSYQLNDKQIPGRILDYWLNIKEVEEGRAVSDRLKLMKRDCMS |
| | RLKALEKFKIDRNRSKIPKTGEMATFLAKDIVDMVVSEGIKKKITSFYYDKMQECLALFADPEKKRLFIHIVI |
| | RELRLNGTGGHPFLFQLNFDKINCTSDFYSEYLREKGHKMVKEKNLKTGKIVLTDHSWMALTFYKLEFND |
| | KVDKLMTVVKLPLNKLN |
| IMG_ | METNQQTHENRRRTLTNDPQYFGGYLNMARLNIYNINNHIATDFKQATLPEEGQIPAAFLCNKTIKNLNWN |
| 3300030055_3 | HVHTRAVRFLPILKVFDSESLPKDERENSDTEGKDFASMSDTLKVVFSELQEFRNDYSHYYSTEKQDSRKL |
| SEQ ID NO: | TVSPELANFLTVNFQRAIAYTKARMKDVLTDADYALVENLQMVAPDNKITTEGLVFLIAMFLEREQAFQFT |
| 4389 | GKIQGLKGTQFNSFIATREVLMSFCVKLPHDKFVSENLEQALTLDIINELNRCPKTLYSVITDKEKQQFRPEL |
| | DAQGIDNLIANSTNDDERERILDEIDYQDYIEGLTKRVRYSNRFSYFAMRYIDEKNVFDKLRFHIDLGKYEV |
| | DNYTKQFAGEQAERKVLENA |
| IMG_ | METNQQTHENRRRTLTNDPQYFGGYLNMARLNIYNINNHIATDFKQATLPEEGQIPAAFLCNKTIKNLNWN |
| 3300028651_2 | HVHTRAVRFLPILKVFDSESLPKDERENSDTEGKDFASMSDTLKVVFSELQEFRNDYSHYYSTEKQDSRKL |
| SEQ ID NO: | TVSPELANFLTVNFQRAIAYTKARMKDVLTDADYALVENLQMVAPDNKITTEGLVFLIAMFLEREQAFQFT |
| 4390 | GKIQGLKGTQFNSFIATREVLMSFCVKLPHDKFVSENLEQALTLDIINELNRCPKTLYSVITDKEKQQFRPEL |
| | DAQGIDNLIANSTNDDERERILDEIDYQDYIEGLTKRVRYSNRFSYFAMRYIDEKNVFDKLRFHIDLGKYEV |
| | DNYTKQFAGEQAERKVLENAKAFGKLSSFTDPELIQQRIDKQQHTAGFDQFAPHYNADNNKIGLSTKENIA |
| | TLIAKSKASSKVEHNLKQPLPQAFLSLHELPKIILLEYLQKGQAEELINDFILLNDTRLMDITFIEEVKSQLPA |
| | DWDEFSKRSDAKKKKAYSDSTLKYLRQRKTTLNTILSKSNLNDKQIPTRILNYWLNIKEVDDKRSVSDRIK |
| | LMKRDCMTRLKAVEKHKLNKSVKTPKVGEMATFLAKDIVDMIVSEEKKQKITSFYYDKMQECLALFANA |
| | EKKALFIH |
| IMG_ | METNQQTHENRRRTLTNDPQYFGGYLNMARLNIYNINNHIATDFKQATLPEEGQIPAAFLCNKTIKNLNWN |
| 3300028764 | HVHTRAVRFLPILKVFDSESLPKDERENSDTEGKDFTSMSDTLKVVFSELQDFRNDYSHYYSTEKGDSRKLI |
| SEQ ID NO: | VSPELANFLTVNFQRAIAYTKARMKDVLTDTDYALVENLQMVAPDNKITTEGLVFLIAMFLEREQAFQFTG |
| 4391 | KIQGLKGTQFNSFIATREVLMSFCVKLPHDKFVSENLEQALTLDIINELNRCPKTLYSVITDKEKQQFRPELD |
| | AQGIDNLIANSTNDDERETILDEIDYQDYIEGLTKRVRYSDRFSYFAMRYIDEKNVFDKLRFHIDLGKYEVD |
| | NYTKQFAGEQAERKVLENANAFGKLSSFTDPELIQQRIDKQQHTAGFDQFAPHYNADNNKIGLSTKENIAT |
| | LIAKSKASSKVEHNLKQPLPQAFLSLHELPKIILLEYLQKGQAEELINDFILLNDTRLMDITFIEEVKSQLPAN |
| | WDEFSKRSDAKKKKAYSDSTLKYLRQRKTTLNTILSKSNLNDKQIPTKILNYWLNIKEVDDKRSVSDRIKL |
| | MKRDCMT |
| IMG_ | METNQQTHENRRRTLTNDPQYFGGYLNMARLNIYNINNHVATDFKRKPLPEEGHIPDALLCNKTIKNLNW |
| 3300030339_5 | NHVHTRALRFLPILKVFDSESLPKDERENSDTEGKDFTSMSDTLKVVFSELQDFRNDYSHYYSTEKGDSRK |
| SEQ ID NO: | LIVSPELANFLTVNFQRAIAYTKARMKDVLTDTDYALVENLQMVAPDNKITTEGLVFLIAMFLEREQAFQF |
| 4392 | TGKIQGLKGTQFNSFIATREVLMSFCVKLPHDKFVSENLEQALTLDIINELNRCPKTLYSVITDKEKQQFRPE |
| | LDAQGIDNLIANSTNDDERETILDEIDYQDYIEGLTKRVRYSDRFSYFAMRYIDEKNVFDKLRFHIDLGKYE |
| | VDNYTKQFAGEQAERKVLENANAFGKLSSFTDPELIQQRIDKQQHTAGFDQFAPHYNADNNKIGLSTKENI |
| | ATLIAKSKASSKVEHNLKQPLPQAFLSLHELPKIILLEYLQKGQAEELINDFILLNDTRLMDITFIEEVKSQLP |
| | ANWDEFSKRSDAKKKKAYSDSTLKYLRQRKTTLNTILSKSNLNDKQIPTRILNYWLNIKEVDDKRSVSDRI |
| | KLMKRDCMTRLKAVEKHKLNKSVKIPKVGEMATFLAKDIVDMIVSEEKKQKITSFYYDKMQECLALFAN |
| | AEKKALFIHIVTNELKLFENGGHPFLQNIN |
| IMG_ | METNQQTHENRRRTLTNDPQYFGGYLNMARLNIYNINNHVATDFKQATLPEEGQIPASFLCNKTIKNLNW |
| 3300025888 | NHVHTRALRFLPILKVFDSESLPKDERENSDSEGKDFASMSDTLKVVFSELQDFRNDYSHYYSTEKQDSRK |
| SEQ ID NO: | LTVSPELANFLTVNFKRAIAYTKARMKDVLTDADYALVENLQMVAADNRIATEGLVFLIAIFLEREQAFQFI |
| 4393 | GKIQGLKGTQFNSFIATREVLMSFCVKLPHDKFVSENLEQALTLDIINELNRCPKTLYSVITDKEKQQFRPEL |
| | DAQGIDNLIANSTNDDERETILDEIDYQDYIEGLTKRVRYSNRFSYFAMRYIDEKNVFDKLRFHIDLGKYEV |
| | DNYTKQFAGEQAERKVLENANAFGKLSSFTDPELIQQRIDKQQHTAGFNQFAPHYNADNNKIGLSTKENIA |
| | TLIAKSKASSKVEHNLKQPLPQAFLSLHELPKIILLEYLQKGQAEELINDFILLNDTRLMDITFIEEVKSQLPA |
| | NWDEFSKRSDAKKKKAYSDSTLKYLRQRKTTLNTILSKSNLNDKQIPTRILNYWLNIKEVDDKRSVSDRIK |
| | LMKRDCMTRLKAVEKHKLNKSVKIPKVGEMATFLAKDIVDMIVSEEKKKKITSFYYDKMQECLALFANAE |
| | KKALFIHIVTNELKLFENGGHPFLQNINLQQIRKTSQFYQAYLVEKGNKMVPRLNPKTNKTSKVDESWMM |
| | KQFYVKEWKEEIGKQLTVVKLPANKSQIPFTIRQWDEKEKYDLNVWLQHVTVGKNKDGKKAVNLPTNLF |
| | DEALCDLLREQLDTKIVNYNPAANYNELLKIWWKTRNDDTQQFYQSEREYDIYN |
| IMG_ | METNQQTHENRRRTLTNDPQYFGGYLNMARLNIYNINNHVATDFKRKPLPEEGQIPDALLCNKTIKNLNW |
| 3300028651 | NHVHTRALRFLPILKVFDSESLPKDERKNSDTEGKDFTSMSDTLKVVFSELQEFRNDYSHYYSTEKGDSRK |
| SEQ ID NO: | LIVSPELANFLTINFKRAITYTKARMKDVLTDADYALVENLQMVATDNKITTEGLVFLIAMFLEREQAFQFI |
| 4394 | GKIQGLKGTQFNSFIATREVLMSFCVKLPHDKFVSENQEQALTLDIINELNRCPKTLYSIITDKEKQQFRPEL |
| | DAQGIENLIANSTNNEERERILDEIDYQDYIEGLTKRVRYNNRFSYFAMRYIDEKNIFDKLRFHIDLGKYEVD |
| | NYTKQFAGEQAERKVLENAKAFGKLSSFTDPELSQQRIDKQQQTAGFEQFAPRYHADNNKIGLSNKENIAT |
| | LTAKSKAGSKVEHNLKQPLPQAFLSLHELPKIILLEYLQKGQAEELINDFILLNDTRLMDITFIEEVKSQLPDG |
| | WNEFNKRSDAKKKKAYSDSTLRYLHQRKTILNTILSKYNLNDKQIPTRILNYWLNIKEVDD |
| IMG_ | METNQQTHENRRRTLTNDPQYFGGYLNMARLNIYNINNHVATDFKRKPLPEEGQIPDALLCNKTIKNLNW |
| 3300028868 | NHVHTRALRFLPILKVFDSESLPKDERKNSDTEGKDFTSMSDTLKVVFSELQEFRNDYSHYYSTEKGDSRK |
| SEQ ID NO: | LIVSPELANFLTINFKRAITYTKARMKDVLTDADYALVENLQMVATDNKITTEGLVFLIAMFLEREQAFQFI |
| 4395 | GKIQGLKGTQFNSFIATREVLMSFCVKLPHDKFVSENQEQALTLDIINELNRCPKTLYSIITDKEKQQFRPEL |
| | DAQGIENLIANSTNNEERERILDEIDYQDYIEGLTKRVRYNNRFSYFAMRYIDEKNIFDKLRFHIDLGKYEVD |
| | NYTKQFAGEQAERKVLENAKAFGKLSSFTDPELSQQRIDKQQQTAGFEQFAPRYHADNNKIGLSNKENIAT |
| | LTAKSKAGSKVEHNLKQPLPQAFLSLHELPKIILLEYLQKGQAEELINDFILLNDTRLMDITFIEEVKSQLPDG |
| | WNEFNKRSDAKKKKAYSDSTLRYLHQRKTILNT |
| IMG_ | METNQQTHENRRRTLTNDPQYFGGYLNMARLNIYNINNHVATDFKRKPLPEEGQIPDALLCNKTIKNLNW |
| 3300028664 | NHVHTRALRFLPILKVFDSESLPKDERKNSDTEGKDFTSMSDTLKVVFSELQEFRNDYSHYYSTEKGDSRK |
| SEQ ID NO: | LIVSPELANFLTINFKRAITYTKARMKDVLTDADYALVENLQMVATDNKITTEGLVFLIAMFLEREQAFQFI |
| 4396 | GKIQGLKGTQFNSFIATREVLMSFCVKLPHDKFVSENQEQALTLDIINELNRCPKTLYSIITDKEKQQFRPEL |
| | DAQGIENLIANSTNNEERERILDEIDYQDYIEGLTKRVRYNNRFSYFAMRYIDEKNIFDKLRFHIDLGKYEVD |
| | NYTKQFAGEQAERKVLENAKAFGKLSSFTDPELSQQRIDKQQQTAGFEQFAPRYHADNNKIGLSNKENIAT |
| | LTAKSKAGSKVEHNLKQPLPQAFLSLHELPKIILLEYLQKGQAEELINDFILLNDTRLMDITFIEEVKSQLPDG |
| | WNEFNKRSDAKKKKAYSDSTLRYLHQRKTILNTILSKYNLNDKQIPTRILNYWLNIKEVDDKRSVSDRIKL |
| | MKRDCMTRLKAVEKHKLNKSVKIPKVGEMATFLAKDIVDMIVSEEKKKKITSFYYDKMQECLALFTNAEK |
| | KALFIHIVTNELKLLENDGHPFLQNINLQQIRKTSQFYQAYLIEKGNKMVPRLNPKTNKTSKVDESWMMKQ |
| | FYVKEWKEEIGKQLTVVKLPANKSRIPFTICQWDKKESHDLNTWLQHVTVGKNKDGKKAVNLPTNLFDE |
| | ALCDLLREQLD |
| IMG_ | METNQQTHENRRRTLTNDPQYFGGYLNMARLNIYNINNHVATDFKRKPLPEEGQIPDALLCNKTIKNLNW |
| 3300028665 | NHVHTRALRFLPILKVFDSESLPKDERKNSDTEGKDFTSMSDTLKVVFSELQEFRNDYSHYYSTEKGDSRK |
| SEQ ID NO: | LIVSPELANFLTINFKRAITYTKARMKDVLTDADYALVENLQMVATDNKITTEGLVFLIAMFLEREQAFQFI |
| 4397 | GKIQGLKGTQFNSFIATREVLMSFCVKLPHDKFVSENQEQALTLDIINELNRCPKTLYSIITDKEKQQFRPEL |
| | DAQGIENLIANSTNNEERERILDEIDYQDYIEGLTKRVRYNNRFSYFAMRYIDEKNIFDKLRFHIDLGKYEVD |
| | NYTKQFAGEQAERKVLENAKAFGKLSSFTDPELSQQRIDKQQQTAGFEQFAPRYHADNNKIGLSNKENIAT |
| | LTAKSKAGSKVEHNLKQPL |
| IMG_ | METNQQTHENRRRTLTNDPQYFGGYLNMARLNIYNINNHVATDFKRKPLPEEGQIPDALLCNKTIKNLNW |
| 3300030294_4 | NHVHTRALRFLPILKVFDSESLPKDERKNSDTEGKDFTSMSDTLKVVFSELQEFRNDYSHYYSTEKGDSRK |
| SEQ ID NO: | LIVSPELANFLTINFKRAITYTKARMKDVLTDADYALVENLQMVATDNKITTEGLVFLIAMFLEREQAFQFI |
| 4398 | GKIQGLKGTQFNSFIATREVLMSFCVKLPHDKFVSENQEQALTLDIINELNRCPKTLYSIITDKEKQQFRPEL |
| | DAQGIENLIANSTNNEERERILDEIDYQDYIEGLTKRVRYNNRFSYFAMRYIDEKNIFDKLRFHIDLGKYEVD |
| | NYTKQFAGEQAERKVLENAKAFGKLSSFTDPELSQQRIDKQQQTAGFEQFAPRYHADNNKIGLRNKENIAT |
| | LAAKSKAGSKVEHNLKQPLPQAFLSLHELPKIILLEYLQKGQAEELINDFILLNDTRLMDITFIEEVKSQLPD |
| | GWNEFNKRSDAKKKKAYSDSTLRYLHQRKTILNTILSKYNLNDKQIPTRI |
| IMG_ | MEANEQNQENRRRTLTNDPQYFGGYLNMARLNIYNINNHIAADFGQAVLPEEGQIPSGFLCNKEIKKLNW |
| 3300030055_4 | NHIYAKTRRFLPILKVFDIESLPKEEQVNSDKEGKDFAAMSDTLKVVFSELQDFRNDYSHYYSTEKGENRK |
| SEQ ID NO: | LTISAELTDMLTINFKRAIAYTKVRMKDVLTDADYELVETKQVVTTGNIITTEGLVFLTCMFLEREHAFQFI |
| 4399 | GKIQGLKGTQFNSFIATREVLMSFCVKLPHDKFVSENLEQALTLDIINELNRCPKTLYGVITDEEKMQFRPEL |
| | DELDIEKLIANSTNDDERERILDEIGYEEYIEGLTKRVRYNNRFPYFAMRFIEEKNVFDKLRFHIDLGKYEVD |
| | RYTKQLAGEQTERVVQENVKAFGKLSSFTDPELIQQKIDNQQRTDGFE |
| IMG_ | MEANEQNQENRRRTLTNDPQYFGGYLNMARLNIYNINNHIAADFGQAVLPEEGQIPSGFLCNKEIKKLNW |
| 3300030943_3 | NHIYAKTRRFLPILKVFDIESLPKEEQVNSDKEGKDFAAMSDTLKVVFSELQDFRNDYSHYYSTEKGENRK |
| SEQ ID NO: | LTISAELTDMLTINFKRAIAYTKVRMKDVLTDADYELVETKQVVTTGNIITTEGLVFLTCMFLEREHAFQFI |
| 4400 | GKIQGLKGTQFNSFIATREVLMSFCVKLPHDKFVSENLEQALTLDIINELNRCPKTLYGVITDEEKMQFRPEL |
| | DELDIEKLIANSTNDDERERILDEIGYEEYIEGLTKRVRYNNRFPYFAMRFIEEKNVFDKLRFHIDLGKYEVD |
| | RYTKQLAGEQTERVVQENVKAFGKLSSFTDPELIQQKIDNQQRTDGFEQFAPHYNADNNKIGLSNKESIAIL |
| | IPKSKPESKVGNNLKQPLPQAFLSLHELPKIILLDYLQKGKAEELINDFILLNDTRLMDITFIEEVKLKLPANW |
| | NEFAKRSDAKKKKAYSDAAMEYLLQRKATLNDVLITYNLNDKQIPTRILNYWLNIKDVEDNRSV |
| IMG_ | MEANEQNQENRRRTLTNDPQYFGGYLNMARLNIYNINNHIAADFGQAVLPEEGQIPSGFLCNKEIKKLNW |
| 3300028864_3 | NHIYAKTRRFLPILKVFDIESLPKEEQVNSDKEGKDFAAMSDTLKVVFSELQDFRNDYSHYYSTEKGENRK |
| SEQ ID NO: | LTISAELTDMLTINFKRAIAYTKVRMKDVLTDADYELVETKQVVTTGNIITTEGLVFLTCMFLEREHAFQFI |
| 4401 | GKIQGLKGTQFNSFIATREVLMSFCVKLPHDKFVSENLEQALTLDIINELNRCPKTLYGVITDEEKMQFRPEL |
| | DELDIEKLIANSTNDDERERILDEIGYEEYIEGLTKRVRYNNRFPYFAMRFIEEKNVFDKLRFHIDLGKYEVD |
| | RYTKQLAGEQTERVVQENVKAFGKLSSFTDPELIQQKIDNQQRTDGFEQFAPHYNADNNKIGLSNKESIAIL |
| | IPKSKPESKVGNNLKQPLPQAFLSLHELPKIILLDYLQKGKAEELINDFILLNDTRLMDITFIEEVKLKLPANW |
| | NEFAKRSDAKKKKAYSDAAMEYLLQRKATLNDVLITYNLNDKQIPTRILNYWLNIKDVEDNRSV |
| IMG_ | MKSNEQTYENKRRTLTNDPQYFGGYLNMVRLNIYNISNHIASDFGQAQLPEEGQIPTSFLCNKGIKKLNWN |
| 3300029923 | HVYTKTRRFLPILKVFDAESLPKEERENYEKEGKDFAAMSDTLKVVFTELQAFRNDYSHYYSTEKGENRKL |
| SEQ ID NO: | TVSGELADFLTINFKRAIAYTKVRMKDVLTDADYELVENRQIVVDNNTITTEGLVFLISMFLEREQAFQFIG |
| 4402 | KIQGLKGTQFNSFIATREVLMSFCVKLPHDKFVSEDLEQALTLDIINELNRCPKTLYKVSTEEAKLQFRPELD |
| | AQGIDNLLANSTNIDECEKILDEINYEDYIEGLTKRVRHNNRFSYFAMRYIDEKNVFEKLRFHIDLGKYEVD |
| | TYTKQLAGEQTERVVFENVKAFGKLNSFTDSESVQQRIDKQQRTGGFEQFAPHYNAENNKIGLSSKEEVAL |
| | LLPKSKPDTKVAYNLKQPLPQAFLSLHELPKVILLEYLQKGKSEQMINDFILLNDTRLMDMTFIEEVKSKLP |
| | FGWNEFTKRSDAKKKKAYSNATMKYLLQRKTIVNDVLIDYNLNHKQIPTRILDYWLNIKDVEDSRSVSDRI |
| | KLMKRDCMTRVKVLEKHKLDKSVKTPKVGEMASFLAKDIVDMIVSKEKKQKITSFYYDIMQECLALFAD |
| | AEKKALFIHIVTNELKLFENGGHPFIQNINLQQLHKTSQFYEAYLKEKGNKQVSKFNPKTNKTSKVDDSWM |
| | MQQFYTKEWNDEIKKQLTVVKLPANKTHIPFTIRMWEEKEKYNLETWLHNVTVGKNIKDGKKAVNLPTN |
| | LFDEALCILLRKQLDTLAPNYNPAANYNELLKLWWKTRNDDTQDFY |
| IMG_ | MENDQQILENRRRTLANDPQYFGGYLNMARLNIYNISNHLATSFEQKALHEEGQIPASFLCNKSIKKINWN |
| 3300030001 | HVYSKARRFLPILKIFDADSLPKEERETSDKEGKDFTAMNETLKLVFDELQAFRNDYSHYYSTEKADSRKL |
| SEQ ID NO: | TISVELADFLTVNFKRAIAYTKVRMKDVLADDDYAVVESKQIVTPDNQITTEGLVFLTCIFLEREQAFQFIG |
| 4403 | KVQGLKGTQFNSFIATREVLLAYCVKLPHDKFVSEDLRQALTLDIINELNRCPKTLYEVITEEEKQQFRPELD |
| | AQGIDNLIANSTNEEEREKILDEIDYEDYIESLTKRVRHSNRFPYFAMRYIEEKNVFDKLRFHIDLGKYEVEK |
| | YNKQFDGEATERKVVENAKAFGKLSSFTNQETVELKIDSAQRTNGFEQFAPHYNADNNKIGLSNKESEARL |
| | LTKAKPESKVSYNLKQPLPQAFLSLHELPKIILLEYLQKGKAEEMINDFIKVNDSQLMNMQFIDEIKEQLPAD |
| | WNEFGKRSDSKKKKAYTNAARQYLLQRKATLNKVLANYQLNDKQVPTRILNYWLNVKEVDDSRSVSDRI |
| | KLMKRDCMSRLKVMEKHKVDKSARTPKVGEMATFLAKDIVDMIVSTDKKQKITSFYYDKMQECLALYA |
| | DNEKKATFIHIVTNELKLLEKDGHPFLANINLRQIRKTSQLYELYLVEKANKQVKKMNPKTQRTNNVDES |
| | WMMKSFYAKEWNEEMGKQLTVVKLPANKTNIPFTIRQWEEKEKHNLQAWLHNITKGKTSKDGKKAVDL |
| | PTNLFDDTLCELLREALINEGIDATP |
| IMG_ | MENDQQILENRRRTLANDPQYFGGYLNMARLNIYNISNHLAASFEQKVLPEEGQIPASFLCNKSIKKINWN |
| 3300031902 | HVYSKARRFLPILKVFDADSLPKEERETTDKEGKDFTAMNETLKLVFDELQAFRNDYSHYYSTEKADSRKL |
| SEQ ID NO: | TISVELADFLTVNFKRAIAYTKVRMKDVLADDDYTMVESKQIVTPDNLITTEGLVFLTCMFLEREQAFQFIG |
| 4404 | KVQGLKGTQFNSFIATREVLLAYCVKLPHDKFVSEDLGQALTLDIINELNRCPKTLYEVITEEEKQQFRPEL |
| | DAQGIDNLIANSTNEEEREKILDEIDYEDYIESLTRRVRHSNRFSYFAMRYIEEKNVFDKLRFHIDLGKYEVD |
| | KYNKQFDGEATECKVVENAKAFGKLSSFTNQETVELKIDSAQRTNGFEQFAPHYNADNNKIGLSNKESEA |
| | RLLTKAKPESKVSYNLKQPLPQAFLSLHE |
| GCA_ | MDTIEKTEHKGLNVYKTLETDPQYFGGYLNMARLNIFSINNYVADKLKISALVNEEKMLDSFLCNNNRKH |
| 002400765.1_ | LNWNLAHSIAVKFFPIMKVFDFESLPKLERTVDLNNINTGKDFVAMAVVLRYLFREIQEFRNDYSHYYSIVN |
| ASM240076v1_ | GNKRKTIISREVAEFLRLNFTRAIEYTKERFNGVLNNEDFEYVKERVLVNQDNTITTDGFVFLISMFLEREHA |
| genomic_2 | FQFIGKIKGLKGTQYSSFIATREVFMAFCVKLPHDRFVSEDKRQALTLDIINTLNRCPKELYTVITDEERKVF |
| SEQ ID NO: | KPSLDSLKLKNLLDNSTNDQADIEDYDNYIEVLTRKIRHSNRFSFFALKFIDETDIFSKLRFHINLGKLLIEEY |
| 4405 | EKPINNELYPRSIVQNVKAFGKLSDFEDGIEVLKQIDKEGNSLGFEQYAPFYNTKNNKIGLHTNSAKSIVINK |
| | PKSESKIKKSLKQALPEAFLSLHELPKIIVLEYLAKGKSEELINDFILICNSKIINKQFIDEVKGELPKDWNEFN |
| | KRSDSKKDPAYKPNALAYLIKRKKIVDEVLAQYNLNHKQIPTRILDYWLCIVDRNADRAISERIKRMKREG |
| | MDRLKAYRKFKKTGKGKIPKIGEMATFMAKXXXXXXXXXXXXXKXXXXXXXXXXXXXXPCLPIPKKNS |
| | YLLILSAKSFGLTR |
| IMG_ | MDTIERIEIKSANVYKTLENDPQYFGAYLNMARLNIFSINNSVADKIKVAPIPNEEKILDSFLCNHNRKHLN |
| 3300027758 | WNLAHAIAVKFLPIIKVFNFEGLPKSERTSDFNNINTGKDFAAMADALRSLFGEIQEFRNDYSHYYSITNGN |
| SEQ ID NO: | KRKTTISKEVAEFLNKNFARAIEYTKDRFNGVLNNEDFYHVKERVLVNKDNTITTDGLVFLIAMFLEREHA |
| 4406 | FQFIGKIKGLKGTQYNSFIATREVLMAFCAKLPHDRFVSEDKKQAFTLDIINTLNRCPKELYAVITEEERKAF |
| | KPNLDSLKIENLLNNSTNDRADIENYDKYIEALTRKVRHSNRFSYCALKFIDETNIFKQLRFQINLGKLGLDE |
| | YEKPINNELYPRSIVQNVKAFGKLSDFEDEKEVLKQIDKEGNSLGFDQYAPFYNTKNNKIGLHTNNAKSIVI |
| | NKAKSESKIKNKLKKALPEAFLSLNELPKIIVLEYLEKGKSEELINDFILASNSKITNKQFIDEVKGKLPNDW |
| | NEFNKRSDSKKETAYKPNALAYLRNRKKILDEVLAQYNLNHKQIPTRILDYWLSVVDINSERAISDRIKRM |
| | KREGMDRLKSYQKYKKTRKGRIPKIGEMATFLAKDIIDMIISTDKKKKITSFYYDKMQECLALFADPDKKA |
| | LFIDIISKELHLNELDGHPFLKYIRFSKISYTQDLYESYLQEKANKMIDVKNHRTGRTNQIDKSWMMTTFYR |
| | REWNKEAGKQLTEVKLPHNLSCIPFSLRQLKEKTSNNLDEWLHNITKGKEVNDGKKPINLPTNLFDETLIRL |
| | LKSDLDTQHEQYPEDAKYNELFKIWWRKRGDSTQSFYNAEREYLIYDEKVNFKLQENAEFADFYSDNLRK |
| | AYKAKQADRRI |
| IMG_ | MEENLNSLLSRTRTISNDPQYFGGYLNMARLNIFNISNYIGKLFSQSQLDDDDHIANSFLTNETIKNLNWNH |
| 3300028603 | VFSKALRFLPIVKLFDLEEYPREIIDELGKKFIAPNETKDFHNMRKSLKLIFSNINNFRNDYSHFYSTISGTNR |
| SEQ ID NO: | KLEIEDDIANLLRNAFTFAISHTKLRLKEVLKEEDFNLVSEKKMVEEGNKITTEGLVFLICMFLEREHAFHFI |
| 4407 | KRIIGFRGNHIKSFVATHEVFMTFCVKLPHDKLISEDYEQRLAMDMVKELNNCPKDLYRLLTERERAKLRY |
| | CSPLIGGNHNDVDQLDYDSYREMLVSNIRHRNRFFYFALRFIDETNCFPTLRFHIDIGKLELVSYLKSFAGSE |
| | EERRIVVDVKTFGKLSEFVEEDTLHKKIDKNGYTTGFDQFSPRYNFKLNKIGIRKSGTKFPIILPTIVSKSDQT |
| | GNIKIRLKQYAPDAFLSLHMLPQIILIEYLERGASEKVINDFINKNKEILDKKFIQQIKGELPTDWAKFQKRSD |
| | SKKRPAYDTYNLKSLTDRKQYLNDVLEKHNLNVKQIPTRVLEYWLNLNDVDGSQLFSNRIKLMKKECTDR |
| | LKVIEKSKINPNIRTPKVGEMATFLAKDIVDMIVDSEIKSQCSSFYYHKLQKSLAFYATSDEKKIFSEIKDELK |
| | LIGTGGHPFLSRVLDKSPINTLEFYIYYLKEKADTRTYKTEKNNSWIEKTFYTTVKDKKTKKRMVTVRMPE |
| | NASNIPYTIQ |
| IMG_ | METTTVAEFSKTRTMESDPQYFGSYLNMARHNIFNISNYIADYFNLSRLKDDDLIQNSFLCNPDIQKINWPY |
| 3300019861 | VFGRTKHLLSILKVFDTDTLPKDEVLSSSQAGKQFLLMNETLKLVFRELQQFRNDYSHYYSAEKGSDKKIII |
| SEQ ID NO: | DEQLVQFLNLNFKRAISYTRERFKDVFSEDDFKYAINLKLVKEDNKITVHGMVFLIAMFLEREEAFSFISRIS |
| 4408 | GLKGTYSKSFLATREVLMAFCVKLPHDKFKSNDEKQATSLDLINELNRCPLDLWNNLNQSDKMKFIPDLE |
| | VDENGDHLAEEYEIYAETITKQIRYKNRFTEFALKYIDYAGVLPKYKMLIDVGKISLGSYTKIMNNEPYEREI |
| | QDEVIAFDKTVEYTKKDEVLKRVDAEKRTKGFTRFNPHYSSAANKIGLLYKSDFSQVMPAQDRKLGIRLN |
| | HPAARAFLSANELTKVILLDYLIPREPERIINRFIQKNKQILDLNFINQIKEQIGFNEFARRTSKKNEHAYTEGA |
| | LNHLTFRKNQLQAILSKYNLTIAQIPSKIIDYWLNIKPVDEYRKAAERITRIRLETKTRYKEHLKARIANKPAL |
| | KQGIMASYLARDII |
| IMG_ | MEDLILEHRDKGKSKNNETQSKRTLGNDPQYFGAYLNMARHNIFTINNHLVKKLKLQDTLVLSDEESIPDS |
| 3300003541 | FLVKKIKEKPNLLFTQLIRFLPIAKVFNPELLPKEEQEKEKEENIDFKSLADTLKICFGELNKFRNDYTHYYSK |
| SEQ ID NO: | TNGLDRKIIIDENLAVFLRINKTRAIEYTKKRFKDIFEDKHFIITEKKELVDQSSKITQDGLVFFICLFLDRENA |
| 4409 | FQFINRIIGFKDTRTPEYKATREVFSSFCVNLPHDKFISDDPVQAFILDMLNELNRCPLELYNNITKKEKKQFQ |
| | PDISDKISNIEENSIPEEISVDKYEEYIQNITTKIRRKDRFPYFALKYLDMKDDYQLKFHINLGKALLDTHKKL |
| | CLGKEENREIVEDVKIFGKLKDFENEDKIIKNIDKKKKMEFKQFNPHFHIENNKIGFSFNLKSCSIKYGLSEKP |
| | NLKLSIPDGFLSINELPKVLLLELLKKGKSIEIIKSFLNTNRENILNKEFIERVKEDLVFEKSFYRSFQKKKEPA |
| | YSEKALSILKDRKTKLNSLLRQHNLNDKQIPARILNYWLDIKPVKEEMSIANKIKAMKKDCIDRLKAKKKN |
| | KAPKVGEMATYLAHDIVDMIIDEKLKNKITSFYYDKMQECLALFSDEEKKQLFLQICEKELNLFDEKKGHP |
| | FLKELDLYNINKTSDIYEKYLEKKGNNMKTLKNEKQQKSYQSDTSWLYTTFYVKSKNPTTNKWETKVNLP |
| | PDLSKLPFSIRNLLRKKSNFEQWLKNVTDGYSDNDKP |
| IMG_ | MENLNKRTLTTDPQYFGGYLNSARHNIFTISNYIAERINPLMKKGKLSIRKDDDEIADSFICTKIIEKPNLFFT |
| 3300032420 | NLVRFLPIVKVYDSDKLPKAEKEKPSSEGIDFETLADDMKICFKELNGFRNDYSHYFSKETGTERKIVIDERL |
| SEQ ID NO: | SVFLRTNYQRAIEYTKIRFKDVYEESHFKIAADKILVNESNVITQDGLVFFTCLFLDRENAFHFINRIIGFKDT |
| 4410 | RTLGFRATREVFSAYCVTLPHDKFTSDDEKQGFILDLLNELNKCPKELYDNITEEERKIFRPDVSESIDKITES |
| | SIPEDLAFEDYDEYIQSIITKKRKSDRFPYFAIKYLDGKKDFDINFHLNLGKVELLSRKKKFLGEEVDRDIVE |
| | DVKVFGKLAEYTNEKEVSRKLGLEFQLFNPHYQIENNKMGISFSPKLCSVKSENDKPNLKLNPPDAFLSVH |
| | ELPKIVLAELFEKGKAKEIIESFIGINKDKILNREFIEEVKSKLVFEKPFYRSFQSKRGAAYNDKGLQILKERK |
| | TKLNEILREYNLNDRQIPERILDYWLNINDVKSESEIANRIKAMKKDCRDRVKAKAKNKAPKAGEMATYL |
| | AKDIVDMVIDEKVKQKITSF |
| GCA_ | MERIFGHCCPHHDSVCFVRFLGTMVSNQDGRENVLDILYIADRTRKLKPMNTVPASENKGQSRTVEDDPQ |
| 002529355.1_ | YFGLYLNLARENLIEVESHVRIKFGKKKLNEESLKQSLLCDHLLSVDRWTKVYGHSRRYLPFLHYFDPDSQI |
| ASM252935v1_ | EKDHDSKTGVDPDSAQRLIRELYSLLDFLRNDFSHNRLDGTTFEHLEVSPDISSFITGTYSLACGRAQSRFAD |
| genomic | FFKPDDFVLAKNRKEQLISVADGKECLTVSGLAFFICLFLDREQASGMLSRIRGFKRTDENWARAVHETFC |
| SEQ ID NO: | DLCIRHPHDRLESSNTKEALLLDMLNELNRCPRILYDMLPEEERAQFLPALDENSMNNLSENSLNEESRLLW |
| 4411 | DGSSDWAEALTKRIRHQDRFPYLMLRFIEEMDLLKGIRFRVDLGEIELDSYSKKVGRNGEYDRTITDHALAF |
| | GKLSDFQNEEEVSRMISGEASYPVRFSLFAPRYAIYDKR |
| GCA_ | MNTVPASENKGQSRTVEDDPQYFGLYLNLARENLIEVESHVRIKFGKKKLNEESLKQSLLCDHLLSVDRWT |
| 002529355.1_ | KVYGHSRRYLPFLHYFDPDSQIEKDHDSKTGVDPDSAQRLIRELYSLLDFLRNDFSHNRLDGTTFEHLEVSP |
| ASM252935v1_ | DISSFITGTYSLACGRAQSRFADFFKPDDFVLAKNRKEQLISVADGKECLTVSGLAFFICLFLDREQASGMLS |
| genomic_2 | RIRGFKRTDENWARAVHETFCDLCIRHPHDRLESSNTKEALLLDMLNELNRCPRILYDMLPEEERAQFLPAL |
| SEQ ID NO: | DENSMNNLSENSLNEESRLLWDGSSDWAEALTKRIRHQDRFPYLMLRFIEEMDLLKGIRFRVDLGEIELDS |
| 4412 | YSKKVGRNGEYDRTITDHALAFGKLSDFQNEEEVSRMISGEASYPVRFSLFAPRYAIYDKR |
| IMG_ | MEEQFLQKERNMGDNPYYFCHFINMAHHNVNLILEEIYNSVYEKYTQDKEENIKAICNSMISKSRKNPDEK |
| 3300029998_2 | AKMMNMCIRHFPFLDYYKEKDQNSDVLTILLNQFLVPLHGLRNQFSHYKHPQEAYCISGFDLLFEQAKTG |
| SEQ ID NO: | AQMRMKYSDEDISKVKSKVVNHDSILTERGILFFICLFLDKRNIYLFLSKIKGFRDRRPDEKYKSATLEVFSQ |
| 4413 | YYCHVPYRKLDSSDVALDMLNELNRCPKALYDVLSDEDRERFIVDNVENADNRDEISDEDDEEMPRSVMK |
| | RSDDRFPYFALRYFEKQNNLDEISFHLYLGRKEAKPAHEKVINGEMRTHKILKDIHVFGRLENYRNEEICNA |
| | IKNREDIEFYAPSYRIVENRIGLLLRRQNDFTLEEANEEKIFEGNLCPDVILSTHELGALFFYNYLH |
| IMG_ | MEEQFLQKERNMGDNPYYFCHFINMAHHNVNLILEEIYNSVYEKYTQDKEENIKAICNSMISKSRKNPDEK |
| 3300030673_3 | AKMMNMCIRHFPFLDYYKEKDQNSDVLTILLNQFLVPLHGLRNQFSHYKHPQEAYCISGFDLLFEQAKTG |
| SEQ ID NO: | AQMRMKYSDEDISKVKSKVVNHDSILTERGILFFICLFLDKRNIYLFLSKIKGFRDRRPDEKYKSATLEVFSQ |
| 4414 | YYCHVPYRKLDSSDVALDMLNELNRCPKALYDVLSDEDRERFIVDNVENADNRDEISDEDDEEMPRSVMK |
| | RSDDRFPYFALRYFEKQNNLDEISFHLYLGRKEAKPAHEKVINGEMRTHKILKDIHVFGRLENYRNEEICNA |
| | IKNREDIEFYAPSYRIVENRIGLLLRRQNDFTLEEANEEKIFEGNLCPDVILSTHELGALFFYNYLHKKGWIES |
| | APYLYIRNFISDFKRFIEDIKNGKLTPVESEDDFYLIKKKKRDETKDNDKKSIAVQERRREKLKEKLKGYHLE |
| | PDWIPDACREYMLGYKADQKDYYTKQRFCSMKKETDSRIKQIEAIRKREDNSIIRQTRVGEIAQELARDIVF |
| | LIPPYKNEKGADTKINNMEFDVLQKMLAYFPLNKKDIYPFLKNIRNWDKHPFLKYTLHTEHQSLLDFYQDY |
| | LNCKKRWISKNIRYDKQKGNYLVDANKTEQECRYFLKTDKLRTAKEKEYFEEPDKPVYLPTGFFVDPIVEA |
| | MRKNGYELKENSNIVGCLKIYFVSKIQPMYDLSRYYTYYDGKEERSM |
| IMG_ | MEEQFLQKERNMGDNPYYFCHFINMAHHNVNLILEEIYNSVYEKYTQDKEENIKAICNSMISKSRKNPDEK |
| 3300030685_3 | AKMMNMCIRHFPFLDYYKEKDQNSDVLTILLNQFLVPLHGLRNQFSHYKHPQEAYCISGFDLLFEQAKTG |
| SEQ ID NO: | AQMRMKYSDEDISKVKSKVVNHDSILTERGILFFICLFLDKRNIYLFLSKIKGFRDRRPDEKYKSATLEVFSQ |
| 4415 | YYCHVPYRKLDSSDVALDMLNELNRCPKALYDVLSDEDRERFIVDNVENADNRDEISDEDDEEMPRSVMK |
| | RSDDRFPYFALRYFEKQNNLDEISFHLYLGRKEAKPAHEKVINGEMRTHKILKDIHVFGRLENYRNEEICNA |
| | nCNREDIEFYAPSYRIVENRIGLLLRRQNDFTLEEANEEKIFEGNLCPDVILSTHELGALFFYNYLHKKGWIES |
| | APYLYIRNFISDFKRFIEDIKNGKLTPVESEDDFYLIKKKKRDETKDNDKKSIAVQERRREKLKEKLKGYHLE |
| | PDWIPDACREYMLGYKADQKDYYTKQRFCSMKKETDSRIKQIEAIRKREDNSIIRQTRVGEIAQELARDIVF |
| | LIPPYKNEKGADTKINNMEFDVLQKMLAYFPLNKKDIYPFLKNIRNWDKHPFLKYTLHTEHQSLLDFYQDY |
| | LNCKKRWISKNIRYDKQKGNYLVDANK |
| GCA_ | MDISNEKTSRYKDLENDPYYFNHFINMGRHNAYLILHDVYKTVYKEELSLEENNLAVFRKKVLEKSQNKP |
| 002307035.1_ | DEIAKVINILLRHFPFLAYYEEKQQYVKEKHKYESLNRLADYLGALNKIRNQTSHYKHNKEDIYLPDYQGL |
| ASM230703v1_ | FQMGVKEAQNRMKYEDKDVKHLYRTQYYNLVNNNILTEAGISYFVCLFLDKKNGYLFLSRIKGFKDRNK |
| genomic | TSERYKSATLEAFTQFHSHVPYPKLDSSDIALDMLNELNRCPKQLYNVLSAEDQNKFIATLSEDGDDELPKP |
| SEQ ID NO: | LMKRSEDRFPYFALRYFEKSGKLDNITFQLYLGRKHAQEPHTKKIAGVERIHFLLKNMHVFGKLPFYKEEE |
| 4416 | AHRFYGENEEVEFYAPAFRMVGNRIGLVLREELQSHYTVPATNKTEKDKNYPDAILSTHELSGL |
| IMG_ | LLIRIRFYSFGKNYSNMETPNKTSTSAYKDLQNDPYYFSHFINMGRHNAYLIIHYIYKCVYKEELNLIESNLY |
| 3300025106 | QFSSKVKANSKKNPDELTKVIRLLLLHFPFLAYYDNAEREKRDERVVGRSNDGNWNKKVKERPYLSDKNT |
| SEQ ID NO: | VSSNSEKASEKATSESHICLERLSQFLIVLNNLRNETSHYKHPKKSTLLPDFQKMYQSGIKEAQRRMNYEDK |
| 4417 | DIQHLFKDPHYKLIETQKQTETVGLTKFNGQKKVNRQPQVNGQTGTDKLAKVDKLTGFDKLTEVDELQDL |
| | DELTEIGIYYFICLFLDKKNGYLLLSRIRGFKDRNRTSEKYKSATLEAFTQFHCLVPNPKLESSNIAMDMLNE |
| | LNRCPRQLYQVLSQDDKEKFVATDTEKEEDSDEVPEPIMKRSEDRFPYFALRYFEEMSRLGLSGTLDQITFQ |
| | LFLGRKHDQEPHTKILNGTQRTHSLLKNMHVFGKLPFYQKEEAYQFYEGNEEVEFYAPAYRIVGNRIGLVL |
| | KDIHPHYTIPKSDGNYKNGNCKNGNCKNENCPDAILSTHE |
| IMG_ | MDTPNFSERIPVSLQSHPYYFAHYLNMARHNAYVILEYVNRELIKPGKNLDEDNLIQSTVLKDGYFDRKPD |
| 3300025308_2 | ELSHRNRLLVQHFPFLREAENEGARTCNPVSYKLKTALAALNQWRNNASHYPLNQNHEKDFDLQPFFSFAI |
| SEQ ID NO: | EACKKRMREVFQPDDFYLLETNEKQFYTLHNENGFTEKGLYCFICFFLEKKYAFQFLAGIKGFKNTTDNKF |
| 4418 | RATLETFTEHCCRLPKPKLDSSDIKLDMLGELSRCPAPLFDLLDIEERKKFIREPEEVKPDESGDREEVQQVL |
| | MKRYDDRFPYFALRYFEEKNLLKGISFHIHIGRWIKSEHTKKIMGAERDRRLLKDIRTFGELKEFSPEHEPYR |
| | YKT |
| IMG_ | MNNPENQKEKTSIGTHPFYFGHYLNMARHNAYIILCALSKKYNFNIPDESEQNEAQLNHFKILNFAADKEK |
| 3300027566 | RPDELNAIKEDLQFHFPVLKAFQLSEFGKSFSDLLILLGDLRNRYSHVYYKKDFKHEVELRDILKQARKDAI |
| SEQ ID NO: | KRMNSVIPEEEFHHLVKVKESKIPFKFYLTERDRNTLTEKGVAFLCCLFLEKKFAFRFLSRLENFHRTEEKW |
| 4419 | ARATLETFTEYCCILPYDRLDSSDIKLDMINELNRCPRELYYLLDDSLKKKFLDKPEAEEDLTETSTDENAE |
| | YEKPTPLRRHSDRFPWFALNFFENVYPGIHFQVKLGRVLTQDLYDKTIASTSRDRRILKDINSLGHPFKYPVE |
| | SAPDSWYNIKQASETGLVNTAMRAGEIDQYSPKFRITEKRIGLFLNKPYTIPFWPNLSKEAKPKKSGPIITTC |
| | KASAIKPDAILSTYELQNR |
| IMG_ | METKTSKTSTLMTINKNPYYFGQYCNMAINNIYLILKKVSTKVYGEEKIKTPCNIIEFIEEIINNKRPDEINYIT |
| 3300014664 | YLILNYLPFLTYYYKPNINLIFILRTYIEALIELKNETTIYSYKHNFVKLPNINEEFTYAVTGTLQRITDIDEKDL |
| SEQ ID NO: | IPVKDNSSIILQKDNGLTSKGFYFLICLFLERKYAFSFLSKIEINTAFTDIQNRFFLEVYTQLCCKVPVFNSSNN |
| 4420 | DIILEIFNELNRCPLSVYYVLDKKDKASFRENYKNDRNEDIQASIMKRLESKFAYLTLKFFEETKSLDGISFH |
| | LKLGNIHQKEPHKKEIIGEVRTHHLLKEMKGFGPLAFYKEEEAYSFYTNNSEIESYSPKYRITGNRIGLSLNN |
| | DSSKNYKIIYENVSPDVILSINDLHSLFFYNYLYKQNLINESPKELIEKFMLSFKDFTEDLKTGKLTPVSIEHTI |
| | KKRRKHTEEEIQKLEEAKIELQQKLDPYQLKIKYIPDQSREYLFGYSPHSLEHRIKSKFDRMWKEAIH |
| GCA_ | MTHEPTQKALFGAFLNTAQHNAYLIINEVNEKLGKADVEEGKLDNDAYALHILTNKEIKTLPLKILSRRLL |
| 900113045.1_ | MEGFPFLCALGFSQDATQTDNFEALKTKLQKALKTLNEYRNFYSHYYEQSIDWQKCQFADLDLIREDFIKT |
| IMGtaxon_ | FTTYASEEQVSKSYEEVKKKKEELDKCKKGLSLAKRKKQTWEINDLKQKEEVLRDELLKAQQAHFQLKEK |
| 2636415974_ | KERKENLLKRYPNISGAELNKLIQDKESPYHSFWKKNNPHRFSKKGLVFFICLFLSKEQANLFLSSISGFKRT |
| annotated_ | DASYFWAVRAMYMHHCCHLPQPRLESSDMLLDILNELNRCPKVLYNLLSETNRAYFEKDINYKEGSVLQT |
| assembly_ | DEEGNLVTIQKMLRHQDRLPYFILKYLDETNAFPDLRFQIYLGKLVTDVYKKPKMLEKNELGELVEQDGQ |
| genomic_2 | RLILKEVHAFGKPSDFADKINLPKELEVNEIQDKYGEMKQEELKVGTIVQFSPQYHISSNRIALKLFKTKDG |
| SEQ ID NO: | KFYSEKPDNDKQARLIILNKNWFWF |
| 4421 | |
| UOPM01.1 | MERASFWFEVKKMLKIGCKFFLFLITHYIYKLTLECYLTITMSTFDQSEYLKSEHFQKGVKIESKKHSLIQSI |
| SEQ ID NO: | AEDLRRCPKILFNVITPSGKRQFLPTFGELQETDLIEDHSKIDLATDFEENERLAKPNIRSKNRFSEYALRYID |
| 4422 | EIGLLGNYHFQLDLGSFVLTQYKKNFLGSNVPRKVVDHAMTFSKLKDIVNEDEVRNKISHNVHGLVFEMF |
| | NPHYNIRNNKIAISSKLEYSTVFFNPNHDRKVAIKLRQPQPEAFISIHELPKLLLLDYLSKGKVEELIKNFIQSN |
| | RQKKLNIDFIKKVKSLLPGEDHWTIIERLPDNRFGSGYSDVQLEIISERKRVLNGVLNSYSLNVKQIPTRILDH |
| | WLNIQDSNIDLLFSNRIRSMKSDCLKRLQAFDVNSRHYTGRIPSYTEMAYFLVKDIVSMVISDSKKSKITSFY |
| | FKKLVDCILNYSDPEKRKLFFLIIASELRLLDLGGHPFLGRLDLHNISTTKDFYVSYLQEKGCKMVSQMDSY |
| | TQRMKLVDQSWLFTTFFQRKWNESSGMYKLFVRYPKMDMDIPLKIRRWYKPHSDLQSWLNKTSSSGSSN |
| | KRGKGVDLPANLFDKVICELLRAKLNDLNVAYKPDANYNELLKLWWSSCNDIVQTFYNLERQYFISGEVV |
| | KFHIGTCPNFKDYYSSALEAVFRRNVEERTLEQQKGSVLPDIQITDVEYPFKHTIAETEKKIRILQEQDQMML |
| | LMLRQLMEDDQLFSFSEGDSLLKDK |
| UOPK01.1 | MERASFWFEVKKMLKIGCKFFLFLITHYIYKLTLECYLTITMSTFDQSEYLKSEHFQKGVKIESKKHSLIQSI |
| SEQ ID NO: | AEDLRRCPKILFNVITPSGKRQFLPTFGELQETDLIEDHSKIDLATDFEENERLAKPNIRSKNRFSEYALRYID |
| 4423 | EIGLLGNYHFQLDLGSFVLTQYKKNFLGSNVPRKVVDHAMTFSKLKDIVNEDEVRNKISHNVHGLVFEMF |
| | NPHYNIRNNKIAISSKLEYSTVFFNPNHDRKVAIKLRQPQPEAFISIHELPKLLLLDYLSKGKVEELIKNFIQSN |
| | RQKKLNIDFIKKVKSLLPGEDHWTIIERLPDNRFGSGYSDVQLEIISERKRVLNGVLNSYSLNVKQIPTRILDH |
| | WLNIQDSNIDLLFSNRIRSMKSDCLKRLQAFDVNSRHYTGRIPSYTEMAYFLVKDIVSMVISDSKKSKITSFY |
| | FKKLVDCILNYSDPEKRKLFFLIIASELRLLDLGGHPFLGRLDLHNISTTKDFYVSYLQEKGCKMVSQMDSY |
| | TQRMKLVDQSWLFTTFFQRKWNESSGMYKLFVRYPKMDMDIPLKIRRWYKPHSDLQSWLNKTSSSGSSN |
| | KRGKGVDLPANLFDKVICELLRAKLNDLNVAYKPDANYNELLKLWWSSCNDIVQTFYNLERQYFISGEVV |
| | KFHIGTCPNFKDYYSSALEAVFRRNVEERTLEQQKGSVLPDIQITDVEYPFKHTIAETEKKIRILQEQDQMML |
| | LMLRQLMEDDQLFSFSEGDSLLKDK |
| OGRG01.1 | MGAIENKHIFAAYANLAIDGLIKTLNFIAKKLDTQKQLSSWDIKHVITLIDSIFDQNPQNNLEQVVEGYLPWI |
| SEQ ID NO: | KPIIEMKTPKKGERQSDKLCIEYKTIITAFASLLNDVRNYYTHYYHDPICIYPGGYDIPSSLNCIYDSAINIIKE |
| 4424 | RFQAEEKEMEHLRRYTRKKGRVVLKTEDDHFYYTLANNNDLSEKGYAFFISMFLERKYSYLFLKKLSGFK |
| | RGDSLQYRLTLEVFTALSTKPPVERLRTTKDTKQDRALDILNELSKIPIELYQTLEPKYREMYNETLQPTDAE |
| | DPYGLPDRSRIRFRSRFEAFALHFLDKQADFK |
| OBVQ01.1 | MGAIENKHIFAAYANLAIDGLIKTLNFIAKKLDTQKQLSSWDIKHVITLIDSIFDQNPQNNLEQVVEGYLPWI |
| SEQ ID NO: | KPIIEMKTPKKGERQSDKLCIEYKTIITAFASLLNDVRNYYTHYYHDPICIYPGGYDIPSSLNCIYDSAINIIKE |
| 4425 | RFQAEEKEMEHLRRYTRKKGRVVLKTEDDHFYYTLANNNDLSEKGYAFFISMFLERKYSYLFLKKLSGFK |
| | RGDSLQYRLTLEVFTALSTKPPVERLRTTKDTKQDRALDILNELSKIPIELYQTLEPKYREMYNETLQPTDAE |
| | DPYGLPDRSRIRFRSRFEAFALHFLDKQADFK |
| OBVO01.1_2 | MGAIENKHIFAAYANLAIDGLIKTLNFIAKKLDTQKQLSSWDIKHVITLIDSIFDQNPQNNLEQVVEGYLPWI |
| SEQ ID NO: | KPIIEMKTPKKGERQSDKLCIEYKTIITAFASLLNDVRNYYTHYYHDPICIYPGGYDIPSSLNCIYDSAINIIKE |
| 4426 | RFQAEEKEMEHLRRYTRKKGRVVLKTEDDHFYYTLANNNDLSEKGYAFFISMFLERKYSYLFLKKLSGFK |
| | RGDSLQYRLTLEVFTALSTKPPVERLRTTKDTKQDRALDILNELSKIPIELYQTLEPKYREMYNETLQPTDAE |
| | DPYGLPDRSRIRFRSRFEAFALHFLDKQADFK |
| ORUQ01.1 | MGAIENKHIFAAYANLAIDGLIKTLNFIAKKLDTQKQLSSWDIKHVITLIDSIFDQNPQNNLEQVVEGYLPWI |
| SEQ ID NO: | KPIIEMKTPKKGERQSDKLCIEYKTIITAFASLLNDVRNYYTHYYHDPICIYPGGYDIPSSLNCIYDSAINIIKE |
| 4427 | RFQAEEKEMEHLRRYTRKKGRVVLKTEDDHFYYTLANNNDLSEKGYAFFISMFLERKYSYLFLKKLSGFK |
| | RGDSLQYRLTLEVFTALSTKPPVERLRTTKDTKQDRALDILNELSKIPIELYQTLEPKYREMYNETLQPTDAE |
| | DPYGLPDRSRIRFRSRFEAFALHFLDKQADFKEIGFYTYLGNYFHNGYQKTRVDRETKDRYINFQLAGFCK |
| | NIQDISAKKLSEALNVKSIDISTDSIPDINSFEPYLVQSTPHYIVNGNNIGIKVLPEGKDTYPTIDEKGAKMPIA |
| | DFWLSKYELPAMLFYTYLRNNNIHKSHCPLSVKDIIERSIHKSTKQKHPEERSELMLRRVMKAIFWTDSKLN |
| | EVERIKSQKSAFGKRQHEILKAGRIAETLVRDMLWLQPSKNNGRDKVTEPNFQAIQVSLAYFGIRRNDLTEI |
| | FTRAGLINSSNPHPFLAQIGTNYTSLIEFYIAYLKERKVYFSRIQKKILQGKLNIQCHPLRDLQREPNKPQEKE |
| | EAIFLPRGLFNEAIINCLKKSKLKHLIESPTREKSPALNVSYLIQNYFRAYFEDQSQEFYAQPRNYRLFDNLSP |
| | NKGKSKSYLSLEQRIKKMEELRPSKIPVAEANKLLEKEDRLYRKNYNEICDNESIIRLYQIQDILLFMMTKEY |
| | LPSDLYNRINKYKLENVKGILNERVSYLIDLNPLKIQGEDIKI |
| UZSP01.1 | MGAIENKHIFAAYANLAIDGLIKTLNFIAKKLDTQKQLSSWDIKHVITLIDSIFDQNPQNNLEQVVEGYLPWI |
| SEQ ID NO: | KPIIEMKTPKKGERQSDKLCIEYKTIITAFASLLNDVRNYYTHYYHDPICIYPGGYDIPSSLNCIYDSAINIIKE |
| 4428 | RFQAEEKEMEHLRRYTRKKGRVVLKTEDDHFYYTLANNNDLSEKGYAFFISMFLERKYSYLFLKKLSGFK |
| | RGDSLQYRLTLEVFTALSTKPPVERLRTTKDTKQDRALDILNELSKIPIELYQTLEPKYREMYNETLQPTDAE |
| | DPYGLPDRSRIRFRSRFEAFALHFLDKQADFKEIGFYTYLGNYFHNGYQKTRVDRETKDRYINFQLAGFCK |
| | NIQDISAKKLSEALNVKSIDISTD |
| ORTU01.1 | MGAIENKHIFAAYANLAIDGLIKTLNFIAKKLDTQKQLSSWDIKHVITLIDSIFDQNPQNNLEQVVEGYLPWI |
| SEQ ID NO: | KPIIEMKTPKKGERQSDKLCIEYKTIITAFASLLNDVRNYYTHYYHDPICIYPGGYDIPSSLNCIYDSAINIIKE |
| 4429 | RFQAEEKEMEHLRRYTRKKGRVVLKTEDDHFYYTLANNNDLSEKGYAFFISMFLERKYSYLFLKKLSGFK |
| | RGDSLQYRLTLEVFTALSTKPPVERLRTTKDTKQDRALDILNELSKIPIELYQTLEPKYREMYNETLQPTDAE |
| | DPYGLPDRSRIRFRSRFEAFALHFLDKQADFKEIGFYTYLGNYFHNGYQKTRVDRETKDRYINFQLAGFCK |
| | NIQDISAKKLSEALNVKSIDISTDSIPDINSFEPYLVQSTPHYIVNGNNIGIKVLPEGKDTYPTIDEKGAKMPIV |
| | DFWLSKYELPAMLFYTYLRNNNIHKSHCPLSVKDIIERSIHKSTKQKHPEERSELMLRRVMKAIFWTDSKLN |
| | EVERIKSQKSAFGKRQHEILKAGRIAETLVRDMLWLQPSKNNGRDKVTEPNFQAIQVSLAYFGIRRNDLTEI |
| | FTRAGLINSSNPHPFLAQIGTNYTSLIEFYIAYLKERKVYFSRIQKKILQGKLNIQCHPLRDLQREPNKPQDKE |
| | EAIFLPRGLFNEAIFSR |
| UMHW01.1 | MGAIENKHIFAAYANLAIDGLIKTLNFIAKKLDTQKQLSSWDIKHVITLIDSIFDQNPQNNLEQVVEGYLPWI |
| SEQ ID NO: | KPIIEMKTPKKGERQSDKLCIEYKTIITAFASLLNDVRNYYTHYYHDPICIYPGGYDIPSSLNCIYDSAINIIKE |
| 4430 | RFQAEEKEMEHLRRYTRKKGRVVLKTEDDHFYYTLANNNDLSEKGYAFFISMFLERKYSYLFLKKLSGFK |
| | RGDSLQYRLTLEVFTALSTKPPVERLRTTKDTKQDRALDILNELSKIPIELYQTLEPKYREMYNETLQPTDAE |
| | DPYGLPDRSRIRFRSRFEAFALHFLDKQADFKEIGFYTYLGNYFHNGYQKTRVDRETKDRYINFQLAGFCK |
| | NIQDISAKKLSEALNVKSIDISTDSIPDINSFEPYLVQSTPHYIVNGNNIGIKVLPEGKDTYPTIDEKGAKMPIV |
| | DFWLSKYELPAMLFYTYLRNNNIHKSHCPLSVKDIIERSIHKSTKQKHPEERSELMLRRVMKAIFWTDSKLN |
| | EVERIKSQKSAFGKRQHEILKAGRIAETLVRDMLWLQPSKNNGRDKVTEPNFQAIQVSLAYFGIRRNDLTEI |
| | FTRAGLINSSNPHPFLAQIGTNYTSLIEFYIAYLKERKVYFSRIQKKILQGKLNIQCHPLRDLQREPNKPQDKE |
| | EAIFLPRGLFNEAIFSR |
| IMG_ | MGAIENKHIFAAYANLAIDGLIKTLNFIAKKLDTQKQLSSWDIKHVITLIDSIFDQNPQNNLEQVVEGYLPWI |
| 3300006464 | KPIIEMKTPKKGERQSDKLCIEYKTIITAFASLLNDVRNYYTHYYHDPICIYPGGYDIPSSLNCIYDSAINIIKE |
| SEQ ID NO: | RFQAEEKEMEHLRRYTRKKGRVVLKTEDDHFYYTLANNNDLSEKGYAFFISMFLERKYSYLFLKKLSGFK |
| 4431 | RGDSLQYRLTLEVFTALSTKPPVERLRTTKDTKQDRALDILNELSKIPIELYQTLEPKYREMYNETLQPTDAE |
| | DPYGLPDRSRIRFRSRFEAFALHFLDKQADFKEIGFYTYLGNYFHNGYQKTRVDRETKDRYINFQLAGFCK |
| | NIQDISAKKLSEALNVKSIDISTDSIPDINSFEPYLVQSTPHYIVNGNNIGIKVLPEGKDTYPTIDEKGAKMPIA |
| | DFWLSKYELPAMLFYTYLRNNNIHKSHCPLSVKDIIERSIHKSTKQKHPEERSELMLRRVMKAIFWTDSKLN |
| | EVERIKSQKSAFGKRQHEILKAGRIAETLVRDMLWLQPSKNNGRDKVTEPNFQAIQVSLAYFGIRRNDLTEI |
| | FTRAGLINSSNPHPFLASSKARRIYSVSFISLPPNKKAPNQIVQDKANRRSISCAKRKL |
| UZRL01.1 | MGAIENKHIFAAYANLAIDGLIKTLNFIAKKLDTQKQLSSWDIKHVITLIDSIFDQNPQNNLEQVVEGYLPWI |
| SEQ ID NO: | KPIIEMKTPKKGERQSDKLCIEYKTIITAFASLLNDVRNYYTHYYHDPICIYPGGYDIPSSLNCIYDSAINIIKE |
| 4432 | RFQAEEKEIEHLRRYTRKKGRVVLKTEDDHFYYTLVNNNDLSEKGYAFFISMFLERKYSYLFLKKLSGFKR |
| | GDSLQYRLTLEVFTALSTKPPVERLRTTKDTKQDRALDILNELSRIPIELYQTLEPKYREMYNETLQPTDAED |
| | PYGLPDRSRIRFRSRFEAFALHFLDKQADFKEIGFYTYLGNYFHNGYQKTRVDRETKDRYINFQLAGFCKNI |
| | QDISAKKLSEALNVKSIDISTDSIPDINSFEPYLVQSTPHYIVNGNNIGIKVLPEGKDTYPTIDEKGAKMPIADF |
| | WLSKYELPAMLFYTYLRNNNIHKSHCPLSVKDIIERSIHKSTKQKHPEERSELMLRRVMKAIFWTDSKLNEV |
| | ERIKSQKSAFGKRQHEILKAGRIAETLVRDMLWLQPSKNNGRDKVTEPNFQAIQVSLAYFGIRRNDLTEIFT |
| | RAGLINSSNPHPFLAQIGTT |
| OZUY01.1 | MGAIENKHIFAAYANLAIDGLIKTLNFIAKKLDTQKQLSSWDIKHVITLIDSIFDQNPQNNLEQVVEGYLPWI |
| SEQ ID NO: | KPIIEMKTPKKGERQSDKLCIEYKTIITAFASLLNDVRNYYTHYYHDPICIYPGGYDIPSSLNCIYDSAINIIKE |
| 4433 | RFQAEEKEIEHLRRYTRKKGRVVLKTEDDHFYYTLVNNNDLSEKGYAFFISMFLERKYSYLFLKKLSGFKR |
| | GDSLQYRLTLEVFTALSTKPPVERLRTTKDTKQDRALDILNELSRIPIELYQTLEPKYREMYNETLQPTDAED |
| | PYGLPDRSRIRFRSRFEAFALHFLDKQADFKEIGFYTYLGNYFHNGYQKTRVDRETKDRYINFQLAGFCKNI |
| | QDISAKKLSEALNVKSIDISTDSIPDINSFEPYLVQSTPHYIVNGNNIGIKVLPEGKDTYPTIDEKGAKMPIADF |
| | WLSKYELPAMLFYTYLRNNNIHKSHCPLSVKDIIERSIHKSTKQKHPEERSELMLRRVMKAIFWTDSKLNEV |
| | ERIKSQKSAFGKRQHEILKAGRIAETLVRDMLWLQPSKNNGRDKVTEPNFQAIQVSLAYFGIRRNDLTEIFT |
| | RAGLINSSNPHPFLAQIGTNYTSLIEFYIAYLKERKVYFSRIQKKILQGKLNIQCHPLRDLQREPNKPQDKEEA |
| | IFLPRGLFNEAIINCLKKSKLKQLIESPTREKSPALNVSYLIQNYFRTYFEDQSQEFYAQPRNYRLFDKLSPNK |
| | GKSKSYLSLEQRIKKMEELRPSKIPVAEANKLLEKEDRLYRKNYNEICDNESIIRLYQIQDILLFMMTKEYLP |
| | SDLYNRINKYKLENVKGILNERVSYLIDLNPLKIQGEDIKIKDYGKLFYIHHDTRISSLNKVLSKVKRSNSISS |
| | SCLLYTSPSPRD |
| UZOU01.1 | MGAIENKHIFAAYANLAIDGLIKTLNFIAKKLDTQKQLSSWDIKHVITLIDSIFDQNPQNNLEQVVEGYLPWI |
| SEQ ID NO: | KPIIEMKTPKKGERQSDKLCIEYKTIITAFASLLNDVRNYYTHYYHDPICIYPGGYDIPSSLNCIYDSAINIIKE |
| 4434 | RFQAEEKEIEHLRRYTRKKGRVVLKTEDDHFYYTLVNNNDLSEKGYAFFISMFLERKYSYLFLKKLSGFKR |
| | GDSLQYRLTLEVFTALSTKPPVERLRTTKDTKQDRALDILNELSRIPIELYQTLEPKYREMYNETLQPTDAED |
| | PYGLPDRSRIRFRSRFEAFALHFLDKQADFKEIGFYTYLGNYFHNGYQKTRVDRETKDRYINFQLAGFCKNI |
| | QDISAKKLSEALNVKSIDISTDSIPDINSFEPYLVQSTPHYIVNGNNIGIKVLPEGKDTYPTIDEKGAKMPIADF |
| | WLSKYELPAMLFYTYLRNNNIHKSHCPLSVKDIIERSIHKSTKQKHPEERSELMLRRVMKAIFWTDSKLNEV |
| | ERIKSQKSAFGKRQHEILKAGRIAETLVRDMLWLQPSKNNGRDKVTEPNFQAIQVSLAYFGIRRNDLTEIFT |
| | RAGLINSSNPHPFLAQIGTNYTSLIEFYIAYLKERKVYFSRIQKKILQGKLNIQCHPLRDLQREPNKPQDKEEA |
| | IFLPRGLFNEAIINCLKKSKLKQLIESPTREKSPALNVSYLIQNYFRTYFEDQSQEFYAQPRNYRLFDKLSPNK |
| | GKSKSYLSLEQRIKKMEELRPSKIPVAEANKLLEKEDRLYRKNYNEICDNESIIRLYQIQDILLFMMTKEYLP |
| | SDLYNRINKYKLENVKGILNERVSYLIDLNPLKIQGEDIKIKDYGKLFYIHHDTRISSL |
| OLEV01.1 | MGAIENKHIFAAYANLAIDGLIKTLNFIAKKLDTQKQLSSWDIKHVITLIDSIFDQNPQNNLEQVVEGYLPWI |
| SEQ ID NO: | KPIIEMKTPKKGERQSDKLCIEYKTIITAFASLLNDVRNYYTHYYHDPICIYPGGYDIPSSLNCIYDSAINIIKE |
| 4435 | RFQAEEKEIEHLRRYTRKKGRVVLKTEDDHFYYTLVNNNDLSEKGYAFFISMFLERKYSYLFLKKLSGFKR |
| | GDSLQYRLTLEVFTALSTKPPVERLRTTKDTKQDRALDILNELSRIPIELYQTLEPKYREMYNETLQPTDAED |
| | PYGLPDRSRIRFRSRFEAFALHFLDKQADFKEIGFYTYLGNYFHNGYQKTRVDRETKDRYINFQLAGFCKNI |
| | QDISAKKLSEALNVKSIDISTDSIPDINSFEPYLVQSTPHYIVNGNNIGIKVLPEGKDTYPTIDEKGAKMPIADF |
| | WLSKYELPAMLFYTYLRNNNIHKSHCPLSVKDIIERSIHKSTKQKHPEERSELMLRRVMKAIFWTDSKLNEV |
| | ERIKSQKSAFGKRQHEILKAGRIAETLVRDMLWLQPSKNNGRDKVTEPNFQAIQVSLAYFGIRRNDLTEIFT |
| | RAGLINSSNPHPFLAQIGTNYTSLIEFYIAYLKERKVYFSRIQKKILQGKLNIQCHPLRDLQREPNKPQDKEEA |
| | IFLPRGLFNEAIINCLKKSKLKQLIESPTREKSPALNVSYLIQNYFRTYFEDQSQEFYAQPRNYRLFDKLSPNK |
| | GKSKSYLSLEQRIKKMEELRPSKIPVAEANKLL |
| OLEP01.1 | MGAIENKHIFAAYANLAIDGLIKTLNFIAKKLDTQKQLSSWDIKHVITLIDSIFDQNPQNNLEQVVEGYLPWI |
| SEQ ID NO: | KPIIEMKTPKKGERQSDKLCIEYKTIITAFASLLNDVRNYYTHYYHDPICIYPGGYDIPSSLNCIYDSAINIIKE |
| 4436 | RFQAEEKEIEHLRRYTRKKGRVVLKTEDDHFYYTLVNNNDLSEKGYAFFISMFLERKYSYLFLKKLSGFKR |
| | GDSLQYRLTLEVFTALSTKPPVERLRTTKDTKQDRALDILNELSRIPIELYQTLEPKYREMYNETLQPTDDED |
| | PYGLPDRSRIRFRSRFEAFALHFLDKQADFKEIGFYTYLGNYFHNGYQKTRVDRETKDRYINFQLAGFCKNI |
| | QDISAKKLSEALNVKSIDISTDSIPDINSFEPYLVQSTPHYIVNGNNIGIKVLPEGKDTYPTIDEKGAKMPIADF |
| | WLSKYELPAMLFYTYLRNNNIHKSHCPLSVKDIIERSIHKSTKQKHPEERSELMLRRVMKAIFWTDSKLNEV |
| | ERIKSQKSAFGKRQHEILKAGRIAETLVRDMLWLQPSKNNGRDKVTEPNFQAIQVSLAYFGIRRNDLTEIFT |
| | RAGLINSSNPHPFLAQIGTNYTSLIEFYIAYLKERKVYFSRIQKKILQGKLNIQCHPLRDLQREPNKPQDKEEA |
| | IFLPRGLFNEAIINCLKKSKLKQLIESPTREKSPALNVSYLIQNYFRTYFEDQSQEFYAQPRNYRLFDKLSPNK |
| | GKSKSYLSLEQRIKKMEELRPSKIPVAEANKLLEKE |
| GCA_ | MGAIENKHIFAAYANLAIDGLIKTLNFIAKKLDTQKQLSSWDIKHVITLIDSIFDQNPQNNLEQVVEGYLPWI |
| 003462945.1_ | KPIIEMKTPKKGERQSDKLCIEYKTIITAFASLLNDVRNYYTHYYHDPICIYPGGYDIPSSLNCIYDSAINIIKE |
| ASM346294v1_ | RFQAEEKEMEHLRRYTRKKGRVVLKTEDDHFYYTLANNNDLSEKGYAFFISMFLERKYSYLFLKKLSGFK |
| genomic | RGDSLQYRLTLEVFTALSTKPPVERLRTTKDTKQDRALDILNELSRIPIELYQTLEPKYREMYNETLQPTDAE |
| SEQ ID NO: | DPYGLPDRSRIRFRSRFEAFALHFLDKQADFKEIGFYTYLGNYFHNGYQKTRVDRETKDRYINFQLAGFCK |
| 4437 | NIQDISAKKLSEALNVKSIDISTDSIPDINSFEPYLVQSTPHYIVNGNNIGIKVLPEGKDTYPTIDEKGAKMPIA |
| | DFWLSKYELPAMLFYTYLRNNNIHKSHCPLSVKDIIERSIHKSTKQKHPEERSELMLRRVMKAIFWTDSKLN |
| | EVERIKSQKSAFGKRQHEILKAGRIAETLVRDMLWLQPSKNNGRDKVTEPNFQAIQVSLAYFGIRRNDLTEI |
| | FTRAGLINSSNPHPFLAQIGTNYTSLIEFYIAYLKERKVYFSRIQKKILQGKLNIQCHPLRDLQREPNKPQDKE |
| | EAIFLPRGLFNEAIINCLKKSKLKQLIESPTREKSPALNVSYLIQNYFRTYFEDQSQEFYAQPRNYRLFDKLSP |
| | NKGKSKSYLSLEQRIKKMEELRPSKIPVAEANKLLEKEDRLYRKNYNEICDNESIIRLYQIQDILLFMMTKEY |
| | LPSDLYNRINKYKLENVKGIFK |
| UYDU01.1 | MGAIENKHIFAAYANLAIDGLIKTLNFIAKKLDTQKQLSSWDIKHVITLIDSIFDQNPQNNLEQVVEGYLPWI |
| SEQ ID NO: | KPIIEMKTPKKGERQSDKLCIEYKTIITAFASLLNDVRNYYTHYYHDPICIYPGGYDIPSSLNCIYDSAINIIKE |
| 4438 | RFQAEEKEMEHLRRYTRKKGRVVLKTEDDHFYYTLANNNDLSEKGYAFFISMFLERKYSYLFLKKLSGFK |
| | RGDSLQYRLTLEVFTALSTKPPVERLRTTKDTKQDRALDILNELSRIPIELYQTLEPKYREMYNETLQPTDAE |
| | DPYGLPDRSRIRFRSRFEAFALHFLDKQADFKEIGFYTYLGNYFHNGYQKTRVDRETKDRYINFQLAGFCK |
| | NIQDISAKKLSEALNVKSIDISTDSIPDINSFEPYLVQSTPHYIVNGNNIGIKVLPEGKDTYPTIDEKGAKMPIA |
| | DFWLSKYELPAMLFYTYLRNNNIHKSHCPLSVKDIIERSIHKSTKQKHPEERSELMLRRVMKAIFWTDSKLN |
| | EVERIKSQKSAFGKRQHEILKAGRIAETLVRDMLWLQPSKNNGRDKVTEPNFQAIQVSLAYFGIRRNDLTEI |
| | FTRAGLINSSNPHPFLAQIGTNYTSLIEFYIAYLKERKVYFSRIQKKILQGKLNIQCHPLRDLQREPNKPQEKE |
| | EAIFLPRGLFNEAIINCLKKSKLKQLIESPTREKSPALNVSYLILNYFRTYFEDQSQEFYAQPRNYRLFDKLSP |
| | NKGKSKSYLSLEQRIKKMEELRPSKIPVAEANKLLEKEDRLYRKNYNEICDNESI |
| OPWW01.1 | MGAIENKHIFAAYANLAIDGLIKTLNFIAKKLDTQKQLSSWDIKHVITLIDSIFDQNPQNNLEQIVEGYLPWI |
| SEQ ID NO: | KPIIEMKTPKKGERQSDKLCIEYKTIITAFASLLNDVRNYYTHYYHDPICIYPRGYDIPSSLNCIYDSAINIIKE |
| 4439 | RFQAEEKEMEHLRRYTRKKGRVVLKTEDDHFYYTLVNNNGLSEKGYAFFISMFLERKYSYLFLKKLSGFK |
| | RGDSLQYRLTLEVFTALSTKPPVERLRTTKDTKQDRALDILNELSKIPIELYQTLEPKYREMYNETLQPTDAE |
| | DPYGLPDRSRIRFRSRFETFALHFLDKQADFKEIGFYTYLGNYFHNGYQKTRVDRETKDRYINFQLAGFCK |
| | NIQDISAKKLSEALNVKSIDISTDSIPDINSFEPYLVQSTPHYIVNGNNIGIKVLPEGKDTYPTIDEKGAKMPIA |
| | DFWLSKYELPAMLFYTYLRNNNIHKSHCPLSVKDIIERSIHKSTKQKHPEERSELMLRRVMKAIFWTDSKLN |
| | EVERIKSQKSAFGKRQHEILKAGRIAETLVRDMLWLQPSKNNGRDKVTEPNFQAIQVSLAYFGIRRNDLTEI |
| | FTRAGLINSSNPHPFLAQIGTNYTSLIEFYIAYLKERKVYFSRIQKKILQGKLNIQCHPLRDLQREPNKPQDKE |
| | EAIFLPRGLFNEAIINCLKKSKLKQLIESPTREKSPALNVSYLIQNYFRTYFEDQSQEFYAQPRNYRLFDKLSP |
| | NKGKSKSYLSLEQRIKKMEELRPSKIPVAEANKLLEKEDRLYRKNYNEICDNESIIRLYQIQDILLFMMTKEY |
| | LPSDLYNRINKYKLENVKGILNERVSYLIDLNLLKIQGEDIKIKDYGKLFYIHHDTRISSLNKVLSKVKR |
| ORLB01.1 | MGAIENKHIFAAYANLAIDGLIKTLNFIAKKLDTQKQLSSWDIKHVITLIDSIFDQNPQNNLEQIVEGYLPWI |
| SEQ ID NO: | KPIIEMKTPKKGERQSDKLCIEYKTIITAFASLLNDVRNYYTHYYHDPICIYPRGYDIPSSLNCIYDSAINIIKE |
| 4440 | RFQAEEKEMEHLRRYTRKKGRVVLKTEDDHFYYTLVNNNGLSEKGYAFFISMFLERKYSYLFLKKLSGFK |
| | RGDSLQYRLTLEVFTALSTKPPVERLRTTKDTKQDRALDILNELSKIPIELYQTLEPKYREMYNETLQPTDAE |
| | DPYGLPDRSRIRFRSRFETFALHFLDKQADFKEIGFYTYLGNYFHNGYQKTRVDRETKDRYINFQLAGFCK |
| | NIQDISAKKLSEALNVKSIDISTDSIPDINSFEPYLVQSTPHYIVNGNNIGIKVLPEGKDTYPTIDEKGAKMPIA |
| | DFWLSKYELPAMLFYTYLRNNNIHKSHCPLSVKDIIERSIHKSTKQKHPEERSELMLRRVMKAIFWTDSKLN |
| | EVERIKSQKSAFGKRQHEILKAGRIAETLVRDMLWLQPSKNNGRDKVTEPNFQAIQVSLAYFGIRRNDLTEI |
| | FTRAGLINSSNPHPFLAQIGTNYTSLIEFYIAYLKERKVYFSRIQKKILQGKLNIQCHPLRDLQREPNKPQDKE |
| | EAIFLPRGLFNEAIINCLKKSKLKQLIESPTREKSPALNVSYLIQNYFRTYFEDQSQEFYAQPRNYRLFDKLSP |
| | NKGKSKSYLSLEQRIKKMEELRPSKIPVAEANKLLEKEDRLYRKNYNEICDNESIIRLYQIQDILLFMMTKEY |
| | LPSDLYNRIN |
| UZST01.1 | MGAIENKHIFAAYANLAIDGLIKTLNFIAKKLDTQKQLSSWDIKHVITLIDSIFDQNPQNNLEQIVEGYLPWI |
| SEQ ID NO: | KPIIEMKTPKKGERQSDKLCIEYKTIITAFASLLNDVRNYYTHYYHDPICIYPRGYDIPSSLNCIYDSAINIIKE |
| 4441 | RFQAEEKEMEHLRRYTRKKGRVVLKTEDDHFYYTLVNNNGLSEKGYAFFISMFLERKYSYLFLKKLSGFK |
| | RGDSLQYRLTLEVFTALSTKPPVERLRTTKDTKQDRALDILNELSKIPIELYQTLEPKYREMYNETLQPTDAE |
| | DPYGLPDRSRIRFRSRFETFALHFLDKQADFKEIGFYTYLGNYFHNGYQKTRVDRETKDRYINFQLAGFCK |
| | NIQDISAKKLSEALNVKSIDISTDSIPDINSFEPYLVQSTPHYIVNGNNIGIKVLPEGKDTYPTIDEKGAKMPIA |
| | DFWLSKYELPAMLFYTYLRNNNIHKSHCPLSVKDIIERSIHKSTKQKHPEERSELMLRRVMKAIFWTDSKLN |
| | EVERIKSQKSAFGKRQHEILKAGRIAETLVRDMLWLQPSKNNGRDKVTEPNFQAIQVSLAYFGIRRNDLTEI |
| | FTRAGLINSSNPHPFLAQIGTNYTSLIEFYIAYLKERKVYFSRIQKKILQGKLNIQCHPLRDLQREPNKPQDKE |
| | EAIFLPRGLFNEAIINCLKKSKLKQLIESPTREKSPALNVSYLIQNYFRTYFEDQSQEFYAQPRNYRLFDKLSP |
| | NKGKSKSYLSLEQRIKKMEELRPSKIPVAEANKLLEKEDRLYRKNYNEICDNESIIRLYQIQDILLFMMTKEY |
| | LPSDLYNRINKYKLENVKGILNERVSYLIDLNLLKIQGEDIKIKDYGKLFYIHHDTRISSLNKVLSKVK |
| OYVX01.1 | MGAIENKHIFAAYANLAIDGLIKTLNFIAKKLDTQKQLSSWDIKHVITLIDSIFDQNPQNNLEQIVEGYLPWI |
| SEQ ID NO: | KPIIEMKTPKKGERQSDKLCIEYKTIITAFASLLNDVRNYYTHYYHDPICIYPRGYDIPSSLNCIYDSAINIIKE |
| 4442 | RFQAEEKEMEHLRRYTRKKGRVVLKTEDDHFYYTLVNNNGLSEKGYAFFISMFLERKYSYLFLKKLSGFK |
| | RGDSLQYRLTLEVFTALSTKPPVERLRTTKDTKQDRALDILNELSKIPIELYQTLEPKYREMYNETLQPTDAE |
| | DPYGLPDRSRIRFRSRFETFALHFLDKQADFKEIGFYTYLGNYFHNGYQKTRVDRETKDRYINFQLAGFCK |
| | NIQDISAKKLSEALNVKSIDISTDSIPDINSFEPYLVQSTPHYIVNGNNIGIKVLPEGKDTYPTIDEKGAKMPIA |
| | DFWLSKYELPAMLFYTYLRNNNIHKSHCPLSVKDIIERSIHKSTKQKHPEERSELMLRRVMKAIFWTDSKLN |
| | EVERIKSQKSAFGKRQHEILKAGRIAETLVRDMLWLQPSKNNGRDKVTEPNFQAIQVSLAYFGIRRNDLTEI |
| | FTRAGLINSSNPHPFLAQIGTNYTSLIEFYIAYLKERKVYFSRIQKKILQGKLNIQCHPLRDLQREPNKPQDKE |
| | EAIFLPRGLFNEAIINCLKKSKLKQLIESPTREKSPALNVSYLIQNYFRTYFEDQSQEFYAQPRNYRLFDKLSP |
| | NKGKSKSYLSLEQRIKKMEELRPSKIPVAEANKLLEKEDRLYRKNYNEICDNESIIRLYQIQDILLFMMTKEY |
| | LPSDLYNRINKYKLENVKGILNERVSYLIDLNLLKIQGEDIKIKDYGKLF |
| ORTO01.1 | MGAIENKHIFAAYANLAIDGLIKTLNFIAKKLDTQKQLSSWDIKHVITLIDSIFDQNPQNNLEQIVEGYLPWI |
| SEQ ID NO: | KPIIEMKTPKKGERQSDKLCIEYKTIITAFASLLNDVRNYYTHYYHDPICIYPRGYDIPSSLNCIYDSAINIIKE |
| 4443 | RFQAEEKEMEHLRRYTRKKGRVVLKTEDDHFYYTLVNNNGLSEKGYAFFISMFLERKYSYLFLKKLSGFK |
| | RGDSLQYRLTLEVFTALSTKPPVERLRTTKDTKQDRALDILNELSKIPIELYQTLEPKYREMYNETLQPTDAE |
| | DPYGLPDRSRIRFRSRFETFALHFLDKQADFKEIGFYTYLGNYFHNGYQKTRVDRETKDRYINFQLAGFCK |
| | NIQDISAKKLSEALNVKSIDISTDSIPDINSFEPYLVQSTPHYIVNGNNIGIKVLPEGKDTYPTIDEKGAKMPIA |
| | DFWLSKYELPAMLFYTYLRNNNIHKSHCPLSVKDIIERSIHKSTKQKHPEERSELMLRRVMKAIFWTDSKLN |
| | EVERIKSQKSAFGKRQHEILKAGRIAETLVRDMLWLQPSKNNGRDKVTEPNFQAIQVSLAYFGIRRNDLTEI |
| | FTRAGLINSSNPHPFLAQIGTNYTSLIEFYIAYLKERKVYFSRIQKKILQGKLNIQCHPLRDLQREPNKPQDKE |
| | EAIFLPRGLFNEAIINCLKKSKLKQLIESPTREKSPALNVSYLIQNYFRTYFEDQSQEFYAQPRNYRLFDKLSP |
| | NKGKSKSYLSLEQRIKKMEELRPSKIPVAEANKLLEKEDRLYRKNYNEICDNESIIRLYQIQDILLFMMTKEY |
| | LPSDLYNRINKYKLENVKGILNE |
| OHBF01.1 | MGAIENKHIFAAYANLAIDGLIKTLNFIAKKLDTQKQLSSWDIKHVITLIDSIFDQNPQNNLEQVVEGYLPWI |
| SEQ ID NO: | KPIIEMKTPKKGERQSDKLCIEYKTIITAFASLLNDVRNYYTHYYHDPICIYPRGYDIPSSLNCIYDSAINIIKE |
| 4444 | RFQAEEKEMEHLRRYTRKKGRVVLKTEDDHFYYTLANNNDLSEKGYAFFISMFLERKYSYLFLKKLSGFK |
| | RGDSLQYRLTLEVFTALSTKPPVERLRTTKDTKQDRALDILNELSKIPIELYQTLEPKYREMYNETLQPTDAE |
| | DPYGLPDRSRIRFRSRFETFALHFLDKQADFKEIGFYTYLGNYFHNGYQKTRVDRETKDRYINFQLAGFCK |
| | NIQDISAKKLSEALNVKSIDISTDSIPDINSFEPYLVQSTPHYIVNGNNIGIKVLPEGKDTYPTIDEKGAKMPIA |
| | DFWLSKYELPAMLFYTYLRNNNIHKSHCPLSVKDIIERSIHKSTKQKHPEERSELMLRRVMKAIFWTDSKLN |
| | EVERIKSQKSAFGKRQHEILKAGRIAETLVRDMLWLQPSKNNGRDKVTEPNFQAIQVSLAYFGIRRNDLTEI |
| | FTRAGLINSSNPHPFLAQIGTNYTSLIEFYIAYLKERKVYFSRIQKKILQGKLNIQCHPLRDLQREPNKPQDKE |
| | EAIFLPRGLFNEAIINCLKKSKLKQLIESPTREKSPALNVSYLIQNYFRTYFEDQSQEFYAQPRNYRLFDKLSP |
| | NKGKSKSYLSLEQRIKKMEELRPSKIPVAEANKLLEKEDRL |
| OXOU01.1 | MGAIKNKHIFAAYANLAIDGLIKTLNFIAKKLDTQKQLSSWDIKHVITLIDSIFDQNPQNNLEQVVEGYLPWI |
| SEQ ID NO: | KPIIEMKTPKKGERQSDKLCIEYKTIITAFASLLNDVRNYYTHYYHDPICIYPGGYDIPSSLNCIYDSAINIIKE |
| 4445 | RFQAEEKEMEHLRRYTRKKGRVVLKTEDDHFYYTLANNNDLSEKGYAFFISMFLERKYSYLFLKKLSGFK |
| | RGDSLQYRLTLEVFTALSTKPPVERLRTTKDTKQDRALDILNELSKIPIELYQTLEPKYREMYNETLQPTDAE |
| | DPYGLPDRSRIRFRSRFEAFALHFLDKQADFKEIGFYTYLGNYFHNGYQKTRVDRETKDRYINFQLAGFCK |
| | NIQDISAKKLSEALNVKSIDISTDSIPDINSFEPYLVQSTPHYIVNGNNIGIKVLPEGKDTYPTIDEKGAKMPIA |
| | DFWLSKYELPAMLFYTYLRNNNIHKSHCPLSVKDIIERSIHKSTKQKHPEERSELMLRRVMKAIFWTDSKLN |
| | EVERIKSQKSAFGKRQHEILKAGRIAETLVRDMLWLQPSKNNGRDKVTEPNFQAIQVSLAYFGIRRNDLTEI |
| | FTRAGLINSSNPHPFLAQIGTNYTSLIEFYIAYLKERKVYFSRIQKKILQGKLNIQCHPLRDLQREPNKPQDKE |
| | EAIFLPRGLFNEAIINCLKKSKLKQLIESPTREKSPALNVSYLIQNYFRTYFEDQSQEFYAQPRNYRLFDKLSP |
| | NKGKSKSYLSLEQRIKKMEELRPSKIPVAEANKLLEKEDRLYRKNYNEICDNESIIRLYQIQDILLFMMTKEY |
| | LPSDCLLYTSPSPRDA |
| ULRQ01.1 | LDTQKQLSSWDIKHVITLIDSIFDQNPQNNLEQVVEGYLPWIKPIIEMKTPKKGERQSDKLCIEYKTIITAFAS |
| SEQ ID NO: | LLNDVRNYYTHYYHDPICIYPGGYDIPSSLNCIYDSAINIIKERFQAEEKEMEHLRRYTRKKGRVVLKTEDD |
| 4446 | HFYYTLANNNDLSEKGYAFFISMFLERKYSYLFLKKLSGFKRGDSLQYRLTLEVFTALSTKPPVERLRTTKD |
| | TKQDRALDILNELSRIPIELYQTLEPKYREMYNETLQPTDAEDPYGLPDRSRIRFRSRFEAFALHFLDKQADF |
| | KEIGFYTYLGNYFHNGYQKTRVDRETKDRYINFQLAGFCKNIQDISAKKLSEALNVKSIDISTDSIPDINSFEP |
| | YLVQSTPHYIVNGNNIGIKVLPEGKDTYPTIDEKGAKMPIADFWLSKYELPAMLFYTYLRNNNIHKSHCPLS |
| | VKDIIERSIHKSTKQKHPEERSELMLRRVMKAIFWTDSKLNEVERIKSQKSAFGKRQHEILKAGRIAETLVR |
| | DMLWLQPSKNNGRDKVTEPNFQAIQVSLAYFGIRRNDLTEIFTRAGLINSSNPHPFLAQIGTNYTSLIEFYIA |
| | YLKERKVYFSRIQKKILQGKLNIQCHPLRDLQREPNKPQDKEEAIFLPRGLFNEAIINCL |
| OJZH01.1 | MGAIENKHIFAAYANLAIDGLIKTLNFIAKKLDTQKQLSSWDIKHVITLIDSIFDQNPQNNLEQIVEGYLPWI |
| SEQ ID NO: | KPIIEMKTPKKGERQSDKLCIEYKTIITAFASLLNDVRNYYTHYYHDPICIYPGGYDIPSSLNCIYDSAINIIKE |
| 4447 | RFQAEEKEMEHLRRYTRKKGRVVLKTEDDHFYYTLANNNDLSEKGYAFFISMFLERKYSYLFLKKLSGFK |
| | RGDSLQYRLTLEVFTALSTKPPVERLRTTKDTKQDRALDILNELSKIPIELYQTLEPKYREMYNETLQPTDAE |
| | DPYGLPDRSRIRFRSRFETFALHFLDKQADFKEIGFYTYLGNYFHNGYQKTRVDRETKDRYINFQLAGFCK |
| | NIQDISAKKLSEALNVKSIDISTDSIPDINSFEPYLVQSMPHYIVNGNNIGIKVLPEGKDTYPTIDEKGAKMPIA |
| | DFWLSKYELPAMLFYTYLRNNNIHKSHCPLSVKDIIERSIHKSTKQKHPEERSELMLRRVMKAIFWTDSKLN |
| | EVERIKSQKSAFGKRQHEILKAGRIAEMLVRDMLWLQPSKNNGRDKVTEPNFQAIQVSLAYFGIRRNDLTEI |
| | FTRAGLINSSNPHPFLAQIGTNYTSLIEFYIAYLKERKVYFSRIQKKILQGKLNIQCHPLRDLQREPNKPQEKE |
| | EAIFLPRGLFNEAIINCLKKSKLKQLIESPTREKSPALNVSYLIQNYFRTYFEDQSQEFYAQPRNYRLFDKLSP |
| | NKGKSKSYLSLEQRIKKMEELRPSKIPVAEANKLLEKEDRLYRKNYNEICDNESIIRLYQIQDILLFMMTKEY |
| | LPSDLYNRINKYKLENVKG |
| UXJA01.1 | MGAIENKHIFAAYANLAIDGLIKTLNFIAKKLDTQKQLSSWDIKHVITLIDSIFDQNPQNNLEQIVEGYLPWI |
| SEQ ID NO: | KPIIEMKTPKKGERQSDKLCIEYKTIITAFASLLNDVRNYYTHYYHDPICIYPGGYDIPSSLNCIYDSAINIIKE |
| 4448 | RFQAEEKEMEHLRRYTRKKGRVVLKTEDDHFYYTLVNNNDLSEKGYAFFISMFLERKYSYLFLKKLSGFK |
| | RGDSLQYRLTLEVFTALSTKPPVERLRTTKDTKQDRALDILNELSKIPIELYQTLEPKYREMYNETLQPTDAE |
| | DPYGLPDRSRIRFRGRFEAFALHFLDKQADFKEIGFYTYLGNYFHNGYQKTRVDRETKDRYINFQLAGFCK |
| | NIQDISAKKLSEVLNVKSIDISTDSIPDINSFEPYLVQSTPHYIVNGNNIGIKVLPEGKDTYPTIDEKGAKMPIA |
| | DFWLSKYELPAMLFYTYLRNNNIHKSHCPLSVKDIIERSIHKSTKQKHPEERSELMLRRVMKAIFWTDSKLN |
| | EVERIKSQKSAFGKRQHEILKAGRIAETLVRDMLWLQPSKNNGRDKVTEPNFQAIQVSLAYFGIRRNDLTEI |
| | FTRAGLINSSNPHPFLAQIGTNYTSLIEFYIAYLKERKVYFSRIQKKILQGKLNIQCHPLRDLQREPNKPQDKE |
| | EVTFLPRGLFNEAIINCLKKSKIKQLIESPTREKSPALNVSYLIQNYFKTYFEDQSDEFYAQPRNYCS |
| IMG_ | MGAIKNKHIFAAYANLAIDGLIKTLNFIAKKLDTQKQLSSWDIKHVITLIDSIFDQNPQNNLEQVVEGYLPWI |
| 3300014947 | KPIIEMKTPKKGERQSDKLCIEYKTIITAFASLLNDVRNYYTHYYHDPICIYPGGYDIPSSLNCIYDSAINIIKE |
| SEQ ID NO: | RFQAEEKEMEHLRRYTRKKGRVVLKTEDDHFYYTLANNNDLSEKGYAFFISMFLERKYSYLFLKKLSGFK |
| 4449 | RGDSLQYRLTLEVFTALSTKPPVERLRTTKDTKQDRALDILNELSKIPIELYQTLEPKYREMYNETLQPTDAE |
| | DPYGLPDRSRIRFRSRFEAFALHFLDKQADFKEIGFYTYLGNYFHNGYQKTRVDRETKDRYINFQLAGFCK |
| | NIQDISAKKLSEALNVKSIDISTDSIPDINSFEPYLVQSTPHYIVNGNNIGIKVLPEGKDTYPTIDEKGAKMPIA |
| | DFWLSKYELPAMLFYTYLRNNNIHKSHCPLSVKDIIERSIHKSTKQKHPEERSELMLRRVMKAIFWTDSKLN |
| | EVERIKSQKSAFGKRQHEILKAGRIAETLVRDMLWLQPSKNNGRDKVTEPNFQAIQVSLAYFGIRRNDLTEI |
| | FTRAGLINSSNPHPFLAQIGTNYTSLIEFYIAYLKERKXXXXIFHEYKRKFSKGN |
| UZJI01.1 | MGAIENKHIFAAYANLAIDGLIKTLNFIAKKLDTQKQLSSWDIKHVITLIDSIFDQNPQNNLEQVVEGYLPWI |
| SEQ ID NO: | KPIIEMKTPKKGERQSDKLCIEYKTIITAFASLLNDVRNYYTHYYHDPICIYPGGYDIPSSLNCIYDSAINIIKE |
| 4450 | RFQAEEKEMEHLRRYTRKKGRVVLKTEDDHFYYTLANNNDLSEKGYAFFISMFLERKYSYLFLKKLSGFK |
| | RGDSLQYRLTLEVFTALSTKPPVERLRTTKDTKQDRALDILNELSRIPIELYQTLEPKYREMYNETLQPTDAE |
| | DPYGLPDRSRIRFRSRFEAFALHFLDKQADFKEIGFYTYLGNYFHNGYQKTRVDRETKDRYINFQSQAFVK |
| | TSKISPQRNYRRH |
| OZEI01.1 | MGAIENKHIFAAYANLAIDGLIKTLNFIAKKLDTQKQLSSWDIKHVITLIDSIFDQNPQNNLEQIVEGYLPWI |
| SEQ ID NO: | KPIIEMKTPKKGERQSDKLCIEYKTIITAFASLLNDVRNYYTHYYHDPICIYPRGYDIPSSLNCIYDSAINIIKE |
| 4451 | RFQAEEKEMEHLRRYTRKKGRVVLKTEDDHFYYTLVNNNGLSEKGYAFFISMFLERKYSYLFLKKLSGFK |
| | RGDSLQYRLTLEVFTALSTKPPVERLRTTKDTKQDRALDILNELSKIPIELYQTLEPKYREMYNETLQPTDAE |
| | DPYGLPDRSRIRFRSRFETFALHFLDKQADFKEIGFYTYLGNYFHNGYQKTRVDRETKDRYINFQLAGFCK |
| | NIQDISAKKLSEALNVKSIDISTDSIPDINSFEPYLVQSTPHYIVNGNNIGIKVLPEGKDTYPTIDEKGAKMPIA |
| | DFWLSKYELPAMLFYTYLRNNNCLLYTSPS |
| OJMI01.1 | MGAIENKHIFAAYANLAIDGLIKTLNFIAKKLDTQKQLSSWDIKHVITLIDSIFDQNPQNNLEQVVEGYLPWI |
| SEQ ID NO: | KPIIEMKTPKKGERQSDKLCIEYKTIITAFASLLNDVRNYYTHYYHDPICIYPRGYDIPSSLNCIYDSAINIIKE |
| 4452 | RFQAEEKEMEHLRNYTLVNNNGLSEKGYAFFISKFLERKYSYLFLKKLSGFKRGDSLQYRLTLEVFTALST |
| | KPPVERLRTTKDTKQDRALDILNELSRIPIELYQTLEPKYREMYNETLQPTDAEDPYGLPDRSRIRFRSRFEA |
| | FALHFLDKQADFKEIGFYTYLGNYFHNGYQKTRVDRETKDRYINFQLAGFCKNIQDISAKKLSEALNVKSI |
| | DISTDSIPDINSFEPYLVQSTPHYIVNGNNIGIKVLPEGKDTYPTIDEKGAKMPIADFWLSKYELPAMLFYTYL |
| | RNNNIHKSHCPLSVKDIIERSIHKSTKQKHPEERSELMLRRVMKAIFWTDSKLNEVERIKSQKSAFGKRQHEI |
| | LKAGRIAETLVRDMLWLQPSKNNGRDKVTEPNFQAIQVSLAYFGIRRNDLTEIFTRAGLINSSNPHPFLAQIG |
| | TNYTSLIEFYIAYLKERKVYFSRIQKKILQGKLNIQCHPLRDLQREPNKPQEKEEAIFLPRGLFNEAIINCLKK |
| | SKLKHLIESPTREKSPALNVSYLIHNYFRAYFEDQSQEFYAQPRNYRLFDKLSPNKGKSKSYLSLEQRIKKM |
| | EELRTKAIQDSCCRS |
| CDZK01.1 | MGAIENKHIFAAYANLAIDGLIKTLNFIAKKLDTQKQLSSWDIKHVITLIDSIFDQNPQNNLEQVVEGYLPWI |
| SEQ ID NO: | KPIIEMKTPKKGERQSDKLCIEYKTIITAFASLLNDVRNYYTHYYHDPICIYPRGYDIPSSLNCIYDSAINIIKE |
| 4453 | RFQAEEKEMEHLRNYTLVNNNGLSEKGYAFFISKFLERKYSYLFLKKLSGFKRGDSLQYRLTLEVFTALST |
| | KPPVERLRTTKDTKQDRALDILNELSRIPIELYQTLEPKYREMYNETLQPTDAEDPYGLPDRSRIRFRSRFEA |
| | FALHFLDKQADFKEIGFYTYLGNYFHNGYQKTRVDRETKDRYINFQLAGFCKNIQDISAKKLSEALNVKSI |
| | DISTDSIPDINSFEPYLVQSTPHYIVNGNNIGIKVLPEGKDTYPTIDEKGAKMPIADFWLSKYELPAMLFYTYL |
| | RNNNIHKSHCPLSVKDIIERSIHKSTKQKHPEERSELMLRRVMKAIFWTDSKLNEVERIKSQKSAFGKRQHEI |
| | LKAGRIAETLVRDMLWLQPSKNNGRDKVTEPNFQAIQVSLAYFGIRRNDLTEIFTRAGLINSSNPHPFLAQIG |
| | TNYTSLIEFYIAYLKERKVYFSRIQKKILQGKLNIQCHPLRDLQREPNKPQEKEEAIFLPRGLFNEAIINCLKK |
| | SKLKHLIESPTREKSPALNVSYLIHNYFRAYFEDQSQEFYAQPRNYRLFDKLSPNKGKSKSYLSLEQRIKKM |
| | EELRTKAIQDSCCRS |
| CDYT01.1 | MGAIENKHIFAAYANLAIDGLIKTLNFIAKKLDTQKQLSSWDIKHVITLIDSIFDQNPQNNLEQVVEGYLPWI |
| SEQ ID NO: | KPIIEMKTPKKGERQSDKLCIEYKTIITAFASLLNDVRNYYTHYYHDPICIYPRGYDIPSSLNCIYDSAINIIKE |
| 4454 | RFQAEEKEMEHLRNYTLVNNNGLSEKGYAFFISKFLERKYSYLFLKKLSGFKRGDSLQYRLTLEVFTALST |
| | KPPVERLRTTKDTKQDRALDILNELSRIPIELYQTLEPKYREMYNETLQPTDAEDPYGLPDRSRIRFRSRFEA |
| | FALHFLDKQADFKEIGFYTYLGNYFHNGYQKTRVDRETKDRYINFQLAGFCKNIQDISAKKLSEALNVKSI |
| | DISTDSIPDINSFEPYLVQSTPHYIVNGNNIGIKVLPEGKDTYPTIDEKGAKMPIADFWLSKYELPAMLFYTYL |
| | RNNNIHKSHCPLSVKDIIERSIHKSTKQKHPEERSELMLRRVMKAIFWTDSKLNEVERIKSQKSAFGKRQHEI |
| | LKAGRIAETLVRDMLWLQPSKNNGRDKVTEPNFQAIQVSLAYFGIRRNDLTEIFTRAGLINSSNPHPFLAQIG |
| | TNYTSLIEFYIAYLKERKVYFSRIQKKILQGKLNIQCHPLRDLQREPNKPQEKEEAIFLPRGLFNEAIINCLKK |
| | SKLKHLIESPTREKSPALNVSYLIHNYFRAYFEDQSQEFYAQPRNYRLFDKLSPNKGKSKSYLSLEQRIKKM |
| | EELRTKAIQDSCCRS |
| OHGO01.1 | MGAIENKHIFAAYANLAIDGLIKTLNFIAKKLDTQKQLSSWDIKHVITLIDSIFDQNPQNNLEQVVEGYLPWI |
| SEQ ID NO: | KPIIEMKTPKKGERQSDKLCIEYKTIITAFASLLNDVRNYYTHYYHDPICIYPGGYDIPSSLNCIYDSAINIIKE |
| 4455 | RFQAEEKEMKHLRNYTLVNNNGLSEKGYAFFISKFLERKYSYLFLKKLSGFKRGDSLQYRLTLEVFTALST |
| | KPPVERLRTTKDTKQDRALDILNELSKIPIELYQTLEPKYREMYNETLQPTDAEDPYGLPDRSRIRFRSRFEA |
| | FALHFLDKQADFKEIGFYTYLGNYFHNGYQKTRVDRETKDRYINFQLAGFCKNIQDISAKKLSEALNVKSI |
| | DISTDSIPDINSFEPYLVQSTPHYIVNGNNIGIKVLPEGKDTYPTIDEKGAKMPIADFWLSKYELPAMLFYTYL |
| | RNNNIHKSHCPLSVKDIIERSIHKSTKQKHPEERSELMLRRVMKAIFWTDSKLNEVERIKSQKSAFGKRQHEI |
| | LKAGRIAETLVRDMLWLQPSKNNGRDKVTEPNFQAIQVSLAYFGIRRNDLTEIFTRAGLINSSNPHPFLAQIG |
| | TNYTSLIEFYIAYLKERKVYFSRIQKKILQGKLNIQCHPLRDLQREPNKPQEKEEAIFLPRGLFNEAIINCLKK |
| OGRG01.1_2 | MPIADFWLSKYELPAMLFYTYLRNNNIHKSHCPLSVKDIIERSIHKSTKQKHPEERSELMLRRVMKAIFWTD |
| SEQ ID NO: | SKLNEVERIKSQKSAFGKRQHEILKAGRIAETLVRDMLWLQPSKNNGRDKVTEPNFQAIQVSLAYFGIRRN |
| 4456 | DLTEIFTRAGLINSSNPHPFLAQIGTNYTSLIEFYIAYLKERKVYFSRIQKKILQGKLNIQCHPLRDLQREPNKP |
| | QEKEEAIFLPRGLFNEAIINCLKKSKLKHLIESPTREKSPALNVSYLIQNYFRAYFEDQSQEFYAQPRNYRLFD |
| | NLSPNKGKSKSYLSLEQRIKKMEELRPSKIPVAEANKLLEKEDRLYRKNYNEICDNESIIRLYQIQDILLFMM |
| | TKEYLPSDLYNRINKYKLENVKGILNERVSYLIDLNPLKIQGEDIKIKDYGKLFYIHHDTRISSLNKVLSKVK |
| | RNNSISSSVKIQPYENYKRECLDFEEAQIQIIPIIHSFEIAMVSMFPDLKKATPGNYYDFNELITEYEKRTKQKI |
| | DSSFLIKTRNMFLHDKYEAECIKEISDDFVYAKKIIAEFKMKIENIKLEDFSNDSSA |
| OBVQ01.1_2 | MPIADFWLSKYELPAMLFYTYLRNNNIHKSHCPLSVKDIIERSIHKSTKQKHPEERSELMLRRVMKAIFWTD |
| SEQ ID NO: | SKLNEVERIKSQKSAFGKRQHEILKAGRIAETLVRDMLWLQPSKNNGRDKVTEPNFQAIQVSLAYFGIRRN |
| 4457 | DLTEIFTRAGLINSSNPHPFLAQIGTNYTSLIEFYIAYLKERKVYFSRIQKKILQGKLNIQCHPLRDLQREPNKP |
| | QEKEEAIFLPRGLFNEAIINCLKKSKLKHLIESPTREKSPALNVSYLIQNYFRAYFEDQSQEFYAQPRNYRLFD |
| | NLSPNKGKSKSYLSLEQRIKKMEELRPSKIPVAEANKLLEKEDRLYRKNYNEICDNESIIRLYQIQDILLFMM |
| | TKEYLPSDLYNRINKYKLENVKGILNERVSYLIDLNPLKIQGEDIKIKDYGKLFYIHHDTRISSLNKVLSKVK |
| | RNNSISSSVKIQPYENYKRECLDFEEAQIQIIPIIHSFEIAMVSMFPDLKKATPGNYYDFNELITEYEKRTKQKI |
| | DSSFLIKTRNMFLHDKYEAECIKEISDDFVYAKKIIAEFKMKIENIKLEDFSNDSSA |
| OBVO01.1 | MPIADFWLSKYELPAMLFYTYLRNNNIHKSHCPLSVKDIIERSIHKSTKQKHPEERSELMLRRVMKAIFWTD |
| SEQ ID NO: | SKLNEVERIKSQKSAFGKRQHEILKAGRIAETLVRDMLWLQPSKNNGRDKVTEPNFQAIQVSLAYFGIRRN |
| 4458 | DLTEIFTRAGLINSSNPHPFLAQIGTNYTSLIEFYIAYLKERKVYFSRIQKKILQGKLNIQCHPLRDLQREPNKP |
| | QEKEEAIFLPRGLFNEAIINCLKKSKLKHLIESPTREKSPALNVSYLIQNYFRAYFEDQSQEFYAQPRNYRLFD |
| | NLSPNKGKSKSYLSLEQRIKKMEELRPSKIPVAEANKLLEKEDRLYRKNYNEICDNESIIRLYQIQDILLFMM |
| | TKEYLPSDLYNRINKYKLENVKGILNERVSYLIDLNPLKIQGEDIKIKDYGKLFYIHHDTRISSLNKVLSKVK |
| | RNNSISSSVKIQPYENYKRECLDFEEAQIQIIPIIHSFEIAMVSMFPDLKKATPGNYYDFNELITEYEKRTKQKI |
| | DSSFLIKTRNMFLHDKYEAECIKEISDDFVYAKKIIAEFKMKIENIKLEDFSNDSSA |
| IMG_ | LKKSKLKQLIESPTREKSPALNVSYLIQNYFRTYFEDQSQEFYAQPRNYRLFDKLSPNKGKSKSYLSLEQRIK |
| 3300014947_2 | KMEELRPSKIPVAEANKLLEKEDRLYRKNYNEICDNESIIRLYQIQDILLFMMTKEYLPSDLYNRINKYKLEN |
| SEQ ID NO: | VKGILNERVSYLIDLNPLKIQGEDIKIKDYGKLFYIHHDTRISSLNKVLSKVKRNNSISSSVKIQPYENYKREC |
| 4459 | LDFEEAQIQIIPIIHSFEIAMVSMFPDLKKATPGNYYDFNELITEYEKRTKQKIDSSFLIKTRNMFLHDKYEAE |
| | CIKEISDDFVYAKKIIAEFKMKIENIKLEDLSNDSSA |
| UZJI01.1_2 | MPIADFWLSKYELPAMLFYTYLRNNNIHKSHCPLSVKDIIERSIHKSTKQKHPEERSELMLRRVMKAIFWTD |
| SEQ ID NO: | SKLNEVERIKSQKSAFGKRQHEILKAGRIAETLVRDMLWLQPSKNNGRDKVTEPNFQAIQVSLAYFGIRRN |
| 4460 | DLTEIFTRAGLINSSNPHPFLAQIGTNYTSLIEFYIAYLKERKVYFSRIQKKILQGKLNIQCHPLRDLQREPNKP |
| | QDKEEAIFLPRGLFNEAIINCLKKSKLKQLIESPTREKSPALNVSYLIQNYFRTYFEDQSQEFYAQPRNYRLFD |
| | KLSPNKGKSKSYLSLEQRIKKMEELRPSKIPVAEANKLLEKEDRLYRKNYNEICDNESIIRLYQIQDILLFMM |
| | TKEYLPSDLYNRINKYKLENVKGILNERVSYLIDLNPLKIQGEDIKIKDYGKLFYIHHDTRINSLNKVLSKVK |
| | RNNSISSSVKIQPYENYKRECLDFEEAQIQIIPIIHSFEITMVSMFPDLKKATPGNYYDFNELITEYEKRTKQKI |
| | DSSFLIKTRNMFLHDKYEAECIKEISDDFVYAKKIIAEFKMKIENIKLEDLSNDSSA |
| UXPW01.1 | LQKAIFWTDSKLNEVERIKSQKSAFGKRQHEILKAGRIAETLVRDMLWLQPSKNNGRDKVTEPNFQAIQVS |
| SEQ ID NO: | LAYFGIRRNDLTEIFTRAGLINSSNPHPFLAQIGTNYTSLIEFYIAYLKERKVYFSRIQKKILQGKLNIQCHPLR |
| 4461 | DLQREPNKPQDKEEAIFLPRGLFNEAIINCLKKSKLKQLIESPTREKSPALNVSYLIQNYFRTYFEDQSQEFYA |
| | QPRNYRLFDKLSPNKGKSKSYLSLEQRIKKMEELRPSKIPVAEANKLLEKEDRLYRKNYNEICDNESIIRLYQ |
| | IQDILLFMMTKEYLPSDLYNRINKYKLENVKGILNERVSYLIDLNLLKIQGEDIKIKDYGKLFYIHHDTRISSL |
| | NKVLSKVKRNNSISSSVKIQPYENYKRECLDFEEAQIQIIPIIHSFEIAMVSMFPDLKKATPGNYYDFNELITE |
| | YEKRTKQKIDSSFLIKTRNMFLHDKYEAECIKEISDDFVYAKKIIAEFKMKIENIKLEDLSNDSSA |
| OJMG01.1 | MDSKYILGSYLNMANDNFINTIHLLAKKLKTPKGEDQNLDQVVSYIPRIFDNSNQVPETEQIVEFYFPWLEA |
| SEQ ID NO: | LKNANGFGKSELPELKIFYKDVLCSFAKNLKDLRDNYTHYIHKTISYHPIIYKKEGNTLQSSLPKALLQIYDA |
| 4462 | SIKLAKERFLADENAVTHLRRYKIVGKKVVRKTEADHFMYLLEKDHLLTEKGIAFFTSLFLNRKYGYLMLK |
| | QLKGFKQGETLTYRLTLETFLAYSNIKPVERLKADKYSDVAFIMDLLGEISKIPKELYHILPETYILQYKNKL |
| | HIELNEDISLEAYCSRGRNRFDQLALTYLDRLEDFKQIGFYTYLGNYIHNGYMKARIDGTEQKRYLSEKMY |
| | GCCKNIYRDLSAIVAKQYNIEVKDSTETSYMLPNDFQPHVIRAYPHYVINNNNIGIRLLDEGESGFPILENRG |
| | TKKM |
| mgm4491477.3 | MEEANRYIYGAYFNMARDNFLNTIKLLADKMKLGAISGFGKDGNEVNDINKLFGDKNTYVNIENVVEFYF |
| SEQ ID NO: | PWIKALEGRFSLDKGDRNLNDMKMFYKSVLTAFFTAVDSLRNKYTHYSHKDLNIREIKIECTLGGKDYCIG |
| 4463 | LLNTLDCIYDSAVNLLKLRFMAGEDEVAHLRRCKAVNKMVVVRTEKDGFYYRLSDNGGVTEKGVIFIAS |
| | MFLNRKYGFLFLKQLEGFKRSDEKRYRLTLETFLAFSNIKPVDRLKSDKLDRASLGLDMLNELTKIPKELSE |
| | TLSVDCLYKYLASDGEDDLRSRIRYQDRFVPLALEFISQSDEFKDFRFYTYVGNYVYKGYIKRLIDGTDKER |
| | YLSDRLCGFYKSVNDASSDAIAQKYGVEIKDSNEPDYMLPDSFRPHVLRATPHFVINNNNIGIKICGNDCLP |
| | VVNGKGVESPEPDYWLSIYELPAMLFYAYLREKNGKLLKDYKSIRELIEDVEKKADEKNDRDKGALMARH |
| | IDKEIIWTQTKLDEVKRLEEKKVAAYGKKGRVVLKSGRMADLLAHDMVRLQPATKGSDKITGANFQALQ |
| | VSLAYFKRDILADVFSRAMLTTGNHRHPFLYRIDVSHCSSLRDFYVAYLGERRKYFEDVAKKITKNKLNTP |
| | CHILRRLQREGSGEEAGKDVKPKFLPRGIFTGSIKSCLEKSALNINIRNARNDVKPAINAAYLILMYYKEIEK |
| | GEFQGFYGEKRRYDILEEGKSLDLDERKKALASIKPAKIDVSEANMPMSKEEHLMRKXXXXXXXXXXXX |
| | XXXXXXXXXXXXXXXXXXXXXXQ |
| OJMG01.1_2 | MSKYDLPALLFYAYLRSDSRFASKCKKTIDEILRGYLSKSKDKKPKQAEKASVLMLRRIDKAIIWTQTKLNE |
| SEQ ID NO: | AEKQRDNKKSFKIGEKADILAHDMLWLQPAKESKDKVSGANFRALQTSLAFFRRNELDDIFKRSFLIGGNN |
| 4464 | PHPFLSRIKINTMPSLFDFYLAYMRERLNYWEKIKLKLLKGHINVSCHPLRKLNHGKPVDQDNKKDEQPIFL |
| | PRGIFNDVIKNCLQKTKLGIYLKDQGAEKRPWNVAYQILKFHEIINDDDIQEFYKQPRKYAILDENHYLTLE |
| | ERTDRLKDLKPECIEVSKANDILEKEDYLLRKSYNQVCDNESAIRLYQVQDILLFMIAQRLCNEIILGDKQEK |
| | KEKVETSFSLTLKNLSKKFDQPVHFEIKMNNVNLFSDTDIPVKNFGKMLRLKKDARFISYGKLFKGQKQNI |
| | NYNDYCKEEEYFDICRIQMVKLCHELEEKLLEKGIITESPNSGYYPFADLVQRIINQGVVISSSDVKFILEARN |
| | MFLHNEYKQCCVNSINSIDSFIAEKVYNLFKQKMDNILGDLESIKPS |
| IMG_ | MAFDKPRPKRRQARSDFYITDKAIMGGYFNLAQLNFFKTLMEIFTKAGIDVSKIKQDNSPKYLMILIKKLTH |
| 3300028886 | DDEKIDDKKWADALDLSNECLLKLQQLLYKHFPFLGPVMGGEASYNIYKLKDGHPEVKVANDVMRGVKL |
| SEQ ID NO: | EDCLTVLRHFALCLNDCRNFYTHFNPYNSIDAQKEQYLSQNKVAVWLDKVKDASRRIVKQNNQLTSQDM |
| 4465 | EFLTGIDHMKPQDKVDEFGNIMTDRRGYTIKEYVEYEDYYFRIRGKRYLVDAAGAKLADQEPRNALSDFG |
| | VVFLCTFFLESDQSRRMLDELRLFETGPYDGSRDGDEFKNDILREILLFYRARIPRGKRLDPMDDTTLLAMD |
| | MLNELRKCPMPLYDVLSREGQRFFEDEVKRPNDLTPEVAKRLRSSDRFPYLALRYIDLNKCFDNIRFQVQL |
| | GKFRYKFYDKTTIDGEQVVRGLQKEVNAYGRLQDVERYRQEKYADMLQQTELVETGEEDITIANFIPDTPQ |
| | SSPYLSDRTASYNIHNNRIGLFWNMPGEQEVLTGDEKMYLPDLNVDDNGKADVFLPAPKASLSVRDLPAL |
| | VFYLYLQNQHPDLMPAESIIQQKYNALVRFFEDVSTGRLQPVKGINELKAAIDRYEYLTIHEIPEKLRDYLA |
| | GVAGTEDDDDCADRLDCYAMGILEKRYRRVAARIDQLKEARKMVGDKMNRYGKKSY |
| LXOW01.2 | MQQHNPKRRKAQSSFLISEKSIMGGYFNIARLNLYKTVITIFAQVGIKGDYQEDKIDRVLDALYKNLAGKSE |
| SEQ ID NO: | ELSKEQSQWKRLNQLKNEQIVKLQRLLFKHFPVLGPIMASEASYKIYKAELCAKDAEEKARNDKAELKKV |
| 4466 | RKSNVINDEQLMRGVGIDECLDVLATMASCLTDCRNFYSHYVPYNNKEEQKIQYGRQAKIARWLDKVIVA |
| | SRRIDKQRNSLSTGEMEFLTGIDHYFPKEKVDENGRVIKDNRGWAVKEFVEYPDYYFRIKGERQLIDTSGV |
| | TLTGEKAMDALTDFGIVFFCTLFLQKTYAKMMQEELALYESGPYNGTVKGQEENDAKKNAILREMLSIYRI |
| | RIPRGKRLDSQDDTTTLAMDMLNELRKCPMSLYDVLGQEGQRFFEDEVQHPNEQTPEKAKRLRATDRFPY |
| | FALRYIDLKKDIFTRIRFQVDLGNYRFKFYNKKTIDGLEEVRSLQKEINGY |
| IMG_ | MTNYHHNNQGSKSPNGQGQNRGSKYGKSGESRRQRRRQTQNFAISLTGKNVFGAYFNMARTNFVKTINYI |
| 3300031994 | LPIAGVRGKYEENKIDKMLHALFLIQAGRGAELTPEQREWRQKLILNPEQQERLKSLLFRHFPMLKPMMAD |
| SEQ ID NO: | FIDHKIYKNKKKSTIQTDDEAFELLRGVSLADCLDMVVLMAETLTECRNFYTHADPYNSAVDLAKQYQHQ |
| 4467 | AAIAKKLDKLVVASRRVLKEMENLSVEEVEFLTGVDHMAQIPRKDEAGQVIRDEKGRKQMKFVEYDDFY |
| | FKISGTRPVQGLSMTGPDGQPTTVDSQLPALSDFGLLFFCVLFLSKPYAKLFIEEARL |
| IMG_ | MTNYHHNNQGSKSPNGQGQNRGSQYGKSGESRRQRRRQTQNFAISLTGKNVFGAYFNMARTNFVKTINYI |
| 3300028805 | LPIAGVRGKYEENKIDKMLHALFLIQAGRGAELTPEQREWRQKLILNPEQQERLKSLLFRHFPMLKPMMAD |
| SEQ ID NO: | FIDHKIYKNKKKSTIQTDDEAFELLRGVSLADCLDMVVLMAETLTECRNFYTHADPYNSAVDLAKQYQHQ |
| 4468 | AAIAKKLDKLVVASRRVLKEMENLSVEEVEFLTGVDHMAQVPRKDEAGQVIRDEKGRKQMKFVEYDDFY |
| | FKISGTRPVQGLSMTGIDGQPTTVDSQLPALSDFGLLFFCVLFLSKPYAKLFIEEARLFEFSPFTEVENLVIRE |
| | MLSIYRIRTPRLHRIDSREDKAALSMDIFGELRRCPMELYNLLDKETDQPFFHDVVKHPNDYTPEVSKRQRH |
| | TDRFPHLALRYVDATKLFERIRFQLQLGAFRYKFYDKKNCIDGRPRVRRIQKEINGYGRLQEVEDKRFEKW |
| | GDLIQKREER |
| IMG_ | MTNYHHNNQGSKRPNGQGQKLGSQQGKSVESRPRRRRQSQDFAISLTGKNVFGAYFNMARTNFVKTINYI |
| 3300032030 | LPIAGVRGKYEENKIDKMLHALFLIQAGRGAELTPEQREWRQKLILNPEQQERLKSLLFRHFPMLKPMMAD |
| SEQ ID NO: | FIDHKIYKNKKKSTIQTDDEAFGLLRGVSLADCLDMVLLMAETLTECRNFYTHADPYNSAVDLAKQYQHQ |
| 4469 | AAIAKKLDKLVVASRRVLKERENLSVEEVEFLTGVDHMAQIPRKDEAGQVIRDEKGRKQMKFVEYDDFYF |
| | KISGTRPVQGLSMTGPDGQPTTVDSQLPALSDFGLLFFCVLFLSKPYAKLFIEEARLFEFSPFTEVENLVMRE |
| | MLSIYRIRTPRLHRIDSREDKAALSMDIFGELRRCPMELYNLLDKETDQPFFHDVVKHPNDYTPEVSKRQRH |
| | TDRFPHLALRYVDATKLFERIRFQLQLGAFRFRFYDKKNCIDGRPRVRRIQKEINGYGRLQEVEDKRFEKW |
| | GDLIQKREEREVKLEHEDMVLDLDQFLQDTADSIPYITDRRPAYNIHAGRIGLFWERSRNPKDFKYFEDGM |
| | YIPQLIVSEDLRAPISMPEPLCSLSVHDLPAMLFYEYLRGQQEGRKFKSAEQIIIDCEGDFRRFFASVADGSLK |
| | PFAREKELREYLSVNFPNLRMADIPEKIRLYLCGQPLRHNNEEETARQRLVRLTLEHLEEREQKIAHRLEHY |
| | QEDRKKIGEKDNKIGKKDHADVRHGALARYIAQSLMLWQPSIDGIGHGKLTGVNYNALTAYLATFGTPQP |
| | EEENFTPRTLLQVLQAANLVEGENPHPFINKVLARGNRNIEELYLHYLDEELNHIRACRQSLQNDPSDAAL |
| mgm4547164.3_ | MGKEHKGNNAPKNRNKVANNSQQPRKVRRLQKTNFRISLSGKHVFGAYFNMARTNFIKTINYILPIAGVR |
| 5 | GNYSESQINKLLQAMFLIQTGRNGELTKEQKQWEKKLRLNPEQQTKLQQLLFKHFPVLGPMMADVADHK |
| SEQ ID NO: | VYLNKKKSNVQTEDEAFAQLKGVSLADCLEMIYLMAETLTECRNFYTHKSPYNTPSQLAMQYLHQEMIA |
| 4470 | KKLDKVVVASRRILKDREGFSVNEVEFLTGIDHLHQETVKDEFGNVKMKGGKVMKTFVEYDDFYFKISGK |
| | RLVKGYTVTVKDDKPVNVDTMLPALSDFGLLYFCVIFLSKPYAKLFIDEVRLFEFSPFSDNENMIMSEMLSI |
| | YRIRTPRLHKIDSRDSKATLAMDIFGELRRCPIELYDLLDKNSGQPFFHDEVKXXXXXXXXXXXXXXXXXX |
| | XXXXXXXXXXXXXXXXXXXXXXXXXXXXXXXXXXXXXXXXXXXXXXXXXXXXXXXXXXXXXXXX |
| | XXXXXXXXXXXXXXXXXXXXNFS |
| IMG_ | MGKENKGNNAPKTQNKTANNSQQQKKVRRLQKTSFRISLTGKHVFGAYFNMARTNFIKTINYILPIAGVRG |
| 3300028805_3 | NYSENQINKMLRALFLIQAGRNGELTTEQKQWEKKLRLNPEQKTRLQKLLFKHFPVLSPMMADVADHKA |
| SEQ ID NO: | YLNKKKSNVQTEDEAFEQLKGISLSDCLEIICLMAETLTECRNFYTHKDPYNKPSLLAAQYQHQEMIAKKL |
| 4471 | DKVIVASRRILKDREGLSVNEVEFLTGIDHLHQEVVKDEFGNVKKKDGKVMKTFVEYDDFYFKISGKRLV |
| | KGFTVTVKDDKPVNVDTMLPALSDFGLLYFCVLFLSKPYAKLFIDEVRLFEFSPFDDNENMIMSEMLSIYRI |
| | RTPRLHKIDSRDNKATLAMDIFGELRRCPIELYDLLDKNTGQPFFHDEVKRPNSHTPEVSKRLRYNDRFPTL |
| | ALRYIDETELFNRIRFQLQLGAFRYKFYDKECIDGRVRVRRIQKDINGYGRLQEVADKRLDKWGDLIQKRE |
| | EQSVKLEHEELYLDLDQFQQDTADSTPYVTDRRPAYNIHANRIGMYWEDSQNPKLFEVFDENKMYIPELK |
| | VSEDMKAPVKMPEPRCALSIYDLSAMLFYEYLREQEDENIPSAEQIIIDYESDYRRFFKAVAEGSLKPFQRTK |
| | EFREYLKKEYPRLHLADIPEKLQSYLCSHGLSF |
| IMG_ | MGKGNKGNEVKIQQPKKKRRIQKTNFTISLTGKHVFGAYFNMARTNFIKTINYILPIAGVRGNYSENQINN |
| 3300028887 | MLHALFLIHAGRNSELSKEQKQWEKKLRLNLEQQTKLQKLLFKHFPVLGPMMADVADHKAFLNKKKSKV |
| SEQ ID NO: | QTEDEAFVQLKGVSLSDCLEMIHLMAITLTECRNFYTHKSPYNTPSQLASQYQHQEQIAKKLDKVVVASRR |
| 4472 | ILKDREGLSINEVEFLTGIDHLHQEIEKDQFGNIVKKNGKVLKTFVEYDDFYFKIFGKRLVKGLTVAVKDND |
| | PVNVDTMLPALSDFGLLYFCVLFLSKPYAKLFIDETRLFEFSPFNDNENMILSEMLSIYRIRTPRLHKIDSRDN |
| | KAALAMDIFGELRCCPIELYDLLDKNTGQSFFHDEVKRPNSHTPEVSKRLRYDDRFPTLALRYIDETELFKRI |
| | RFQIQLGAFRYRFFDKEDCIDGRVRVRSIQKEINGYGRLQEVADKRLEKWGDMLQKREERSVKLEHEELYL |
| | DLDQFQEDTANSTPYVTDRRPSYNIHANRIGLYWEDSQNPKQFKVFDENGMYIPKLIVTEDEKAPINMPAP |
| | RCALSVYDLPAMLFYEYLREQQKGNVQAAEQIIIDYENDYRKFFKAVAEGTLKPFQKTKELREYLEENYPK |
| | LRMSDIPEKIQLYLTSKGLTHNNKPETVRERMIRLINQHLEEREKNVQRRLEHYQEDRKMVGEKENKYGK |
| | KGFADVRHGALARYLTQSMMEWQPSKDGKGYDKLTGLNYNVLTAYLATFGTPQTVEEGFTPKSLEQVLT |
| | KAHIIGGSNPHPFMNKVLSLGSRNIEELYLH |
| IMG_ | MDKKQNHNIVGGQMSASTQPHSNQRRIQSTDFSIGLTGKHVYGAYFNMARTNFVKTVSYIMEIVGIRGKYS |
| 3300001395 | ESQLNNVLQALYLIRAGQSDKLTAVQKTWKKNLRLTVEQQTLFQRLLFKHFPVLNPIMADTANYRAYLKK |
| SEQ ID NO: | ENKRKSTVQSEDETFEQLKGISLADCLEMLVLMGDTLTECRNFYTHLDPYNPPEELEKQYKHQALIAIKLN |
| 4473 | KVIEASRRVLKEREGLTTGEVEFLTGIDHLMQVDKKDEHGNKIYQKNGRPQKTFVEYDDFYFKVSGTRSIQ |
| | GISHPALSDFGLLYLCVLFLSKHYAKLLIEESRLFEFSPFNDNENLILQEMLSIYRIRTPRPKRIDSHDDKATLA |
| | MDIFGELRRCPIVLYDLLDKEKGQPFFHDEVKRPNDHTPEVFKRIRFDDRFPHLALRYIDMAELFKRIRFQL |
| | QLGSFRYKFYDKLCADGQIRVRRIQKDINGYGRLQEVADKRWDFWGDLIQKREELPVKLEHEEVFINLDQF |
| | VQDTADSMPYITDRRPSYN |
| IMG_ | MGKNYYSKNGNGSNKNAKVQKAPRLTNEPFTIREDDKKIYGAYFNMALDNFFKTIAYIFNVLDIKQFVRT |
| 3300028591 | KYNGEYVEVPMFSEESLHIILKYYSKFFGGTLKSDKLKKNVKKLSRLSSKDEEQEQKYEEDLDELIQSLQLT |
| SEQ ID NO: | NEQQQKFQQMLFRHFPFLGPIMADYASYSIYQQASKDVSDKEYIKKRKKEIMNSYDSLRGVTLSQCLEELS |
| 4474 | KMADCLTDCRNKYTHFKPYNSLETQKTQLELQFMIAKKLDKLLAASRRLTKQNIAITTEEMEFITGIDHYE |
| | NVNKQFIEREDFYFNPKGKGMAVIESTDANGAHQQSSSTYDAFSPFGIAYFCILFLSKTYARLFIDEINLFAG |
| | SPFNDSENAIMREIMSLYRVRTPRGKRLDSKATDSTLGMDMLNELRKCPMELYETLSQEGRRFFEDEVKRQ |
| | NDHTPEVVKRLRSTDRFPYLAMRYIDETQMFDDIRFQVRLGSYRFRFYKKIDCVDGVDRVRRIQKEINGFG |
| | RLQDIENERKTNWEAQMQDANYKSVKLEHEDLYLDLRQFPKDTESQQPYITDRRAEYNIHNNRIGLYWNR |
| | ETDTPEYLDDAKCFLPKLETTGDAGKRKAQIIQPAPLCTLSVRELPAMLFYQWLCDNYKTDMPHDSAELLI |
| | KKKYDSLVRLFTAIKNGTFSYKTTEEATVKYLKNKFKLTLTDVPQKLRMYIVGKETHPLQRLIEVTFDGYE |
| | DNSGKHKGKLEQRREKIERRLEKYKDDRKKIGDKTNTY |
| mgm4547164.3_ | MEKSENKQHSQGFPFPHKHVRRPQPLKVDQDNKYVLGGYFSLGLNNFYKTVLLVFAKAGIPIVGKKGTILY |
| 4 | EEEKIGQVLNTLYKCCLNPKPDFEPSEEKWVPFFKLNVNQQMKLHKLLFKHFPILSPIMADEAAYKANKRK |
| SEQ ID NO: | KSKVTDTFSMTLGVSLSDCLKVIGTIAQGLVDCRNADVHFDPYNSLEDLAKQYMVQQDIVRYLVKALVAS |
| 4475 | RRLDKEQNNIETEKMEFLTGYATKKSLEGYIQKWGFYPKYEQQIKKDKDGNPVYVEVTDKDGNPKKDKN |
| | GNPIYKQQLDRRTGKRMCDRDGNPIYEVQKVMVERSDFFYKIGGETTIEKNGKVYSTLTGFGLCYFCTIFLS |
| | KPQARQMLQDIRLFEHSPYPEELNXXXXXXXXXXXXXXXXXXXXXXXXXXXXXXXXXXXXXXXXXXX |
| | XXXXXXXXXXXXXXXXXXXXXXXXXXXXXXXXXXXXXXXXXXXXXXXXXXXXXXXXXXXXXXXX |
| | XXXXXXXXXXXXXXXXXXXXXXXXXXXXXXXXXXXFMTC |
| IMG_ | MEKSNKKANTQPPKKVQEPKALVVNESNKYVLGGYFSLGLNNFYKTILLVFAKTGIKVMSGNGNILYSEE |
| 3300028591_2 | KIGQVLNTLFKSTLSPRPKFEAFEQAWAVNFKLTANQQVTLQKLLFHHFPVLGPIMADEEAYKVIKTKKSN |
| SEQ ID NO: | VTDTYSMTLGVTLSECLKAISIIAQGLVDCRNTDVHYHPYNSLDDLARQYHVQSDIVRYLNKALVASRRID |
| 4476 | KKRNSIETVKMEFLTGYANVDALNKYLAKWHFYPKYDQMSKRDADGNILYVDATDKQGNPLFDKGGNP |
| | KYKQERDRSGKPLYNQDGSPKYEEQKIMVERNDFFYRIGGESTIEKNAETFSTLTGFGLAYFCTLFLSKPQA |
| | KQMLADIKLFERSPYPQELNDIIRDMLSIYRLRSPKGKKLEGGDNQVTLALDILNELRKCPKELYDVLSPEG |
| | QAFFEDEVKRPNERTPEVVKRFRSKDRFSFLALRYIDEMGVFDNIRFQVQLGKLRFKFYPKTCINGEEDVRS |
| | LQKEINGYGKLHEIELERKSKYGPLLQVSTEKSVKIEHEDMYLDLLQFERDKADSQPYITDSKTFYNIYNNRI |
| | GLFWKELEYADSKNNQQVVKPQKGDYLPSLLDVKEGKAPVDMPAPMAMLSVYELPALIFYHYLRSQQKD |
| | IVNPTAEDIIIDKYYSLKRFFMDVCIGTLAPFEKKKLLVETLSSQYGLGINEIPKKLKDYLTGKNINIESKKLK |
| | LTQDILATRLKKAIRRRDGYKDDRKKIGDKENRYGKDSYVDVRHGS |
| mgm4547164.3_ | MSTFKFINKFACGAYFNSARDNFHRAMLDILQQIGVSKHYTETELDDRLAEILNVLKGEPSPISEEDAKKIIA |
| 9 | NQTMFRQLLFRRFPILGPVISDVLHYTHRQKEKIIMKELIDERVHDLIMQNEAEEDYYLSNEQMVLQAEKEI |
| SEQ ID NO: | KEALKTKKKKIIVDDCGDRDATCAECLDAILLLARCLTDCRNYFTHYLPYNPNEKLHNMYGRQCKAATW |
| 4477 | LNPVFTASRRLDKRRNRLTSAQLEFITNHNYKAKTDENGRKVKDENGKDIYIKDHSYYFSIIGESFIAKRNG |
| | DEYVQKDIENDSSAFGNCENNALSDFGLMYLCCCFLTRSQAQQFAEKAKLFANSPENMTERDFQYVLNVS |
| | AEAQPNSIQLEELNRLKTKLRVDNLDLSKEKDRAAFTALQNDRSYWQKTSENILLQEMLSIYRVRLPRGKR |
| | LDKQDNATTVALDMLNELRRCPKELFDILPTEGQQAFAAPVNNEEGETENSVARKRFTDRFPYLALRAIDE |
| | ANLLPSIRFQVQLGYYRFAFYNKTCIDGSSQLRRLGKALNGFGRLSAMESRRKTEWAPEDSESETQQPNRF |
| | QRKIYTPTRLEDGKTVLDLLRPVEDKVGNEPYITDTAASYNIYNNRIGLYWEEQNGGRKNDDILEFPELRTK |
| | DTDKVGTKRPEVPQKAPLCTLSVRDLPALLFLLHINGYNSKAVEDVIVNKYKGLLKFFSDISRXXXXXXXX |
| | XXXXXXXXXXXXXXXXTRFSKVIT |
| IMG_ | MATFRFQNKYVCGAYYNMAQNNFRLAILHVLSRIGINRKDEERAIPELLDTIYGFLTGDTEHFNDTQILQKK |
| 3300031853 | VLTLRYDQQVKLRELLFRQFPILKPIIASETHKSLQEQKEKLSEMEEYIHEFEKQLKRLYRSKKGKASQEQK |
| SEQ ID NO: | EINEQIKYLKTKKSKYLDEYDTLLFSKSHDADLQLCLKILKTMAWCLYDLRDFYTHYDPYNTPESLKVKYL |
| 4478 | RQVTVANWLSQVFAASRTIDKERNSITTEEMNFLNEAKKQGNDKKWREDPDYYFAIKGQNLLSSSFIDADS |
| | PVYNDYLDELYQKYRKKRLAWMKEQRDEALERDDEEEYGFWVVEMEKLDNPERIAKIKSKICPLALSDFG |
| | VLYFCATFLPRNYTLLMADHAEVMKNSPYSMTAEELEARRNACKTDEEREKIDPTDTPRNNILREMLCIYR |
| | VRLPKGKRLDKKDTKGLLTLDILNELRKCPKEVYEQLSKEGKDFFISRVSSASHNAPDIVKRIRFGDRFPYL |
| | ALRAIDESDVFKRIRFQVRLGSYRFYFYNKTCIDGSTQLRRWDKEINGFGRLQDMEALRKSL |
| IMG_ | MNNSVNSFALVNESSGRGKYVAGTYFEIAIHNFFKTIDFVLRRVNIRKSDKQWADGFAHLGNWTDERMGK |
| 3300026539_2 | VLEQLALAEMSPTQLSRLSRLLYHHFPFFSPIMADAADHQVYLRVNEIKEIEQEITESDKKIKKNPVNKELV |
| SEQ ID NO: | QSINEARIRLKAAHNSLERQLASTTAKEVLAKLAVMAYAMNFYRNQYSHKCHFETLNEKTLQEENEQNLA |
| 4479 | FWLEVIFKGARSIILDRKEHSQEDTKFLTQDGNLHYNVNKSKKSTRNPNFYFSPGKKNGQKWLITDFGRYY |
| | FCSLFLQRSDAIEFGKNVGLYTDSPFKLSNEERNKLQLEEKHRALEEQKIVDKEGDGHKVNPRIISNTESVQ |
| | NTIIQEMLDVYRLRIPREGRIDAMMNEGTLIMDILNELRRCPKSVYETFSPADKKKFNKVGTNPDGSKSEMK |
| | LIRYHDRFPYLALRMIDQTNAIGDIRFHLRLGLFRYRFYNKKTISGELVNPVRTIQKEVNGFGRWQDVEEGR |
| | KSLYGKYFQNRIINDDGLEQPVPDSLQSLPYITDWHASYNIHACRIGMAWNLSQMEDALYLPPLTFDDGNN |
| | RNRKAPLDMPAPMCYMSIYDIPALLFYNYL |
| IMG_ | MEKNNKEGKSQSFYKNKNWGKELKQRQIRKFVENMLNYSLPITNTKETSGKSILGAYANVAFDNFDKTLQ |
| 3300031853_2 | YIYKKVGLKVNGTNQVAVLEKILDAYKKEKEWYRSHPNEKKPGKKSQYLLTSEQNEKMKTLLFHHFSVL |
| SEQ ID NO: | APILGSMKNAEIAKIHNEIKKDEENKSLTEEKSAEIIKKVKDVVTSAHIDSCLKVLVNLSKSLHYCRNLHSHY |
| 4480 | RAYNNRENQINMFKNFATTAGYLTNALKASAIICQTNAGNKAKQYEFVTGEYHYMKDKKEYSNYYYRIK |
| | GKRNTIKASDKIEPDQYDAISDYGLIYLTSLFLSKSDTELMLDQLEVFKNSPFKDEFTMEKAVLTSIMAVYRI |
| | NIPKGKRMKMEDDNVQLCLDMLNELQKCPQELYDVISDKGKDSFKREQTEP |
| IMG_ | MADYIFDYIDPDKTKRYIYGTYIEMAFHNFFITLQHIYKCVKGVYPAMQEEDFGRDENTIFIFDDLTNAEDQ |
| 3300028886_3 | ERIKLLLNKHFPFLKVIEDDFNETDKITIIKKCWDFLKSLRNAVEHDTETTKSIFANNKTDILRWLRTDFGCG |
| SEQ ID NO: | KDVKKRGIAIAAKKEMKDRFFLPRDPKSVFYFMNNCNPESGNFAFRSLVIFVSLFLEGKYTYQFITNSELKS |
| 4481 | NFFYKEKNRAGVVNQIEFRKDDFVNLYRALSIYNINLPAVKYDAQFDKTNILGLDIINELQKCPNELYEHIS |
| | KEDQNKFRVQNSDNADYPDEIFLKRFQDRFATLVLRYIDTQKLFKDIRFQVSLGKYRFKFYDKQCIDSDSA |
| | DRVRILQKELKTFGRLDDMEQKRRTEWADILRISDIENPSEADTADTQPYITDQNARYNIDKHTPKIPLWWD |
| | GDCSLPVTKGQVNLGQKCQSIVPKAFLSVYDLPAMMFLHLLGGNPEALIKEYYNNYIKFFTDIRDGKLTPD |
| | TFSEKDFAQTYKIKLCDVPKQLQNFLLRKKPSVPERYQNMPLRLVKKASLNDFQNATLKVIDEKIEKVISEP |
| | QKLK |
| IMG_ | MADYIFDYIDPDKTKRYIYGTYIEMAFHNFFITLQHIYKCVKGVYPAMQEEDFGRDENTIFIFDDLTNAEDQ |
| 3300032007 | ERIKLLLNKHFPFLKVIEDDFNETDKITIIKKCWDFLKSLRNAVEHDTETTKSIFANNKTDILRWLRTDFGCG |
| SEQ ID NO: | KDVKKRGIAIAAKKEMKDRFFLPRDPKSVFYFMNNCNPESGNFAFRSLVIFVSLFLEGKYTYQFITNSELKS |
| 4482 | NFFYKEKNRAGVVNQIEFRKDDFVNLYRALSIYNINLPAVKYDAQFDKTNILGLDIINELQKCPNELYEHIS |
| | KEDQNKFRVQNSDNADYPDEIFLKRFQDRFATLVLRYIDTQKLFKDIRFQVSLGKYRFKFYDKQCIDSDSA |
| | DRVRILQKELKTFGRLDDMEQKRRTEWADILRISDIENPSEADTADTQPYITDQNARYNIDKHTPKIPLWWD |
| | GDCSLPVTKGQVNLGQKCQSIVPKAFLSVYDLPAMMFLHLLGGNPEALIKEYYNNYIKFFTDIRDGKLTPD |
| | TFSEKDFAQTYKIKLCDVPKQLQNFLLRKKPSVPERYQNMPLRLVKKASLNDFQNATLKVIDEKIEKVISEP |
| | QKLK |
| mgm4547164.3_ | LYATYIEMAFHNMFLNIKHIYGVVFGRDIMAEAKANYEALNPEKKWDEDFANEFLVWKPMFEAFNNGNV |
| 10 | EEKQKVGEMLSRHFPLLVPFTDFTNHESNYKNLTIVDILRRLSQVLRVLRNLYSHYRIELFENQKKVYLDNE |
| SEQ ID NO: | YLIIRCTMNSYMGARRVTKDRFSYDEKDMRCTDQYQFVDERGRRLKEKVEIKGFRYKIGEKGKDSKLHFTP |
| 4483 | FGLVAFISLFLEKKYSKILTDKLRLIPIQDQHIINEMLAVYRIRLNAQKLNISKDADLLALDIINELQRCPKDLF |
| | SLLSPSDQKKFRHESEANDEVLMVRHSDRFPFLVMKYIDDCQLFDNIRFQVSLGKYFYKFYDKNCIDSETR |
| | VRALSKNLNGFGRLSKIEAMREGCWEDSIRQYDDIHKNTVDEKPYVTDHHAKYVINGNRIAMRIIREEEKA |
| | YLPELNAEGVRNLAPTCWLSIYDLSSL |
| IMG_ | LXXXXXXXXXXXXXXXXXXXXXXXXXXXXXXXXXXXXXXXXTGLFRTRAQNGNSPFEKNENEVMFNI |
| 2061766007_3 | FCAHRIRLPKGRVESTASAHALGLDILNELQKCPSELFNTLSPEDKKQFQVKRKDDEIQPNPDDDLNLFRRN |
| SEQ ID NO: | GDRFPYLAMRYIDAMRETQDDQSKVLKDIVFQVSLGKYRFKFYNRASLDTQRNDRVRVQQKEINGFGPID |
| 4484 | KVEQKRKDKYSPIIRPISNDPKHLFXXXXXXXXXXXXXXXXXXXXXXXXXXXXXXXXXXXXXXXXXXE |
| | KTGDKGHNETINIEKLDNDKCFLPNVPISTENIAPRAWLSXXXXXXXXXXXXXXXXXXEAVIKDTYKRFV |
| | LLLKDIRSGDLKPQANKEQLQNXXXXXXXXXXXXXXXXXXXXXXXXSLRHRTENPRKS |
| OOXJ01.1 | MKQNTNNRQSKNKGRKNEGSFQELTPRFFDDVKTKAVWANYLNMARQNTYQTLCHITHVLGLAYNPED |
| SEQ ID NO: | KELEANLLQIPAVTLLLKKGNAEKKQKAMKLLDKHFPFMTPMLEQYVKLQQGKSTRGKETTPEDYHAILN |
| 4485 | MILPLINLLRNKYTHYKIEDPKLDASGKIADPGILNNCHILARLLNFCFDGARRIVKERFGTGENAPLKDKDF |
| | NFLTEEGTRYYKEDKKFIERKDFKYRIFDDTQEISNIGIFMLTCLLLEKKYASEFADQTDFFGKNLEPKRRPT |
| | ENEILIMREAVSVYRIRLPKDRMQSDRGESALGLDMLNELKKCPRELFDTLSPADQETFRVEANDNEDGKV |
| | LLLRSHDRFPTLALQYIDYKQLFAHIHFQVQLGNYRYKFYEKEWIDKSKEQTDKDGADERIRILQKELTGY |
| | GRLQEIESQRNERWGHIIRKIDAPRQDALDTQPYVTDHHASYLFNNNRIGLLWNTEKEHPLRNGVFMPSLE |
| | LPSWLDDYPAKAAELRGTAQKTDEKVAECRAPMCWLSTYELPAVIFLSLLTGSGQAAEELIKNTTAAYRR |
| | LFADIASGKLLPGGDLTPYGIELKLLPEKIQDYLTGKEVDMN |
| ULOJ01.1 | MKQNTNNRQSKNKGRKNEGSFQELTPRFFDDVKTKAVWANYLNMARQNTYQTLCHITHVLGLAYNPED |
| SEQ ID NO: | KELEANLLQIPAVTLLLKKGNAEKKQKAMKLLDKHFPFMTPMLEQYVKLQQEKSTRGKETTPEDYYAILN |
| 4486 | MILPLINLLRNKYTHYKIEDPKLDASGKIADPGILDNCHILARLLNFCFDGARRIVKERFGTGENAPLKDEDF |
| | DFLTEEGKRYYKEDKKFIERKDFKYRIFHDTQKISNIGIFMLTCLLLEKKYASEFADQTDFFGKNLEPQRRPT |
| | ENEILIMREAISVYRIRLPKDRMQSDRGESALGLDMLNELKKCPRELFDTLSPADQETFRVEANDNEDGKVL |
| | LLRSHDRFPTLTLQYIDYKQLFAHIRFQVQLGNYRYKFYEKEWIDKSKEQRDKDGADERIRILQKELTGYG |
| | RLQEIESQRNERWGHIIRKIDAPRQDALDTQPYVTDHHASYLFNNNRIGLLWNTEKEHPLRNGVFMPSLELP |
| | SWLDDYPAK |
| IMG_ | MSYKNQEEKYFFSVYLNLARLNAYLTLSHITKLLGKKPSPKEESLVTMPIIEALNGIDQLLLQKSQRLILKHF |
| 3300000230 | PFFKAIVEKEKSKATDENKLLYDVCKLFFHFLNEWRNFYTHYNHAPVNFQDDAEKENFFKYLDFIFDASLR |
| SEQ ID NO: | KGKERFTWDEKNLKRFRYKSGYDKVKKLPKENPDFQYQFHKNNDLTEKGFIYFVCMFLERKDSADLINAL |
| 4487 | AAVYNFQKTEESIFREIYSIYAIRIPHHRVESTDSMLTLGLDILNELKRFPKSLYEILRKSEKETFIENIKDEGQ |
| | NETNFKRFNERFPYFALNFIDELKLFKDYRFHVKLGKYYFQFYDKNTVDGEIRKRDLSVNLKTFGRINEVN |
| | DVRKKDWKDLIWDDNEGETPTPPKEYAKKYITNSFPRYILESNQIGLKKVPNVSLPELNDKKTRCLAPDCY |
| | LSVFELPALIFYGLLLNKNREAEAIMTFLPIELVIVKFISSVKKFFKHFHGGKSNYLFLKNKFPIRCPILQLI |
| UYCW01.1 | VFLSKLPNPGNYPSNSKESRIIRRSMGVCSVALPKERIHSETGDLSVALDMLNELKRCPRELFDTLSPGDQER |
| SEQ ID NO: | FRTISSDHNEVLQMRSKDRFAQLVLQYIDHNRLFENLRFHVNMGKLRYLFNPKKYCIDGQTRVRVLEHPLN |
| 4488 | GFGRLQEMEKERLQKDGTFADSGIKVRCFDEVRRDDADSNNYPYIVDTYTHYVLENDMVEMFFCPEGSG |
| | MKMPEVTSREGKWYVDKKVPHCRMRMSVLELPAMLFHLLLCGAKNTEVHIGKVCDNYCHLFSDMAQGN |
| | LTEENILSYGIKKEDIPQKVWDCVRGVHTGKDCRVFRKKEIRGRYEDVTRRLERLEADRKAVLGGENKIGK |
| | RGFVQIVPGRLAAYLATDICRLQPSLRKGAEYGTDRLTGMNFRLLQSSIATYNCGESDILYGRFRDMYSAV |
| | LD |
| ULPT01.1 | VFLSKLPNPGNYPSNSKESRIIRRSMGVCSVALPKERIHSETGDLSVALDMLNELKRCPRELFDTLSPGDQER |
| SEQ ID NO: | FRTISSDHNEVLQMRSKDRFAQLVLQYIDHNRLFENLRFHVNMGKLRYLFNPKKYCIDGQTRVRVLEHPLN |
| 4489 | GFGRLQEMEKERLQKDGTFADSGIKVRCFDEVRRDDADSNNYPYIVDTYTHYVLENDMVEMFFCPEGSG |
| | MKMPEVTSREGKWYVDKKVPHCRMRMSVLELPAMLFHLLLCGAKNTEVHIGKVCDNYCHLFSDMAQGN |
| | LTEENILSYGIKKEDIPQKVWDCVRGVHTGKDCRVFRKKEIRGRYEDVTRRLERLEADRKAVLGGENKIGK |
| | RGFVQIVPGRLAAYLATDICRLQPSLRKGAEYGTDRLTGMNFRLLQSSIATYNCGESDILYGRFRDMYSAV |
| | LD |
| OUQN01.1 | LSVFGKKYVNVFLQKLPIYGTYKKQSLEANIIRQTFGIHTAKLPKERIVSEKSDFSIGMDMLNELKRCPKALF |
| SEQ ID NO: | STLSYADQNAFRIVSSDMNDVLQVRHTDRFAQLSLEYIDRRELFSDIRFHLNMGKLRYLKTADKHCIDGISR |
| 4490 | VRVLEDKINAFGRIHEFEARRKELGFVECYEQGGRAISTNTNIEIRDFEHVKRDDSNPDSYPYIIDTYTHYILE |
| | NNKIGMHIGDYWPDLIKLDEHKWTVYNENPTCFMSSLELPAMMFHMMLCGSDATESLIKAEVDKYKKLF |
| | GAMANGTLTKENISGFGIAEENIPQKVIDCVNGKTSGKGLDKQIKKEIDEMLADTNLRIERLKSDKRSVAST |
| | QNKMGKRGFRSIQPGKLADWLAADIVKHQPSLLKGVDYGTDRITGMNYRVMQSTIATFNATTPEHSLEEL |
| | KKVFSAAQFIQCEKKEHPFLYKALDRNPQNTIDLYEFYLSARQSYYKSMRRNIENGENVKLPYLNTDRNK |
| | WMRRGSVYYSTMGEIYLKDMPIELPRQMFDKKIKEALAKLPSMKDVDMQHCNVTFLIAEYLKKELKDDS |
| | QPFYQWNRNYRFTDMMICEENRSTRALSTHFIPVALREEIWEKRSELKAAYKEWALPRLSKNRDTERLSPA |
| | QKSELLDARIAKCRNEYQKNEKIIRRYKVQDALMFMMVKDMFGKGVFTAESKEFALSAITPDAKRGILSEV |
| | IPIDFKFSIDGKTYTIHSNGMKIKNYGDFYKLINDKRMKSILKIITHNVIDKDLLEKEFSSYDDKRPEAIEIVFE |
| | FEKAAYSKYPELEELVLSENHFDFGTLLRELQAKKVLSQNDGHYLSQIRNAFSHNSYPRNLRIPSNIPEIAQE |
| | MINIFRITTPLKTKK |
| OQWI01.1 | LSVFGKKYVNVFLQKLPIYGTYKKQSMEANIIRQTFGIHTAKLPKERIVSEKSDFSIGMDMLNELKRCPKAL |
| SEQ ID NO: | FSTLSYADQNAFRIVSSDMNDVLQVRHTDRFAQLSLEYIDRSELFSDIRFHLNMGKLRYLKTADKHCIDGIS |
| 4491 | RVRVLEDKINAFGRIHEFEARRKEQGFVEGYEQGGRAISTNTNIEIRDFEHVKRDDSNPDSYPYIIDTYTHYI |
| | LENNKIGMHIGDYWPDLIKLDEHKWTVYNENPTCFMSSLELPAMMFHMMLCGSDATESLIKAAVDKYKK |
| | LFGAMANGTLTKENISGFGIAEENIPQKVIDCVNGKTSGKGLDKQIKKEIDEMLADTNLRIERLKSDKRSVA |
| | STQNKMGKRGFRSIQPGKLADWLAADIVKHQPSLLKGVDYGTDRITGMNYRVMQSTIATFNATTPEHSLE |
| | ELKKVFSAAQLIQCEKKEHPFLYKALNRNPQNTIELYEFYLSAKQSYYKSMRRNIENGENVKLPYLNTDRN |
| | KWMRRGSVYYSTMGEIYLKDMPIELPRQMFDKKIKEALAKLPSMKDVDMQHSNVTFLIAEYLKKELKDD |
| | FQPFYQWNRNYRFTDMMICEENRSTRALSTHFIPVALREEIWEKRSELKAAYKEWALPRLSKNRDTERLSP |
| | AQKSELLDARIAKCRNEYQKNEKIIRRYKVQDALMFMMVKDMFGKGVFTAESKEFALSAITPDAKRGILSE |
| | VIPIDFKFSIDGKTYTIHSNGMKIKNYGDFYKLINDKRMKSILKIITHNVIDKDLLEKEFSSYDDKRPEAIEIVF |
| | EFEKAAYSKYPELEELVLSENHFDFGTLLRELQAKKVLSQNDGHYLSQIRNAFSHNSYPRNLRITSNIPEIAQ |
| | EMINIFRITTPLKTKK |
| GCA_ | MKIPQIIEDNKHLFGTYSTMALANIRNILDHIATLACIENDFNADSDDFWHHPCMEIINPQNLCNDVTKADF |
| 900543255.1_ | VTEKLKSHFPFVVIMAEAKRQKDIAWAKNQAKKAFENRDFQKQQEFNKKQKSLLSITNADIYRVLNNLFR |
| UMGS549_ | VLTSYRHYTSHYLINYIYFNEGSNLLKYHEQPLSYNINDYFTIALRDTAQKYSYSPEALSFIQSSRYKIENRR |
| genomic | KILDTDFFLSIQHRNGDSSPKNLHISGVGVALLICLFLEKKYVNVFLQKLPIYGTYKKQSMEANIIRQTFGIHT |
| SEQ ID NO: | AKLPKERIVSEKSDFSIGMDMLNELKRCPKALFSTLSYADQNAFRIVSSDLNDVLQVRHTDRFAQLSLEYID |
| 4492 | RRELFSDIRFHLNMGKLRYLKTADKHCIDGISRVRVLEDKINAFGRIHEFEARRKELGFVECYEQGGRAIST |
| | NTNIEIRDFEHVKRDDSNPDSYPYIIDTYTHYILENNKIGMHIGDYWPDLIKLDEHKWTVYNENPTCFMSSL |
| | ELPAMMFHMMLCGSDATESLIKAEVDKYKKLFGAMANGTLTKENISGFGIAEENIPQKVIDCVNGKTSGK |
| | GLDKQIKKEIDEMLADTNLRIERLKSDKRSVASTQNKMGKRGFRSIQPGKLADWLAADIVKHQPSLLKGV |
| | DYGTDRITGMNYRVMQSTIATFNATTPEHSLEELKKVFSAAQLIQCEKKEHPFLYKALDRNPQNTIDLYEFY |
| | LSARQSYYKSMRRNIENGENVKLPYLNTDRNKWMRRGSVYYSTMGEIYLKDMPIELPRQMFDKKIKEALA |
| | KLPSMKDVDMQHSNVTFLIAEYLKKELKDDFQPFYQWNRNYRFTDMMICEKTALQEH |
| OJAW01.1 | MKIPQIIEDNKHLFGTYSTMALANIRNILDHIATLACIENDFNADSDDFWHHPCMEIINPQNLCNDVTKADF |
| SEQ ID NO: | VTEKLKSHFPFVVIMAEAKRQKDIAWAKNQAKKAFENRDFQKQQEFNKKQKSLLSITNADIYRVLNNLFR |
| 4493 | VLTSYRHYTSHYLINYIYFNEGSNLLKYHEQPLSYNINDYFTIALRDTAQKYSYSPEALSFIQSSRYKIENRR |
| | KILDTDFFLSIQHRNGDSSPKNLHISGVGVALLICLFLEKKYVNVFLQKLPIYGTYKKQSMEANIIRQTFGIHT |
| | AKLPKERIVSEKSDFSIGMDMLNELKRCPKALFSTLSYADQNAFRIVSSDLNDVLQVRHTDRFAQLSLEYID |
| | RRELFSDIRFHLNMGKLRYLKTADKHCIDGISRVRVLEDKINAFGRIHEFEARRKELGFVECYEQGGRAIST |
| | NTNIEIRDFEHVKRDDSNPDSYPYIIDTYTHYILENNKIGMHIGDYWPDLIKLDEHKWTVYNENPTCFMSSL |
| | ELPAMMFHMMLCGSDATESLIKAEVDKYKKLFGAMANGTLTKENISGFGIAEENIPQKVTDCVNGKTSGK |
| | GLDKQIKKEIDEMLADTNLRIERLKSDKRSVASTQNKMGKRGFRSIQPGKLADWLAADIVKHQPSLLKGV |
| | DYGTDRITGMNYRVMQSTIATFNATTPEHSLEELKKVFSAAQLIQCEKKEHPFLYKALDRNPQNTIDLYEFY |
| | LSARQSYYKSMRRNIENGENVKLPYLNTDRNKWMRRGSVYYSTMGEIYLKDMPIELPRQMFDKKIKEALA |
| | KLPSMKDVDMQHSNVTFLIAEYLKKELKDDFQPFYQWNRNYRFTDMMICEKTALQEH |
| OVJZ01.1 | MRIPSLIENNKKYYAIHSEMALLNAQAVLDHIQKMAGIEACAYNEKEKKPSDEDLWVHPVMIFLDKAKTS |
| SEQ ID NO: | EVKAEKVQYVIERLCSYFPFMNIMAQFQREYDNEHNKTNRLEVNANDMYDALNKIFRVLKKYRDYSAHY |
| 4494 | KFEDNCFIDGCAFLRYSEQPLASMVRKYYDVALRNIKEKYNYKTEELAFIQNKRYKITKGIDGRKKTVGNP |
| | NFFLTLTSNNGDTTNKWHLSGVGVALLISLFLDKQYVNLFWTRLPIFSDNKLKEDERRVIIRSMGINSVKLP |
| | KDRIHMDKDDMSVAMDMLNELKRCPDELFDILPAEKQAHFRIISSDHNEVLMKRSTDRFTSMLLQYIDYG |
| | KKFKQIRFHVNMGKLRYLLNAEKNCIDGNIRTRVTEHPLNGYGRIDEIEELRKNEDMTYADTGIRIKDFESM |
| | TRDDSDTANYPYVVDTYTHYLLENNKVEFSFCGNSSLPEVSERNGKWYVSKDVPACRMSILELPAMAFHM |
| | LLLGSEKTEARIKSVYD |
| IMG_ | MAQTRWKQSKTPAIKPVMAAYLNMARHNMYRVMLHISRQMQIIENKEEAEIAAFSVWQKLSSGTPTEQM |
| 3300028914 | KMIKLLQRHFPVLKPVFDVEKKKNVENAAISASPKEIKRIFTTILTALNRLRNEYSHYSPVPRKTEGEEKMIA |
| SEQ ID NO: | YLYRCMDGSAREVRNRFSLTVKDPKGAKETAKVLEVNKAVFDIFQDAFRKEKVKALDKSGKVTKDNKGR |
| 4495 | TQFEFRDKEDYYYALKDANAALSDMGIVFFTCLFLEKRYAAMFLDAIKPWPQDFNEIERKAVLEVFTVYHI |
| | HLPKEKYDSTRPEYALGLDMLNELQKCPKELFDILSAKSRDALSVDIKADRPDVVTDDGVTVKDGKVQMR |
| | RVRDRFAPLALQYLDSQKAFNDIRFMVRLGHYRFKFYKKQCVADNAPDTLRVLQKEINGFGRLDEMEAA |
| | RKKNYTPLFKATCVKTNDKGIEVHELVPDAPDSAPYITDTKAHYLIDNNRVGLRIDNPSFLPSLRGEKGAPI |
| | QSAGDISLLSPQAWLSTYELPGLVFYQYLYDTYDGHGKHLPSAEEIIKSYILAYKRLFVDLGEGSFDGWDEY |
| | AYAPLTLGDLPQKIKGFILHPSATIDPRFQDKANNRIDDMIKRTEAEIAGFDTKMKKLSDKSNKLGKKKYV |
| | DIRPGSIASRLVRDILFFTPVSEEKAKITSANFNSLQSALALSELGTNRIKDILRGLNHPFVMKAFEKYRVEDF |
| | HLFDFWKVYLNKRLDYLKGLDREKLEEVPFLHSSRTRWQKRDEKYIKLLAGRYEQFELPRSLFTAPTRVLL |
| | DEVALHFESGSDRDLSMGNLINLFFSKVLSDNNQPFYRWERHYDVFDKLAGVKSGISLVHQFFKPEQLAKK |
| | MRERKTLKPSLYMCEKAVNSVNQNLK |
| GCA_ | MFLDAIKPWPQEFNDTEKKAVLEVLSVFHIRPPKEKYDSQRPDYALGLDMLNELQMCPSELFEVLSDKSRD |
| 002438905.1_ | MLSVDIHAQGEDVVQDDGVTGRDGKVQMKRIRDRFAPLALQYIDRQEVFDNIRFMVRLGNYRFKFYKKQ |
| ASM243890v1_ | CLADNGPDTLRILQKEINGFGRIQEVEIERKRKYSALFKKTRTTTDESEAKTKIQELVADTPDSKPYMTDTK |
| genomic | VHYLFSNNRVGLRLFNDSSKLDIPEVTKQGLPLTSASEVKLLLPDAWLSIYELPGLIFYQHLYKEYGAKGNY |
| SEQ ID NO: | PSAEDILKSYIDAYRRLFSDIEDGTFLGWDDTKYKPLSQDVLPIKIKKYIQNGNGVQSAYFHKKARERIKEM |
| 4496 | CEQTQAELNGFKSKISKMTSKDNKFKKGHYVDLRPGSISMRLCRDILFFMEIPEEKSVITSANFNSLQSALA |
| | MSATTNDKVDEMLSPLKHPFLQEALKKYHNLSNGKYFKVFDFYKIYLEKRANYLELLKKISSDQLIKLPFL |
| | HYSRIRWRDRSNSSIKELAGRYEQFELPRSLFTQYAKKILVENCALSLEAETAERKLGMSNLVNTYFQTVM |
| | NDTTQKFYRWPRHYRAFDLLGGKTIRNQVVHEFMTPIQLQKMMRDRKSLKPNGLILDKAKNAVKQEKGK |
| | KKITDKDLANQILRKVYKEYDENERTIRRYAVQDMLMFLMAKDILLGIDGIEKESLDKFKLKDILPNNKETI |
| | LELMVPFNVSLIVNGINVTIHQEENIKIKRFGEFYRYNSDTRLKSLIPYLVKNLGTCAGVSIEIDRDKLETELS |
| | QYDLNRIEVMKQVQSLEQSIIAGAGGKNNIDKTLRENFNNLITIQGNIPYENQGRVLINVRNAFCHNEYAKD |
| | IDIPANTPLPQVADAIVKLFKTEKRRNKRKDN |
| UYAX01.1 | MNTHQEELQSWITRKRLPDTEMKKYWAAYMNLARLNFFKTLMFISNSIGDLKPAKDNNGKGNTEVNMHN |
| SEQ ID NO: | MGILTALLGPEDEEKARLLIFKHFPFLRTFCIEKELSLSKQRTILIDMACIIGRYRNMYSHSIFISDDNEKVLES |
| 4497 | EKRCSEYLQSILTVSTRIIKERYRSNKNDAQRGMIDDKSLKFISENKVKFVYDENGKRITAPNKKYYLSTIDK |
| | DNTHLSYFGKLMLTCILLEKKYATDFLTQCHFLDAFNDSEVAPKLSERRLMLEVMTALRIRLAEKKLSNEK |
| | SEVQISLDILNELKKCPFELYELLGSEDKRLFTIVADTGETILLRRHEDRFPQLALSWIDSSKAFDHLRFQVNA |
| | GKLRYLFRDNKHCIDGQTRMRVLEEPLNGYRRLMEFEEERIQKQSGEIRSLWPGLDILNKDETPRNDASVL |
| | PYISDYRVRYLFDGDNIGISIGDFTPSITKTDETKYRVTGKTADCCLSKYELPGLLFYHLLTLRHGDNKRSTK |
| | HA |
| OOVA01.1 | MNTHQEELQSWITRKRLPDTEMKKYWAAYMNLARLNFFKTLMFISNSIGDLKPAKDNNGKGNTEVNMHN |
| SEQ ID NO: | MGILTALLGPEDEEKARLLIFKHFPFLRTFCIEKELSLSKQRTILIDMACIIGRYRNMYSHSIFISDDNEKVLES |
| 4498 | EKRCSEYLQSILTVSTRIIKERYRSNKNDAQRGMIDDKSLKFISENKVKFVYDENGKRITAPNKKYYLSTIDK |
| | DNTHLSYFGKLMLTCILLEKKYATDFLTQCHFLDAFNDSEVAPKLSERRLMLEVMTALRIRLAEKKLSNEK |
| | SEVQISLDILNELKKCPFELYELLGSEDKRLFTIVADTGETILLRRHEDRFPQLALSWIDSSKAFDHLRFQVNA |
| | GKLRYLFRDNKHCIDGQTRMRVLEEPLNGYRRLMEFEEERIQKQSGEIRSLWPGLDILNKDETPRNDASVL |
| | PYISDYRVRYLFDGDNIGISIGDFTPSITKTDETKYRVTGKTADCCLSKYELPGLLFYHLLTLRHGDNK |
| ULIX01.1 | MNTHQEELQSWITRKRLPDTEMKKYWAAYMNLARLNFFKTLMFISNSIGDLKPAKDNNGKGNTEVNMHN |
| SEQ ID NO: | MGILTALLGPEDEEKARLLIFKHFPFLRTFCIEKELSLSKQRTILIDMACIIGRYRNMYSHSIFISDDNEKVLES |
| 4499 | EKRCSEYLQSILTVSTRIIKERYRSNKNDAQRGMIDDKSLKFISENKVKFVYDENGKRITAPNKKYYLSTIDK |
| | DNTHLSYFGKLMLTCILLEKKYATDFLTQCHFLDAFNDSEVAPKLSERRLMLEVMTALRIRLAEKKLSNEK |
| | SEVQISLDILNELKKCPFELYELLGSEDKRLFTIVADTGETILLRRHEDRFPQLALSWIDSSKAFDHLRFQVNA |
| | GKLRYLFRDNKHCIDGQTRMRVLEEPLNGYRRLMEFEEERIQKQSGEIRSLWPGLDILNKDETPRNDASVL |
| | PYISDYRVRYLFDGDNIGISIGDFTPSITKTDETKYRVTGKTADCCLSKYELPGLLFYHLLTLR |
| OZPT01.1 | LILSFIIFNFIVIINQHTLNTYTRKYMKDKSFSTISSAINETITTDNIKYPEQLNLILSKRLRPKNELQPLWAAYF |
| SEQ ID NO: | NMARYNMYTTLVHIATATGLSDEDNMENRMDKMRILNEPVEPEIEHRLRKLLCRHFPFAVWMICSPIRKK |
| 4500 | DSKEDSADEDYRVISVKELRDCLKTVSYTLNYFRNYYSHTRHVETRSEDIIAASRNSEKQTGIFLNKVCTVA |
| | TRRVKSRFSDKSNKGQAGMIDDQSMKFITEGKVKFRNNNGIKETIYNPDHFLYPLFLNRSSALRDGTNPERL |
| | STVGKIQLICLLLDKKYITEFLDQSGFLSAFNNDAPAPKLSERRLILEVLSDLRIRLPQRKIDATCNDIQVALD |
| | MLNELKKCPKELFELLEAKDKATFSILSSTGEHILLRRSSDRFTQLALQWFDVNKAFSRIRFHMNAGIFRYLF |
| | NDSKTCIDGKTRLRVLQEPLNCFGRIQEVEDSRESNRDGNDGPWRGFEIKGFDEAARNDVNCLPY |
| IMG_ | MGYLPSYVLAAYYNDARLNIFACLNDVRQKLGKQALDNDDQIVSAIKELGLTKATPEDQARIIQYLHASFG |
| 3300005479 | FLGVFMDVTKAKNKQTNPEQATPLPRYYEERLIWLFSLVNDLRNTFVHPTDGECEIPRLVHRRLYFLLSRV |
| SEQ ID NO: | YDASFHVLKTRFSYSTEAMRPFMRCDQKGKPKRANQFLFALASDPLNLTDQTKTPQSQVFHAFGQVLFCS |
| 4501 | LFLEKSQSAELISHFWEFVPQKLQAAWSTEQRKLIRELITIYRLRLPLQRLQSTDSTVAITLDSLAELSRCPLP |
| | LFETLSLEDQARFRFEAETTSDAEEAGSSVLFARSRDERFPSLMMRFLDFDPTNRLRFAVDLGQLHYHVRL |
| | KSAEHFTDQRARIRSLGQKIVAYGCLQAFEQAEKPADWQILENNYTQMRAEAEGLIQEAASGMSTLRPYLI |
| | PAYPHYHYFPERIGFRVDQAKTKQTASYPDLQAVTAEQAVRLEPPSAQDMQPQFWMSHEQLLQLSFYHFL |
| | WKQQGADAKQPSLDQLLLRYESGMKRLFKALSAGDGLECKTPAELQAWLDELFNTRQQFAVPVSSLPKV |
| | LVQHLLTKKQKPITRAMVEQRIQHLLAETDYRLEQLKTILASEKKRGQKGFKLLKCGPIGDFLAEDLLRFQ |
| | AVDSSKSDGGKLNSQQYQILQKTLAYYGAHLEEPPKITDLLADFGLLSGAWAHPFLADLGLTQRPDQYQG |
| | LLSFYAAYLKARRRFLKRFAAIPKQWSLQALPAWLGLKPKATLANWQAELWDGEQLRQPLPVPDQFLYRP |
| | ILNLVAAALQLAPQALEQEGSVSYEQGGAKVWIPPSVTWLLKRYLAAQGQEMQAMYTYPRRHHLLDTWL |
| | DQRSKQFAEKHKHYLPETERQQYTVAIRQWC |
| AATN01.1 | MGYLPSYVLAAYYNDARLNIFACLNDVRQKLGKQALDNDDQIVSAIKELGLTKATPEDQARIIQYLHASFG |
| SEQ ID NO: | FLGVFMDVTKAKNKQTNPEQATPLPRYYEERLIWLFSLVNDLRNTFVHPTDGECEIPRLVHRRLYFLLSRV |
| 4502 | YDASFHVLKTRFSYSTEAMRPFMRCDQKGKPKRANQFLFALASDPLNLTDQTKTPQSQVFHAFGQVLFCS |
| | LFLEKSQSAELISHFWEFVPQKLQAAWSTEQRKLIRELITIYRLRLPLQRLQSTDSTVAITLDSLAELSRCPLP |
| | LFETLSLEDQARFRFEAETTSDAEEAGSSVLFARSRDERFPSLMMRFLDFDPTNRLRFAVDLGQLHYHVRL |
| | KSAEHFTDQRARIRSLGQKIVAYGCLQAFEQAEKPADWQILENNYTQMRAEAEGLIQEAASGMSTLRPYLI |
| | PAYPHYHYFPERIGFRVDQAKTKQTASYPDLQAVTAEQAVRLEPPSAQDMQPQFWMSHEQLLQLSFYHFL |
| | WKQQGADAKQPSLDQLLLRYESGMKRLFKALSAGDGLECKTPAELQAWLDELFNTRQQFAVPVSSLPKV |
| | LVQHLLTKKQKPITRAMVEQRIQHLLAETDYRLEQLKTILASEKKRGQKGFKLLKCGPIGDFLAEDLLRFQ |
| | AVDSSKSDGGKLNSQQYQILQKTLAYYGAHLEEPPKITDLLADFGLLSGAWAHPFLADLGLTQRPDQYQG |
| | LLSFYAAYLKARRRFLKRFAAIPKQWSLQALPAWLGLKPKATLANWQAELWDGEQLRQPLPVPDQFLYRP |
| | ILNLVAAALQLAPQALEQEGSVSYEQGGAKVWIPPSVTWLLKRYLAAQGQEMQAMYTYPRRHHLLDTWL |
| | DQRSKQFAEKHKHYLPETERQQYTVAIRQ |
| IMG_ | MRLDQAVLAAFYNDARLNILSCLNDIREKQGLSFIGDDAQIVSAFNDLSHILTQGTPEEASALIDRLRYRFPF |
| 3300021975 | IDTRTDASSRHKDFTPVPDNFQHIFQRIFKLINSLRNTLVHPVNSPLLLDMDQHKNLFFMLNDIYDDARRLL |
| SEQ ID NO: | KTRFDWSTRDLMPLLRCDHKGKPKAVNKFSFALCSDPKSRSNSPVIGYNRVLYDFGHVLLCSLFLDKSQSA |
| 4503 | DLIHHFWQSGHGKFWQNQKHREMIKELISAYHIRLPLQRLKADSLTTLTIDALSELSRCPQPLLKTLKKEDK |
| | DKFREALGTLDNIDISDDAGNGAGNAAANSARKQSQAEQQASYLLARSHEDRFVPLMMRFLEHDPANKLR |
| | FAIDLGQFYYHVRLKSGDFFTDNKPRVRRLGQKLICYGHLNNLNKSDFWQQLEDNFALSSQEAKQAETLA |
| | SAEPLQLKPYLVKTIPHYHFDNNKIGFRLAQSTGKSTDKRANKSANQKTDYPKYPEDKGISVEDIRQPIQLD |
| | KIPAEQMQAEFWISPAQMLHIGFYHYLYQHQQNATSGKATQSKSIEVLLNTYKAGTLRLFKALKKQMPEL |
| | AGEAFSAERHQAVQDYINGFYAAKGNNSDNSDYHISMANLPKVLVNALLGAQQQQVIPKQQIIDRANKLL |
| | QSTEQRQRQLERQLNAFKKRGHKDFRPIKCGNIGDFLTDDIIRFQAVDPSQNDGGKLNSQQYQILQKTLAY |
| | YGKYIDEPPQIIDLFQDFGLIEGDFKHPFLDKLGLQKNPHKYKGLLDFYKDYEKLILKSILIELAVMTIINNNR |
| | YKLHTGCA |
| IMG_ | MRLDQAVLAAFYNDARLNILNCLNDIREKQGLSIIGAGDHADATQIVSAFNDLSYILTHGTPEEASALIDRL |
| 3300021792 | RYRFPFIDTCTDANSRHKDFTPVPDNFQHIFERIFKLINALRNTLVHPVNTPLLLDMDQHKDLFFMLNDIYD |
| SEQ ID NO: | DARRLLKTRFDWSNDELKPLLRCDHKGKPKAVNKFSFALCSAPNSASKSRSNHTAIGYNEVLYDFGHVLL |
| 4504 | CSLFLDKSQSADLITYFWQSGHDKFWRNPKHREMIKELISVYHIRLPLQRLKADSLKTLTIDALSELSRCPRP |
| | LLKTLKKEDKDKFREALDPLDNIDPENVAGNGAIDSSAKSQNQVEQQASYLLARSHEDRFIPLMMRFLEHD |
| | PANKLRFAIDLGHFYYHVRLKSGNFFTDNKPRVRRLGQKLITYGHLNSLNKSDFWQQLEDNFALSNQEAE |
| | QAKKIANAKPLQLKPYLIKTIPHYHYDHNKIGIRLAQSTDKSTDKSTDKSTDKNANQKTDYPKYPEDKGIN |
| | V |
| IMG_ | MESIIGLGLSFNPYKTADKHYFGSFLNLADNNLKAVFAEFKERISDKSKDEDISNLIEKHFIDNMSIVDYEKN |
| 3300031208 | ISILNGYLPIIDFLDDELENNLNTRVKNFKKSFIILAEALETLRNYYTHFYHDPITFGDNKEPLLELLDEVLLKT |
| SEQ ID NO: | ILDVKKKYLKTDKTKEILKDSLREEMDLLVIRKTDELREKKKTNPKFKFSTDPTQIRNSIFNDAFQGLLYED |
| 4505 | KENNGKTQVSYRAKTKLNPKDIHKQEERDFEIPLSTSGIVFLMSLFLSKKEIEDFKSNIKGFKGKVVKDENH |
| | NSLKYMATHRVYSILAFKGLKYRIKTDTFSKVTLMMQMIDELSKVPDCVYQNLSETKQKDFIEDWNEYLK |
| | DNEENTENLENSRVVHPLIRKRYEDKFNYFAIRFLDEFANFKTLKFQVFMGYYIHDQRTKTIGTTNITTERT |
| | VKEKINVFGKLSKMDNLKKHFFSQLSDEENTDWEFFPNPSYNFLTQADNSPANNIPIYLELKNQQIIKEKDDI |
| | KAEVNNSQNRNPNKPSKRDLLNKISNTNEDFYQGDPTAILSLNEIPALLHLFLVQPDNKTGQQIENIIRIKIEK |
| | QFNSIKNPSKDDKGVPKSLFADTNVRVNAIKLKKDLGEELDMLNKKQIVFKENQKASSNYDELLKKHQFTP |
| | KNKRPALRKYVFYNSEKGEEATWLANDIKRFMPKGFKTKWKGYQHSELQRKLAFYDRHTKQDIKELLSG |
| | CEFDHFLLDINACFKEDD |
| IMG_ | MESIIGLGLSFNPYKTADKHYFGSFLNLADNNLKAVFAEFKERISDKSKDEDISNLIEKHFIDNMSIVDYEKN |
| 3300028348 | ISILNGYLPIIDFLDDELENNLNTRVKNFKKSFIILAEALETLRNYYTHFYHDPITFGDNKEPLLELLDEVLLKT |
| SEQ ID NO: | ILDVKKKYLKTDKTKEILKDSLREEMDLLVIRKTDELREKKKTNPKFKFSTDPTQIRNSIFNDAFQGLLYED |
| 4506 | KENNGKTQVSYRAKTKLNPKDIHKQEERDFEIPLSTSGIVFLMSLFLSKKEIEDFKSNIKGFKGKVVKDENH |
| | NSLKYMATHRVYSILAFKGLKYRIKTDTFSKVTLMMQMIDELSKVPDCVYQNLSETKQKDFIEDWNEYLK |
| | DNEENTENLENSRVVHPLIRKRYEDKFNYFAIRFLDEFANFKTLKFQVFMGYYIHDQRTKTIGTTNITTERT |
| | VKEKINVFGKLSKMDNLKKHFFSQLSDEENTDWEFFPNPSYNFLTQADNSPANNIPIYLELKNQQIIKEKDDI |
| | KAEVNNSQNRNPNKPSKRDLLNKISNTNEDFYQGDPTAILSLNEIPALLHLFLVQPDNKTGQQIENIIRIKIEK |
| | QFIEVSS |
| IMG_ | MESIIGLGLSFNPYKTADKHYFGSFLNLADNNLKAVFAEFKERISDKSKDEDISNLIEKHFIDNMSIVDYEKN |
| 3300028412 | ISILNGYLPIIDFLDDELENNLNTRVKNFKKSFIILAEALETLRNYYTHFYHDPITFGDNKEPLLELLDEVLLKT |
| SEQ ID NO: | ILDVKKKYLKTDKTKEILKDSLREEMDLLVIRKTDELREKKKTNPKFKFSTDPTQIRNSIFNDAFQGLLYED |
| 4507 | KENNGKTQVSYRAKTKLNPKDIHKQEERDFEIPLSTSGIVFLMSLFLSKKEIEDFKSNIKGFKGKVVKDENH |
| | NSLKYMATHRVYSILAFKGLKYRIKTDTFSKVTLMMQMIDELSKVPDCVYQNLSETKQKDFIEDWNEYLK |
| | DNEENTENLENSRVVHPLIRKRYEDKFNYFAIRFLDEFANFKTLKFQVFMGYYIHDQRTKTIGTTNITTERT |
| | VKEKINVFGKLSKMDNLKKHFFSQLSDEENTDWEFFPNPSYNFLTQADNSPANNIPIYLELKNQQIIKEKDDI |
| | KAEVNNSQNRNPNKPSKRDLLNKISNTNEDFYQGDPTAILSLNEIPALLHLFLVQPDNKTGQQIENIIRIKIEK |
| | QFIEVSS |
| IMG_ | MESIIGLGLSFNPYKTADKHYFGSFLNLADNNLKAVFAEFKERISDKSKDEDISNLIEKHFIDNMSIVDYEKN |
| 3300012128 | ISILNGYLPIIDFLDDELENNLNTRVKNFKKSFIILAEALETLRNYYTHFYHDPITFGDNKEPLLELLDEVLLKT |
| SEQ ID NO: | ILDVKKKYLKTDKTKEILKDSLREEMDLLVIRKTDELREKKKTNPKFKFSTDPTQIRNSIFNDAFQGLLYED |
| 4508 | KENNGKTQVSYRAKTKLNPKDIHKQEERDFEIPLSTSGIVFLMSLFLSKKEIEDFKSNIKGFKGKVVKDENH |
| | NSLKYMATHRVYSILAFKGLKYRIKTDTFSKVTLMMQMIDELSKVPDCVYQNLSETKQKDFIEDWNEYLK |
| | DNEENTENLENSRVVHPLIRKRYEDKFNYFAIRFLDEFANFKTLKFQVFMGYYIHDQRTKTIGTTNITTERT |
| | VKEKINVFGKLSKMDNLKKHFFSQLSDEENTDWEFFPNPSYNFLTQADNSPANNIPIYLELKNQQIIKEKDDI |
| | KAEVNNSQNRNPNKPSKRDLLNKISNTNEDFYQGDPTAILSLNEIPALLHLFLVQPDNKTGQQIENIIRIKIEK |
| | QFIEVSS |
| IMG_ | LKAVFAEFKERISDKSKDEDISNLIEKHFIDNMSIVDYEKNISILNGYLPIIDFLDDELENNLNTRVKNFKKSFI |
| 3300023981 | ILAEALETLRNYYTHFYHDPITFGDNKEPLLELLDEVLLKTILDVKKKYLKTDKTKEILKDSLREEMDLLVIR |
| SEQ ID NO: | KTDELREKKKTNPKFKFSTDPTQIRNSIFNDAFQGLLYEDKENNGKTQVSYRAKTKLNPKDIHKQEERDFEI |
| 4509 | PLSTSGIVFLMSLFLSKKEIEDFKSNIKGFKGKVVKDENHNSLKYMATHRVYSILAFKGLKYRIKTDTFSKV |
| | TLMMQMIDELSKVPDCVYQNLSETKQKDFIEDWNEYLKDNEENTENLENSRVVHPLIRKRYEDKFNYFAI |
| | RFLDEFANFKTLKFQVFMGYYIHDQRTKTIGTTNITTERTVKEKINVFGKLSKMDNLKKHFFSQLSDEENTD |
| | WEFFPNPSYNFLTQADNSPANNIPIYLELKNQQIIKEKDDIKAEVNNSQNRNPNKPSKRDLLNKISNTNEDFY |
| | QGDPTAILSLNEIPALLHLFLVQPDNKTGQQIENIIRIKIEKQFNSIKNPSKDDKGVPKSLFADTNVRVNAIKL |
| | KKDLGEELDMLNKKQIVFKENQKASSNYDELLKKHQFTPKNKRPALRKYVFYNSEKGEEATWLANDIKRF |
| | MPKGFKTKWKGYQHSELQRKLAFYDRHTKQDIKELLSGCEFDHFLLDINACFKEDDFEDFFSKYLKNRIET |
| | LNIILKQLHDFKNEPTPLKGVFKNCLKFLKQKNYVTENPEIIKKRILAKPAFLPRGIFDERPTMKKGKKSFDR |
| IMG_ | MSLFLSKKEIEDFKSNIKGFKGKWKDENHNSLKYMATHRVYSILAFKGLKYRIKTDTFSKVTLMMQMIDE |
| 3300024002 | LSKVPDCVYQNLSETKQKDFIEDWNEYLKDNEENTENLENSRVVHPLIRKRYEDKFNYFAIRFLDEFANFK |
| SEQ ID NO: | TLKFQVFMGYYIHDQRTKTIGTTNITTERTVKEKINVFGKLSKMDNLKKHFFSQLSDEENTDWEFFPNPSYN |
| 4510 | FLTQADNSPANNIPIYLELKNQQIIKEKDDIKAEVNNSQNRNPNKPSKRDLLNKISNTNEDFYQGDPTAILSL |
| | NEIPALLHLFLVQPDNKTGQQIENIIRIKIEKQFNSIKNPSKDDKGVPKSLFADTNVRVNAIKLKKDLGEELD |
| | MLNKKQIVFKENQKASSNYDELLKKHQFTPKNKRPALRKYVFYNSEKGEEATWLANDIKRFMPKGFKTK |
| | WKGYQHSELQRKLAFYDRHTKQDIKELLSGCEFDHFLLDINACFKEDDFEDFFSKYLKNRIETLNIILKQLH |
| | DFKNEPTPLKGVFKNCLKFLKQKNYVTENPEIIKKRILAKPAFLPRGIFDERPTMKKGKNPLIDRDEFAKWF |
| | VEYLENKDYQKFYNSEEYRIRDADFKKNAVIKKQKLKDFYTLQMVNYLLKEVFGKDEMNLQLSELFQTR |
| | QERLKLQGIAKKQMNKETGDSSENTRNQTYIWNKDVPVSFFNGKVTIDKVKLKNIGKYKRYERDERVKTF |
| | IGYEVDEKWMMYLPHNWKDRYSVKPINVTDLQIQEYEEIRSHELLKEIQNLEQYIYDHTTDKNTLLQDGNP |
| | NFKMYVLNGLLTGIKQVNIADFIVLKQNTNFDKIDFTGIASCSELEKKTIILIAIRNKFAHNQLPNKTIYDLAN |
| | EFLKKEKRETYANYYLKVLKKMISDLA |
| IMG_ | LIDRDEFAKWFVEYLENKDYQKFYNSEEYRIRDADFKKNAVIKKQKLKDFYTLQMVNYLLKEVFGKDEM |
| 3300023981_2 | NLQLSELFQTRQERLKLQGIAKKQMNKETGDSSENTRNQTYIWNKDVPVSFFNGKVTIDKVKLKNIGKYK |
| SEQ ID NO: | RYERDERVKTFIGYEVDEKWMMYLPHNWKDRYSVKPINVTDLQIQEYEEIRSHELLKEIQNLEQYIYDHTT |
| 4511 | DKNTLLQDGNPNFKMYVLNGLLTGIKQVNIADFIVLKQNTNFDKIDFTGIASCSELEKKTIILIAIRNKFAHN |
| | QLPNKTIYDLANEFLKKEKRETYANYYLKVLKKMISDLA |
| IMG_ | MENNTTLGKGISYNPYKTADKHYFGGYFNLAMNNIEFVIAEFLTRIGRKETKIANLKKVFTENMSLVDYER |
| 3300027269 | YIHILEEYFPIIKHLDKIHFKINDTVKEVSKEKRITYFIDNFISLLDLTNNLRNFYTHYYHESIAIEENIFDFLDES |
| SEQ ID NO: | LLTTVRDTKENYLKSDKTKQILSISLKQELEILCSEKLNYLKENKIKFNRNDKEALINAVYNDAFKNFLYKK |
| 4512 | GEHFHLTDYKKTKILNPDKLEKDFDLDLSTSGIVYLLSFFLNRKELELFKGNIKGFKASVIRGTSDFEKNSIHF |
| | MATHRIYSVHCYRGLKKKIRSSNHDTKQVLLMQMLDELSKVPHVIYNSLDKELKDTFVEDWNEYFKDNEE |
| | NNENLENSRVIHPVIRKRYEDKFNYFALRFLDNCVDFPTLRFQVHVGDYVHHKMEKSLIDSKIISERIIKEKV |
| | TVFARLDEVNKAKADYFNSLQAENDNRWEFFPNPSYDFPKQNTEKIMGNAKQKNAEKIGIYIQLKNSNLIQ |
| | QTADAKEKLNPHKRSNTKLRKQEIIEKIINLNTDYKSKTPIVHTGEPVAYLSTHDLHSILYDLLIKGETAQAV |
| | EMKIQKQIEKQLREIVDKDTSVKILKKYNKEQTFSNINFSKLQNDLVKERDNLISLLDEHDYRIEDYDRTKK |
| | QRNYPHKRTYILYAAEKGKIAAWLADDIKRFMPKD |
| GCA_ | MENKTSLGNNIYYNPFKPQDKPYFAGYLNAAMENIDSVFRELGKRLKGKEYTSENFFDAIFKENISLVEYER |
| 000827575.1_ | YVKLLSDYFPMARLLDKKEVPIKERKENFKKNFKGIIKAVRDLRNFYTHKEHGEVEITDEIFGVLDEMLKST |
| Cc11.1_ | VLTVKKKKIKTDKTKEILKKSIEKQLDILIKKKLNYLRETAKKVEEKRRIQREMGEEIDPPFRYGNKREDLIA |
| genomic | TIYNDAFDVYIDKKKDSLKESSKAKYNTKSYPQQEEGDLKIPISKNGVVFLLSLFLTKQEIHAFKSKIAGFKA |
| SEQ ID NO: | TVTDEATVSEATVSHRKNSICFMATHEIFSHLAYKKLKRKVRTAEINYGEAENAEQLSVYAKETLMMQML |
| 4513 | DELSKVPDVVYQNLSEDVQKTFIEDWNEYLKENNGDVGTMEEEQVIHPVIRKRYEDKFNYFAIRFLDEFAQ |
| | FPTLRFQVHLGNYLHDSRPKENLISDRRIKEKITVFGRLSELEHKKALFIKNTETNEDREHYWEIFPNPNL |
| GCA_ | MFLERKETEDLKSRVKGFKAKIIKQGEEQISGLKFMATHWVFSYLCFKGIKQKLSTEFHEETLLIQIIDELSK |
| 004119415.1_ | VPDEVYSAFDSKTKEKFVEDINEYMKEGNADLSLEDSKVIHPVIRKRYENKFNYFAIRFLDEYLSSTSLKFQ |
| ASM411941v1_ | VHVGNYVHDRRVKNINGTGFQTERVVKDRVKVFGRLSMISNLKADYIKEQLELPNDSNGWEIFPNPSYIFI |
| genomic_2 | DNNVPIHILADETTKKGIELFKDKRRKEQPEELQKRKGKLSKYNIVSMISKEAKGKDKLRIDEPLALLSLNEI |
| SEQ ID NO: | PALLYQILEKGATPKDIELIIKNKLTERFEKIKNYDPETPAPASQISKRLRNNTTAKGQETLNAEKLSLLIEREI |
| 4514 | EDTETKLSSIEEKRLKAKKEQRRNLPQTSIFLIVTLAV |
| GCA_ | MFLERKETEDLKSRVKGFKAKIIKQGEEQISGLKFMATHWVFSYLCFKGIKQKLSTEFHEETLLIQIIDELSK |
| 004119455.1_ | VPDEVYSAFDSKTKEKFVEDINEYMKEGNADLSLEDSKVIHPVIRKRYENKFNYFAIRFLDEYLSSTSLKFQ |
| ASM411945v1_ | VHVGNYVHDRRVKNINGTGFQTERVVKDRVKVFGRLSMISNLKADYIKEQLELPNDSNGWEIFPNPSYIFI |
| genomic | DNNVPIHILADETTKKGIELFKDKRRKEQPEELQKRKGKLSKYNIVSMISKEAKGKDKLRIDEPLALLSLNEI |
| SEQ ID NO: | PALLYQILEKGATPKDIELIIKNKLTERFEKIKNYDPETPAPASQISKRLRNNTTAKGQETLNAEKLSLLIEREI |
| 4515 | EDTETKLSSIEEKRLKAKKEQRRNLPQTSIFSNSDLGRIAAWLADDIKRFMPAEQRKNWKGYQHSQLQQSL |
| | AYFEKRPQEAFLLLKEGWDTSDGSSYWNNWVMNSFSENNRFEKFYENYLMKRVKYFSELAENIKQHTHN |
| | TKFLRKFIKQQMPADLFPKRHYILKDLETEKIKFYLNH |
| GCA_ | MEKTQTGLGIYYDHTKLQDKYFFGGFFNLAQNNIDNVIKTFILKFFPERKDKDVNAAQFLDICFKDNDADS |
| 003523505.1_ | DFLKKTKFLRMHFPVIGFLASNNDKAGFKRKFSLLLKAISELRNFYTHYYHQPIEFPSELFELLDDIFVETTSE |
| ASM352350v1_ | IKKLKKKDDKTQQLLNKNLSEEYDIRYQQQIERLKELNAQGKKIPLNDETAIRNGVFNAAFNHLIYKDGGD |
| genomic_2 | LKPSRVYQSSYSEPDPAENGTSLSQSSILFLLSMFLERKETEDLKSRVKGFKAKFIKNGEEKISNLKLTATHW |
| SEQ ID NO: | VFSYLCFKGIKQKLSTEFHEETLLIQIIDELSKVPDEVYSAFGAKTKQKFVEDINEYMKEGNADLSLEDSKVI |
| 4516 | HPVIRKRYENKFNYFAIRFLDEYLSSTSLKFQVHVGNYVHDRRIKNINGTDFQTERVVKDSIKVFGRLSKISN |
| | LKADYIKEQLSLPNDSNGWEIFPNPSYVFIDNNVPIHIQTDEATKNGIKLFKDTRRKEQPEELQKRKGKLSKH |
| | NIVEIIFKETKGKDKPRVDEPLALLSLNEIPALLYQILEKGATPEDIELIIKNKLAERFEKIKNYDPETPAPASQI |
| | SKRLRNNTTAKGQETLNAEKLSILIEREIEDTETKLDAIEEKRRKAKKEYRRNSPQKSIFSNSELGRIAAWLA |
| | DDIKRFMPAELRKNWKGYQHSQLQQSLAYFEKRPQEAFLLLKEGWDTSDGSSYWNIWVINSFSETEDFEK |
| | FYENYLRKRAKYFSELAGNIKQHTHNAKFLRKFIKQQMPADLFPKRHYILKDLETEKNKVLSKPLVFSRGL |
| | FDSNPTFIKGVKVTENPELFAEXXNGIATGTKRNIPSSISMAGKETIMSF |
| IMG_ | MNTQPVGLGISYSHTSKNDKHFFGGFLNLGINNLEVLIAAFKLKFFSGDQKKIDIKNFVQTCFTANISDHDFE |
| 3300025944_2 | SRVEFLQNYLPVVRYLDKRNKEGFKNQVELLFKSLDSLRNFYTHYYHAPLSLPQALFDLLDSTFAKVASDV |
| SEQ ID NO: | KANKVKDDKSRHLLKSALSEELNARYKLQLERLKELKASGKKVNLHDHDAIRNGVLNSSFNHLIYKNEAG |
| 4517 | DTIVTRRYAARYSEIESAENGITISQSGLLFLAGLFLKRKEVEDLKSRVKGFKAKIIKEGEENISGLKYMATH |
| | WIFSYLSFKQQNKH |
| UWRZ01.1 | LKASFVKFLKCIYMENHTKQTTYKYDEIADKHYFAGFFNLAWNNIEIVFKVFLKKFKLIEDKDKKIEVNPLS |
| SEQ ID NO: | FVDNYFKNELALSDYRDRIDFLKQYFPVVQYLELLVSKNNDLEKCIGEEKENKRRECFRAKFKSLIRTINEL |
| 4518 | RNYYTHHYHKPIIVDEATFELLDELFLTVVKEVKRYKMKGEPIRHLFKKELNNELTALIKLKKSELETRRKE |
| | GKRVNIDPVSIENAVLNDAFSHLLFGEKGEKFYQSKSTSSNQQSTINISESGLLFLLGMFLHRKESERLRSNIQ |
| | GFKAKVVRDPEKPIDFKNNSLKYMATHWVFNHLAAKPIKERLNTAFQKETLLLQIADELSKVPDEVYQTFS |
| | QEKKNEFLEDINEYFKTGNDIKSFEESRVVHPVIRKRYENKFNYFVLRFLDEFIDFPTLRFQIHLGNYVHDQK |
| | EKPISQGTHLITQRIIKEKINLFGKLSEVTNNKTDFFQKLEVAGGETNLEMFPEPSYNFVGNNIPIYLNLAKSK |
| | VEGAKELNSHLIRLNNEEKKHQKKRTGNKPDKTAILSEIQISDISYGKPVALLSLNELPALLYELLINGKSGE |
| | EIENILVEKLVERYKTINNFSPDNPLPTSQISKKLRKATANERIDIDKLIRAIDREIAVSKEKANLISTKLRDWE |
| | NAKTNRKYAFTKKELGQEATWLADDIKRFMPNKVKENWKGYQHSHLQLLLAFYESRPNEAYSFIQEFWN |
| | LDNDTYLFNRWLKTSFNEKSFHKFYLKYLENRKEYFENIQQQITAFKNQEKLLKKFIEQQHIWSVFYKRLYI |
| | VSPIEEQKRQLLLKPLVFTRGIFDPKPTYIEGKEFEGNKDLFADWYQYIHDEEHVLQKFYSWKRDYKELFEK |
| | FKASDEFTNNKYQLSEKQQF |
| IMG_ | MENHTKQTTYKYDEIADKHYFAGFFNLAWNNIEIVFKVFLKKFKLIEDKDKKIEVNPLSFVDNYFKNELAL |
| 3300025528 | SDYRDRIDFLKQYFPVVQYLELLVSKNNDLEKCIGEEKENKRRECFRAKFKSLIRTINELRNYYTHHYHKPII |
| SEQ ID NO: | VDEATFELLDELFLTVVKEVKRYKMKGEPIRHLFKKELNNELTALIKLKKSELETRRKEGKRVNIDPVSIEN |
| 4519 | AVLNDAFSHLLFGEKGEKFYQSKSTSSNQQSTINISESGLLFLLGMFLHRKESERLRSNIQGFKAKVVRDPEK |
| | PIDFKNNSLKYMATHWVFNHLAAKPIKERLNTAFQKETLLLQIADELSKVPDEVYQTFSQEKKNEFLEDINE |
| | YFKTGNDIKSFEESRVVHPVIRKRYENKFNYFVLRFLDEFIDFPTLRFQIHLGNYVHDQKEKPISQGTHLITQ |
| | RIIKEKINLFGKLSEVTNNKTDFFQKLEVAGGETNLEMFPEPSYNFVGNNIPIYLNLAKSKVEGAKELNSHLI |
| | RLNNEEKKHQKKRTGNKPDKTAILSEIQIS |
| IMG_ | METKQQVGKGISYDHRRPDDKHYFGGFLNLAQNNIDGVIQEFAMRLNREYDPENKNQSLFSYFNINASFTD |
| 3300028733 | WERGVNILKEYWPMMEFIDRPATDKQFEAEKPENREAAKRKYFLATLGALLTSIKDLRHYYTHYYHPPVH |
| SEQ ID NO: | LNDDLFLFLDHALLYTAFDVKKTKMKDDKTRQLLNQNLSLELEKLKKLKVEELKKKKEKGIKVNLQDEK |
| 4520 | GILNAIYNDAFAHIITKEKDSDKDKLETRYKSILPQDEAAETGINISISGLIFLLSLFLSRKEIEQLKSNIEGYKG |
| | KVLNIETEVDRKHNSLKYMATHWVFSILAFKGLKQRLTNSFEKESLLIQMMDELNKVPDELYQTLSETAKK |
| | EFLEDINEYVSEGDDNEKATYVVHPVIRKRYESKFNYFAIRYLDEFAQFPTLKFQIFVGQYLHDNRPKTLAS |
| | NGMTAQRMKEKINLFGNLSEVTKHKSDFFEKESAAQGWEFFPNPSYNWAGNNIYRYDRERRQSQRDTGA |
| | NKQVSQTTQSGTTKR |
| GCA_ | METQQIGKGISYDHLSADDKHYFGGFLNLAQNNIDSVMQEFCSRLNLTYDKRKHKDIINNYFKIHYNPKEK |
| 001897035.1_ | PSHTDWERGVAILKEYWPVVNAIDLPLTAESIKNLPLDEQEKAKREYFTKTLLALFSAIETLRNYYTHYYHP |
| ASM189703v1_ | PITLPESLFVFLDKTLFHTVIDVKKTKMKEDKTRQILKDSLQDQIKKLAELKKNELIEKKKENPRINTNDSEG |
| genomic | ILNSIYNDAFSHFLYTDKDSKKEVLSKWYTSRLPEEKLADSPIGISTSGLVFLLSMFLSRKEVEHLKSNITGY |
| SEQ ID NO: | KGKVLAISEVTKKENGLKFMATHWVFSILAFKGIKHRITSSFEKETFLMQIVDELNKVPDEVYQTLSDGSKK |
| 4521 | TFLEDMNEYVSESVGEDEVPLYVVHPVIRKRYEDKFSYFAIRFLDEX |
| IMG_ | METKEQIGKNIYYAHDIYEDKHYFGAFLNLAQNNIDQVFSEFCTRLNEPKDENIHNIIIKYFSNNVSYSDWD |
| 3300025380 | KRIEILKEYLPVVEYLNLPISDKLFEKYPEKEKEDKRKEYFIKNFQSLIKSVNDLRNFYTHYYHPPVVIDESM |
| SEQ ID NO: | FDFLDSLLLKTCLTVRKKKMKNDKTRQILKKGIIAEWKVLEELKVNELKKNKEKNKWISIDDKEGIRNAIL |
| 4522 | NDSFHHLIFKDKDSFCLKDYHKAKYSKNIFAENKIPISKSGLVFLLSLFLTKKETEQLKANIEGFKAKVIGKE |
| | DEVTKKNNSLKYMATHWVFSYLTYKGLKRRVSTSFDKVTLLTQMLDELSKVPDEVYQTFSISDKDEFLEDI |
| | NEFVQESTGDDKSLIESTVVHPVIRKRYENKFNYFAIRFLDEYANFPTLKFQIFAGLFQHDHKTKNIGESNYI |
| | SDRKIKEKINVFGKLSKVAKYKSDYFTENKNENEWHLFPNPSYNFVGNNIHIYLDMYRKGAEVKSVQEEIN |
| | ALRKIINPKKDRVNRKGKKEIIDMIYNKSSKIEYNEPTALFSLNELPAILYEFLINKKTGEDLENILVQKIVER |
| | YKTIKNYNTTQQLSNSFITKKLRKSSLKQDQINIEKLLRSINKEIEITGEKLNLIKTNKEETTKTNKQDKPERK |
| | YIFYTNELGQEATWLANDLVRFMPKFAKTNWKGYQHSELQRLLAFYDRHKNEAKTLLTTNWDLNSFPIW |
| | GSDINEAFDKDKFDEFYEEYLKKRKKTLEGFANTIELNKNDPKLLKKVLKEVFIAFDKRLFVISSIDKQKNE |
| | LLAKPIVFPRGIFDN |
| CEVJ01.1 | MNETDYLAKRLEYNYASIEDKHYFGGYFNLAQNNINDLSKAFKEKFGMKPKSCILDFFTQDKAIAEYQLG |
| SEQ ID NO: | VEFLQKNLPVIRYLYLPTSHKRFENVPKNQLISEQRNYFKNSLKVLKNLIRDYRNFYTHHFHKPIPVFPETYK |
| 4523 | LLDDLFLAVANDVKKHRMKTDASKQLLKKGLIEELAQLEKLKLEDLKKLKREGKKVNLNDKEAITNAILN |
| | DSFSHLLPKENTISKYYSAVPTEDIDTENGVTISESGIIFLLGLFLTKKQSEDLRSRVKGFKAKLIVNPENPINK |
| | KNNSLKYMATHWVFGYLGFKGLKNRFTTTFTKDTLLAQIVDELSKVPDELYQVLPEELKNEFLEDMNEYL |
| | KEENS |
| IMG_ | MESTVNAKRISYDYKNQEDKHYFGGFLNLAQNNIEETIEALGIRNQVFKKEDSNKKNKSRPAEIIAKVFQID |
| 3300000931 | LKKRKTKDDGSGITYAQWESNVNFLKQYLPIVQFLNLPVSHKKFDHLPKAKKEKAKRDYFIGNFLLLIDIIG |
| SEQ ID NO: | SLRHYYTHYHHKQISIEPELFTLLDEIFLHTCLVVKKRKMKSEKTRELLKRELEREVDILKKLKLAALKKQK |
| 4524 | EDGVRVSLDDEHVERAVLNESFNYLLAKRDNVYKVQPTHCSRGEDGTPFSRSGLVFLVSMFLTKKQGEDF |
| | RSRIKGFKEKIVKREENAISPTNNSLRFMATHWVFSYWSYKGFKAKLNTTFSKEVLELKGI |
| IMG_ | MTQTATTNSGTLADDKQTYYYHFLKSDKFFFGSFFNLADNNLKATFNDFEKRLGIKSANGLVQKVEQYFP |
| 3300027262 | DNLLLSEFERRTELLTEYLPIVHKLRKINKESAEPDRSYFRDNLKMLIKAVDHLRNFYTHYYHKSIIFDERLF |
| SEQ ID NO: | EFLNGALLNVCFDVKKKRMKSDTNKAFLKKHFEENFINKSKDKIKEAFDEAFSHLKVSNDGKKFSLTKFYQ |
| 4525 | AKLSHKQKFSVKNDLIFDITNSDFVFLSNSGLLFLLSFFLRREEQEQLLSKMEGFKNQNELNFIATRWVFTH |
| | KCFKGLKKTIKSSYDKETLLMQMVDELSKCPDVLYKNLSDKQ |
| IMG_ | LSKVPDDVYQAFSEETRNLFVEDINQYLKEGNDDYTLEEAQVIHPVIRKRYENKFNYFAIRYLDEFAGFTSL |
| 3300025944 | KFQVHLGNYIHDKRTKHISGTELQTERRIKERVKVFGKLSDAQRLKNDFFADKSRRDQELGWEILPNPSYV |
| SEQ ID NO: | FIENNIPIYFKVDNEVAEAVKSAKASRKSLSPDERKVRSGDKAQKHIILNSISERGLLRKDEPTALLSLNEIPA |
| 4526 | LLYEILVKGTSPVEIEEILKSKAVERVQVIKNYTPEQPLPGSQISKRLRSNTAVTGKQYNVDKLQQLLKKEIF |
| | LADEKLALIYKNRVELHKKIGGKVLRNYVFGFSELGREATWIAEDIKRFMPLPARREWKGYQHSQLQQSLS |
| | YYESRPNEAFNILKDNWNFDDGAMLWNSWIKDSFNEKFFDRFYERYLHGKRKYLENFLENIQNFSPGSNKI |
| | LEKFLCQQMPKNFFDKRLYVLEPLEQEKDKILSYPLVFPRGLFDPAPTFIKGVQVMEEPERFAAWYRYGYS |
| | PDHPFQRFYEMERDYTDLINDDTETRPDTDKNKSDFSSEQQYALIKKKQDLKIKNIKIQDLFLKLIAETLFSD |
| | IFDYDSEIRLSDLYLTQAERIEKEQNAAQQSIRPAGDDSDNIIKDNFIWSKTIPYIKDQIYEPAVKFKDIGKFK |
| | YFLNDGRINRLLSYDTLKIWSKAEIETEIYIGSASYESIRREAIFKELQKLEEKILARYKGGHPEELEYKNNPS |
| | FKKYIVNGILRKKPDTVSETDCFWLDNFDESTFENPEVFEILSDKLPLVQEAFLLVYLRNKFAHNQLPIKEAY |
| | FYINENYPDLRGSTVSETLLNFLVHAVNNITNRCI |
| IMG_ | MEQEYDFFNKTDKHFFAGLFNTALNNFDLSLAELNKRMNYKEIKGNEKEIIIIEYAFNKDERTQLDFENNFK |
| 3300001348 | YLSESLIFLNRIPSFIAHKNKNGSTIILKDFLKDFLCGLYQTLLNYRNYYTHFEHDDVAIGHPLIAEFLEYLLF |
| SEQ ID NO: | NSVSRVKDDRVKTKAVKDKLLSKYKDDYTTIIEYKNKWICDKNEELINEGRKTFKKINNNSEAGYNYVLN |
| 4527 | SIFRRFIDDSTNTPKLQLDEKCSTDDGLTKVGFIQFLALLLNKRQVSLLFDNITYTRYTDTQLQRVITRWIFTY |
| | ESYRDINYLFKSEYDEHALLLQMVSELTKCPKNLYPYLSEKNKDNFLEDINIYFKENAKLFEDDALVSHEV |
| | VRKRFEDKFPYFAIRFLDEFAKFPSLRFQVNMGKFNHDSREKEFISTGKKTERLILENLTVFENLSEATKKKN |
| | LYFEKSDSKEKSDKESNYKDVSDSIEVSDWVEYPRPKYQFNKNTIGIWLDCDGLGNYDESPKRENKKPTKH |
| | DILDKIELKDSFKKPIAYLSLHELPALLYCLLIEKKDGRFIENRIKGKIRKQRSFLESLKGDYQYSEEELKQFP |
| | KKIRLILTKKSNINSEKIKRQISNEIKVNPLKEIREKYTPKSETELSLSEKGKIATWLSKDIKRFVAKDVKGPSE |
| | EDKNKSWKGYQFSEFQALLSYYDIDKSKLSDFVFKDLNFNINKDFPFQGIVFNKSSLFDFYTHYLKSRREYL |
| | NHLLENFSNTTNEELLLPFKASKFKIKELEEYRKNKLEEPVMLVRGVFDDKPTASREKDKTEFAKWFTVSM |
| | NSSSAQKFYDFDKIYPLTLSVINGRKSEENLTINTKAGLTKQYIP |
| IMG_ | MEQEYDFFNKTDKHFFAGLFNTALNNFDLSLAELNKRMNYKEIKGNEKEIIIIEYAFNKDERTQLDFENNFK |
| 3300025594 | YLSESLIFLNRIPSFIAHKNKNGSTIILKDFLKDFLCGLYQTLLNYRNYYTHFEHDDVAIGHPLIAEFLEYLLF |
| SEQ ID NO: | NSVSRVKDDRVKTKAVKDKLLSKYKDDYTTIIEYKNKWICDKNEELINEGRKTFKKINNNSEAGYNYVLN |
| 4528 | SIFRRFIDDSTNTPKLQLDEKCSTDDGLTKVGFIQFLALLLNKRQVSLLFDNITYTRYTDTQLQRVITRWIFTY |
| | ESYRDINYLFKSEYDEHALLLQMVSELTKCPKNLYPYLSEKNKDNFLEDINIYFKENAKLFEDDALVSHEV |
| | VRKRFEDKFPYFAIRFLDEFAKFPSLRFQVNMGKFNHDSREKEFISTGKKTERLILENLTVFENLSEATKKKN |
| | LYFEKSDSKEKSDKESNYKDVSDSIEVSDWVEYPRPKYQFNKNTIGIWLDCDGLGNY |
| UAMK01.1 | LFETLSAEDQDKFRIEVKDSEEETGSTVLLLRSFDRFPVLALQYLDTMHKFDRIRFQVDLGNYRYKFYEKK |
| SEQ ID NO: | NWIDKADEESADRVRILQKTLTGYGRLNEIEQQRKERWGSLIRAIDQPRADSFDSKPYITDHHASYHLEDN |
| 4529 | HIGLRWNTEGQDILDKSGIFMPSTELPPEADGCMDGTVAPLQAPKCRLSVYDLPAVCFLTYLTGSGKAAED |
| | LIINTTEKYFDFFRALSTGEIIPYNKEAKESFIPLEIKEKIKRCRTEARKTGGQQDQVLSYVIEPYGIDLASLPR |
| | KIQDYLLGDSFLSDGNARFKKLATEKLKKMLEITERKLDTIKETKKVYASKDNKLGKKSHVDIRQGTLARF |
| | LAKDMVFFKRPDPQGRIMLTSQNFDILQKELALFSKPLRGLKQLFITAELIGCKYPEENHPFLQKVLDRNPS |
| | GFLDFYIAYLSERRKYLEGILMSKQNDYSQYHFLHPERAKWSNRNRDYYNKLAARYTTIELPGNLFLEAIV |
| | KELKGIDQNKLQYPQTLSDALAQERKNVAFLINAYMKAVGEGCQPFYNYKRGYRYFSMTCKPDWDFSKPI |
| | EKLKDKYLTVGQMEQFMSDNDKEARESFYLRSLDARNAAKVTKAKNQGRYDSRKRGYLKDELEASKVE |
| | APEKLSHSLKFYKENEKEIRRIKVQDAVLYLLAKDVLTHTMDNADLSAYKLKYIGKDNDTDILSMQLPFAV |
| | RLQIRTSDDSTKEVTIRQEDLKLKNYGDFFSFIYDSRIRPLLAQVDAELIDRSQLEKELDNYDRKRVPLFEYV |
| | HNLESRVCETLNEEQFHKDAEGNPVKMDFKYLLRYLNISEKTEDLLKAIRNAFCHGTYPEGSRVTLVFEKE |
| | DCLLYTSDAA |
| GCA_ | MPAEQRKNWKGYQHSQLQQSLAYFEKRPQEAFLLLKEGWDTSDGSSYWNNWVMNSFSENNRFEKFYEN |
| 004119415.1_ | YLMKRVKYFSELAENIKQHTHNTKFLRKFIKQQMPADLFPKRHYILKDLETEKNKVLSKPLVFSRGLFDSN |
| ASM411941v1_ | PTFIKGVKVTENPELFAEWYSYGYKTEHTFQHFYGWERDYNELLDNELQKGNSFAKNSIHYSRESQLDLIK |
| genomic | LKQDLKIKKIKIQDLFLKRIAEKLFENVFNYTTTLSLDEFYMTQEERAEKERIALAQSQREEGDKSSNIIKDN |
| SEQ ID NO: | FIWSKTIAFESQQIYELAIKLKDLGKFNRFLLDHKVLTLLSYDQNKIWNKEQLERELSIGENSYEVIRREKLF |
| 4530 | KEIQNLELQTLSNWSWDGINHPREFEMEDQKNARHPNFKMYLVNGILRKNTNFYKEGEDFWLESLKENDF |
| | KTLPSEILETKSEMVQLLFLVIMIRNQFAHNQLPKVQLYNFIRKNYPEIQNNTAAELYLNLIKLAVQKLKENS |
| GCA_ | LFDSNPTFIKGVKVTENPELFAEWYSYGYKTEHTFQHFYGWERDYNELLDNELQKGNSFAKNSIHYSRESQ |
| 004119455.1_ | LDLIKLKQDLKIKKIKIQDLFLKRIAEKLFENVFNYTTTLSLDEFYMTQEERAEKERIALAQSQREEGDKSSNI |
| ASM411945v1_ | IKDNFIWSKTIAFESQQIYELAIKLKDLGKFNRFLLDHKVLTLLSYDQNKIWNKEQLERELSIGENSYEVIRR |
| genomic_2 | EKLFKEIQNLELQTLSNWSWDGINHPREFEMEDQKNARHPNFKMYLVNGILRKNTNFYKEGEDFWLESLK |
| SEQ ID NO: | ENDFKTLPSEILETKSEMVQLLFLVIMIRNQFAHNQLPKVQLYNFIRKNYPEIQNNTAAELYLNLIKLAVQKL |
| 4531 | KENS |
| GCA_ | MXEWYSYGYKTEHTFQHFYGWERDYNELLDNELQKDNSFAKNSIHYSRESQLDLIKLKQDLKIKKIKIQDL |
| 003523505.1_ | FLKRIAEKLFENVFHYPTTLSLDEFYMTQEERAEKERIALAQSLREEGDNSPNIIKDNFIWSKTIAFESQQISEP |
| ASM352350v1_ | AIKLKDIGKFNRFLLDSKVKTLLSYDQNKKDKEQLERELSIGENSYEVIRREKLFKEIQNLELQTLSNWPWD |
| genomic | GINHPREFEMEDQKNIWHPNFKMYVVNGILRKNSNFYKEDEDFWLESLKENDFKTLPSEILETKSEMVQLL |
| SEQ ID NO: | FLVIMIRNQFAHNQLPEVQFYNFIRKNYPEIQNNTAAELYLNLIKLAVQKLKENS |
| 4532 | |
| GCA_ | MARSTKFTKSMFSYESSFKRFSHRKGMQSGFLKSTPSKSNPYSYNYKPINGYKDYRLDSLINNQTDLWSKY |
| 000212915.1_ | SRKQDKFMLYASRYLAESNYFGEEAMFKVYQFASNEEQEKYIVEAKQNLPKREYDKLKYHKGRLVVYKS |
| ASM21291v1_ | YHNHLQEYPRWDYPFVVENNAIQIYVKILGEPWIVSIQRRLIIYFLEDALFSKKKESNGIALLQNYLPHHQRD |
| genomic | VRNGLFVFKTGQTNNLSTKEMSNLRKLFPRKLIQSYLYEDNTGDMDSPSQVLSDTSINDTEKKGTKKILNL |
| SEQ ID NO: | RVGKHLKLRYIRKVWNLIYFKDIYKDKAQRMGHHKKFHITKDEFVFYTRWMYSFESIPSYKDHLIQFFIKK |
| 4533 | HFFNNEEFKELFLNSSSIDELYLQTKRNFIKWSAHNVNSEKKEKTYSLEDYKLFFESKILYINVSHFISFLNQE |
| | KVIQKNDNGIIQYKALKNLSYLIKPFYYKDKLEIEHYKTYGKVFNKLRSIKLEDCLLYEIAYRYLLNVTPSFP |
| | KYKQLIIQSFPKEKVDLLVNAIYSFEIHNKKGAFIYSIQVPFLKLNELVCLIYRNSTKIAATNKEFLFLQIYKYL |
| | VNYCKNKPVDYELYTVCYKFNQLKVLGYDDLLHFLKHIVKRGLQLTQILTQLEKFLIIKNNIQIDIQKQGTL |
| | NSLSIYECSKMNNPQKLEDLRIKAINFDIPDTDYPSILEHIEKQFIIKETPFKPVSWSHLEKHTQDMCDIMMN |
| | MLHLNLYKRNSDTESREEAKIQFRDRYFNTVVKQSD |
| IMG_ | MPVSNHQQKGHKTYFTNHSNKAEISVFVNTALNNIYRIIKTIEENVFQAVPDYNREEMYKSQVFTVLFSKR |
| 3300009446 | NEVKKERIIQYLTRWLPWFSKGLTITDPRRFALRLVVYIQKLVELRNFYSHSLKNVVNLNLYTNAHVPSSA |
| SEQ ID NO: | KDVFIDLVCDIRREERDKKDSFIPFDHVKAEYKDYMFDAILHEDLNREKYACYEQDYCNFRADFKQLYKST |
| 4534 | KNEVRERFKKERNLNDEKLKKQGVIFSAGKGPDSKQNANKLTEFGLVFFISIFLERRMVADFLDTVYPNDIG |
| | FMDKLVKRSLTIYNAKPPKEQLISMDRKFALGLDILNMLNRVPNYIYDHLTDGAKEKAIDEEGIVMKRYND |
| | RFPYLILQCLEYSGKLEGLQLMCLIGKNFNAKPYHKQFEGKSEIREIHKTLYAFDHLSDIRENDKYYQELRS |
| | KDHEVNYNIGEEELAIINEIKNLHTYPLYQYYPKYGIHEYSTWKYIGFVFQDESIGPPVIAQSEESETRIVITPE |
| | FRVNNTQHQFTLDQSLLKYLAYLLKGESTVSENENGLASFKDLCLQFKSDFVRLLNDIRDQNITPDSDYDY |
| | SQILNSYNIPSACIPKRIKKYLNAKQSSNNSRKHIKTKLEYMLCETKCLLAENPVRSKPLPKEEYINRKKESQ |
| | YFLMRGDKATWITNDILFFMKPKLVSIEKEGQKTNHFHKLNNQQAKILQSKLALMDHNFHDIRSFMKETG |
| | VFETGSEHIFLTEQNIKAKYQKVDNFFVRYLGLRKAYLESTIKKLKTKNQIINQTELERAYYYIKSKTIRRSV |
| | ANEDKHIAITTYIENLKKQPIIIHPELMKKWANDVYQKEESENNQVHNLSYIVNDLDESFARYKQQWFYQK |
| | DSLIDGFGKRPQFQKRP |
| IMG_ | MHQKKQQKQKKKQSRRAKELTLKERSAYAIAANLAQSRVEHILEGDESPNSLNKLYDKITGHLREEIQRYY |
| 3300027338 | GKDENNKDERALIMESALDLLNRLRNYYSHILYDDPGDVSFMLKGSEEGQNKKQDEENGDRPLISWLTWL |
| SEQ ID NO: | YREAWKKQDLEEKFPLWDSVDDNISRLSHYGAAFFINLFLTRSKAEHFLQRLGKFEGKNKKRSRHVFSAYC |
| 4535 | QRDRISDTFIQDPPEHMLYREIMGALKIPPFHSKAGQENKKKVEDSKYEQPPEYSDTDVLPFRSQSRARDYV |
| | LQLIDMLGLLPNIRFRGIVETKEIDKEGGIIWQPAHEIIKSKVKKKSQDEKGDKKSYDRDKRVIRKTYNRNN |
| | EALKEALKEVGQRFVYDHSDGNILFEIEQKGKDPVRGVVRWRDFLTWVYLIAFEKKPSNKIDEEIYGYLSG |
| | YKETLSEGKTPKEVYK |
| UYAX01.1_2 | VRECNEDEKFTAWKNGFISEMLQSTKNRIKRFEKDSEAVISSDNKPGKKNHVSLKPGAYASFIANDIVFFQE |
| SEQ ID NO: | CGATEKMTGLNFKVMQSRLATFTKDGSTSFNILLQTLKNAHLVSTTYGKGDHPFLYRVIKQQPSDIVQFYK |
| 4536 | IYLNEKVLYLQSDIPDNAIFLHGERKRWENRNEQYYRDLAERYLQRPIQLPRQLFESHIRQLLLSDCIKGERG |
| | NDLKEAINSAASQGRCNTTYMIMEYFADYLCDGTQFFYGLFDGDLSHEYNYRFYSLISNNIENSKKLVLTL |
| | KKGNNSKESPFISALERGIHWSKMNPLMKKGLKNDSSEGDFVHAAKRAYKEMTETERMFRRYAVQDEVL |
| | FLAAKITIRRVLGLSEQYNCLLGDIKPQGGSLLEQTIPSITTKHTINTGNKKQKPKQVQILQKNVKLKDFGKV |
| | FKLLNDRRIFDLLFNKGNEAVSMTDLCEELERYDRHRVDVFDSVLKYESKITKGYTNKELMNESGQIDFKA |
| | IQAFDKQNTTADKEDLRLIRNAFSHNQYPQYNNEPILFDKDIPEIADEISIIAKDIEENTK |
| OLVX01.1 | LKKCPFELYELLGSEDKRLFTIVADTGETILLRRHEDRFPQLALSWIDSSKAFDHLRFQVNAGKLRYLFRDN |
| SEQ ID NO: | KHCIDGQTRMRVLEEPLNGYRRLMEFEEERIQKQSGEIRSLWPGLDILNKDETPRNDASVLPYISDYRVRYL |
| 4537 | FDGDNIGISIGDFTPSITKTDETKYRVTGKTADCCLSKYELPGLLFYHLLTLRHGDNKRSTKNAEDIIIDAIKR |
| | YKRLFSDVKEGILKPIKEENANQLGNRIWNSYGINIKDIPDKIIDYLLVRECNEDEKFTAWKNGFISEMLQST |
| | KNRIKRFEKDSEAVISSDNKPGKKNHVSLKPGAYASFIANDIVFFQECGATEKMTGLNFKVMQSRLATFTK |
| | DGSTSFNILLQTLKNAHLVSTTYGKGDHPFLYRVIKQQPSDIVQFYKIYLNEKVLYLQSDIPDNAIFLHGERK |
| | RWENRNEQYYRDLAERYLQRPIQLPRQLFESHIRQLLLSDCIKGERGNDLKEAINSAASQGRCNTTYMIME |
| | YFADYLCDGTQFFYGLFDGDLSHEYNYQFYSLISNNIENSKKLVLTLKKGNNSKESPFISALERGIHWSKMN |
| | PLMKKGLKNDSSEGDFVHAAKRAYKEMTETERMFRRYAVQDEVLFLAAKITIRRVLGLSEQYNCLLGDIK |
| | PQGGSLLEQTIPSITTKHTINTGNKKQKPKQVQILQKNVKLKDFGKVFKLLNDRRIFDLLFNKGNEAVSMTD |
| | LCEELERYDRHRVDVFDSVLKYESKITKGYTNKELMNESGQIDFKAIQAFDKQNTTADKEDLRLIRNAFSH |
| | NQYPQYNNEPILFDKDIPEIADEISIIAKDIEENTK |
| IMG_ | LPAVINYKPELSTLAIILEKATQSEDRYNRLLKKAEDEGNYADFIKRNKGKQFKLQFIRKAWHLMYFKNSY |
| 3300028862 | TQQLESTGKHHKNFHITRDEFNDFCRYMFAFDEVPAYKNYLREMLDKKQFFKNDQFKILFENGDSLDSLYS |
| SEQ ID NO: | KTKQSYEKWLQGQSTKEQETEKYTLSNYENIFQDKMLYVNVSHFTGFLKTTGIWTENEHGVIQFKALENR |
| 4538 | RYLIQEYYYADKLEKPEYKNCRKLFNELKTVKLEDALLYEIAMRYLQIDSQIVQNVRTSIIEILNQNIRFLIK |
| | NKENKALYELIVPFKKIDSYVGLLAHKKEQEMDPKSKGSSFLTNIAGYLELVKDHKDLKKVYGSFTANKN |
| | MPVLTFDDLHKIDAHLITHSIRFTNLALAMEHYFVVKKNISIVKDNRITYDEIKDLKPYFDNKTRNKAFHFG |
| | VPSKSYETFIREVEQKFLFNEVKTTKPTSFQSLSRQHKIMCGMFLELIHNDLYNKGEKDSKKKRNDAEASYF |
| | NSVISK |
| IMG_ | LPAVINYKPELSTLAIILEKATQSEDRYNRLLKKAEDEGNYADFIKRNKGKQFKLQFIRKAWHLMYFKNSY |
| 3300028767 | TQQLESTGKHHKNFHITRDEFNDFCRYMFAFDEVPAYKNYLREMLDKKQFFKNDQFKILFENGDSLDSLYS |
| SEQ ID NO: | KTKQSYEKWLQGQSTKEQETEKYTLSNYENIFQDKMLYVNVSHFTGFLKTTGIWTENEHGVIQFKALENR |
| 4539 | RYLIQEYYYADKLEKPEYKNCRKLFNELKTVKLEDALLYEIAMRYLQIDSQIVQNVRTSIIEILNQNIRFLIK |
| | NKENKALYELIVPFKKIDSYVGLLAHKKEQEMDPKSKGSSFLTNIAGYLELVKDHKDLKKVYGSFTANKN |
| | MPVLTFDDLHKIDAHLITHSIRFTNLALAMEHYFVVKKNISIVKDNRITYDEIKDLKPYFDNKTRNKAFHFG |
| | VPSKSYETFIREVEQKFLFNEVKTTKPTSFQSLSRQHKIMCGMFLELIHNDLYNKGEKDSKKKRNDAEASYF |
| | NSVISK |
| IMG_ | LPAVINYKPELSTLAIILEKATQSEDRYNRLLKKAEDEGNYADFIKRNKGKQFKLQFIRKAWHLMYFKNSY |
| 3300028738_3 | TQQLESTGKHHKNFHITRDEFNDFCRYMFAFDEVPAYKNYLREMLDKKQFFKNDQFKILFENGDSLDSLYS |
| SEQ ID NO: | KTKQSYEKWLQGQSTKEQETEKYTLSNYENIFQDKMLYVNVSHFTGFLKTTGIWTENEHGVIQFKALENR |
| 4540 | RYLIQEYYYADKLEKPEYKNCRKLFNELKTVKLEDALLYEIAMRYLQIDSQIVQNVRTSIIEILNQNIRFLIK |
| | NKENKALYELIVPFKKIDSYVGLLAHKKEQEMDPKSKGSSFLTNIAGYLELVKDHKDLKKVYGSFTANKN |
| | MPVLTFDDLHKIDAHLITHSIRFTNLALAMEHYFVVKKNISIVKDNRITYDEIKDLKPYFDNKTRNKAFHFG |
| | VPSKSYETFIREVEQKFLFNEVKTTKPTSFQSLSRQHKIMCGMFLELIHNDLYNKGEKDSKKKRNDAEASYF |
| | NSVISK |
| IMG_ | LPAVINYKPELSTLAIILEKATQSEDRYNRLLKKAEDEGNYADFIKRNKGKQFKLQFIRKAWHLMYFKNSY |
| 3300030943_4 | TQQLESTGKHHKNFHITRDEFNDFCRYMFAFDEVPAYKNYLREMLDKKQFFKNDQFKILFENGDSLDSLYS |
| SEQ ID NO: | KTKQSYEKWLQGQSTKEQETEKYTLSNYENIFQDKMLYVNVSHFTGFLKTTGIWTENEHGVIQFKALENR |
| 4541 | RYLIQEYYYADKLEKPEYKNCRKLFNELKTVKLEDALLYEIAMRYLQIDSQIVQNVRTSIIEILNQNIRFLIK |
| | NKENKALYELIVPFKKIDSYVGLLAHKKEQEMDPKSKGSSFLTNIAGYLELVKDHKDLKKVYGSFTANKN |
| | MPVLTFDDLHKIDAHLITHSIRFTNLALAMEHYFVVKKNISIVKDNRITYDEIKDLKPYFDNKTRNKAFHFG |
| | VPSKSYETFIREVEQKFLFNEVKTTKPTSFQSLSRQHKIMCGMFLELIHNDLYNKGEKDSKKKRNDAEASYF |
| | NSVISK |
| IMG_ | LPAVINYKPELSTLAIILEKATQSEDRYNRLLKKAEDEGNYADFIKRNKGKQFKLQFIRKAWHLMYFKNSY |
| 3300031521 | TQQLESTGKHHKNFHITRDEFNDFCRYMFAFDEVPAYKNYLREMLDKKQFFKNDQFKILFENGDSLDSLYS |
| SEQ ID NO: | KTKQSYEKWLQGQSTKEQETEKYTLSNYENIFQDKMLYVNVSHFTGFLKTTGIWTENEHGVIQFKALENR |
| 4542 | RYLIQEYYYADKLEKPEYKNCRKLFNELKTVKLEDALLYEIAMRYLQIDSQIVQNVRTSIIEILNQNIRFLIK |
| | NKENKALYELIVPFKKIDSYVGLLAHKKEQEMDPKSKGSSFLTNIAGYLELVKDHKDLKKVYGSFTANKN |
| | MPVLTFDDLHKIDAHLITHSIRFTNLALAMEHYFVVKKNISIVKDNRITYDEIKDLKPYFDNKTRNKAFHFG |
| | VPSKSYETFIREVEQKFLFNEVKTTKPTSFQSLSRQHKIMCGMFLELIHNDLYNKGEKDSKKKRNDAEASYF |
| | NSVISK |
| IMG_ | LPAVINYKPELSTLAIILEKATQSEDRYNRLLKKAEDEGNYADFIKRNKGKQFKLQFIRKAWHLMYFKNSY |
| 3300031918_3 | TQQLESTGKHHKNFHITRDEFNDFCRYMFAFDEVPAYKNYLREMLDKKQFFKNDQFKILFENGDSLDSLYS |
| SEQ ID NO: | KTKQSYEKWLQGQSTKEQETEKYTLSNYENIFQDKMLYVNVSHFTGFLKTTGIWTENEHGVIQFKALENR |
| 4543 | RYLIQEYYYADKLEKPEYKNCRKLFNELKTVKLEDALLYEIAMRYLQIDSQIVQNVRTSIIEILNQNIRFLIK |
| | NKENKALYELIVPFKKIDSYVGLLAHKKEQEMDPKSKGSSFLTNIAGYLELVKDHKDLKKVYGSFTANKN |
| | MPVLTFDDLHKIDAHLITHSIRFTNLALAMEHYFVVKKNISIVKDNRITYDEIKDLKPYFDNKTRNKAFHFG |
| | VPSKSYETFIREVEQKFLFNEVKTTKPTSFQSLSRQHKIMCGMFLELIHNDLYNKGEKDSKKKRNDAEASYF |
| | NSVISK |
| IMG_ | LPAVINYKPELSTLAIILEKATQSEDRYNRLLKKAEDEGNYADFIKRNKGKQFKLQFIRKAWHLMYFKNSY |
| 3300029989_4 | TQQLESTGKHHKNFHITRDEFNDFCRYMFAFDEVPAYKNYLREMLDKKQFFKNDQFKILFENGDSLDSLYS |
| SEQ ID NO: | KTKQSYEKWLQGQSTKEQETEKYTLSNYENIFQDKMLYVNVSHFTGFLKTTGIWTENEHGVIQFKALENR |
| 4544 | RYLIQEYYYADKLEKPEYKNCRKLFNELKTVKLEDALLYEIAMRYLQIDSQIVQNVRTSIIEILNQNIRFLIK |
| | NKENKALYELIVPFKKIDSYVGLLAHKKEQEMDPKSKGSSFLTNIAGYLELVKDHKDLKKVYGSFTANKN |
| | MPVLTFDDLHKIDAHLITHSIRFTNLALAMEHYFVVKKNISIVKDNRITYDEIKDLKPYFDNKTRNKAFHFG |
| | VPSKSYETFIREVEQKFLFNEVKTTKPTSFQSLSRQHKIMCGMFLELIHNDLYNKGEKDSKKKRNDAEASYF |
| | NSVISK |
| IMG_ | LPAVINYKPELSTLAIILEKATQSEDRYNRLLKKAEDEGNYADFIKRNKGKQFKLQFIRKAWHLMYFKNSY |
| 3300029998_5 | TQQLESTGKHHKNFHITRDEFNDFCRYMFAFDEVPAYKNYLREMLDKKQFFKNDQFKILFENGDSLDSLYS |
| SEQ ID NO: | KTKQSYEKWLQGQSTKEQETEKYTLSNYENIFQDKMLYVNVSHFTGFLKTTGIWTENEHGVIQFKALENR |
| 4545 | RYLIQEYYYADKLEKPEYKNCRKLFNELKTVKLEDALLYEIAMRYLQIDSQIVQNVRTSIIEILNQNIRFLIK |
| | NKENKALYELIVPFKKIDSYVGLLAHKKEQEMDPKSKGSSFLTNIAGYLELVKDHKDLKKVYGSFTANKN |
| | MPVLTFDDLHKIDAHLITHSIRFTNLALAMEHYFVVKKNISIVKDNRITYDEIKDLKPYFDNKTRNKAFHFG |
| | VPSKSYETFIREVEQKFLFNEVKTTKPTSFQSLSRQHKIMCGMFLELIHNDLYNKGEKDSKKKRNDAEASYF |
| | NSVISK |
| IMG_ | LPAVINYKPELSTLAIILEKATQSEDRYNRLLKKAEDEGNYADFIKRNKGKQFKLQFIRKAWHLMYFKNSY |
| 3300030339_3 | TQQLESTGKHHKNFHITRDEFNDFCRYMFAFDEVPAYKNYLREMLDKKQFFKNDQFKILFENGDSLDSLYS |
| SEQ ID NO: | KTKQSYEKWLQGQSTKEQETEKYTLSNYENIFQDKMLYVNVSHFTGFLKTTGIWTENEHGVIQFKALENR |
| 4546 | RYLIQEYYYADKLEKPEYKNCRKLFNELKTVKLEDALLYEIAMRYLQIDSQIVQNVRTSIIEILNQNIRFLIK |
| | NKENKALYELIVPFKKIDSYVGLLAHKKEQEMDPKSKGSSFLTNIAGYLELVKDHKDLKKVYGSFTANKN |
| | MPVLTFDDLHKIDAHLITHSIRFTNLALAMEHYFVVKKNISIVKDNRITYDEIKDLKPYFDNKTRNKAFHFG |
| | VPSKSYETFIREVEQKFLFNEVKTTKPTSFQSLSRQHKIMCGMFLELIHNDLYNKGEKDSKKKRNDAEASYF |
| | NSVISK |
| IMG_ | MDTNEAYTAYNSRNSFKRIFDFKGEIAPIAEKANLNYDIKAKNAINREQRLHYFTVGHTFKNIDTEHVFEILL |
| 3300028862_2 | DEETREKRPYTFLSLQQFNTDFCTAIKEVISNIRHINSHYIHDFERIKTDNIPPEIITFLKESFELAVIQIYLKENN |
| SEQ ID NO: | ITYLQFIEQKNTDTTIVKYLHDKFYSLDNTKTDTKNDTSPSLAEYIAFRNTFKTLSKEKALDSLLFVTVDAGF |
| 4547 | PWKLEETHTACTITQGTYLSFNACLFLLSLFLYKSEANQLISKIKGFKKNKTDEEKSKREIFSFFSKKFSSQDI |
| | DSEENHLVKFRDLIQYINHYPVEWNKDLKLESGHPLMTDKLIAKITDMEIDRAYPDYAGNNKFQAYAKEL |
| | LWNVPSKTTFTTEEIEAFAFEINKSPELKDAKKKLHDLQAKMGLYGFKKVKNEQEIAKTIKRIKWIQNDLNP |
| | VTENVKKRLAQFSLYGSYGRNQDRFMDFATRYLAEQKYFGVDAEFKMYKYFTSEEQNTELATYELPKDK |
| | KAYDKLRFHKGKLVHFSTFENHLKKYESWDTPFVIENNAIQVKLSIRQDNKKEPIEKILSIQRALMLYFLED |
| | ALFQTGNNNIIENKGRILVEQYYTVYNNDFVQSKTVLEENDSISPEQKNALKKIVPKRLLHRYFARSNKL |
| IMG_ | MDTNEAYTAYNSRNSFKRIFDFKGEIAPIAEKANLNYDIKAKNAINREQRLHYFTVGHTFKNIDTEHVFEILL |
| 3300028767_2 | DEETREKRPYTFLSLQQFNTDFCTAIKEVISNIRHINSHYIHDFERIKTDNIPPEIITFLKESFELAVIQIYLKENN |
| SEQ ID NO: | ITYLQFIEQKNTDTTIVKYLHDKFYSLDNTKTDTKNDTSPSLAEYIAFRNTFKTLSKEKALDSLLFVTVDAGF |
| 4548 | PWKLEETHTACTITQGTYLSFNACLFLLSLFLYKSEANQLISKIKGFKKNKTDEEKSKREIFSFFSKKFSSQDI |
| | DSEENHLVKFRDLIQYINHYPVEWNKDLKLESGHPLMTDKLIAKITDMEIDRAYPDYAGNNKFQAYAKEL |
| | LWNVPSKTTFTTEEIEAFAFEINKSPELKDAKKKLHDLQAKMGLYGFKKVKNEQEIAKTIKRIKWIQNDLNP |
| | VTENVKKRLAQFSLYGSYGRNQDRFMDFATRYLAEQKYFGVDAEFKMYKYFTSEEQNTELATYELPKDK |
| | KAYDKLRFHKGKLVHFSTFENHLKKYESWDTPFVIENNAIQVKLSIRQDNKKEPIEKILSIQRALMLYFLED |
| | ALFQTGNNNIIENKGRILVEQYYTVYNNDFVQSKTVLEENDSISPEQKNALKKIVPKRLLHRYFARSNKL |
| IMG_ | MDTNEAYTAYNSRNSFKRIFDFKGEIAPIAEKANLNYDIKAKNAINREQRLHYFTVGHTFKNIDTEHVFEILL |
| 3300028738_4 | DEETREKRPYTFLSLQQFNTDFCTAIKEVISNIRHINSHYIHDFERIKTDNIPPEIITFLKESFELAVIQIYLKENN |
| SEQ ID NO: | ITYLQFIEQKNTDTTIVKYLHDKFYSLDNTKTDTKNDTSPSLAEYIAFRNTFKTLSKEKALDSLLFVTVDAGF |
| 4549 | PWKLEETHTACTITQGTYLSFNACLFLLSLFLYKSEANQLISKIKGFKKNKTDEEKSKREIFSFFSKKFSSQDI |
| | DSEENHLVKFRDLIQYINHYPVEWNKDLKLESGHPLMTDKLIAKITDMEIDRAYPDYAGNNKFQAYAKEL |
| | LWNVPSKTTFTTEEIEAFAFEINKSPELKDAKKKLHDLQAKMGLYGFKKVKNEQEIAKTIKRIKWIQNDLNP |
| | VTENVKKRLAQFSLYGSYGRNQDRFMDFATRYLAEQKYFGVDAEFKMYKYFTSEEQNTELATYELPKDK |
| | KAYDKLRFHKGKLVHFSTFENHLKKYESWDTPFVIENNAIQVKLSIRQDNKKEPIEKILSIQRALMLYFLED |
| | ALFQTGNNNIIENKGRILVEQYYTVYNNDFVQSKTVLEENDSISPEQKNALKKIVPKRLLHRYFARSNKL |
| IMG_ | MDTNEAYTAYNSRNSFKRIFDFKGEIAPIAEKANLNYDIKAKNAINREQRLHYFTVGHTFKNIDTEHVFEILL |
| 3300030047_3 | DEETREKRPYTFLSLQQFNTDFCTAIKEVISNIRHINSHYIHDFERIKTDNIPPEIITFLKESFELAVIQIYLKENN |
| SEQ ID NO: | ITYLQFIEQKNTDTTIVKYLHDKFYSLDNTKTDTKNDTSPSLAEYIAFRNTFKTLSKEKALDSLLFVTVDAGF |
| 4550 | PWKLEETHTACTITQGTYLSFNACLFLLSLFLYKSEANQLISKIKGFKKNKTDEEKSKREIFSFFSKKFSSQDI |
| | DSEENHLVKFRDLIQYINHYPVEWNKDLKLESGHPLMTDKLIAKITDMEIDRAYPDYAGNNKFQAYAKEL |
| | LWNVPSKTTFTTEEIEAFAFEINKSPELKDAKKKLHDLQAKMGLYGFKKVKNEQEIAKTIKRIKWIQNDLNP |
| | VTENVKKRLAQFSLYGSYGRNQDRFMDFATRYLAEQKYFGVDAEFKMYKYFTSEEQNTELATYELPKDK |
| | KAYDKLRFHKGKLVHFSTFENHLKKYESWDTPFVIENNAIQVKLSIRQDNKKEPIEKILSIQRALMLYFLED |
| | ALFQTGNNNIIENKGRILVEQYYTVYNNDFVQSKTVLEENDSISPEQKNALKKIVPKRLLHRYFARSNKL |
| IMG_ | MDTNEAYTAYNSRNSFKRIFDFKGEIAPIAEKANLNYDIKAKNAINREQRLHYFTVGHTFKNIDTEHVFEILL |
| 3300030943_5 | DEETREKRPYTFLSLQQFNTDFCTAIKEVISNIRHINSHYIHDFERIKTDNIPPEIITFLKESFELAVIQIYLKENN |
| SEQ ID NO: | ITYLQFIEQKNTDTTIVKYLHDKFYSLDNTKTDTKNDTSPSLAEYIAFRNTFKTLSKEKALDSLLFVTVDAGF |
| 4551 | PWKLEETHTACTITQGTYLSFNACLFLLSLFLYKSEANQLISKIKGFKKNKTDEEKSKREIFSFFSKKFSSQDI |
| | DSEENHLVKFRDLIQYINHYPVEWNKDLKLESGHPLMTDKLIAKITDMEIDRAYPDYAGNNKFQAYAKEL |
| | LWNVPSKTTFTTEEIEAFAFEINKSPELKDAKKKLHDLQAKMGLYGFKKVKNEQEIAKTIKRIKWIQNDLNP |
| | VTENVKKRLAQFSLYGSYGRNQDRFMDFATRYLAEQKYFGVDAEFKMYKYFTSEEQNTELATYELPKDK |
| | KAYDKLRFHKGKLVHFSTFENHLKKYESWDTPFVIENNAIQVKLSIRQDNKKEPIEKILSIQRALMLYFLED |
| | ALFQTGNNNIIENKGRILVEQYYTVYNNDFVQSKTVLEENDSISPEQKNALKKIVPKRLLHRYFARSNKL |
| IMG_ | MDTNEAYTAYNSRNSFKRIFDFKGEIAPIAEKANLNYDIKAKNAINREQRLHYFTVGHTFKNIDTEHVFEILL |
| 3300031521_2 | DEETREKRPYTFLSLQQFNTDFCTAIKEVISNIRHINSHYIHDFERIKTDNIPPEIITFLKESFELAVIQIYLKENN |
| SEQ ID NO: | ITYLQFIEQKNTDTTIVKYLHDKFYSLDNTKTDTKNDTSPSLAEYIAFRNTFKTLSKEKALDSLLFVTVDAGF |
| 4552 | PWKLEETHTACTITQGTYLSFNACLFLLSLFLYKSEANQLISKIKGFKKNKTDEEKSKREIFSFFSKKFSSQDI |
| | DSEENHLVKFRDLIQYINHYPVEWNKDLKLESGHPLMTDKLIAKITDMEIDRAYPDYAGNNKFQAYAKEL |
| | LWNVPSKTTFTTEEIEAFAFEINKSPELKDAKKKLHDLQAKMGLYGFKKVKNEQEIAKTIKRIKWIQNDLNP |
| | VTENVKKRLAQFSLYGSYGRNQDRFMDFATRYLAEQKYFGVDAEFKMYKYFTSEEQNTELATYELPKDK |
| | KAYDKLRFHKGKLVHFSTFENHLKKYESWDTPFVIENNAIQVKLSIRQDNKKEPIEKILSIQRALMLYFLED |
| | ALFQTGNNNIIENKGRILVEQYYTVYNNDFVQSKTVLEENDSISPEQKNALKKIVPKRLLHRYFARSNKL |
| IMG_ | MDTNEAYTAYNSRNSFKRIFDFKGEIAPIAEKANLNYDIKAKNAINREQRLHYFTVGHTFKNIDTEHVFEILL |
| 3300031918_4 | DEETREKRPYTFLSLQQFNTDFCTAIKEVISNIRHINSHYIHDFERIKTDNIPPEIITFLKESFELAVIQIYLKENN |
| SEQ ID NO: | ITYLQFIEQKNTDTTIVKYLHDKFYSLDNTKTDTKNDTSPSLAEYIAFRNTFKTLSKEKALDSLLFVTVDAGF |
| 4553 | PWKLEETHTACTITQGTYLSFNACLFLLSLFLYKSEANQLISKIKGFKKNKTDEEKSKREIFSFFSKKFSSQDI |
| | DSEENHLVKFRDLIQYINHYPVEWNKDLKLESGHPLMTDKLIAKITDMEIDRAYPDYAGNNKFQAYAKEL |
| | LWNVPSKTTFTTEEIEAFAFEINKSPELKDAKKKLHDLQAKMGLYGFKKVKNEQEIAKTIKRIKWIQNDLNP |
| | VTENVKKRLAQFSLYGSYGRNQDRFMDFATRYLAEQKYFGVDAEFKMYKYFTSEEQNTELATYELPKDK |
| | KAYDKLRFHKGKLVHFSTFENHLKKYESWDTPFVIENNAIQVKLSIRQDNKKEPIEKILSIQRALMLYFLED |
| | ALFQTGNNNIIENKGRILVEQYYTVYNNDFVQSKTVLEENDSISPEQKNALKKIVPKRLLHRYFARSNKL |
| IMG_ | MDTNEAYTAYNSRNSFKRIFDFKGEIAPIAEKANLNYDIKAKNAINREQRLHYFTVGHTFKNIDTEHVFEILL |
| 3300029989_3 | DEETREKRPYTFLSLQQFNTDFCTAIKEVISNIRHINSHYIHDFERIKTDNIPPEIITFLKESFELAVIQIYLKENN |
| SEQ ID NO: | ITYLQFIEQKNTDTTIVKYLHDKFYSLDNTKTDTKNDTSPSLAEYIAFRNTFKTLSKEKALDSLLFVTVDAGF |
| 4554 | PWKLEETHTACTITQGTYLSFNACLFLLSLFLYKSEANQLISKIKGFKKNKTDEEKSKREIFSFFSKKFSSQDI |
| | DSEENHLVKFRDLIQYINHYPVEWNKDLKLESGHPLMTDKLIAKITDMEIDRAYPDYAGNNKFQAYAKEL |
| | LWNVPSKTTFTTEEIEAFAFEINKSPELKDAKKKLHDLQAKMGLYGFKKVKNEQEIAKTIKRIKWIQNDLNP |
| | VTENVKKRLAQFSLYGSYGRNQDRFMDFATRYLAEQKYFGVDAEFKMYKYFTSEEQNTELATYELPKDK |
| | KAYDKLRFHKGKLVHFSTFENHLKKYESWDTPFVIENNAIQVKLSIRQDNKKEPIEKILSIQRALMLYFLED |
| | ALFQTGNNNIIENKGRILVEQYYTVYNNDFVQSKTVLEENDSISPEQKNALKKIVPKRLLHRYFARSNKL |
| IMG_ | MDTNEAYTAYNSRNSFKRIFDFKGEIAPIAEKANLNYDIKAKNAINREQRLHYFTVGHTFKNIDTEHVFEILL |
| 3300029998_6 | DEETREKRPYTFLSLQQFNTDFCTAIKEVISNIRHINSHYIHDFERIKTDNIPPEIITFLKESFELAVIQIYLKENN |
| SEQ ID NO: | ITYLQFIEQKNTDTTIVKYLHDKFYSLDNTKTDTKNDTSPSLAEYIAFRNTFKTLSKEKALDSLLFVTVDAGF |
| 4555 | PWKLEETHTACTITQGTYLSFNACLFLLSLFLYKSEANQLISKIKGFKKNKTDEEKSKREIFSFFSKKFSSQDI |
| | DSEENHLVKFRDLIQYINHYPVEWNKDLKLESGHPLMTDKLIAKITDMEIDRAYPDYAGNNKFQAYAKEL |
| | LWNVPSKTTFTTEEIEAFAFEINKSPELKDAKKKLHDLQAKMGLYGFKKVKNEQEIAKTIKRIKWIQNDLNP |
| | VTENVKKRLAQFSLYGSYGRNQDRFMDFATRYLAEQKYFGVDAEFKMYKYFTSEEQNTELATYELPKDK |
| | KAYDKLRFHKGKLVHFSTFENHLKKYESWDTPFVIENNAIQVKLSIRQDNKKEPIEKILSIQRALMLYFLED |
| | ALFQTGNNNIIENKGRILVEQYYTVYNNDFVQSKTVLEENDSISPEQKNALKKIVPKRLLHRYFARSNKL |
| IMG_ | MDTNEAYTAYNSRNSFKRIFDFKGEIAPIAEKANLNYDIKAKNAINREQRLHYFTVGHTFKNIDTEHVFEILL |
| 3300030339_4 | DEETREKRPYTFLSLQQFNTDFCTAIKEVISNIRHINSHYIHDFERIKTDNIPPEIITFLKESFELAVIQIYLKENN |
| SEQ ID NO: | ITYLQFIEQKNTDTTIVKYLHDKFYSLDNTKTDTKNDTSPSLAEYIAFRNTFKTLSKEKALDSLLFVTVDAGF |
| 4556 | PWKLEETHTACTITQGTYLSFNACLFLLSLFLYKSEANQLISKIKGFKKNKTDEEKSKREIFSFFSKKFSSDDI |
| | DSEENHLVKFRDLIQYINHYPVEWNKDLKLESGHPLMTDKLIAKITDMEIDRAYPDYAGNNKFQAYAKEL |
| | LWNVPSKTTFTTEEIEAFAFEINKSPELKDAKKKLHDLQAKMGLYGFKKVKNEQEIAKTIKRIKWIQNDLNP |
| | VTENVKKRLAQFSLYGSYGRNQDRFMDFATRYLAEQKYFGVDAEFKMYKYFTSEEQNTELATYELPKDK |
| | KAYDKLRFHKGKLVHFSTFENHLKKYESWDTPFVIENNAIQVKLSIRQDNKKEPIEKILSIQRALMLYFLED |
| | ALFQTGNNNIIENKGRILVEQYYTVYNNDFVQSKTVLEENDSISPEQKNALKKIVPKRLLHRYFARSNKL |
| IMG_ | MKSSVENIYYNGVNSFKKIFDSKGAIAAIAEKSCRNFDIKAQNVVNREQRMHYFSVGHTFKQLDTENLFEY |
| 3300030000_3 | VLDEQLRIKTPTRFVSLQHFDKEFIENIKRLISDIRNINSHYIHRFDPLKIDAIPSTIVTFLKESFELAVIQIYLKE |
| SEQ ID NO: | KGINYLQFSENPHADQKLVAFLHDKFLPIDEKKIAMLQNETPQLKEYKEYRKSFKALSKEAAIDQLLFAETE |
| 4557 | TDYDWKLFESHPVFTISAGKYVSFYACLFLLSMFLYKSEASQLISKIKGFKKNTTEEEKSKREIVTFFSKKFN |
| | SMDIDSEEKQLVKFRDLVSYLNHYPVAWNKDLELESSNAAMTDKLKSKIIELEINRSFPSYEGNNRFAIFAK |
| | YQIWGKQHPNKFIQTEYNNAAFSNEEITAYTYETNSCPELKDAHKKLAELKAAKGLFGNRKEKNERNIEKT |
| | QKSIRKLQHEPNPIKDKLIQRIEKNLLTVSYGRNQDRFMDFSARFLAEINYFGQDARFKMYRFYSTDEQNCE |
| | LEKYELPKDKKEYDSLKFHQGKLVHFSSYKEHLKRYETWDDAFVIENNAIQLKLLFDGVENTITIQRALLIY |
| | LLEDALRNSQNNTAENAGKELLEAYYSHNKVDFSAFKHILTQQESIEPQQKTEFKKLLPRRLLNHYSPAIGN |
| | CQTAPSSLPLLLEKAILAEKRYSSLTAKAKAEGNYDDFIRRNKGKQYKLQFIRKAWH |
| IMG_ | MDNSTSKSFKRFFEFKGNVAPIAEKANRNFNIKNLNPINTQQRLHYFAIGHVFKSIDTEKIFTVLLDEVAKVK |
| 3300001881 | KPTKFSALQNTEFTFINELKCLMSDIRNINSHFIHDFEKIKIDSIDKNIIEFLKQSFELAVLQTCMDEKNINYEE |
| SEQ ID NO: | FTGGGNPEKEIVDFLCDKFYPKIDNSKDLSEHQKLISDFKKKSKDEAINEILFINVSSDYNWNIFETHTVFKIS |
| 4558 | KGKYLSFEACLFLLAMFLYKGEANQLISKIKGFKRNDDNKFMSKRNLFTFFSKKFSSQDIDSEENHLVKFRD |
| | LVQYLNHYPTVWNKYLELGSNNPIMTERLKEKIIELEIKRCFPELASNSSFNQFAINYIFKNGKIIECENNNIY |
| | LDIINKNDEVRKIYFSIKNNEFNRSEFKDNSFKMFALKYVVKEYYKENKAYADYLTKQIKDKEKTFDEELIT |
| | NKKVEKLKKQISQNLNFIFYGRNQDRFMEFATRYLAETGYFGKDAKFKMYEFFTTDEQIEEIDRLKRTISKK |
| | EFDKLKFHQGKLVHCSTYADHIAKYKNWDTPFVVENNAVQLTVCFDNGQRKILSIQRNLMPYFLEDALYN |
| | MQNDKIEGAGKILIENYYNYHKEGFEKSRLTLKQNDTISLLEKATFKKILPKRLLHRYSPAVQNNLPENSTY |
| | KQILTKTKEAEERYV |
| IMG_ | MNTAKKFHRFFEVKGNVAPIAEKADKNFILKEKNNVNLQERLWYFAIGHVFKQLDTKAIFDYKVNETTRE |
| 3300033446 | SKPQKFTSLTSDNFSFLKKIKSFIGNIRNINSHYIHDFSVIKLNTNIEDANNDNSFMMFLKEAFELALIHIYSEE |
| SEQ ID NO: | KGLKYSQFIDDKTNDKKLVEYIRDKFYSLNDSRKNLTSEEKKASEEYKKFRTDFLNKTKSQAINDILFIDNE |
| 4559 | ADFDWTLYETHKVFTIKEGKYLSFDACLFLLTMFLYKNEANELISKIKGFKRSDDNTFRSKRNLFSFYSKKF |
| | SSQDIDSEEGNLIKFRDIVQYLNLYPKHWNSELEFDAKIPQMTKPLKDKIVEMEIERCFP |
| IMG_ | MGETSKDSSNNDFSSSAFYRHFENAGIMGPICEKAVKNFELKGAFFKSSNESSTDLVNRRQRIHYFAIGHAF |
| 3300020385 | KQIDTKTIFEYKIDETAREERPTKYLSLQTNNFSLDKELFNLLRDIRNLNNHYVHIFDKIKVTKLKETNVIAFL |
| SEQ ID NO: | KESFELALIKIYFKEKGHLPNNDNDIVSFLKRIFFPKKTDNKTDSIEQKERNKIWNDFTYSLTSKAQTIDAILFI |
| 4560 | DVENEFDWNINNEVKVLSIKKGKYLSFEACLFLVSMFLYKNEANHLIPKIRGYKRNDDTQMRSKRELFSFF |
| | SKKFTSQDVDAEESHLVKFRDIIQFLNHYPTTWNNDLKLESESKNQKMIKVLKDSIITMEIYRTYPNYNNDI |
| | NFVSFAKDYLFKNKSNELNEEYKNKKLTKAQCEYYEEITQNPHIKIFKNEIANAIKPIAYNLKENAFKIYVK |
| | QYVLKTFFPNKRGYEKFATHRFKKNKRYITEDVEKGFKSQLFSNPKTERLKKRILEDSLIMSYGRNQDRFM |
| | DFSIRYLAEKNYFGADAQFKCYQFYTTFEQENYLNNFKKTHTKKEIDNLKYHNGKLVHFTTYQSHKRNYP |
| | EWDMPFVNQNNSVSIKIILEEKTTDEKNEVAIEKIITIQRNLITYFLEDALYNTDYDGKQLLT |
| IMG_ | MEQKQLESRFNQIFNNKGHTGPIAEKAVKNFETIRQHKVSPRERLHYFAVGHALRNIDKDLKESIFEYNLDE |
| 3300020592 | EQKKQKPTQFTTLQSDFFRFENALLTLLKDIRNCNGHYVHTFDKLQLDEILKLQEKNKEHGILNKDAGCQII |
| SEQ ID NO: | EFLKEAFEFSILIQFLKEKPKEYEKFKKRKNENKNQSLRNLIGGYEKKLVKYLCDKFFPNEEKQKEIRDKFIE |
| 4561 | HNLEEAIEDLLFIPVDEDIEWKLGEEHVVFVIKKGKYLSFYAQLFLLSMFLYKQEANQLISKIRGFKRSEDEF |
| | QYKRNIFTFFSKKVSSQDIHSEEKHLIYFRDIIQYLNRFPTAWNEYLSPERKNLPMTKLLEKYILEEEIFRTFST |
| | YKNDCNRELFLKYTIKRLFCKKAELFDAEKISIDDNLRKKFNYEIDTSPELKNIHEKLKGKLKPKDYYKNIK |
| | RKEELEKEENPEKLKLTKKVTEEKLFTAYGRNRDRFMDFAVRYLAEQNYFGKDAEFKMYMFETTNEQEN |
| | YLKEQKNTADKKVIDQNKYHQGRLTCFKTYQKHKDDYQNWDDPFVFQNNAFQIILTFSNGERKKFSIQRK |
| | LLIYLLEDALFNHSDSIEDKGKQLLEDYFFNTLMPDFEDAKESYKTSDDVNWKHRKLLPKRLIYTVHPPRRT |
| | DSEEQIHPFEKILRETQEQERRYRLLLGKAKNMKLKEEFIKRNKGKHFKLRFIRKAWHLMYFREIYERRAKE |
| | HSHHKSFHITRDEINDFSRWMYAFDEVPPYKVYLRNMLQRKKFMENEEFAELFEKGKSLDDFYRITKKEFS |
| | KRIKNNLFQLKVDSERQYAEILSKKLVYINLSHFIKYLNAKGKLTVENGIIQYKASTNKKYLIDEYYYTEVL |
| | PREEYKVHKHLFNKLRATKL |
| IMG_ | MEQKQLESRFNQIFNNKGHTGPIAEKAVKNFETIRQHKVSPRERLHYFAVGHALRNIDKDLKESIFEYNLDE |
| 3300005281 | EQKKQKPTQFTTLQSDFFRFENALLTLLKDIRNCNGHYVHTFDKLQLDEILKLQEKNKEHGILNKDAGCQII |
| SEQ ID NO: | EFLKEAFEFSILIQFLKEKPKEYEKFKKRKNENKNQSLRNLIGGYEKKLVKYLCDKFFPNEEKQKEIRDKFIE |
| 4562 | HNLEEAIEDLLFIPVDEDIEWKLGEEHVVFVIKKGKYLSFYAQLFLLSMFLYKQEANQLISKIRGFKRSEDEF |
| | QYKRNIFTFFSKKVSSQDIHSEEKHLIYFRDIIQYLNRFPTAWNEYLSPERKNLPMTKLLEKYILEEEIFRTFST |
| | YKNDCNRELFLKYTIKRLFRKKAELFDAEKISIDDNLRKKFNYEIDTSPELKNIHEKLKGKLKPKDYYKNIK |
| | RKEELEKEDESPKN |
| IMG_ | MDFAVRYLAEQNYFGKDAEFKMYMFETTNEQENYLKEQKNTADKKVIDQNKYHQGRLTCFKTYQKHKD |
| 3300005281_2 | DYQNWDDPFVFQNNAFQIVLTFSNGERKKFSIQRKLLIYLLEDALFNHSDSIEDKGKQLLEDYFFNTLMPDF |
| SEQ ID NO: | EEAKGSYKTSDDVNWKHRKLLPKRLIYTVHPPRRTDSEEQIHPFEKILRETQEQERRYRLLLGKAKNMKLK |
| 4563 | EEFIKRNKGKHFKLRFIRKAWHLMYFREIYERRAKEHSHHKSFHITRDEINDFSRWMYAFDEVPPYKVYLR |
| | NMLQRKKFMENEEFAELFEKGKSLDEFYHLTKQEFSKRIKNNLFQLKVDSERQYAEVLSKKLVYINLSHFI |
| | KYLKCEREN |
| IMG_ | MSTRYTNQKKVEENINYVFSNKGIFAAVAEKTLTNYKSKFNEGQTIQPNLHYFAVGHTFKNIDTKRIFDYQ |
| 3300031208_2 | LSEDEMDILPTKYFSLQQNKFSFPIDGQTKTDKLYLLLDNIRNINAHFIHDFNFLKVDNIDENIICFLIDSFELA |
| SEQ ID NO: | LIKGVFAKKYGNKKHELGLDFLSNDLKDEILEEILENLDDELIVFMKEIFYQTLYVVDKKEWRNKELNQEK |
| 4564 | KDFLDSHLSSKEDWINWILFNCVEEDIDWFLNNYGDSDPHPDSKNHKHKVLTIEKGKHLSFEGSLFMMTMF |
| | LYANEANYLIPKLKGYKKNGTPQDASKLEVFRFFAKKFKSQDVDSEHKQYVKFRDMIQYVGKYPTVWNK |
| | HIHLDNYYVNELKVSILENEITQLFEQDIQNYFETKYGLQKFAKAKGDMHYAFVEVAKSYLQKKTISYKGK |
| | YQDDSIAILETLAEQITNKRQLKNIEVKLLRFSDTDYQSLSSIEKTKKQRLDKSKKMFLDKIKESKKTINKTT |
| | EKFAKRVEDNLLYISNGRNSDRFMVFACRFLAEINYFGKDAQFKMYENYYSEEEQNALKDKKQNLTQKEF |
| | DKLHYHGGKLTHFETFENHTKKYPNWDMPFVVQNNAIYVKIPGINFIKNTAFCIQRNVINYLLEHALGENY |
| | KDQQGRKWLFDYYEHKTEATDNAKRILTESKPIEASSKTKLKKLLPKKLFPKYSASETEKNILRKYLEQAEE |
| | SEKLYENQKDKAKAENRLDLFVNK |
| IMG_ | MSTRYTNQKKVEENINYVFSNKGIFAAVAEKTLTNYKSKFNEGQTIQPNLHYFAVGHTFKNIDTKRIFDYQ |
| 3300031613 | LSEDEMDILPTKYFSLQQNKFSFPIDGQTKTDKLYLLLDNIRNINAHFIHDFNFLKVDNIDENIICFLIDSFELA |
| SEQ ID NO: | LIKGVFAKKYGNKKHELGLDFLSNDLKDEILEEILENLDDELIVFMKEIFYQTLYVVDKKEWRNKELNQEK |
| 4565 | KDFLDSHLSSKEDWINWILFNCVEEDIDWFLNNYGDSDPHPDSKNHKHKVLTIEKGKHLSFEGSLFMMTMF |
| | LYANEANYLIPKLKGYKKNGTPQDASKLEVFRFFAKKFKSQDVDSEHKQYVKFRDMIQYVGKYPTVWNK |
| | HIHLDNYYVNELKVSILENEITQLFEQDIQNYFETKYGLQKFAKAKGDMHYAFVEVAKSYLQKKTISYKGK |
| | YQDDSIAILETLAEQITNKRQLKNIEVKLLRFSDTDYQSLSSIEKTKKQRLDKSKKMFLDKIKESKKTINKTT |
| | EKFAKRVEDNLLYISNGRNSDRFMVFACRFLAEINYFGKDAQFKMYENYYSEEEQNA |
| IMG_ | MSTRYTNQKKVEENINYVFSNKGIFAAVAEKTLTNYKSKFNEGQTIQPNLHYFAVGHTFKNIDTKRIFDYQ |
| 3300028408 | LSEDEMDILPTKYFSLQQNKFSFPIDGQTKTDKLYLLLDNIRNINAHFIHDFNFLKVDNIDENIICFLIDSFELA |
| SEQ ID NO: | LIKGVFAKKYGDKKSKLRLDFLSNEARDEILTDILENLDKELIVFMKEIFYQTLYVVDKKEWRNKELNQEK |
| 4566 | KDFLDNHLSSKEDWINWILFNCVEEDIDWYLNNYGDYDPHPDSKNHKHKVLTIEKGKYLSFEGSLFMMTM |
| | FLYANEANYLIPKLKGYKKNGTPQDASKLEVFRFFAKKFKSQDVDSEHKQYVKFRDMIQYVGKYPTVWN |
| | KHIHLDSYYVKDLKATILENEIIQLYQEDIKNHFQSICGLKQFEDSQEEIQLAFIEVAKDYLQNKEIYYTGEY |
| | REDCITILKTSAEHLANKRQLKDIQKQLKKYINKAYKSLSSEDQGKKKKLDISKLKYIDKIRKSKNSINTTTD |
| | KFAKRVEDNLLFISNGRNSDRFMVFACRFLAEINYFGKDAQFKMYENYYSEEEQNALKDKKQNLTQKEFD |
| | KLHYHGGKLTHFETFENHTKKYPNWDMPFVVQNNAIYVKIPGINFIKNTAFCIQRNVINYLLEHALGENYK |
| | DQQGRKWLFDYYEHKTEATDNAKRILTESKPIEASSKTKLKKLLPKKLFPKYSASETEKNGSSLGLR |
| IMG_ | MKKNINPFNLFFLEKGYIGSIAQKAENNFSTNCKALNGSQISDKENKATSRIYYFAVGHAFKNIDTKAIFAY |
| 3300028650 | KYDDDKKNLRATQYVHIQRNVFDQGLRDFIGEKVHAIRNMCSHYVHLFNDIKLEDEDSDKANIIQDQFIPF |
| SEQ ID NO: | VKEAFKLAVVQAYPGESDMTIDKVDDAKIIRFLYDNFISKGEYDDLEEKKQFFKLSSDKALEKVLFIDLDED |
| 4567 | QSICIGPGYEVFTATKGRYLSFYASLFLLSMFLYRNEAEILISRIKGFKDKRDIGNIAKRSVFTFFSKKVSSRD |
| | VDNEEMPLVKFRDIMQYLNHYPTAWNDQLSDYSSSESSKNLCNKIVEMDIKRLFHEMFETENEESLRFLTY |
| | VKLTQYEALYPKKYVRAEFLKADFTSRETEHFDIIIKESKELKGCRKKLQDLLHADSLGNEKEKEIAECTEKI |
| | QELEGAETNPDLDAVRKQIDDHLFITSYGRNQDRFMDFAARFLAEVEYFGKDAFFKVYRFETIEEQSKYLE |
| | KVKNQLPKEQYDKLKMHRGRLATYMNHNQIINYYSSFDIPFVTENNSIQVFMPSSKIIEDMDDQMLKKIFKG |
| | KGTFYVIQRPLIIYLLEQFLYEPSGRKKMTFKALIENYCGRRKKGLEKYETLLLNDSDSKAAELQDQ |
| GCA_ | MNITDFIKKKTDPFIRNKGLLAPLSEIAYRNFELVCDNNEKSGDLSLQAISSIYQFSIGQTFKSHNIKQLFNYQ |
| 000212915.1_ | LNDEKDRFVPTKYLSLQKKQFIDNEIASTLLKLVSAIRELNQNYTHNLEPLRIGNNIITPQIIEFLHDLFEVSII |
| ASM21291v1_ | MLLNKSVKDRNNFTSQYNEDSLNLLLKEFILTLFFPETSYTTEEIEVLRKKSKDELINEVLFFDVQSVYQWK |
| genomic_2 | VVNNPLMMPIQCGKYLSFTSCLFINSLFLFKEDTKIIFPNFPFLKNKTDETQVLQMFFSLFANPYTLHYIPSQH |
| SEQ ID NO: | LRIAKHKDIIEYLNLYPSPWQEALNSQSPCFPMSHLLKDFLIERECNRVFLKVPHLNLILIPIIINRLMVTKIIA |
| 4568 | |
| IMG_ | LIDEYYYTEVLPREEYKVHKHLFNKLRATKLEDALLYELAMKYLREDNDIVEKAKSKVSDIQSSEISFDIKD |
| 3300020592_2 | YYGNHLYTLIVPFNKLETLSILIRYKTKQEKNSKLQRTSFLGNIYHLLAFLDKNYKQLSKYKDDGGFKKIVK |
| SEQ ID NO: | NFKNKKRLSFVELNTINGYIISGAVKFSKVHMELERYFINKHKIKANHIYIDLEDIKDDSNKQVFGNYYDSK |
| 4569 | LRIRNKAFHFGVPTNFFFNIEIEKIEKKFILEEVKLQNVSSFDKLNQNAKSVCRVFMEVLHSDLYRRDKNKS |
| | KEELRREFEEKYFNEIITTV |
| IMG_ | MRKGKLTVENGIIQYKASTNKKYLIDEYYYTEVLPREEYKVHKHLFNKLRAAKLEDALLYELAMKYLKED |
| 3300005281_3 | EEIVEKAKSKVSDIQSSEISFDIKDYYGNHLYTLIVPFNKLETLSILIRYKTGQENELKNKKTSFLGNIYHLLAF |
| SEQ ID NO: | LDKNYKQLSKYKDDGGFKKIVKNFKNKKRLSFVELNTINGYIISGAVKFSKVHMELERYFINKHKIKANHI |
| 4570 | YIDLEDIKDDSNKQVFGNYYDSKLRIRNKAFHFGVPTNFFFNIEIEKIEKKFILEEVKLQNVSSFDKLNQNAK |
| | SVCRVFMEVLHSDLYRRDKNKSKEELRREFEEKYFNEIITTV |
| GCA_ | MIQGVKFSENKERFADWFVHYKDYEHYQKFYDTNLYPVESIEDKERQKLEATIKKQQKNDVFTLLMIKKIF |
| 900618225.1_ | NDLFNQDFEANLYEMYQSKEERENNQLIAKETQNRNLNFIWNKPIAIDLFDGKVKIDEVKLKDVGSFRKYE |
| NCTC13469_ | NDKRVQTFIKYHPEIQWIPYLPNTWEGINLPVNVTERQIDRYEKVRSEELLKEVQAIEKYIYEQVNDKTELLQ |
| genomic | NGNQNFKNYLVNGLLKQIQGIDVSNFKFINQQKFETINVKDLDNEASALEQKVYILINIRNQFSHNQFPKSTF |
| SEQ ID NO: | YQFCQKILLIEEDELFADYYLRLFKLLKNELLD |
| 4571 | |
| IMG_ | MTETTKVALPNDKNQAINKLFDSADRQKTLAKIEKELPFFQYYLNQAVVNLQKLGAPDLSGDEDKAQKLI |
| 2061766007 | EELPDAKIQILADFLWLFKTDNPGEDFKDYRKITTMLVDKIFRLRNFFCHTERGDIKPLLTNAAFYHFFAGW |
| SEQ ID NO: | ALGEARLHSLEGGVKSDRIFKMSIMNAQEINKDDRTRNIYAFTRRGIIMLICMALYKDEAIEFCQALDDMKL |
| 4572 | PRVELDEELEQSDSEQTELRKKAGIRKAYHLVFLYFSKKRSFNAVDEENHDFVCFTDIIGYLNKVPMVSMD |
| | YLALNEERKRLAELEAASTESDENKRFKYTLHRRMKDRFLSFITAYCEDFNLLPSIRFKRLDISPSIGRKRYC |
| | FGIESDNSVRQSRHYAIEKDAIRFEWRAKQHYGDIHIDSLRSAISASEFKRLLLASRSTRTGKNFNASNELDA |
| | YFTAYHKVLEKMLNEPECDFINREGYLPELTAITGASREELMDNPTLLEKMRPFFPENITRFFIPRDNIPDNQ |
| | TLLEQLKNALQNAIKHDDDFIARMDGATEWTSKYADVPPEKRPKRPQEYRFNNNAFISKVFALLNLYLPDD |
| | RKFRQLPKGKQHRACMDFEYQTLHAIIGRFASDPQELWDYLKGIKTVYRYEGKKRIPDHTINVIDSKRXXX |
| | XXXLQKKRTSSTRKRNASTGIPSLMQMDDSHATPSRCLHAPLSSCIRNSAKSFSHNIKVHNWTGFAHSFRK |
| | TAASSAYALDSPSLMTPSSKPSSTLTRPSGSMPSMKRKTALGKTARS |
| IMG_ | MNAQEINEDDKTKNTYAFTRKGIVLLACMALYKDEATEFCQSLQDMKLPTVELEEDESIDDAEKATLRKK |
| 2061766007_2 | ASIRKAYHLVMSYFSQKRSYNAIDQENHDFVSFTDIIGYLNKVPTVSMDYLALNEERRKLAELDAKSTESEE |
| SEQ ID NO: | NRRFKYTLHRRAKDRFLSFAAGYCEDFNILPCIHFKRLDISDHIGRKRYIYGMENDNSVRQSRHYAIDKDAI |
| 4573 | RFEYRPSGHYGDIHIDYLRSAISAKEFKRLLLATRSTRTSIFNPSEALDAYFSAYHKVLEKMLNEPDCDFIDR |
| | TGYXXXXXXXXXXXXSHPG |
| OLZV01.1 | MKKQNKNNHNRSCKGRFGEKNISQNCKRNIYLPNDLKRALYKLKIDQPGYSEQKNFFVYLSFATNNIFEIA |
| SEQ ID NO: | GISHDFSTDGIKVWDEIKRLKMVDKLARFLWLFRIEDPAKECPDYEEITEGIVKKLLELRNLFAHINNKKSIE |
| 4574 | AFLLDNKLANALQWGLMDVARENVLKPGLSTAKLFKQRLVTPHNDTKYEFTRKGIIFLICLALFKDEAFHF |
| | CSSLNDLKDMRKDAEWQRLRNDDAAEELKKYMTRNNYKNPSQTRAQVDMLTYFSMRSSYKAILGIGSDD |
| | QGSSAIDKEERDYKIFADIIGYLNKVPVECYDYLELADERRMLKDLNDKSEESEENKEYKYDLKSNRRLKN |
| | RFLPLAIGYCEDFDLFPSIKFKRLDISEQIGRKRYCYGKENGNANGMDRHYAIHDGSVGFEYCPDNHYGDL |
| | RISSMRSSISTYELKRLLLLETVFRCDKKKIDEAISNYFSAYHRVMERMLNASYSGDFELEDFREDFSLVSGL |
| | EPEEISKDKLFEQMGLYFPDSLLRFFLNKDNNPTPKELKALLKKKIAYRQRQCEDFLNKIDEVYKRRTSTKE |
| | ELSSAGKPVKISDGVLIRKVFNLLNIFLKPEEKFRQLPKSEWHKGNKDFEYQTLHAIIGKFPLDKNKRFWSFI |
| | LECRPGLKDIIGKLQAKYNSEYERRGASEARRGLNAL |
| OLZZ01.1 | MKKQNKNNHNRSCKGRFGEKNISQNCKRNIYLPNDLKRALYKLKIDQPGYSEQKNFFVYLSFATNNIFEIA |
| SEQ ID NO: | GISHDFSTDGIKVWDEIKRLKMVDKLARFLWLFRIEDPAKECPDYEEITEGIVKKLLELRNLFAHINNKKSIE |
| 4575 | AFLLDNKLANALQWGLMDVARENVLKPGLSTAKLFKQRLVTPHNDTKYEFTRKGIIFLICLALFKDEAFHF |
| | CSSLNDLKDMRKDAEWQRLRNDDAAEELKKYMTRNNYKNPSQTRAQVDMLTYFSMRSSYKAILGIGSDD |
| | QGSSAIDKEERDYKIFADIIGYLNKVPVECYDYLELADERRMLKDLNDKSEESEENKEYKYDLKSNRRLKN |
| | RFLPLAIGYCEDFDLFPSIKFKRLDISEQIGRKRYCYGKENGNANGMDRHYAIHDGSVGFEYCPDNHYGDL |
| | RISSMRSSISTYELKRLLLLETVFRCDKKKIDEAISNYFSAYHRVMERMLNASYSGDFELEDFREDFSLVSGL |
| | EPEEISKDKLFEQMGLYFPDSLLRFFLNKDNNPTPKELKALLKKKIAYRQRQCEDFLNKIDEVYKR |
| IMG_ | MSYNITVGSRQNGRASGFHGGAPKKRTYLSGDFARDMRELRIKGTIRSPQTRKETYVDETPQFITYLTLALQ |
| 3300031998 | NISDIIGEDVTKMRSKNSVERSLSRSGKLWEVASFLWLHAEDQPKRDFAKLSKEAAAKGEDPDYAKFAGAI |
| SEQ ID NO: | VVKLWELRNMFVHWSQSRSAGVLVVNREFYRFVEGELYSAAMPDAIGSGRKSEKMFKLRLFNPHDDAKL |
| 4576 | QYEFTRKGMIFLVCLALYRHDASEFIQQFPDLQLPPREWEMEKGYKKRMTEEDLVSLRKKGGSIKAILDAF |
| | THYSMRASRTDIDLKNKEYLNFANVLTYLNKVPMASYNYLTLREEAQALAEAAEKSTESEENKRFKYLLH |
| | PRQKDRFLTLALAFIEDFHVLDCIRFKRLDITVRPERSRYMFGPIEAGTKNEFGYELSDANGMDRHYVISHG |
| | NAEFEYVPEKSDHENRSIRISRLRGRVGEGEVMRLLLAFFTTRDANVPAEKNPVNTELHAYLRSYHRILER |
| | MLNAKTLDGLKFDSPDFKNDFKRVSGKSVDSLTKENFVEEMKPFFPAGITRYFVGDEMKLDTRALQDILAS |
| | KLAARADRASDFLKRLDRLTDWRELDEEARKRVGPPICKIGELKYPPRTCKMTDAQLIKRVLDYINLNLND |
| | PNDKFRQLPRGLRHRGIRDVEFQMLHRDIGRFGSNPDGLWRTLEKREALNGED |
| IMG_ | MKAKLPMNHQDALCHLEIEGCVRGSNVHLESAFLLYLNQAVVNIQERTGIGDRYFDPDTVWSEIRKKGPG |
| 3300000505 | VVERLASFLWLFREEDPERDWGKDYEEYTEKIVKRIFQLRNWFAHRDRMAGKDSLIVDRAFYVLIEGLLG |
| SEQ ID NO: | AAAREAADGPGMKMAKVWKAKLLSLQDKNAVDKALETYYLTKRGLIFLICLALYKDDATEFCQLIPELRL |
| 4577 | EDRYEEALEGYEVPDPKKKGSAKAMRAFFTYYSMRKGRQDLDAGDLDRMCFSDILTDLNKVPLAAHDYL |
| | PLAEERQDLDARREVSTESEANKRFKYELHPRMKDRFLSTAAGYIEDFDVLPSV |
| IMG_ | MMKQAKQVLLPADPKEALLKLWDRPDKSERRWLFEHELPYFQFYLNLAITHIQGIAHLDESKFDEEAIVKQ |
| 2061766007_4 | IMKLDKETRFRLADFLWLSKVDDAKSLFYKDCCPQECAISFPEEKKPCNDEAGNLAEGKDDVKSFFPCCNE |
| SEQ ID NO: | RCPLRAKDECSNYDARIIVQLYRLRNFLAHYTRPDTTIGALLTDYQFYTFFAGWLFGEAKSKALNGQIKTD |
| 4578 | KLHKMKLMTQQTEGKDTPREQCQYAFTRKGLVFLICLALYKHEAHEFCQALVDMKLPTKELLAVEQPDE |
| | DAQTALRKKKSQREASRELFTYFSMRESYGAVWKDDHNFIYFTDLIEYLNTVPLVSLDYLALRKERELLAE |
| | DCAKSEESESNKLWKYSLHGRQKERFLSFLTAYCEDFDIIPSIEFKRQDLRPSIERHRYCFGEDEKRKNFTSD |
| | SADSDISRDRQDRHYAISRDCVHXXXXXXXXXAYSYCGVAQCD |
| mgm4547164.3_ | MKDIVSYFRELLSGTKYALADDATEEKISELIYNVGYSKSAKDLPNKNLKKLTQLQIVQTGIETLMRSKGK |
| 8 | KPEDLPENIHAFVFNNAEAIQASDPGLTTDEANPVTARFLQMLMGDGDQNEGRLERRLQWVDGQLAKFSR |
| SEQ ID NO: | SSSAQFAKDNRYATKGYKDVRYGRLAEILAESMLLWQPTKDTDDSIERGRNKLTGLNYRRLVDFLAIYSE |
| 4579 | DSTAKKERDGIVEEYSGLEALECVLNEAKLIGSVTYHPFLSAVLKKAPRNIENLYLAYMNAEKNYLINLKK |
| | TFAKKAATDKIEDLQSQAPAFVHPFRERWTDKVQVADNVRRMAARYLESGSTLLLPDGLFTDAILSQLQR |
| | RGLLQDVFAEAANEQDETEKELLEQRNRNVSFLISRYMESMGDHCQTFYDGDTPIFYRGYDLFKKLYGKK |
| | VRNEQLPFYMSRDVIAAELKAKEELVKKIENYCVQQNKAEAEEGMIRDINHIKKNERAILRYKVQDMVLFL |
| | TAKKMLQSQQTLQDGNATQNQESHRVNLGRQTQAAYVRQQQTLLNRSERIERMSLQDIFDGDALNETMD |
| | YEYRIDVTWKLRDEQGRVLKFKADGQPIGFDEDGNLLEKGGKPKVFKRKVFVTQKNVAIKNFGRIFRIVRD |
| | ERLEKLLILLIMKVEGANLQETGQDYTVSVAELANEFTTFDSLRTDAFELIHELEKTAYPCLTNKESNETFQF |
| | KNMMRLICDTEEEAVAINQYRISFAHSLYGIEETSIGDGLQIPLVSTRMKEQMAARSDQIKEHLAAQN |
| IMG_ | MMRFQPAKRSADNMGVPGSKANSTEYRLLQEALAFYSTYKDRLEPYFRQVNLIGGTNPHPFLHRVDWKK |
| 3300014026_2 | CNHLLSFYHDYLEAKEQYLSHLSPADWQKHQYFLLLKVRKDIQNEKKEWKKSLVAGWKNGFNLPRGLFT |
| SEQ ID NO: | ESIKTWFSTHADKVQIADPKLFENRVGLIAKLIPLYYNKVYEDKPQPFYQYPFNINDRYKPEDADKQFTAAS |
| 4580 | SKLWNEKKARYKNAQLEQLKKKKDLKYLDFLSWKKLERELRMLRNQDMMVWLMCKDLFAQCTVEGVE |
| | FADLKLSQLEVDVTVQDNLNVLNNVSSMILPLSVYPSDAQGNILRNSKPLYTVYVQENNTKLLKQGNFKSL |
| | LKDRRLNGLFSFIAAEGEDLQQHPLTKNRLEYELSIYQTMRISVFEQTLQLEKAILTRNETLCGNNFNNLLNS |
| | WSEHRTDKKTLQPDIDFLIAVRNAFSHNQYPMSTNMVMQDIEKFXXXXQTPKLAEKDGLGIASQLAKKTK |
| | DAASRLQNIINGGTN |
| IMG_ | MEGTKMRRLGVSVYPGHSEIEDILDYLRLAATYGFSRVFTCLLSVGNQEKTIADFKEAVKLATSLGMEVIA |
| 3300008679 | DVDLSVFEKLDLKYDNLEFFKDMGLTGIRLDGGFSGQEEAGMTFNPQGLMIELNMSIENRYLENIAAFQPK |
| SEQ ID NO: | FEKLIGCHNFYPHRYTGLSVQHFLNTSKRYKDLGLRTAAFVNSKVATTGPWPVEEGLCTLEMHREWEITSA |
| 4581 | AKWLWATELIDDVIVANSFASEEELKEYLKGKDIEIVHLPKQMIAILESKPKDMVKEAKRKQKEMVKDTK |
| | KLLAALEKQTQGEIEDGGRNIRLLKSGEIARWLVNDMMRFQPVQKDNEGNPLNNSKANSTEYQMLQRSLA |
| | LYNKEEKPTRYFRQVNLINSSNPHPFLKWTKWEECNNILSFYRSYLTKKIEFLNKLKPEEWKKNQYFLKLK |
| | EPKTNRETLVQGWKNGFNLPRGIFTEPIKEWFKRHQNDSEEYKKVEALDRVGLVAKVIPLFFKEEYFKEDA |
| | QKEINNCVQPFYSFPYNVGNIHKPEEKNFLHCEERRKLWDKKKDKFKDYKAKEKSKKMTDKEKEEHRSYL |
| | EFQSWNKFERELRLVRNQDIVTWLLCTELIDKLKIDELNIEELQKLRLKDIDTDTAKQEKNNILNRIMPMQL |
| | PVTVYEIDDSHNIVKDKPLHTVYIEETKTKLLKQGNFKALVKDRRLNGLFSFVKTSSEAESKSKPISKLRVE |
| | YELGAYQKARIDIIKDMLALEKTLIDNDKNLPTNKFSDMLNSWLEGKGEANKVRFQNDVDLLVAVRNAFS |
| | HNQYPMYNSEVFKGMKLLSLSSDIPEKEGLGIAKQLKDKIKETIERIIEIEKEIRN |
| IMG_ | MIKDTKKRLATLDKQVKGEIEDGGRNIRLLKSGEIARWLVNDMMRFQPVQKDNEGKPLNNSKANSTEYQ |
| 3300008304 | MLQRSLALYNKEEKPTRYFRQVNLIKSSNPHPFLEDTKWEECYNILSFYRNYLKAKIKFLNKLKPEDWKKN |
| SEQ ID NO: | QYFLMLKEPKTNRKTLVQGWKNGFNLPRGIFTEPIREWFKRHQNNSEEYEKVEALDRVGLVTKVIPLFFKE |
| 4582 | EYFKEDAQKEINNCVQPFYSFPYNVGNIHKPDEKDFLPSEERKKLWGDKKDKFKGYKAKVKSKKLTDKEK |
| | EEYRSYLEFQSWNKFERELRLVRNQDIVTWLLCTELIDKLKVEGLNVEELQKLRLKDIDTDTAKQEKNNIL |
| | NRIMPMQLPVTVYEIDDSHKIVKDRPLHTVYIEETKTKLLKQGNFKALVKDRRLNGLFSFVDTSSEAELKD |
| | KPISKSVVEYELGEYQNARIETIKDMLLLEETLIKKYKTLPTNKFKKMLKGWLEGKDEADKARFQNDVKLL |
| | VAVRNAFSHNQYPMRNRIAFANINPFSLSSANTSEEKGLGIANQLKDKTKETIEKIIKIEKPIETKE |
| IMG_ | MKAIIYARVSTEMQEEGRSLEFQIRKCEDFCKMSGYKLKEVIQDVESGGNDNREGFLKLQQEIKKKSFDVL |
| 3300009381 | VVYESSRISRITLTMLNFVLELQKSNIKFVSISQSEINTTTPTGMLFFQIFAVLADYERKQISMRVKSNKWAR |
| SEQ ID NO: | AKAGIWQGGNIPIGYKKDEHNNIVIDPETSEDVINIFNTYLNTKSISETASIFNRNISSIKWILQNEFYIGNLMY |
| 4583 | GRKENNINTGEVKINKEITIFKGNHQALISEDLFREVQRQMLFKQRVIRKEGKFLFTGILECICGGKMFKNGV |
| | NYRCDKCKKAISMNKAEKFIIHKLLNLKELEFLNELQPQNWASDNYFLLLRAPKNDRQKLAEGWKNGFNL |
| | PRGLFTEKIKTWFNEHKTIVDISDCDIFKNRVGDVA |
| IMG_ | LKSNILPENDDDYDADLHHPFLLNVLDEEPSSVEEFYEIYLEEELNHIDYMITFLKKHKAKGTALYIPFLHAN |
| 3300028805_2 | RSRWKNADEDTMKKLATRYMEQPLQLPNGMFTESIFKLLMEIDNPDLHEELVKAENPDADKNLANNVSY |
| SEQ ID NO: | LMSIYFKHVERDHSQPFYNTTAIEGEPSPYRHVYRIFKKLYGQQIPHTNQTTTPAYTVEEINGLRKQALTDIA |
| 4584 | KYVEKDISNWKDRQQFKFEQKLKKKLKKENDRRYKNHEQQLNVYEEVNKVVQQEINTMRTTTTAKLIRQ |
| | LKKVYDNERTIRRFKTQDMLMLIMAREILKAKSQNKDFTKDFCLKYVMTDSLLDKPIDFDWSVNIEKKKK |
| | NEEGKIEKEIIRKTIRQEGMKMKNYGQFYKFASDHQRLESLLSRLPDELFLRAEIENELSYYDTNRSEVFRLV |
| | YIIESEAYKLKPELANDANTDKEWFYYADKKGKKHPKRNNFLSLLEILAAGKDGILNEDEKRSLQSTRNAF |
| | GHNTYDVDLPTVFEGKKEKMKIPEVANGIKDKIENQTEELKKSLQK |
| IMG_ | LKSNILPENDDDYDADLHHPFLLNVLDEEPSSVEEFYEIYLEEELNHIDYMITFLKKHKAKGTALYIPFLHAN |
| 3300031994_2 | RSRWKNADEDTMKKLATRYMEQPLQLPNGMFTESIFKLLMEIDNPDLHEELVKAENPDADKNLANNVSY |
| SEQ ID NO: | LMSIYFKHVERDHSQPFYNTTAIEGEPSPYRHVYRIFKKLYGQQIPHTNQTTTPAYTVEEINGLRKQALTDIA |
| 4585 | KYVEKDISNWKDRQQFKFEQKLKKKLKKENDRRYKNHEQQLNVYEEVNKVVQQEINTMRTTTTAKLIRQ |
| | LKKVYDNERTIRRFKTQDMLMLIMAREILKAKSQNKDFTKDFCLKYVMTDSLLDKPIDFDWSVNIEKKKK |
| | NEEGKIEKEIIRKTIRQEGMKMKNYGQFYKFASDHQRLESLLSRLPDELFLRAEIENELSYYDTNRSEVFRLV |
| | YIIESEAYKLKPELANDANTDKEWFYYADKKGKKHPKRNNFLSLLEILAAGKDGILNEDEKRSLQSTRNAF |
| | GHNTYDVDLPTVFEGKKEKMKIPEVANGIKDKIENQTEELKKSLQK |
| IMG_ | VEEVFNLLRRKSNPPQSKSQLDCDIHEYVEKHRKDKSKEWAEDPTALMRKQAKQVEQTEHAIRRCQIEDIV |
| 3300032030_2 | MLYAARDMLYAARDILSAKNNRTPNGTDTPQPQKFKLKHVQKDDGLLERTIDFDWVVDIDGQQKTIRQQ |
| SEQ ID NO: | NMKMKDYGKFYKFASDGERLKSLLAHLGGNEFQRADIEAEYANYDVSRSQVFRYVYMLESKAYQLLAK |
| 4586 | RKDNPIDLLNDQKPIPDAFWFVSKEGIRNEFRVFKENLFNEYKADVHDYKANDPDAEALVNAICNFTGTSIE |
| | EWDANQDTLMKQVKSLLTDENPNEKDKALILQVKDYCMKKDIARKAIRNNFGELIEILLRGDEPIFTDDDK |
| | YIIQHIRNAFGHNHYLKKEDEYNTVFRGKEAKLKLPEVAKTIKDWMGEKTTKALSLTPDTQRALPPKSQAA |
| | E |
| GCA_ | LIYLQEKVNKTIDVRNYKTGKTSTIDKSWMMTTFYKREWNQEVGKQLTEVKLPDNLSGIPFTLRQLKEKAS |
| 002400765.1_ | YSLDQWLNNVTKGKVAGDGKRPINLPTNLFDETLINLLQNDLEAQQVEYPTDAKYNELFKIWWRKRGDST |
| ASM240076v1_ | QSFYNAEREYVIFDEKVNFKLQENAMFTDFYSDSLKKAFRAKQNTRRIEQRSNRRLPDIQFSQVEKVFKRSI |
| genomic | SNTEKQIRLLKEEDQIMLLMLEELMSSDLDLKLNQIDTLLNKTITVKKPVTGNLSFGDKSEITRTIIDQRKRK |
| SEQ ID NO: | DHSMLHKYVYDRRLPELFEYFEENEIPLQDLKNELEAYNTAKQMVLDAVFKFEEDIVTNNQVHDLIGSAC |
| 4587 | DTGHIQHKVYLQWLKKEGMINENEYLFLNRVRNCFSHNLFPQKRTMSLFVNQWADSNFALQIAEHYNEKI |
| | NAILAI |
| GCA_ | MLTPLNFEPLRKKYIKKKEENMSHPPGYPYSKEEFKDLKERHEKLQKFLDTDYKGLKVWHLPDDIKEYLIQ |
| 900113045.1_ | VSTPSYRQLALIKIDEIKAQTKQLIKDCKALEKKKPEERTLRAGHIAQILARDMVYLRKHHQHIKDGKVHHS |
| IMGtaxon_ | KLNDEEYNRLQNLLAYFQKDDIQAHLDQYRLLELHPFLKDVKLENSKNLYEYYKKYLEKRKEYFIGVYDS |
| 2636415974_ | IDLFAPIFKKAEQYLKKFHGVNKDEKDKKVKKSLLELKKALFNFDRQVIKIFLKNYITDWKGINLGNCKNA |
| annotated_ | EDFCFHVFSIEKEFKDKTFFNIDELQNKLGYLFDFKYQENQPEKLDKNYAQIPIALPSSLFKDAIIEGIEKAMQ |
| assembly_ | KEGKKLTFGKDEEGNEKRTVVYALREWLENDTQVFYTHNRHYKMPEKSKEIFSKEQIKRIECQVISLENRK |
| genomic | ELYHYKELSLYEWIDKPEKYDKLKEIAQKDALKKFRSYLLSTEKVLRLEQHKDRVLWLLAKDLSENRTQG |
| SEQ ID NO: | TNLDFKNFKLKDLEKFLDTPIKMEVKVNYIVDKEDIAVNNAISGKPCTSEKQLIEVGAVSETLKIKDYGDLR |
| 4588 | RFAKDRRLPNLFRYFYDVKSKGEALSKTELEKAITLLEVRNLIQRNEDGSKIFKDKITVLEKAMELEQLLHE |
| | KYGQPDTDFENTRLGKYWKQEQPKDSHISHNTYIKFLQDKTLGIDLNINPIVGMDGAQHLNNDKELAKSK |
| | RTHPEQTLEACLIILLRNKLIHNEVPYTTFLQSKMQADFTPEQVVRQIIDESMRIYDQLIAEVKKQTA |
| IMG_ | LPKLLALQLLTRTAEQPIINFIQTTNAKIFNFGELEKIKDRTNYIPEVFTKRVVRERELINNKGGITYLSNKLE |
| 3300028769_2 | MNILNKYHLSIVQLAAMDKDSFKKLTGKNKKDIELLSQIKYQYLLKQRREELKKHLPTGLNLDMLPKRVL |
| SEQ ID NO: | DYLMQSNERNEKKKIHQKIKDIKDEAKLLNKSIKKEIEKTQQEQRIKLGEIATFIASDMLNMIIDKELKSRITN |
| 4589 | PYYNKLQNKIAYFSLNKGEIISICDELSLFDTKKGHVFLTRNLIFKSTGIIDFYQNYLEAKIAWIDNKLFVKGK |
| | MGGYTIPNNNVPYSILKIKNEIRTYNFNTWLKNKIISPVELPNSLMDDQLAKVLKSALKKESKTYNDGDKFS |
| | ILLAKYLSNDSQPFYEYTRNYTINTEPVCFDVQGLSSKDIQDKYGNRVAENEKLIRFIQTKDRILKLVCDELL |
| | LKDPSIGSKDRFKLSEIHPTSLHNPLERQAEFKHKIIRKGTEVFFTVVAKDTKEQIQEVIEYEKITSSDEKEKY |
| | PGQKWYQWTIKDFGRFKRFLKDRRLPNLSEYFEDKDITFDFLEYQIKEYDKYRNNVFDLTFELEKSIATSDL |
| | EGIRQIEQRLHIRPKGFFEIEFDVYVEWLDRKGIQYNKDLINECRNRFSHSEFPKYEHLNQIPKITRQQIIDFEY |
| | NKRTREYKNNADISISEKITNQYKTEIEQIIHQIRLQ |
| IMG_ | LPKLLALQLLTRTAEQPIINFIQTTNAKIFNFGELEKIKDRTNYIPEVFTKRVVRERELINNKGGITYLSNKLE |
| 3300028862_4 | MNILNKYHLSIVQLAAMDKDSFKKLTGKNKKDIELLSQIKYQYLLKQRREELKKHLPTGLNLDMLPKRVL |
| SEQ ID NO: | DYLMQSNERNEKKKIHQKIKDIKDEAKLLNKSIKKEIEKTQQEQRIKLGEIATFIASDMLNMIIDKELKSRITN |
| 4590 | PYYNKLQNKIAYFSLNKGEIISICDELSLFDTKKGHVFLTRNLIFKSTGIIDFYQNYLEAKIAWIDNKLFVKGK |
| | MGGYTIPNNNVPYSILKIKNEIRTYNFNTWLKNKIISPVELPNSLMDDQLAKVLKSALKKESKTYNDGDKFS |
| | ILLAKYLSNDSQPFYEYTRNYTINTEPVCFDVQGLSSKDIQDKYGNRVAENEKLIRFIQTKDRILKLVCDELL |
| | LKDPSIGSKDRFKLSEIHPTSLHNPLERQAEFKHKIIRKGTEVFFTVVAKDTKEQIQEVIEYEKITSSDEKEKY |
| | PGQKWYQWTIKDFGRFKRFLKDRRLPNLSEYFEDKDITFDFLEYQIKEYDKYRNNVFDLTFELEKSIATSDL |
| | EGIRQIEQRLHIRPKGFFEIEFDVYVEWLDRKGIQYNKDLINECRNRFSHSEFPKYEHLNQIPKITRQQIIDFEY |
| | NKRTREYKNNADISISEKITNQYKTEIEQIIHQIRLQ |
| IMG_ | LPKLLALQLLTRTAEQPIINFIQTTNAKIFNFGELEKIKDRTNYIPEVFTKRVVRERELINNKGGITYLSNKLE |
| 3300028767_4 | MNILNKYHLSIVQLAAMDKDSFKKLTGKNKKDIELLSQIKYQYLLKQRREELKKHLPTGLNLDMLPKRVL |
| SEQ ID NO: | DYLMQSNERNEKKKIHQKIKDIKDEAKLLNKSIKKEIEKTQQEQRIKLGEIATFIASDMLNMIIDKELKSRITN |
| 4591 | PYYNKLQNKIAYFSLNKGEIISICDELSLFDTKKGHVFLTRNLIFKSTGIIDFYQNYLEAKIAWIDNKLFVKGK |
| | MGGYTIPNNNVPYSILKIKNEIRTYNFNTWLKNKIISPVELPNSLMDDQLAKVLKSALKKESKTYNDGDKFS |
| | ILLAKYLSNDSQPFYEYTRNYTINTEPVCFDVQGLSSKDIQDKYGNRVAENEKLIRFIQTKDRILKLVCDELL |
| | LKDPSIGSKDRFKLSEIHPTSLHNPLERQAEFKHKIIRKGTEVFFTVVAKDTKEQIQEVIEYEKITSSDEKEKY |
| | PGQKWYQWTIKDFGRFKRFLKDRRLPNLSEYFEDKDITFDFLEYQIKEYDKYRNNVFDLTFELEKSIATSDL |
| | EGIRQIEQRLHIRPKGFFEIEFDVYVEWLDRKGIQYNKDLINECRNRFSHSEFPKYEHLNQIPKITRQQIIDFEY |
| | NKRTREYKNNADISISEKITNQYKTEIEQIIHQIRLQ |
| IMG_ | LPKLLALQLLTRTAEQPIINFIQTTNAKIFNFGELEKIKDRTNYIPEVFTKRVVRERELINNKGGITYLSNKLE |
| 3300028774 | MNILNKYHLSIVQLAAMDKDSFKKLTGKNKKDIELLSQIKYQYLLKQRREELKKHLPTGLNLDMLPKRVL |
| SEQ ID NO: | DYLMQSNERNEKKKIHQKIKDIKDEAKLLNKSIKKEIEKTQQEQRIKLGEIATFIASDMLNMIIDKELKSRITN |
| 4592 | PYYNKLQNKIAYFSLNKGEIISICDELSLFDTKKGHVFLTRNLIFKSTGIIDFYQNYLEAKIAWIDNKLFVKGK |
| | MGGYTIPNNNVPYSILKIKNEIRTYNFNTWLKNKIISPVELPNSLMDDQLAKVLKSALKKESKTYNDGDKFS |
| | ILLAKYLSNDSQPFYEYTRNYTINTEPVCFDVQGLSSKDIQDKYGNRVAENEKLIRFIQTKDRILKLVCDELL |
| | LKDPSIGSKDRFKLSEIHPTSLHNPLERQAEFKHKIIRKGTEVFFTVVAKDTKEQIQEVIEYEKITSSDEKEKY |
| | PGQKWYQWTIKDFGRFKRFLKDRRLPNLSEYFEDKDITFDFLEYQIKEYDKYRNNVFDLTFELEKSIATSDL |
| | EGIRQIEQRLHIRPKGFFEIEFDVYVEWLDRKGIQYNKDLINECRNRFSHSEFPKYEHLNQIPKITRQQIIDFEY |
| | NKRTREYKNNADISISEKITNQYKTEIEQIIHQIRLQ |
| IMG_ | LPKLLALQLLTRTAEQPIINFIQTTNAKIFNFGELEKIKDRTNYIPEVFTKRVVRERELINNKGGITYLSNKLE |
| 3300028738_2 | MNILNKYHLSIVQLAAMDKDSFKKLTGKNKKDIELLSQIKYQYLLKQRREELKKHLPTGLNLDMLPKRVL |
| SEQ ID NO: | DYLMQSNERNEKKKIHQKIKDIKDEAKLLNKSIKKEIEKTQQEQRIKLGEIATFIASDMLNMIIDKELKSRITN |
| 4593 | PYYNKLQNKIAYFSLNKGEIISICDELSLFDTKKGHVFLTRNLIFKSTGIIDFYQNYLEAKIAWIDNKLFVKGK |
| | MGGYTIPNNNVPYSILKIKNEIRTYNFNTWLKNKIISPVELPNSLMDDQLAKVLKSALKKESKTYNDGDKFS |
| | ILLAKYLSNDSQPFYEYTRNYTINTEPVCFDVQGLSSKDIQDKYGNRVAENEKLIRFIQTKDRILKLVCDELL |
| | LKDPSIGSKDRFKLSEIHPTSLHNPLERQAEFKHKIIRKGTEVFFTVVAKDTKEQIQEVIEYEKITSSDEKEKY |
| | PGQKWYQWTIKDFGRFKRFLKDRRLPNLSEYFEDKDITFDFLEYQIKEYDKYRNNVFDLTFELEKSIATSDL |
| | EGIRQIEQRLHIRPKGFFEIEFDVYVEWLDRKGIQYNKDLINECRNRFSHSEFPKYEHLNQIPKITRQQIIDFEY |
| | NKRTREYKNNADISISEKITNQYKTEIEQIIHQIRLQ |
| IMG_ | LPKLLALQLLTRTAEQPIINFIQTTNAKIFNFGELEKIKDRTNYIPEVFTKRVVRERELINNKGGITYLSNKLE |
| 3300028739_2 | MNILNKYHLSIVQLAAMDKDSFKKLTGKNKKDIELLSQIKYQYLLKQRREELKKHLPTGLNLDMLPKRVL |
| SEQ ID NO: | DYLMQSNERNEKKKIHQKIKDIKDEAKLLNKSIKKEIEKTQQEQRIKLGEIATFIASDMLNMIIDKELKSRITN |
| 4594 | PYYNKLQNKIAYFSLNKGEIISICDELSLFDTKKGHVFLTRNLIFKSTGIIDFYQNYLEAKIAWIDNKLFVKGK |
| | MGGYTIPNNNVPYSILKIKNEIRTYNFNTWLKNKIISPVELPNSLMDDQLAKVLKSALKKESKTYNDGDKFS |
| | ILLAKYLSNDSQPFYEYTRNYTINTEPVCFDVQGLSSKDIQDKYGNRVAENEKLIRFIQTKDRILKLVCDELL |
| | LKDPSIGSKDRFKLSEIHPTSLHNPLERQAEFKHKIIRKGTEVFFTVVAKDTKEQIQEVIEYEKITSSDEKEKY |
| | PGQKWYQWTIKDFGRFKRFLKDRRLPNLSEYFEDKDITFDFLEYQIKEYDKYRNNVFDLTFELEKSIATSDL |
| | EGIRQIEQRLHIRPKGFFEIEFDVYVEWLDRKGIQYNKDLINECRNRFSHSEFPKYEHLNQIPKITRQQIIDFEY |
| | NKRTREYKNNADISISEKITNQYKTEIEQIIHQIRLQ |
| IMG_ | LPKLLALQLLTRTAEQPIINFIQTTNAKIFNFGELEKIKDRTNYIPEVFTKRVVRERELINNKGGITYLSNKLE |
| 3300029998_4 | MNILNKYHLSIVQLAAMDKDSFKKLTGKNKKDIELLSQIKYQYLLKQRREELKKHLPTGLNLDMLPKRVL |
| SEQ ID NO: | DYLMQSNERNEKKKIHQKIKDIKDEAKLLNKSIKKEIEKTQQEQRIKLGEIATFIASDMLNMIIDKELKSRITN |
| 4595 | PYYNKLQNKIAYFSLNKGEIISICDELSLFDTKKGHVFLTRNLIFKSTGIIDFYQNYLEAKIAWIDNKLFVKGK |
| | MGGYTIPNNNVPYSILKIKNEIRTYNFNTWLKNKIISPVELPNSLMDDQLAKVLKSALKKESKTYNDGDKFS |
| | ILLAKYLSNDSQPFYEYTRNYTINTEPVCFDVQGLSSKDIQDKYGNRVAENEKLIRFIQTKDRILKLVCDELL |
| | LKDPSIGSKDRFKLSEIHPTSLHNPLERQAEFKHKIIRKGTEVFFTVVAKDTKEQIQEVIEYEKITSSDEKEKY |
| | PGQKWYQWTIKDFGRFKRFLKDRRLPNLSEYFEDKDITFDFLEYQIKEYDKYRNNVFDLTFELEKSIATSDL |
| | EGIRQIEQRLHIRPKGFFEIEFDVYVEWLDRKGIQYNKDLINECRNRFSHSEFPKYEHLNQIPKITRQQIIDFEY |
| | NKRTREYKNNADISISEKITNQYKTEIEQIIHQIRLQ |
| IMG_ | LPKLLALQLLTRTAEQPIINFIQTTNAKIFNFGELEKIKDRTNYIPEVFTKRVVRERELINNKGGITYLSNKLE |
| 3300030055 | MNILNKYHLSIVQLAAMDKDSFKKLTGKNKKDIELLSQIKYQYLLKQRREELKKHLPTGLNLDMLPKRVL |
| SEQ ID NO: | DYLMQSNERNEKKKIHQKIKDIKDEAKLLNKSIKKEIEKTQQEQRIKLGEIATFIASDMLNMIIDKELKSRITN |
| 4596 | PYYNKLQNKIAYFSLNKGEIISICDELSLFDTKKGHVFLTRNLIFKSTGIIDFYQNYLEAKIAWIDNKLFVKGK |
| | MGGYTIPNNNVPYSILKIKNEIRTYNFNTWLKNKIISPVELPNSLMDDQLAKVLKSALKKESKTYNDGDKFS |
| | ILLAKYLSNDSQPFYEYTRNYTINTEPVCFDVQGLSSKDIQDKYGNRVAENEKLIRFIQTKDRILKLVCDELL |
| | LKDPSIGSKDRFKLSEIHPTSLHNPLERQAEFKHKIIRKGTEVFFTVVAKDTKEQIQEVIEYEKITSSDEKEKY |
| | PGQKWYQWTIKDFGRFKRFLKDRRLPNLSEYFEDKDITFDFLEYQIKEYDKYRNNVFDLTFELEKSIATSDL |
| | EGIRQIEQRLHIRPKGFFEIEFDVYVEWLDRKGIQYNKDLINECRNRFSHSEFPKYEHLNQIPKITRQQIIDFEY |
| | NKRTREYKNNADISISEKITNQYKTEIEQIIHQIRLQ |
| IMG_ | LPKLLALQLLTRTAEQPIINFIQTTNAKIFNFGELEKIKDRTNYIPEVFTKRVVRERELINNKGGITYLSNKLE |
| 3300028864_2 | MNILNKYHLSIVQLAAMDKDSFKKLTGKNKKDIELLSQIKYQYLLKQRREELKKHLPTGLNLDMLPKRVL |
| SEQ ID NO: | DYLMQSNERNEKKKIHQKIKDIKDEAKLLNKSIKKEIEKTQQEQRIKLGEIATFIASDMLNMIIDKELKSRITN |
| 4597 | PYYNKLQNKIAYFSLNKGEIISICDELSLFDTKKGHVFLTRNLIFKSTGIIDFYQNYLEAKIAWIDNKLFVKGK |
| | MGGYTIPNNNVPYSILKIKNEIRTYNFNTWLKNKIISPVELPNSLMDDQLAKVLKSALKKESKTYNDGDKFS |
| | ILLAKYLSNDSQPFYEYTRNYTINTEPVCFDVQGLSSKDIQDKYGNRVAENEKLIRFIQTKDRILKLVCDELL |
| | LKDPSIGSKDRFKLSEIHPTSLHNPLERQAEFKHKIIRKGTEVFFTVVAKDTKEQIQEVIEYEKITSSDEKEKY |
| | PGQKWYQWTIKDFGRFKRFLKDRRLPNLSEYFEDKDITFDFLEYQIKEYDKYRNNVFDLTFELEKSIATSDL |
| | EGIRQIEQRLHIRPKGFFEIEFDVYVEWLDRKGIQYNKDLINECRNRFSHSEFPKYEHLNQIPKITRQQIIDFEY |
| | NKRTREYKNNADISISEKITNQYKTEIEQIIHQIRLQ |
| IMG_ | LPKLLALQLLTRTAEQPIINFIQTTNAKIFNFGELEKIKDRTNYIPEVFTKRVVRERELINNKGGITYLSNKLE |
| 3300030047 | MNILNKYHLSIVQLAAMDKDSFKKLTGKNKKDIELLSQIKYQYLLKQRREELKKHLPTGLNLDMLPKRVL |
| SEQ ID NO: | DYLMQSNERNEKKKIHQKIKDIKDEAKLLNKSIKKEIEKTQQEQRIKLGEIATFIASDMLNMIIDKELKSRITN |
| 4598 | PYYNKLQNKIAYFSLNKGEIISICDELSLFDTKKGHVFLTRNLIFKSTGIIDFYQNYLEAKIAWIDNKLFVKGK |
| | MGGYTIPNNNVPYSILKIKNEIRTYNFNTWLKNKIISPVELPNSLMDDQLAKVLKSALKKESKTYNDGDKFS |
| | ILLAKYLSNDSQPFYEYTRNYTINTEPVCFDVQGLSSKDIQDKYGNRVAENEKLIRFIQTKDRILKLVCDELL |
| | LKDPSIGSKDRFKLSEIHPTSLHNPLERQAEFKHKIIRKGTEVFFTVVAKDTKEQIQEVIEYEKITSSDEKEKY |
| | PGQKWYQWTIKDFGRFKRFLKDRRLPNLSEYFEDKDITFDFLEYQIKEYDKYRNNVFDLTFELEKSIATSDL |
| | EGIRQIEQRLHIRPKGFFEIEFDVYVEWLDRKGIQYNKDLINECRNRFSHSEFPKYEHLNQIPKITRQQIIDFEY |
| | NKRTREYKNNADISISEKITNQYKTEIEQIIHQIRLQ |
| IMG_ | LPKLLALQLLTRTAEQPIINFIQTTNAKIFNFGELEKIKDRTNYIPEVFTKRVVRERELINNKGGITYLSNKLE |
| 3300030491 | MNILNKYHLSIVQLAAMDKDSFKKLTGKNKKDIELLSQIKYQYLLKQRREELKKHLPTGLNLDMLPKRVL |
| SEQ ID NO: | DYLMQSNERNEKKKIHQKIKDIKDEAKLLNKSIKKEIEKTQQEQRIKLGEIATFIASDMLNMIIDKELKSRITN |
| 4599 | PYYNKLQNKIAYFSLNKGEIISICDELSLFDTKKGHVFLTRNLIFKSTGIIDFYQNYLEAKIAWIDNKLFVKGK |
| | MGGYTIPNNNVPYSILKIKNEIRTYNFNTWLKNKIISPVELPNSLMDDQLAKVLKSALKKESKTYNDGDKFS |
| | ILLAKYLSNDSQPFYEYTRNYTINTEPVCFDVQGLSSKDIQDKYGNRVAENEKLIRFIQTKDRILKLVCDELL |
| | LKDPSIGSKDRFKLSEIHPTSLHNPLERQAEFKHKIIRKGTEVFFTVVAKDTKEQIQEVIEYEKITSSDEKEKY |
| | PGQKWYQWTIKDFGRFKRFLKDRRLPNLSEYFEDKDITFDFLEYQIKEYDKYRNNVFDLTFELEKSIATSDL |
| | EGIRQIEQRLHIRPKGFFEIEFDVYVEWLDRKGIQYNKDLINECRNRFSHSEFPKYEHLNQIPKITRQQIIDFEY |
| | NKRTREYKNNADISISEKITNQYKTEIEQIIHQIRLQ |
| IMG_ | LPKLLALQLLTRTAEQPIINFIQTTNAKIFNFGELEKIKDRTNYIPEVFTKRVVRERELINNKGGITYLSNKLE |
| 3300030048 | MNILNKYHLSIVQLAAMDKDSFKKLTGKNKKDIELLSQIKYQYLLKQRREELKKHLPTGLNLDMLPKRVL |
| SEQ ID NO: | DYLMQSNERNEKKKIHQKIKDIKDEAKLLNKSIKKEIEKTQQEQRIKLGEIATFIASDMLNMIIDKELKSRITN |
| 4600 | PYYNKLQNKIAYFSLNKGEIISICDELSLFDTKKGHVFLTRNLIFKSTGIIDFYQNYLEAKIAWIDNKLFVKGK |
| | MGGYTIPNNNVPYSILKIKNEIRTYNFNTWLKNKIISPVELPNSLMDDQLAKVLKSALKKESKTYNDGDKFS |
| | ILLAKYLSNDSQPFYEYTRNYTINTEPVCFDVQGLSSKDIQDKYGNRVAENEKLIRFIQTKDRILKLVCDELL |
| | LKDPSIGSKDRFKLSEIHPTSLHNPLERQAEFKHKIIRKGTEVFFTVVAKDTKEQIQEVIEYEKITSSDEKEKY |
| | PGQKWYQWTIKDFGRFKRFLKDRRLPNLSEYFEDKDITFDFLEYQIKEYDKYRNNVFDLTFELEKSIATSDL |
| | EGIRQIEQRLHIRPKGFFEIEFDVYVEWLDRKGIQYNKDLINECRNRFSHSEFPKYEHLNQIPKITRQQIIDFEY |
| | NKRTREYKNNADISISEKITNQYKTEIEQIIHQIRLQ |
| IMG_ | LPKLLALQLLTRTAEQPIINFIQTTNAKIFNFGELEKIKDRTNYIPEVFTKRVVRERELINNKGGITYLSNKLE |
| 3300030001_3 | MNILNKYHLSIVQLAAMDKDSFKKLTGKNKKDIELLSQIKYQYLLKQRREELKKHLPTGLNLDMLPKRVL |
| SEQ ID NO: | DYLMQSNERNEKKKIHQKIKDIKDEAKLLNKSIKKEIEKTQQEQRIKLGEIATFIASDMLNMIIDKELKSRITN |
| 4601 | PYYNKLQNKIAYFSLNKGEIISICDELSLFDTKKGHVFLTRNLIFKSTGIIDFYQNYLEAKIAWIDNKLFVKGK |
| | MGGYTIPNNNVPYSILKIKNEIRTYNFNTWLKNKIISPVELPNSLMDDQLAKVLKSALKKESKTYNDGDKFS |
| | ILLAKYLSNDSQPFYEYTRNYTINTEPVCFDVQGLSSKDIQDKYGNRVAENEKLIRFIQTKDRILKLVCDELL |
| | LKDPSIGSKDRFKLSEIHPTSLHNPLERQAEFKHKIIRKGTEVFFTVVAKDTKEQIQEVIEYEKITSSDEKEKY |
| | PGQKWYQWTIKDFGRFKRFLKDRRLPNLSEYFEDKDITFDFLEYQIKEYDKYRNNVFDLTFELEKSIATSDL |
| | EGIRQIEQRLHIRPKGFFEIEFDVYVEWLDRKGIQYNKDLINECRNRFSHSEFPKYEHLNQIPKITRQQIIDFEY |
| | NKRTREYKNNADISISEKITNQYKTEIEQIIHQIRLQ |
| IMG_ | LPKLLALQLLTRTAEQPIINFIQTTNAKIFNFGELEKIKDRTNYIPEVFTKRVVRERELINNKGGITYLSNKLE |
| 3300031918 | MNILNKYHLSIVQLAAMDKDSFKKLTGKNKKDIELLSQIKYQYLLKQRREELKKHLPTGLNLDMLPKRVL |
| SEQ ID NO: | DYLMQSNERNEKKKIHQKIKDIKDEAKLLNKSIKKEIEKTQQEQRIKLGEIATFIASDMLNMIIDKELKSRITN |
| 4602 | PYYNKLQNKIAYFSLNKGEIISICDELSLFDTKKGHVFLTRNLIFKSTGIIDFYQNYLEAKIAWIDNKLFVKGK |
| | MGGYTIPNNNVPYSILKIKNEIRTYNFNTWLKNKIISPVELPNSLMDDQLAKVLKSALKKESKTYNDGDKFS |
| | ILLAKYLSNDSQPFYEYTRNYTINTEPVCFDVQGLSSKDIQDKYGNRVAENEKLIRFIQTKDRILKLVCDELL |
| | LKDPSIGSKDRFKLSEIHPTSLHNPLERQAEFKHKIIRKGTEVFFTVVAKDTKEQIQEVIEYEKITSSDEKEKY |
| | PGQKWYQWTIKDFGRFKRFLKDRRLPNLSEYFEDKDITFDFLEYQIKEYDKYRNNVFDLTFELEKSIATSDL |
| | EGIRQIEQRLHIRPKGFFEIEFDVYVEWLDRKGIQYNKDLINECRNRFSHSEFPKYEHLNQIPKITRQQIIDFEY |
| | NKRTREYKNNADISISEKITNQYKTEIEQIIHQIRLQ |
| IMG_ | LPKLLALQLLTRTAEQPIINFIQTTNAKIFNFGELEKIKDRTNYIPEVFTKRVVRERELINNKGGITYLSNKLE |
| 3300030000_2 | MNILNKYHLSIVQLAAMDKDSFKKLTGKNKKDIELLSQIKYQYLLKQRREELKKHLPTGLNLDMLPKRVL |
| SEQ ID NO: | DYLMQSNERNEKKKIHQKIKDIKDEAKLLNKSIKKEIEKTQQEQRIKLGEIATFIASDMLNMIIDKELKSRITN |
| 4603 | PYYNKLQNKIAYFSLNKGEIISICDELSLFDTKKGHVFLTRNLIFKSTGIIDFYQNYLEAKIAWIDNKLFVKGK |
| | MGGYTIPNNNVPYSILKIKNEIRTYNFNTWLKNKIISPVELPNSLMDDQLAKVLKSALKKESKTYNDGDKFS |
| | ILLAKYLSNDSQPFYEYTRNYTINTEPVCFDVQGLSSKDIQDKYGNRVAENEKLIRFIQTKDRILKLVCDELL |
| | LKDPSIGSKDRFKLSEIHPTSLHNPLERQAEFKHKIIRKGTEVFFTVVAKDTKEQIQEVIEYEKITSSDEKEKY |
| | PGQKWYQWTIKDFGRFKRFLKDRRLPNLSEYFEDKDITFDFLEYQIKEYDKYRNNVFDLTFELEKSIATSDL |
| | EGIRQIEQRLHIRPKGFFEIEFDVYVEWLDRKGIQYNKDLINECRNRFSHSEFPKYEHLNQIPKITRQQIIDFEY |
| | NKRTREYKNNADISISEKITNQYKTEIEQIIHQIRLQ |
| IMG_ | LPKLLALQLLTRTAEQPIINFIQTTNAKIFNFGELEKIKDRTNYIPEVFTKRVVRERELINNKGGITYLSNKLE |
| 3300030002_2 | MNILNKYHLSIVQLAAMDKDSFKKLTGKNKKDIELLSQIKYQYLLKQRREELKKHLPTGLNLDMLPKRVL |
| SEQ ID NO: | DYLMQSNERNEKKKIHQKIKDIKDEAKLLNKSIKKEIEKTQQEQRIKLGEIATFIASDMLNMIIDKELKSRITN |
| 4604 | PYYNKLQNKIAYFSLNKGEIISICDELSLFDTKKGHVFLTRNLIFKSTGIIDFYQNYLEAKIAWIDNKLFVKGK |
| | MGGYTIPNNNVPYSILKIKNEIRTYNFNTWLKNKIISPVELPNSLMDDQLAKVLKSALKKESKTYNDGDKFS |
| | ILLAKYLSNDSQPFYEYTRNYTINTEPVCFDVQGLSSKDIQDKYGNRVAENEKLIRFIQTKDRILKLVCDELL |
| | LKDPSIGSKDRFKLSEIHPTSLHNPLERQAEFKHKIIRKGTEVFFTVVAKDTKEQIQEVIEYEKITSSDEKEKY |
| | PGQKWYQWTIKDFGRFKRFLKDRRLPNLSEYFEDKDITFDFLEYQIKEYDKYRNNVFDLTFELEKSIATSDL |
| | EGIRQIEQRLHIRPKGFFEIEFDVYVEWLDRKGIQYNKDLINECRNRFSHSEFPKYEHLNQIPKITRQQIIDFEY |
| | NKRTREYKNNADISISEKITNQYKTEIEQIIHQIRLQ |
| IMG_ | LPKLLALQLLTRTAEQPIINFIQTTNAKIFNFGELEKIKDRTNYIPEVFTKRVVRERELINNKGGITYLSNKLE |
| 3300030673 | MNILNKYHLSIVQLAAMDKDSFKKLTGKNKKDIELLSQIKYQYLLKQRREELKKHLPTGLNLDMLPKRVL |
| SEQ ID NO: | DYLMQSNERNEKKKIHQKIKDIKDEAKLLNKSIKKEIEKTQQEQRIKLGEIATFIASDMLNMIIDKELKSRITN |
| 4605 | PYYNKLQNKIAYFSLNKGEIISICDELSLFDTKKGHVFLTRNLIFKSTGIIDFYQNYLEAKIAWIDNKLFVKGK |
| | MGGYTIPNNNVPYSILKIKNEIRTYNFNTWLKNKIISPVELPNSLMDDQLAKVLKSALKKESKTYNDGDKFS |
| | ILLAKYLSNDSQPFYEYTRNYTINTEPVCFDVQGLSSKDIQDKYGNRVAENEKLIRFIQTKDRILKLVCDELL |
| | LKDPSIGSKDRFKLSEIHPTSLHNPLERQAEFKHKIIRKGTEVFFTVVAKDTKEQIQEVIEYEKITSSDEKEKY |
| | PGQKWYQWTIKDFGRFKRFLKDRRLPNLSEYFEDKDITFDFLEYQIKEYDKYRNNVFDLTFELEKSIATSDL |
| | EGIRQIEQRLHIRPKGFFEIEFDVYVEWLDRKGIQYNKDLINECRNRFSHSEFPKYEHLNQIPKITRQQIIDFEY |
| | NKRTREYKNNADISISEKITNQYKTEIEQIIHQIRLQ |
| IMG_ | LPKLLALQLLTRTAEQPIINFIQTTNAKIFNFGELEKIKDRTNYIPEVFTKRVVRERELINNKGGITYLSNKLE |
| 3300029981 | MNILNKYHLSIVQLAAMDKDSFKKLTGKNKKDIELLSQIKYQYLLKQRREELKKHLPTGLNLDMLPKRVL |
| SEQ ID NO: | DYLMQSNERNEKKKIHQKIKDIKDEAKLLNKSIKKEIEKTQQEQRIKLGEIATFIASDMLNMIIDKELKSRITN |
| 4606 | PYYNKLQNKIAYFSLNKGEIISICDELSLFDTKKGHVFLTRNLIFKSTGIIDFYQNYLEAKIAWIDNKLFVKGK |
| | MGGYTIPNNNVPYSILKIKNEIRTYNFNTWLKNKIISPVELPNSLMDDQLAKVLKSALKKESKTYNDGDKFS |
| | ILLAKYLSNDSQPFYEYTRNYTINTEPVCFDVQGLSSKDIQDKYGNRVAENEKLIRFIQTKDRILKLVCDELL |
| | LKDPSIGSKDRFKLSEIHPTSLHNPLERQAEFKHKIIRKGTEVFFTVVAKDTKEQIQEVIEYEKITSSDEKEKY |
| | PGQKWYQWTIKDFGRFKRFLKDRRLPNLSEYFEDKDITFDFLEYQIKEYDKYRNNVFDLTFELEKSIATSDL |
| | EGIRQIEQRLHIRPKGFFEIEFDVYVEWLDRKGIQYNKDLINECRNRFSHSEFPKYEHLNQIPKITRQQIIDFEY |
| | NKRTREYKNNADISISEKITNQYKTEIEQIIHQIRLQ |
| IMG_ | LPKLLALQLLTRTAEQPIINFIQTTNAKIFNFGELEKIKDRTNYIPEVFTKRVVRERELINNKGGITYLSNKLE |
| 3300030943 | MNILNKYHLSIVQLAAMDKDSFKKLTGKNKKDIELLSQIKYQYLLKQRREELKKHLPTGLNLDMLPKRVL |
| SEQ ID NO: | DYLMQSNERNEKKKIHQKIKDIKDEAKLLNKSIKKEIEKTQQEQRIKLGEIATFIASDMLNMIIDKELKSRITN |
| 4607 | PYYNKLQNKIAYFSLNKGEIISICDELSLFDTKKGHVFLTRNLIFKSTGIIDFYQNYLEAKIAWIDNKLFVKGK |
| | MGGYTIPNNNVPYSILKIKNEIRTYNFNTWLKNKIISPVELPNSLMDDQLAKVLKSALKKESKTYNDGDKFS |
| | ILLAKYLSNDSQPFYEYTRNYTINTEPVCFDVQGLSSKDIQDKYGNRVAENEKLIRFIQTKDRILKLVCDELL |
| | LKDPSIGSKDRFKLSEIHPTSLHNPLERQAEFKHKIIRKGTEVFFTVVAKDTKEQIQEVIEYEKITSSDEKEKY |
| | PGQKWYQWTIKDFGRFKRFLKDRRLPNLSEYFEDKDITFDFLEYQIKEYDKYRNNVFDLTFELEKSIATSDL |
| | EGIRQIEQRLHIRPKGFFEIEFDVYVEWLDRKGIQYNKDLINECRNRFSHSEFPKYEHLNQIPKITRQQIIDFEY |
| | NKRTREYKNNADISISEKITNQYKTEIEQIIHQIRLQ |
| IMG_ | LPKLLALQLLTRTAEQPIINFIQTTNAKIFNFGELEKIKDRTNYIPEVFTKRVVRERELINNKGGITYLSNKLE |
| 3300030685 | MNILNKYHLSIVQLAAMDKDSFKKLTGKNKKDIELLSQIKYQYLLKQRREELKKHLPTGLNLDMLPKRVL |
| SEQ ID NO: | DYLMQSNERNEKKKIHQKIKDIKDEAKLLNKSIKKEIEKTQQEQRIKLGEIATFIASDMLNMIIDKELKSRITN |
| 4608 | PYYNKLQNKIAYFSLNKGEIISICDELSLFDTKKGHVFLTRNLIFKSTGIIDFYQNYLEAKIAWIDNKLFVKGK |
| | MGGYTIPNNNVPYSILKIKNEIRTYNFNTWLKNKIISPVELPNSLMDDQLAKVLKSALKKESKTYNDGDKFS |
| | ILLAKYLSNDSQPFYEYTRNYTINTEPVCFDVQGLSSKDIQDKYGNRVAENEKLIRFIQTKDRILKLVCDELL |
| | LKDPSIGSKDRFKLSEIHPTSLHNPLERQAEFKHKIIRKGTEVFFTVVAKDTKEQIQEVIEYEKITSSDEKEKY |
| | PGQKWYQWTIKDFGRFKRFLKDRRLPNLSEYFEDKDITFDFLEYQIKEYDKYRNNVFDLTFELEKSIATSDL |
| | EGIRQIEQRLHIRPKGFFEIEFDVYVEWLDRKGIQYNKDLINECRNRFSHSEFPKYEHLNQIPKITRQQIIDFEY |
| | NKRTREYKNNADISISEKITNQYKTEIEQIIHQIRLQ |
| IMG_ | LPKLLALQLLTRTAEQPIINFIQTTNAKIFNFGELEKIKDRTNYIPEVFTKRVVRERELINNKGGITYLSNKLE |
| 3300028853_2 | MNILNKYHLSIVQLAAMDKDSFKKLTGKNKKDIELLSQIKYQYLLKQRREELKKHLPTGLNLDMLPKRVL |
| SEQ ID NO: | DYLMQSNERNEKKKIHQKIKDIKDEAKLLNKSIKKEIEKTQQEQRIKLGEIATFIASDMLNMIIDKELKSRITN |
| 4609 | PYYNKLQNKIAYFSLNKGEIISICDELSLFDTKKGHVFLTRNLIFKSTGIIDFYQNYLEAKIAWIDNKLFVKGK |
| | MGGYTIPNNNVPYSILKIKNEIRTYNFNTWLKNKIISPVELPNSLMDDQLAKVLKSALKKESKTYNDGDKFS |
| | ILLAKYLSNDSQPFYEYTRNYTINTEPVCFDVQGLSSKDIQDKYGNRVAENEKLIRFIQTKDRILKLVCDELL |
| | LKDPSIGSKDRFKLSEIHPTSLHNPLERQAEFKHKIIRKGTEVFFTVVAKDTKEQIQEVIEYEKITSSDEKEKY |
| | PGQKWYQWTIKDFGRFKRFLKDRRLPNLSEYFEDKDITFDFLEYQIKEYDKYRNNVFDLTFELEKSIATSDL |
| | EGIRQIEQRLHIRPKGFFEIEFDVYVEWLDRKGIQYNKDLINECRNRFSHSEFPKYEHLNQIPKITRQQIIDFEY |
| | NKRTREYKNNADISISEKITNQYKTEIEQIIHQIRLQ |
| IMG_ | LPKLLALQLLTRTAEQPIINFIQTTNAKIFNFGELEKIKDRTNYIPEVFTKRVVRERELINNKGGITYLSNKLE |
| 3300029995 | MNILNKYHLSIVQLAAMDKDSFKKLTGKNKKDIELLSQIKYQYLLKQRREELKKHLPTGLNLDMLPKRVL |
| SEQ ID NO: | DYLMQSNERNEKKKIHQKIKDIKDEAKLLNKSIKKEIEKTQQEQRIKLGEIATFIASDMLNMIIDKELKSRITN |
| 4610 | PYYNKLQNKIAYFSLNKGEIISICDELSLFDTKKGHVFLTRNLIFKSTGIIDFYQNYLEAKIAWIDNKLFVKGK |
| | MGGYTIPNNNVPYSILKIKNEIRTYNFNTWLKNKIISPVELPNSLMDDQLAKVLKSALKKESKTYNDGDKFS |
| | ILLAKYLSNDSQPFYEYTRNYTINTEPVCFDVQGLSSKDIQDKYGNRVAENEKLIRFIQTKDRILKLVCDELL |
| | LKDPSIGSKDRFKLSEIHPTSLHNPLERQAEFKHKIIRKGTEVFFTVVAKDTKEQIQEVIEYEKITSSDEKEKY |
| | PGQKWYQWTIKDFGRFKRFLKDRRLPNLSEYFEDKDITFDFLEYQIKEYDKYRNNVFDLTFELEKSIATSDL |
| | EGIRQIEQRLHIRPKGFFEIEFDVYVEWLDRKGIQYNKDLINECRNRFSHSEFPKYEHLNQIPKITRQQIIDFEY |
| | NKRTREYKNNADISISEKITNQYKTEIEQIIHQIRLQ |
| IMG_ | LPKLLALQLLTRTAEQPIINFIQTTNAKIFNFGELEKIKDRTNYIPEVFTKRVVRERELINNKGGITYLSNKLE |
| 3300028650_2 | MNILNKYHLSIVQLAAMDKDSFKKLTGKNKKDIELLSQIKYQYLLKQRREELKKHLPTGLNLDMLPKRVL |
| SEQ ID NO: | DYLMQSNERNEKKKIHQKIKDIKDEAKLLNKSIKKEIEKTQQEQRIKLGEIATFIASDMLNMIIDKELKSRITN |
| 4611 | PYYNKLQNKIAYFSLNKGEIISICDELSLFDTKKGHVFLTRNLIFKSTGIIDFYQNYLEAKIAWIDNKLFVKGK |
| | MGGYTIPNNNVPYSILKIKNEIRTYNFNTWLKNKIISPVELPNSLMDDQLAKVLKSALKKESKTYNDGDKFS |
| | ILLAKYLSNDSQPFYEYTRNYTINTEPVCFDVQGLSSKDIQDKYGNRVAENEKLIRFIQTKDRILKLVCDELL |
| | LKDPSIGSKDRFKLSEIHPTSLHNPLERQAEFKHKIIRKGTEVFFTVVAKDTKEQIQEVIEYEKITSSDEKEKY |
| | PGQKWYQWTIKDFGRFKRFLKDRRLPNLSEYFEDKDITFDFLEYQIKEYDKYRNNVFDLTFELEKSIATSDL |
| | EGIRQIEQRLHIRPKGFFEIEFDVYVEWLDRKGIQYNKDLINECRNRFSHSEFPKYEHLNQIPKITRQQIIDFEY |
| | NKRTREYKNNADISISEKITNQYKTEIEQIIHQIRLQ |
| IMG_ | LPKLLALQLLTRTAEQPIINFIQTTNAKIFNFGELEKIKDRTNYIPEVFTKRVVRERELINNKGGITYLSNKLE |
| 3300030294_2 | MNILNKYHLSIVQLAAMDKDSFKKLTGKNKKDIELLSQIKYQYLLKQRREELKKHLPTGLNLDMLPKRVL |
| SEQ ID NO: | DYLMQSNERNEKKKIHQKIKDIKDEAKLLNKSIKKEIEKTQQEQRIKLGEIATFIASDMLNMIIDKELKSRITN |
| 4612 | PYYNKLQNKIAYFSLNKGEIISICDELSLFDTKKGHVFLTRNLIFKSTGIIDFYQNYLEAKIAWIDNKLFVKGK |
| | MGGYTIPNNNVPYSILKIKNEIRTYNFNTWLKNKIISPVELPNSLMDDQLAKVLKSALKKESKTYNDGDKFS |
| | ILLAKYLSNDSQPFYEYTRNYTINTEPVCFDVQGLSSKDIQDKYGNRVAENEKLIRFIQTKDRILKLVCDELL |
| | LKDPSIGSKDRFKLSEIHPTSLHNPLERQAEFKHKIIRKGTEVFFTVVAKDTKEQIQEVIEYEKITSSDEKEKY |
| | PGQKWYQWTIKDFGRFKRFLKDRRLPNLSEYFEDKDITFDFLEYQIKEYDKYRNNVFDLTFELEKSIATSDL |
| | EGIRQIEQRLHIRPKGFFEIEFDVYVEWLDRKGIQYNKDLINECRNRFSHSEFPKYEHLNQIPKITRQQIIDFEY |
| | NKRTREYKNNADISISEKITNQYKTEIEQIIHQIRLQ |
| IMG_ | LPKLLALQLLTRTAEQPIINFIQTTNAKIFNFGELEKIKDRTNYIPEVFTKRVVRERELINNKGGITYLSNKLE |
| 3300029923_2 | MNILNKYHLSIVQLAAMDKDSFKKLTGKNKKDIELLSQIKYQYLLKQRREELKKHLPTGLNLDMLPKRVL |
| SEQ ID NO: | DYLMQSNERNEKKKIHQKIKDIKDEAKLLNKSIKKEIEKTQQEQRIKLGEIATFIASDMLNMIIDKELKSRITN |
| 4613 | PYYNKLQNKIAYFSLNKGEIISICDELSLFDTKKGHVFLTRNLIFKSTGIIDFYQNYLEAKIAWIDNKLFVKGK |
| | MGGYTIPNNNVPYSILKIKNEIRTYNFNTWLKNKIISPVELPNSLMDDQLAKVLKSALKKESKTYNDGDKFS |
| | ILLAKYLSNDSQPFYEYTRNYTINTEPVCFDVQGLSSKDIQDKYGNRVAENEKLIRFIQTKDRILKLVCDELL |
| | LKDPSIGSKDRFKLSEIHPTSLHNPLERQAEFKHKIIRKGTEVFFTVVAKDTKEQIQEVIEYEKITSSDEKEKY |
| | PGQKWYQWTIKDFGRFKRFLKDRRLPNLSEYFEDKDITFDFLEYQIKEYDKYRNNVFDLTFELEKSIATSDL |
| | EGIRQIEQRLHIRPKGFFEIEFDVYVEWLDRKGIQYNKDLINECRNRFSHSEFPKYEHLNQIPKITRQQIIDFEY |
| | NKRTREYKNNADISISEKITNQYKTEIEQIIHQIRLQ |
| IMG_ | LPKLLALQLLTRTAEQPIINFIQTTNAKIFNFGELEKIKDRTNYIPEVFTKRVVRERELINNKGGITYLSNKLE |
| 3300029989_2 | MNILNKYHLSIVQLAAMDKDSFKKLTGKNKKDIELLSQIKYQYLLKQRREELKKHLPTGLNLDMLPKRVL |
| SEQ ID NO: | DYLMQSNERNEKKKIHQKIKDIKDEAKLLNKSIKKEIEKTQQEQRIKLGEIATFIASDMLNMIIDKELKSRITN |
| 4614 | PYYNKLQNKIAYFSLNKGEIISICDELSLFDTKKGHVFLTRNLIFKSTGIIDFYQNYLEAKIAWIDNKLFVKGK |
| | MGGYTIPNNNVPYSILKIKNEIRTYNFNTWLKNKIISPVELPNSLMDDQLAKVLKSALKKESKTYNDGDKFS |
| | ILLAKYLSNDSQPFYEYTRNYTINTEPVCFDVQGLSSKDIQDKYGNRVAENEKLIRFIQTKDRILKLVCDELL |
| | LKDPSIGSKDRFKLSEIHPTSLHNPLERQAEFKHKIIRKGTEVFFTVVAKDTKEQIQEVIEYEKITSSDEKEKY |
| | PGQKWYQWTIKDFGRFKRFLKDRRLPNLSEYFEDKDITFDFLEYQIKEYDKYRNNVFDLTFELEKSIATSDL |
| | EGIRQIEQRLHIRPKGFFEIEFDVYVEWLDRKGIQYNKDLINECRNRFSHSEFPKYEHLNQIPKITRQQIIDFEY |
| | NKRTREYKNNADISISEKITNQYKTEIEQIIHQIRLQ |
| IMG_ | LPKLLALQLLTRTAEQPIINFIQTTNAKIFNFGELEKIKDRTNYIPEVFTKRVVRERELINNKGGITYLSNKLE |
| 3300030339 | MNILNKYHLSIVQLAAMDKDSFKKLTGKNKKDIELLSQIKYQYLLKQRREELKKHLPTGLNLDMLPKRVL |
| SEQ ID NO: | DYLMQSNERNEKKKIHQKIKDIKDEAKLLNKSIKKEIEKTQQEQRIKLGEIATFIASDMLNMIIDKELKSRITN |
| 4615 | PYYNKLQNKIAYFSLNKGEIISICDELSLFDTKKGHVFLTRNLIFKSTGIIDFYQNYLEAKIAWIDNKLFVKGK |
| | MGGYTIPNNNVPYSILKIKNEIRTYNFNTWLKNKIISPVELPNSLMDDQLAKVLKSALKKESKTYNDGDKFS |
| | ILLAKYLSNDSQPFYEYTRNYTINTEPVCFDVQGLSSKDIQDKYGNRVAENEKLIRFIQTKDRILKLVCDELL |
| | LKDPSIGSKDRFKLSEIHPTSLHNPLERQAEFKHKIIRKGTEVFFTVVAKDTKEQIQEVIEYEKITSSDEKEKY |
| | PGQKWYQWTIKDFGRFKRFLKDRRLPNLSEYFEDKDITFDFLEYQIKEYDKYRNNVFDLTFELEKSIATSDL |
| | EGIRQIEQRLHIRPKGFFEIEFDVYVEWLDRKGIQYNKDLINECRNRFSHSEFPKYEHLNQIPKITRQQIIDFEY |
| | NKRTREYKNNADISISEKITNQYKTEIEQIIHQIRLQ |
| IMG_ | LPKLLALQLLTRTAEQPIINFIQTTNAKIFNFGELEKIKDRTNYIPEVFTKRVVRERELINNKGGITYLSNKLE |
| 3300028676 | MNILNKYHLSIVQLAAMDKDSFKKLTGKNKKDIELLSQIKYQYLLKQRREELKKHLPTGLNLDMLPKRVL |
| SEQ ID NO: | DYLMQSNERNEKKKIHQKIKDIKDEAKLLNKSIKKEIEKTQQEQRIKLGEIATFIASDMLNMIIDKELKSRITN |
| 4616 | PYYNKLQNKIAYFSLNKGEIISICDELSLFDTKKGHVFLTRNLIFKSTGIIDFYQNYLEAKIAWIDNKLFVKGK |
| | MGGYTIPNNNVPYSILKIKNEIRTYNFNTWLKNKIISPVELPNSLMDDQLAKVLKSALKKESKTYNDGDKFS |
| | ILLAKYLSNDSQPFYEYTRNYTINTEPVCFDVQGLSSKDIQDKYGNRVAENEKLIRFIQTKDRILKLVCDELL |
| | LKDPSIGSKDRFKLSEIHPTSLHNPLERQAEFKHKIIRKGTEVFFTVVAKDTKEQIQEVIEYEKITSSDEKEKY |
| | PGQKWYQWTIKDFGRFKRFLKDRRLPNLSEYFEDKDITFDFLEYQIKEYDKYRNNVFDLTFELEKSIATSDL |
| | EGIRQIEQRLHIRPKGFFEIEFDVYVEWLDRKGIQYNKDLINECRNRFSHSEFPKYEHLNQIPKITRQQIIDFEY |
| | NKRTREYKNNADISISEKITNQYKTEIEQIIHQIRLQ |
| IMG_ | LPKLLALQLLTRTAEQPIINFIQTTNAKIFNFGELEKIKDRTNYIPEVFTKRVVRERELINNKGGITYLSNKLE |
| 3300029983_2 | MNILNKYHLSIVQLAAMDKDSFKKLTGKNKKDIELLSQIKYQYLLKQRREELKKHLPTGLNLDMLPKRVL |
| SEQ ID NO: | DYLMQSNERNEKKKIHQKIKDIKDEAKLLNKSIKKEIEKTQQEQRIKLGEIATFIASDMLNMIIDKELKSRITN |
| 4617 | PYYNKLQNKIAYFSLNKGEIISICDELSLFDTKKGHVFLTRNLIFKSTGIIDFYQNYLEAKIAWIDNKLFVKGK |
| | MGGYTIPNNNVPYSILKIKNEIRTYNFNTWLKNKIISPVELPNSLMDDQLAKVLKSALKKESKTYNDGDKFS |
| | ILLAKYLSNDSQPFYEYTRNYTINTEPVCFDVQGLSSKDIQDKYGNRVAENEKLIRFIQTKDRILKLVCDELL |
| | LKDPSIGSKDRFKLSEIHPTSLHNPLERQAEFKHKIIRKGTEVFFTVVAKDTKEQIQEVIEYEKITSSDEKEKY |
| | PGQKWYQWTIKDFGRFKRFLKDRRLPNLSEYFEDKDITFDFLEYQIKEYDKYRNNVFDLTFELEKSIATSDL |
| | EGIRQIEQRLHIRPKGFFEIEFDVYVEWLDRKGIQYNKDLINECRNRFSHSEFPKYEHLNQIPKITRQQIIDFEY |
| | NKRTREYKNNADISISEKITNQYKTEIEQIIHQIRLQ |
| IMG_ | LPKLLALQLLTRTAEQPIINFIQTTNAKIFNFGELEKIKDRTNYIPEVFTKRVVRERELINNKGGITYLSNKLE |
| 3300030019 | MNILNKYHLSIVQLAAMDKDSFKKLTGKNKKDIELLSQIKYQYLLKQRREELKKHLPTGLNLDMLPKRVL |
| SEQ ID NO: | DYLMQSNERNEKKKIHQKIKDIKDEAKLLNKSIKKEIEKTQQEQRIKLGEIATFIASDMLNMIIDKELKSRITN |
| 4618 | PYYNKLQNKIAYFSLNKGEIISICDELSLFDTKKGHVFLTRNLIFKSTGIIDFYQNYLEAKIAWIDNKLFVKGK |
| | MGGYTIPNNNVPYSILKIKNEIRTYNFNTWLKNKIISPVELPNSLMDDQLAKVLKSALKKESKTYNDGDKFS |
| | ILLAKYLSNDSQPFYEYTRNYTINTEPVCFDVQGLSSKDIQDKYGNRVAENEKLIRFIQTKDRILKLVCDELL |
| | LKDPSIGSKDRFKLSEIHPTSLHNPLERQAEFKHKIIRKGTEVFFTVVAKDTKEQIQEVIEYEKITSSDEKEKY |
| | PGQKWYQWTIKDFGRFKRFLKDRRLPNLSEYFEDKDITFDFLEYQIKEYDKYRNNVFDLTFELEKSIATSDL |
| | EGIRQIEQRLHIRPKGFFEIEFDVYVEWLDRKGIQYNKDLINECRNRFSHSEFPKYEHLNQIPKITRQQIIDFEY |
| | NKRTREYKNNADISISEKITNQYKTEIEQIIHQIRLQ |
| IMG_ | LPKLLALQLLTRTAEQPIINFIQTTNAKIFNFGELEKIKDRTNYIPEVFTKRVVRERELINNKGGITYLSNKLE |
| 3300029990 | MNILNKYHLSIVQLAAMDKDSFKKLTGKNKKDIELLSQIKYQYLLKQRREELKKHLPTGLNLDMLPKRVL |
| SEQ ID NO: | DYLMQSNERNEKKKIHQKIKDIKDEAKLLNKSIKKEIEKTQQEQRIKLGEIATFIASDMLNMIIDKELKSRITN |
| 4619 | PYYNKLQNKIAYFSLNKGEIISICDELSLFDTKKGHVFLTRNLIFKSTGIIDFYQNYLEAKIAWIDNKLFVKGK |
| | MGGYTIPNNNVPYSILKIKNEIRTYNFNTWLKNKIISPVELPNSLMDDQLAKVLKSALKKESKTYNDGDKFS |
| | ILLAKYLSNDSQPFYEYTRNYTINTEPVCFDVQGLSSKDIQDKYGNRVAENEKLIRFIQTKDRILKLVCDELL |
| | LKDPSIGSKDRFKLSEIHPTSLHNPLERQAEFKHKIIRKGTEVFFTVVAKDTKEQIQEVIEYEKITSSDEKEKY |
| | PGQKWYQWTIKDFGRFKRFLKDRRLPNLSEYFEDKDITFDFLEYQIKEYDKYRNNVFDLTFELEKSIATSDL |
| | EGIRQIEQRLHIRPKGFFEIEFDVYVEWLDRKGIQYNKDLINECRNRFSHSEFPKYEHLNQIPKITRQQIIDFEY |
| | NKRTREYKNNADISISEKITNQYKTEIEQIIHQIRLQ |
| IMG_ | LPKLLALQLLTRTAEQPIINFIQTTNAKIFNFGELEKIKDRTNYIPEVFTKRVVRERELINNKGGITYLSNKLE |
| 3300028772_2 | MNILNKYHLSIVQLAAMDKDSFKKLTGKNKKDIELLSQIKYQYLLKQRREELKKHLPTGLNLDMLPKRVL |
| SEQ ID NO: | DYLMQSNERNEKKKIHQKIKDIKDEAKLLNKSIKKEIEKTQQEQRIKLGEIATFIASDMLNMIIDKELKSRITN |
| 4620 | PYYNKLQNKIAYFSLNKGEIISICDELSLFDTKKGHVFLTRNLIFKSTGIIDFYQNYLEAKIAWIDNKLFVKGK |
| | MGGYTIPNNNVPYSILKIKNEIRTYNFNTWLKNKIISPVELPNSLMDDQLAKVLKSALKKESKTYNDGDKFS |
| | ILLAKYLSNDSQPFYEYTRNYTINTEPVCFDVQGLSSKDIQDKYGNRVAENEKLIRFIQTKDRILKLVCDELL |
| | LKDPSIGSKDRFKLSEIHPTSLHNPLERQAEFKHKIIRKGTEVFFTVVAKDTKEQIQEVIEYEKITSSDEKEKY |
| | PGQKWYQWTIKDFGRFKRFLKDRRLPNLSEYFEDKDITFDFLEYQIKEYDKYRNNVFDLTFELEKSIATSDL |
| | EGIRQIEQRLHIRPKGFFEIEFDVYVEWLDRKGIQYNKDLINECRNRFSHSEFPKYEHLNQIPKITRQQIIDFEY |
| | NKRTREYKNNADISISEKITNQYKTEIEQIIHQIRLQ |
| IMG_ | LPKLLALQLLTRTAEQPIINFIQTTNAKIFNFGELEKIKDRTNYIPEVFTKRVVRERELINNKGGITYLSNKLE |
| 3300030838 | MNILNKYHLSIVQLAAMDKDSFKKLTGKNKKDIELLSQIKYQYLLKQRREELKKHLPTGLNLDMLPKRVL |
| SEQ ID NO: | DYLMQSNERNEKKKIHQKIKDIKDEAKLLNKSIKKEIEKTQQEQRIKLGEIATFIASDMLNMIIDKELKSRITN |
| 4621 | PYYNKLQNKIAYFSLNKGEIISICDELSLFDTKKGHVFLTRNLIFKSTGIIDFYQNYLEAKIAWIDNKLFVKGK |
| | MGGYTIPNNNVPYSILKIKNEIRTYNFNTWLKNKIISPVELPNSLMDDQLAKVLKSALKKESKTYNDGDKFS |
| | ILLAKYLSNDSQPFYEYTRNYTINTEPVCFDVQGLSSKDIQDKYGNRVAENEKLIRFIQTKDRILKLVCDELL |
| | LKDPSIGSKDRFKLSEIHPTSLHNPLERQAEFKHKIIRKGTEVFFTVVAKDTKEQIQEVIEYEKITSSDEKEKY |
| | PGQKWYQWTIKDFGRFKRFLKDRRLPNLSEYFEDKDITFDFLEYQIKEYDKYRNNVFDLTFELEKSIATSDL |
| | EGIRQIEQRLHIRPKGFFEIEFDVYVEWLDRKGIQYNKDLINECRNRFSHSEFPKYEHLNQIPKITRQQIIDFEY |
| | NKRTREYKNNADISISEKITNQYKTEIEQIIHQIRLQ |
| IMG_ | LPKLLALQLLTRTAEQPIINFIQTTNAKIFNFGELEKIKDRTNYIPEVFTKRVVRERELINNKGGITYLSNKLE |
| 3300031521_3 | MNILNKYHLSIVQLAAMDKDSFKKLTGKNKKDIELLSQIKYQYLLKQRREELKKHLPTGLNLDMLPKRVL |
| SEQ ID NO: | DYLMQSNERNEKKKIHQKIKDIKDEAKLLNKSIKKEIEKTQQEQRIKLGEIATFIASDMLNMIIDKELKSRITN |
| 4622 | PYYNKLQNKIAYFSLNKGEIISICDELSLFDTKKGHVFLTRNLIFKSTGIIDFYQNYLEAKIAWIDNKLFVKGK |
| | MGGYTIPNNNVPYSILKIKNEIRTYNFNTWLKNKIISPVELPNSLMDDQLAKVLKSALKKESKTYNDGDKFS |
| | ILLAKYLSNDSQPFYEYTRNYTINTEPVCFDVQGLSSKDIQDKYGNRVAENEKLIRFIQTKDRILKLVCDELL |
| | LKDPSIGSKDRFKLSEIHPTSLHNPLERQAEFKHKIIRKGTEVFFTVVAKDTKEQIQEVIEYEKITSSDEKEKY |
| | PGQKWYQWTIKDFGRFKRFLKDRRLPNLSEYFEDKDITFDFLEYQIKEYDKYRNNVFDLTFELEKSIATSDL |
| | EGIRQIEQRLHIRPKGFFEIEFDVYVEWLDRKGIQYNKDLINECRNRFSHSEFPKYEHLNQIPKITRQQIIDFEY |
| | NKRTREYKNNADISISEKITNQYKTEIEQIIHQIRLQ |
| IMG_ | LPKLLALQLLTRTAEQPIINFIQTTNAKIFNFGELEKIKDRTNYIPEVFTKRVVRERELINNKGGITYLSNKLE |
| 3300031722_2 | MNILNKYHLSIVQLAAMDKDSFKKLTGKNKKDIELLSQIKYQYLLKQRREELKKHLPTGLNLDMLPKRVL |
| SEQ ID NO: | DYLMQSNERNEKKKIHQKIKDIKDEAKLLNKSIKKEIEKTQQEQRIKLGEIATFIASDMLNMIIDKELKSRITN |
| 4623 | PYYNKLQNKIAYFSLNKGEIISICDELSLFDTKKGHVFLTRNLIFKSTGIIDFYQNYLEAKIAWIDNKLFVKGK |
| | MGGYTIPNNNVPYSILKIKNEIRTYNFNTWLKNKIISPVELPNSLMDDQLAKVLKSALKKESKTYNDGDKFS |
| | ILLAKYLSNDSQPFYEYTRNYTINTEPVCFDVQGLSSKDIQDKYGNRVAENEKLIRFIQTKDRILKLVCDELL |
| | LKDPSIGSKDRFKLSEIHPTSLHNPLERQAEFKHKIIRKGTEVFFTVVAKDTKEQIQEVIEYEKITSSDEKEKY |
| | PGQKWYQWTIKDFGRFKRFLKDRRLPNLSEYFEDKDITFDFLEYQIKEYDKYRNNVFDLTFELEKSIATSDL |
| | EGIRQIEQRLHIRPKGFFEIEFDVYVEWLDRKGIQYNKDLINECRNRFSHSEFPKYEHLNQIPKITRQQIIDFEY |
| | NKRTREYKNNADISISEKITNQYKTEIEQIIHQIRLQ |
| IMG_ | LPKLLALQLLTRTAEQPIINFIQTTNAKIFNFGELEKIKDRTNYIPEVFTKRVVRERELINNKGGITYLSNKLE |
| 3300028763_2 | MNILNKYHLSIVQLAAMDKDSFKKLTGKNKKDIELLSQIKYQYLLKQRREELKKHLPTGLNLDMLPKRVL |
| SEQ ID NO: | DYLMQSNERNEKKKIHQKIKDIKDEAKLLNKSIKKEIEKTQQEQRIKLGEIATFIASDMLNMIIDKELKSRITN |
| 4624 | PYYNKLQNKIAYFSLNKGEIISICDELSLFDTKKGHVFLTRNLIFKSTGIIDFYQNYLEAKIAWIDNKLFVKGK |
| | MGGYTIPNNNVPYSILKIKNEIRTYNFNTWLKNKIISPVELPNSLMDDQLAKVLKSALKKESKTYNDGDKFS |
| | ILLAKYLSNDSQPFYEYTRNYTINTEPVCFDVQGLSSKDIQDKYGNRVAENEKLIRFIQTKDRILKLVCDELL |
| | LKDPSIGSKDRFKLSEIHPTSLHNPLERQAEFKHKIIRKGTEVFFTVVAKDTKEQIQEVIEYEKITSSDEKEKY |
| | PGQKWYQWTIKDFGRFKRFLKDRRLPNLSEYFEDKDITFDFLEYQIKEYDKYRNNVFDLTFELEKSIATSDL |
| | EGIRQIEQRLHIRPKGFFEIEFDVYVEWLDRKGIQYNKDLINECRNRFSHSEFPKYEHLNQIPKITRQQIIDFEY |
| | NKRTREYKNNADISISEKITNQYKTEIEQIIHQIRLQ |
| IMG_ | LPKLLALQLLTRTAEQPIINFIQTTNAKIFNFGELEKIKDRTNYIPEVFTKRVVRERELINNKGGITYLSNKLE |
| 3300030230_2 | MNILNKYHLSIVQLAAMDKDSFKKLTGKNKKDIELLSQIKYQYLLKQRREELKKHLPTGLNLDMLPKRVL |
| SEQ ID NO: | DYLMQSNERNEKKKIHQKIKDIKDEAKLLNKSIKKEIEKTQQEQRIKLGEIATFIASDMLNMIIDKELKSRITN |
| 4625 | PYYNKLQNKIAYFSLNKGEIISICDELSLFDTKKGHVFLTRNLIFKSTGIIDFYQNYLEAKIAWIDNKLFVKGK |
| | MGGYTIPNNNVPYSILKIKNEIRTYNFNTWLKNKIISPVELPNSLMDDQLAKVLKSALKKESKTYNDGDKFS |
| | ILLAKYLSNDSQPFYEYTRNYTINTEPVCFDVQGLSSKDIQDKYGNRVAENEKLIRFIQTKDRILKLVCDELL |
| | LKDPSIGSKDRFKLSEIHPTSLHNPLERQAEFKHKIIRKGTEVFFTVVAKDTKEQIQEVIEYEKITSSDEKEKY |
| | PGQKWYQWTIKDFGRFKRFLKDRRLPNLSEYFEDKDITFDFLEYQIKEYDKYRNNVFDLTFELEKSIATSDL |
| | EGIRQIEQRLHIRPKGFFEIEFDVYVEWLDRKGIQYNKDLINECRNRFSHSEFPKYEHLNQIPKITRQQIIDFEY |
| | NKRTREYKNNADISISEKITNQYKTEIEQIIHQIRLQ |
| IMG_ | LPKLLALQLLTRTAEQPIINFIQTTNAKIFNFGELEKIKDRTNYIPEVFTKRVVRERELINNKGGITYLSNKLE |
| 3300028734 | MNILNKYHLSIVQLAAMDKDSFKKLTGKNKKDIELLSQIKYQYLLKQRREELKKHLPTGLNLDMLPKRVL |
| SEQ ID NO: | DYLMQSNERNEKKKIHQKIKDIKDEAKLLNKSIKKEIEKTQQEQRIKLGEIATFIASDMLNMIIDKELKSRITN |
| 4626 | PYYNKLQNKIAYFSLNKGEIISICDELSLFDTKKGHVFLTRNLIFKSTGIIDFYQNYLEAKIAWIDNKLFVKGK |
| | MGGYTIPNNNVPYSILKIKNEIRTYNFNTWLKNKIISPVELPNSLMDDQLAKVLKSALKKESKTYNDGDKFS |
| | ILLAKYLSNDSQPFYEYTRNYTINTEPVCFDVQGLSSKDIQDKYGNRVAENEKLIRFIQTKDRILKLVCDELL |
| | LKDPSIGSKDRFKLSEIHPTSLHNPLERQAEFKHKIIRKGTEVFFTVVAKDTKEQIQEVIEYEKITSSDEKEKY |
| | PGQKWYQWTIKDFGRFKRFLKDRRLPNLSEYFEDKDITFDFLEYQIKEYDKYRNNVFDLTFELEKSIATSDL |
| | EGIRQIEQRLHIRPKGFFEIEFDVYVEWLDRKGIQYNKDLINECRNRFSHSEFPKYEHLNQIPKITRQQIIDFEY |
| | NKRTREYKNNADISISEKITNQYKTEIEQIIHQIRLQ |
| IMG_ | MAFWGREQDKLPNIFGQLNLLQQHPFLNGVELKDVGIYTFFRNYFEQKVSHLNSVLRKIETKTATIEDYYFI |
| 3300000983 | NLKERTDIEERVNNLLYTQEEDVEPMIQLPGDFFYQQLLKHIEQHLPEFYTILTANEGNPARLNYVIEQYFK |
| SEQ ID NO: | HHHKDEPQTLYNKKRSYHTYNQWLDKRTKKTMRNALEKEFLSVDDRTKDYQKIKEALKDKAAEATVKR |
| 4627 | GVVEKTKNIWWKGLKNINQNESRLRNIKAEDVLLYLAAMKIFKAELPELKLATEVKLKNLSAADESSLLEK |
| | QIPFELPYAFIDENETAQTIWITDTMKMKDYGKFRRFLKDRRLPNLMDMMNQFRNKFSHNQYPPKSVCGF |
| | AVDKHKDDKIAAQLAKAAIEIYENTVKKMNTST |
| IMG_ | MNAIELKKEEAAFYFNQARLNISGLDEIIEKQLPHIGSNRENAKKTVDMILDNPEVLKKMENYVFNSRDIAK |
| 3300031651 | NARGELEALLLKLVELRNFYSHYVHKDDVKTLSYGEKPLLDKYYEIAIEATGSKDVRLEIIDDKNKLTDAG |
| SEQ ID NO: | VLFLLCMFLKKSEANKLISSIRGFKRNDKEGQPRRNLFTYYSVREGYKVVPDMQKHFLLFTLVNHLSNQDE |
| 4628 | YISNLRPNQEIGQGGFFHRIASKFLSDSGILHSMKFYTYRSKRLTEQRGELKPKKDHFTWIEPFQGNSYFSVQ |
| | GQKGVIGEEQLKELCYVLLVAREDFRAVEGKVTQFLKKFQNANNVQQVEKDEVLEKEYFPANYFENRDV |
| | GRVKDKILNRLKKITESYKAKGREVKAYDKMKEVMEFINNCLPTDENLKLKDYRRYLKMVRFWGREKEN |
| | IKREFDSKKWERFLPRELWQKRNLEDAYQLAKEKNTELFNKLKTTVERMNELEFEKYQQINDAKDLANLR |
| | QLARDFGVKWEEKDWQEYSGQIKKQITDRQKLTIMKQRITAALKKKQGIENLNLRITTDTNKSRKVVLNRI |
| | ALPKGFVRKHILKTDIKISKQIRQSQCPIILSNNYMKLAKEFFEERNFDKMTQINGLFEKNVLIAFMIVYLME |
| | QLNLRLGKNTELSNLKKTEVNFTITDKVTEKVQISQYPSLVFAINREYVDGISGYKLPPKKPKEPPYTFFEKI |
| | DAIEKERMEFIKQVLGFEEHLFEKNVIDKTRFTDTATHISFNEICDELIKKGWDENKIIKLKDARNAALHGKI |
| | PEDTSFDEAKVLINELKK |
| IMG_ | MNAIELKKEEAAFYFNQARLNISGLDEIIEKQLPHIGSNRENAKKTVDMILDNPEVLKKMENYVFNSRDIAK |
| 3300031365 | NARGELEALLLKLVELRNFYSHYVHKDDVKTLSYGEKPLLDKYYEIAIEATGSKDVRLEIIDDKNKLTDAG |
| SEQ ID NO: | VLFLLCMFLKKSEANKLISSIRGFKRNDKEGQPRRNLFTYYSVREGYKVVPDMQKHFLLFTLVNHLSNQDE |
| 4629 | YISNLRPNQEIGQGGFFHRIASKFLSDSGILHSMKFYTYRSKRLTEQRGELKPKKDHFTWIEPFQGNSYFSVQ |
| | GQKGVIGEEQLKELCYVLLVAREDFRAVEGKVTQFLKKFQNANNVQQVEKDEVLEKEYFPANYFENRDV |
| | GRVKDKILNRLKKITESYKAKGREVKAYDKMKEVMEFINNCLPTDENLKLKDYRRYLKMVRFWGREKEN |
| | IKREFDSKKWERFLPRELWQKRNLEDAYQLAKEKNTELFNKLKTTVERMNELEFEKYQQINDAKDLANLR |
| | QLARDFGVKWEEKDWQEYSGQIKKQITDRQKLTIMKQRITAALKKKQGIENLNLRITTDTNKSRKVVLNRI |
| | ALPKGFVRKHILKTDIKISKQIRQSQCPIILSNNYMKLAKEFFEERNFDKMTQINGLFEKNVLIAFMIVYLME |
| | QLNLRLGKNTELSNLKKTEVNFTITDKVTEKVQISQYPSLVFAINREYVDGISGYKLPPKKPKEPPYTFFEKI |
| | DAIEKERMEFIKQVLGFEEHLFEKNVIDKTRFTDTATHISFNEICDELIKKGWDENKIIKLKDARNAALHGKI |
| | PEDTSFDEAKVLINELKK |
| IMG_ | MNNIELKKEEAAFYFNQAELNLKAIEDNIFDRGRRKTLLDNPRILAKVENFIFNFKDVTKNARGEIDCLLSK |
| 3300032053 | LTELRNFYSHYVHNDNVKILSKGEKPILEKYYQIAIDATASANVRLEIVDNGNKLTDAGVLFLLCMFLKKS |
| SEQ ID NO: | QANKLISGISGFKRNDPIGQPRRNLFTYFSVREGYKVVPDMYKHFLLFALVNHLYNQDDYIENIEKAQQPSD |
| 4630 | IGKGLFFHRMASAFLNISGILRNMKFYTYQSKRLKEQRGELKHEKDIFTWTETFQGNSYFSVNGQKGVIGE |
| | DELKELCYALLIGKQDVNEVEGRITQFLKKFKNADNVQKVEDDEMLDSENFPANYFAEPAADNIKDKILNR |
| | LKKAIESYKDAGADVKAYDKMKEVMTFINNSLPADEKLKRKDYRRYLKMVRFWGEEKGNIEREFETKEW |
| | SKYFSSNFWVAKNLERLYGLAKEKNAELFNKLKATVEKMDEWEFGKYQQINKAEDLAGLRRLAKDFGLK |
| | WEEKDWEEYSRQIKKQITDSQKLTVMKQRITAGLKKKHGIENLNLRITIDSNKSRKAVLNRIAIPRGFV |
| IMG_ | MDRIKNRTQHLRAEDRATFLSKDLVYFQPHTTAKDGPNGDEFRKLQAATAFFERDKEYFIRMFHQCKLNDI |
| 3300020661 | GTCHPFFTEDDIRKCKTNNDLYERYLKKRHDHLVYCKKLNKKATDIPIELKFLKIKNTIADDKALQDLAKE |
| SEQ ID NO: | VKKNAINLPRGLFKDATVKMIELYGNDAMKNAVATSKKNPKSETPDHNTANTVYLVQKYFEQMNDSYQP |
| 4631 | FYDYDRNYRTVDEWYDNRNDGAMTQIAHVPQTKKELTTLAGTIKDSERKFNDKATYNQYLRKKAEENKP |
| | TRHVSNHNNRNSSIKIIEVTPAQKLESIIDDRDFYKVYKDKVIENEKLIRHYRTGDQMLFLMCIEFIDDPTFD |
| | KHIKEILRKERDAGHFLLKEIKPKNKKSILNTPIPYELPLTVKSKEDGKEEEKRIKSVIKIKNYGGFRRFLKDR |
| | RLDSLLTYLPGNVTERDHLEWQLSNYENKRIDIFKTIYEFEKACGENVHYKKKIAELLIKPGRAAHKHLMTK |
| | TIEIIPTISSTLQERLNKIRNAFSHNQFPPFLFVKPILKGDDSFIEQIVKYTTAEYDSYIAIIKK |
| GCA_ | MTYFNIHIRPNHFSAEESSQKLKKRHNALDTLLKIERVFKESLTCDLTTSPLISQQDLLDRAKQICDHYVGKQ |
| 000829755.1_ | NKLPWILRMIFSKKKMVEATYERIVRLSTPPLPVSEEVASHALSFLDGSSLGEYSQVSHWANRQALEAQFSL |
| ASM82975v1_ | VRRYGYEGNDINEAKKYIHNLRQEMHFLSKNEWKLAPDSIFSLKNLIIYEKRQLNFKQSWQNLMQISVNDV |
| genomic | AKLYSKESCPELCRELLRINLSTPDQFTDQTSADFALMIAVRRQDAPAVQFFLSHGANPDFTFNKISMISLSI |
| SEQ ID NO: | NRKAPAITKLLLEAGADIRQMSVSRHSLFEQILRTPDNVELLKCLIDCGFDVNQPIRDGLTALHVAAELGNL |
| 4632 | QMVELLLEHGAILDATNSEGDTPLLLSIASPKIVELLLQSGANANHANAKGRTALHYAMIVTHPILADKLSQ |
| | SAEILKKYGADPDLKDNDGLTPSEYSARALG |
| IMG_ | MFFNMAVNNVHTVVQFLERKYALSLDDAPPPNDEAEDRHREEREEKILGSEKKKIKIPASPIIEVLRKGTDIS |
| 3300027984 | LQANIIRDLIHYFPFLREVKNHREKPYAYEKNKETKKKPAKQLSPGEIAELFLFYAKLLYDQRNYYTHACSK |
| SEQ ID NO: | PTPLDFTGKKLYDLERIIEYNRRTVNERFFKGKVPNSQAEIELLPLTPKINIQQIISQTKNQLNLVQQEICETRD |
| 4633 | QRNLREKCGQRLSTLLSLLDAQRNQNEQNELSALDDQCEQNKLSDNPVYLLGQKFFKDDNTDLSAMGRTF |
| | VIAQFLEAKYISQMIQQLVDAGELSIPECVNSDADNKLLITRAFSITHIVLPRTRLQTDNVLNPMSIGMDSLC |
| | ELHKCPEALFDMISTENQGKFRFFDDKEGIENLFKRFGKDRFAYLALNYLDMSNRTREDASPDEKTTGKFE |
| | RIRFHIDMGNFFFTKYEKENMIDGTKLKHRRLSKRIYCFK |
| GCA_ | MKKELNREDVFTGGKTPELTIYYNIAYFRMAGLINALCGNKLERDKDALEQFMKAFINGKQKLTDMQFVK |
| 003513165.1_ | LCDYLWKGYKYDKNRSEYSLTENDKTMVLKMVAKLQDIRNFQSHIWHDNKVLVFDADLVQFIKNKHLE |
| ASM351316v1_ | AIDAQRQRFSKETEVYEKENRELKKKKNKELLFDIHDGLGYITGEGRNFFLSFFLTRGEMTRFLKQRKGCK |
| genomic | RDDTPEYKIKHLVYRHFTHRDGATRTHYGYEDNMLDQLPDKQEFLTTRHTYRLINYLNDIPEEVTNPELFP |
| SEQ ID NO: | LFNTISNGILIKESVGTYIAFINKMPLLSDFEFSEVWGKDGKPYTNLVEFYHKTQPGFKFRTDLNSFHKIILNL |
| 4634 | IRDENYTGFFTTQLNLFMAHREELILVISKPLITPNDLLLIEEHYRYKLKANDFVREKLGEWKEKIEKGKWE |
| | KANEQKDKLINLLGGVIEITFYDFYWQKDEKPRNENRFMEFAIRFMADFNLLPDCEWEVEPLQIENDLIANR |
| | TATPDLKKSGSQFMNQLTDNYRLKFNDGQIAFRYQNQVFIMGHKAVKNLLIACFDGKEKMLNGFMPALL |
| | ADLKKITNEHILKNHQALNTLSLLNNDSIPSYISRQWGEAEPITDMKKKAIARMDYITQQFEALIENHHYLN |
| | RADKNRQIMRCYKFFEWQYPQNSQFKFLRRNEYHRMSIYHYCLDKEQHKYDKKGHNYLYNRLIKESHNE |
| | SGNIEQHLPYQIRTMLNDAKDFNDYFLRILNATHKILTDWKNQLKQGREPNNYYLSRLGFTGGLTQKVVH |
| | TRLLPFSIHPGIPVSFFYRTEMNQNPSFNLSAKVWNSESPFRVGLKESNYQYAKYLGLFNEIKTQRKIIGKMN |
| | QLIAEDALLWQIAKKYXX |
| IMG_ | MKKELNREDVFTGGKTPELTIYYNIAYFRMAGLINALCGNKLERDKDALEQFMKAFINGKQKLTDMQFVK |
| 3300025154 | LCDYLWKGYKYDKNRSEYSLTENDKTMVLKMVAKLQDIRNFQSHIWHDNKVLVFDADLVDFIKNKHLE |
| SEQ ID NO: | AIDAQRQRFSKETEVYEKENRELKKKKNKELLFDIHDGLGYITGEGRNFFLSFFLTRGEMTRFLKQRKGCK |
| 4635 | RDDTPEYKIKHLVYRHFTHRDGATRTHYGYEDNMLDQLPDKQEFLTTRHTYRLINYLNDIPEEVTNPELFP |
| | LFNTISNGILIKESVGTYIAFINKMPLLSDFEFSEVWGKDGKPYTNLVEFYHKTQPGFKFRTDLNSFHKIILNL |
| | IRDENYTGFFTTQLNLFMAHREELILVISKPLITPNDLLLIEEHYRYKLKANDFVREKLGEWKEKIEKGKWE |
| | KANEQKDKLINLLGGVIEITFYDFYWQKDEKPRNENRFMEFAIRFMADFNLLPDCEWEVEPLQIENDLIANR |
| | TATPDLKKSGSQFMNQLTDNYRLKFNDGQIAFRYQNQVFIMGHKAVKNLLIACFDGKEKMLNGFMPALL |
| | ADLKKITNEHILKNHQALNTLSLLNNDSIPSYISRQWGEAEPITDMKKKAIARMDYITQQFEALIENHHYLN |
| | RADKNRQIMRCYKFFEWQYPQNSQFKFLRRNEYHRMSIYHYCLDKEQHKYDKKGHNYLYNRLIKESHNE |
| | SGNIEQHLPYQIRTMLNDAKDFNDYFLRILNATHKILTDWKNQLKQGREPNNYYLSRLGFTGGLTQKVVH |
| | TRLLPFSIHPGIPVSFFYRTEMNQNPSFNLSAKVWNSESPFRVGLKESNYQYAKYLGLFNEIKTQRKIIGKMN |
| | QLIAEDALLWQIAKKY |
| GCA_ | MKKELNREDVFTGGKTPELTIYYNIAYFRMAGLINALCGNKLERDKDALEQFMKAFINGKQKLTDMQFVK |
| 003518305.1_ | LCDYLWKGYKYDKNRSEYSLTENDKTMVLKMVAKLQDIRNFQSHIWHDNKVLVFDADLVQFIKNKHLE |
| ASM351830v1_ | AIDAQRQRFSKETEVYEKENRELKKKKNKELLFDIHDGLGYITGEGRNFFLSFFLTRGEMTRFLKQRKGCK |
| genomic | RDDTPEYKIKHLVYRHFTHRDGATRTHYGYEDNMLDQLPDKQEFLTTRHTYRLINYLNDIPEEVTNPELFP |
| SEQ ID NO: | LFNTISNGILIKESVGTYIAFINKMPLLSDFEFSEVWGKDGKPYTNLVEFYHKTQPGFKFRTDLNSFHKIILNL |
| 4636 | IRDENYTGFFTTQLNLFMAHREELILVISKPLITPNDLLLIEEHYRYKLKANDFVREKLGEWKEKIEKGKWE |
| | KANEQKDKLINLLGGVIEITFYDFYWQKDEKPRNENRFMEFAIRFMADFNLLPDCEWEVEPLQIENDLIANR |
| | TATPDLKKSGSQFMNQLTDNYRLKFNDGQIAFRYQNQVFIMGHKAVKNLLIACFDG |
| IMG_ | MKKELNREDVFTGGKTPELTIYYNIAYFRMAGLINALCGNKLERDKDALEQFMKAFINGKQKLTDMQFVK |
| 3300009296 | LCDYLWKGYKYDKNRSEYSLTENDKTMVLKMVAKLQDIRNFQSHIWHDNKVLVFDADLVQFIKNKHLE |
| SEQ ID NO: | AIDAQRQRFSKETEVYEKENRELKKKKNKELLFDIHDGLGYITGEGRNFFLSFFLTRGEMTRFLKQRKGCK |
| 4637 | RDDTPEYKIKHLVYRHFTHRDGATRTHYGYEDNMLDQLPDKQEFLTTRHTYRLINYLNDIPEEVTNPELFP |
| | LFNTISNGILIKESVGTYIAFINKMPLLSDFEFSEVWGKDGKPYTNLVEFYHKTQPGFKFRTDLNSFHKIILNL |
| | IRDENYTGFFTTQLNLFMAHREELILVISKPLITPNDLLLIEEHYRYKLKANDFVREKLGEWKEKIEKGKWE |
| | KANEQKDKLINLLGGVIEITFYDFYWQKDEKPRNENRFMEFAIRFMADFNLLPDCEWEVEPLQIENDLIANR |
| | TATPDLKKSGSQFMNQLTDNYRLKFNDGQIAFRYQNQVFIMGHKAVKNLLIACFDG |
| GCA_ | MYTKEQKERVPPTRKELYMGGKTKTADYAVFYNIAFNGILSKIHFKETGQTEFDEAKLSVMYGQKYLDVF |
| 003165435.1_ | ETARPSNIKHDFKDETYLTLRDFLWKGYETDKNSSGHALTDEDKSITRALLVKLRVIRNYHSHIWHNNDGL |
| 20120700_ | KFDNSLQIFIKKKHDDAINSLYATHPAEVDAYKEESKQAHLFKDNYITTEGRVFFLSFFLTSGEMSSFLQQH |
| S1D_genomic | RGSKRTDELKFRIKHIVYRYYTHRDGSTRQKFSQEDDVLSSFSPNDQQDVLMARQSFKLITYLNDVPDSAN |
| SEQ ID NO: | NIDLYPLFTDSGERKPAETAQELKAFCDQRELFTTIQITDVANKKGEIQTGVLNFSIPALGDTAVRLGRGTFH |
| 4638 | KLIIDTLRRHDNGKFVYDGLTWLITERLKLIEELQKLDTLQHLDETSGMAQRKFFEEYMLHKLNGNLYLQQ |
| | LMRNWFYAFEKDLKKEGKLRDKLVQGCIQDPVAPGYYDFYFEEGEKPRNTDRFSEFAVKYLIDFNLAPDW |
| | EWMMESFGVADKHGKAISGKNKAFFSHFKSGTAWRLSVTDGCVIVRLKRLPDFRFQLGHRALKNLLIAHF |
| | YQKANIGTLLNKLTKDTQKIRNVLYNKTSHTLTDLALLERKNLPRFVLLTLGDAQTAAGETVENATVATL |
| | KRISNLIAKLRDWRTNHKTISRNEKNRIIMDCYQLFDWKYPDTGTYKFLRRDEYQNMSIYHYMLERVLNLR |
| | EDITYFQQKIQDAEDYGKKKKYQMAIFDNNKQIERTETILSKLLKDVKNRIPEEVNQILENSESLDDLLKNA |
| IMG_ | MDYPQRKAKPQQHFKGKSSKPNRFSPGTRTGRRPSSEYDFFTGGGTKITNTDKESTKTADFTIFYNIAFENV |
| 3300020782 | EKVKTQLQNKTQSQQNAFWAEYFWKAHFLSKNTNGYELTQQDDRIITQLIKKVEEIRNYHSHIWHDNSVL |
| SEQ ID NO: | VFSDELKRFVEQKYNEALVQLSVDFPGAVSDYQFLKQKNYEKESKLFNPIGFGGDAKNFITIEGRIFFLSFFL |
| 4639 | TTGQMNQFLQQRTGYKRADMPQFKIKRLLYTFYCNRDGAAITDFNHEDRFIDTLAPEVRQNVFKARTAFK |
| | LISYLMDYPDYWGSNDAMPLFDNNNELIKNVEQLKDYIESKNILPELKFTLIDRKIKASLELEEDAETLKKE |
| | QEDKHSTGTIAFTYDELSGFSFHINFEALHRLVLLQTLHHNMVDLPAPLAILAIELKKQANNRTTLYDILIKPI |
| | AERTDDEQVYLLTKENQYLRGGRKVTELGIIFF |
| GCA_ | MHPKKSGSAPTAYEAFTDFGDKTADLAIYYNIAVANLNEIRKAINASTANPDTQLARLAEYLWSAHKDAK |
| 001870995.1_ | NSRGYELTPDDKVIINELCKKVEDIRNFYSHQWHDPCVLECSGQLVSFINDRYKLAAAMVAKDDPAAVAD |
| ASM187099v1_ | YEALLGKREYKPYKLFNGSVLTVEGRIFFLSFFLSSGQLSQLMQQRRGFKRTDMPLFRAKRKIYLYYTLRD |
| genomic | GATMAHFHQEQSVLSTLSAEDQKQVLKARTAYKLISYLNDYPDFWGNTEKMPLYLSKGKKIENIDNLYEY |
| SEQ ID NO: | LQQHPELLPDFEFAPPDEEETGIRKHILFTHEGLPGYEFKMDFPMLYRLVVLMQLFNATVLQESPVDTLLQN |
| 4640 | LRTVIEAGRSYSTF |
| IMG_ | LRPVPHRRPREIPQGRARKRGRLPEDRGGDVRRGRRPHDTYQGVRILAYAASRHTAHRNRPEPRFGDPGAT |
| 2049941000 | GVAACRYRRGPARRHHRDRRRRRGSHRGRCAAQDRERLYAGAGNHPVVRDQAGCAADAHHELQHVRG |
| SEQ ID NO: | LPHPSSLQHLHXXXXVLPEAKKRELEAVNIDEETVIKKRHSDRFVPLLLRFIDANELFPSIRFQVNSGYLRFL |
| 4641 | HHEKAAYMDGVERPRILQDAVNGFGRIQEVERKRSASDTYLGFPLYAPSPDDDVTMPLPCITESASXXXXX |
| | XXXXXXXXXXXXXXXXXXXXXXXXXXXXXXXXXXXXXXXXXXXXXXXXXXXXXXXXXXXXXXXX |
| | XXXXXXXXXXXXXXXXXXXXXXXKHDRPRVRQHRRLLCAIEGLRQAGDRPELGVRTGAGRRGIGRAGT |
| | CGRFRRTIGGRESRPVAPETEGQVPEHVEEGHRRRARTGRRGEEALGREHRPGDXXXXRPSTTSRASTSTCS |
| | TSPLPARLSSGAWNRRSSWPTVAPTPTSTTCRSRGSIPGWSRRTSPSRSSSIPXXXXKVDMGTYPYPETTYA |
| | KVYVVRESNISAYDFVSTGRLVDVGRSKSNPHGFMIERFQVVKNERTETRRRN |
| IMG_ | MAVYLAKSIVNLIKNNELKPTGKNYNVMQANLAVYESFDKVKQMFIRSKMVDSHPFLKNVLQRSPQRAID |
| 3300028886_2 | FYKFYLSEEKAFFSNINNCTYLKFYKNRISKYDDKGAAYYKNLAEHYLKNGFVELTNHIFADEIRAKLSGK |
| SEQ ID NO: | MADIDANDQKYNISFLISRYYKESQPFYFFNCVFNNEIDDPKTKKHIEKAITRYRIQDKILFAMAKTLLKTQD |
| 4642 | DVSKAQISDIAEMTLSNIMPGDNIFDKPMQNFSVKVTLDGKQLTINADNIKVKNYSTIFKTIFDRRLDTLAKL |
| | ITTPQVSLTDITAELELYDREALKINKLVYDTDDAHRAIPLVKVIRNSFAHWSYPHKDSLRNKHGVISDAYV |
| | TNLHNKLVNKNLGEKVGLIKPELEMALM |
| UYCW01.1_2 | LDKVLPEAYSVCCPRNTIEFYERYLEEYQRYLKPLVIKLEKGKVPSLSFVNEGQRRWAKRDDAYYHELGNL |
| SEQ ID NO: | YLSQAIELPRQMFDDEIKDKLREMPEMRDVDFDHANVTFLIGEYLKRVRHDESQEFYSWPRHYKYVDMLK |
| 4643 | CILNSKNGSLQAVYTQMGEREGLWQERSELEEKYAKIRLRDLGRKGLDKDEANERIKTGLGNRKKEYQKA |
| | EKVIRRYKVQDALLFMLAKNTLFNSVEVDDERFKLKDIMPDGEKDILSEVVPMDFCFRSGNSATRKLMGTI |
| | HSDNTKIKNYGDFFALANDKRMVTLLPLVGEQCLVKEEVEEEFDKYDDCRPEMISMVFDFEQWAYSAYPE |
| | LKELVSNEAIKGRLFSNLLQELLGRGELTYEEKYALVGIRNAFLHNSYPKDGGVVKVRTLPDIAKSLKDVF |
| | KEYIRLE |
| IMG_3300014786 | MKKRXXXXXXSRMISGEASYPVRFSLFAPRYAIYDNKIGYCHTSDPVYPKSKTGEKRALSNPQSMGFISVH |
| SEQ ID NO: | DLRKLLLMELLCEGSFSRMQSDFLRKANRILDETAEGKLQFSALFPEMRHRFIPPQNPKSKDRREKAETTLE |
| 4644 | KYKQEIKGRKDKLNSQLLSAFDMDQRQLPSRLLDEWMNIRPASHSVKLRTYVKQLNEDCRLRLRKFRKDG |
| | DGKARAIPLVGEMATFLSQDIVRMIISEETKKLITSAYYNEMQRSLAQYAGEENRRQFRAIVAELRLLDPSS |
| | GHPFLSATMETAHRYTEGFYKCYLEKKREWLAKIFYRPEQDENTKRRISVFFVPDGEARKLLPLLIRRRMK |
| | EQNDLQDWIRNKQAHPIDLPSHLFDSKVMELLKVKDGKKKWNEAFKDWWSTKYPDGMQPFYGLRRELNI |
| | HGKSVSYIPSDGKKFADCYTHLMEKTVRDKKRELRTAGKXXXXXXXXLSLLTWLPTSSGAFTELSMNVNL |
| | CSASCKKTIGLC |
| mgm4547164.3 | LPRLLSSXXXXXXXXXXXXXXXXXXXXXXXXXXXXXXXXXXXXXXXXXXXXXXXXXXXXXXXXXXX |
| SEQ ID NO: | XXXXXXXXXXXXXXXXXXXXXXXXXXXLFYQHLRKEDNLSGGDFPSAEDIIIKQYDNLVRFFKEVKDIQP |
| 4645 | NNDEPELAKILSTFGLSKQSVPKKIYDYLSGKATAISKDFNKSAGIELNRRLNKAKGKLREFLADKDKIESA |
| | DNKYGKDSFASIRYAQLADYLAESIMDWMTLKLTGLNYRVLASSLAAFGTRQTDDDIMQLLADAHIYKD |
| | AVTDHPFIAWTLGDDDNPVTDIETFYESYLKREIKQIEKYISVTTDPKTNKDVITLKKNPEDIPFLHRQRRRW |
| | QENTIAEQAERYLFIAEEGKEKPSRATLLLPDGLFTPYIIKVFELKHPELIMQLESLTDKQXXXXXXXXXXX |
| | XXXXXXXXXXXXXXXXXXXXXXXXXLIMQLESLTDKQKIGITNNAAYLINLYFESKGEMSQPFYDSTEPS |
| | YYNDSIRKVAPYKFSRSYDFFNTLKGWQIHLPVDKIKKQLLQKDTLINNQVNQLSVKGNFDSLEDAKDSLK |
| | RRLLRDLRDMQDNERAIRRHKTQDRILFLMAKDIMGDTVSQNGDLFKLENVCKEEFLNQKVPVKHTVRSG |
| | DKQMVIQKEEMPIKDYGKIYRLLSDNRMVALLSYTLFANGDTINYDHLSEELKQYDLHRSSALKSAQVLE |
| | NKRFEQSREVLTDPERDEFYQGNRRYKNRARTKENEAKRNNFSTLLKDLQKLTPEQMEMFSKEDRQLIIAV |
| | RNAFCHNSYPSWDVVNKLLIQSQSERPDLELELTQIANFLITKLSGYVKQAENN |
| mgm4547164.3_ | VILFTYTKRKLXXXXXXXXXXXXXXXXXXXXXXXXXXXXXXXXXXXXXXXXXXXXXXXXXXXXXXX |
| 2 | XXXXXXXXXXXXXXXFGSCKVLLPDPEVDSNKSKLGLSDFGMLYFCALFLSKEQLVQFCTEAKVFVNSPF |
| SEQ ID NO: | NNDNNKKNNIILNMMYVYQTHIPRGKRLDSERDSQALAMDMLNELRRCPIELYNVLPAIGKREFEDNVIHQ |
| 4646 | NSRTPELSKRIRTKDRFPHLALRYIDSQHLFEKIRFQVRLGSYRFCFYDKVCIDGKTHPRQLHKEINGFGRW |
| | QDMEKERKEQYGPLFQKTREESIWQKDENAYVNLRQLEPIKAGDPPHITDTITQYNIHKNRIGLYWNTSGE |
| | TYLKDKASEQGETICQGYYLXXXXXXXXXXXXXXXXXXXXXXXXXXXXXXXXXXXXXXXXXXXXXX |
| | XXXXXXXXXXXXXXXXXXXXXXXXXXXXXXXXXXXXXXXXCCSTSTFVRKTILVEVISLLLKTLLSNN |
| | MITLSDSLRRLRTSSPTTMSRSWQRYSALLVSANKAYPRKFTIICQGRRQPFQRISISLQE |
| mgm4547164.3_ | VIAPDLTPTEETCDGLSAFGMLYFCSLFLSKEQTAQLCTESRVFVTSPYQPAGNLKNNIILNMMFVYAIHIPR |
| 6 | GKRLDCENDTQALAMDMLNELRRCPRELYNVLPAIGKRDFEDNVIHENNRTPELSKRIRSKDRFPYLALRY |
| SEQ ID NO: | IDQKGLFEKIRFQVRLGSFRFCFYDKICIDGKSHPRQLHKEINGFGRLQDIEKERKEQYGPLFQLSREQSVWQ |
| 4647 | KDENAYVNLKQLEPIKAGDQPHITDTFAQYNIHQNRIGLFWNTDEESKLVNKTNSQGEIICDGYYLPPLNSV |
| | DSPTEHKRKALVEMPAPLCSLSVYELPAMLFYNYLRSIDGLKGEVFPTVEEIIIKQYDNLRNFFKEVTNIQPT |
| | DNIENLTAILNAYGLSKHSVPKKIFDYLSNKNTSINKDIWKSAEIEVKDRLRRAIIRKQCFEKDQERIENTKD |
| | NKFGKDSFACIRYARIAEELTKSMMEWQSENSKMTGLNFRVLTASLAKFGDGVTKKDTIISMLRNAKIMGG |
| | DHPHCFIEQAVELEQDDIEDFYLDYVSAEIQYLTRFLTIDDQAIELEEKQLLDALRKDKEARDDARIHLKND |
| | VDFDELPFIHKSRLRWQQSKIAELANRYLYVKEEGKETPGRATLLLPDGMFYPYIMKVFEQCHSELMNNIN |
| | ALSDEQKKGISNNAAYLINLYFESKGEKSQPFYDSTEPSYYNDNIRQLAPFKYARSYEFFKIIKGWQIHLSCA |
| | EIRNKLTGYKTLINNKVNGLTEKGNYISLEEAKNALRRRLHNTFYDMQDNXXXXXXXXXXXXXXXXXXX |
| | XXXXXXXXXXXXXXXXXXXXXXXXXXXXVPFVVIRRKIALFSSWRKI |
| mgm4547164.3_ | MHSVXIRNNENSEEAISLLLDIVKRCYDERWNVEKDALTGLNDHQKKNKEDEFYAQCSDEGATGEKVHLL |
| 3 | TAFTLRSEQEERLRKLLFRHIPFLAPIMADLVAGEFRKKQKNENKEVNSIMHDSSLTDCLKALGQIALCLNY |
| SEQ ID NO: | SRNFYTHANPYNSESDQEQQFDIQKTIACYLDKAFVASRRIAKKRNGYSEKDLKFLTDKAPANEDSEKYRM |
| 4648 | EEVFVLDENNQKIKKVEKDDNGKIKLDKKGDPIYIYKKKVIXXXXXXXXXXXXXXXXXXXXXXXXXXX |
| | XXXXXXXXXXXXXXXXXXXXXXXXXXXXXXXXXXXXXXXXXXVWQLQSITS |
| IMG_ | MANFHFKDRHVFGTYLNMAHTNFYRTILYVFSASGIDCYTLKGDLYVTERNVSKVTDAFCRIRNNENSEEA |
| 3300031760 | ISLLLDIVKRCYDERWNVEKDALTGLNDHQKKNKEDEFYAQCSDEGATGEKAHLLTAFTLRSEQEERLRK |
| SEQ ID NO: | LLFRHIPFLAPIMADLVAGEFRKKQKNENNEVNSIMHDSSLTDCLKALGQIALCLNYSRNFYTHANPYNSES |
| 4649 | DQEQQFDIQKTVACYLDKAFVASRRIAKKRNGYSEKDLKFLTDKAPANEDSEKYRMEEVFVLDENNQKIK |
| | KVEKDDNGKIKLDKKGDPIYIYKKKVTKDDKGNPILNEKGKKQYEIVRDDKGNPIHEYETKFVERKQWYFR |
| | LFGSCKVLLPDPEVDSNKSKLGLSDFGMLYFCALFLSKEQLVQFCTEAKVFVNSPFNNDNNKKNNIILNMM |
| | YVYQTHIPRGKRLDSERDSQALAMDMLNELRRCPIELYNVLPAIGKREFEDNVIHPNSRTPELSKRIRTKDR |
| | F |
| mgm4547164.3_ | MANYQAPPRHIFGTYLNIARANFYNTILYVFSSSGIDCYTKRGDLFVREDTVDKIIGAFSQIISGENEEMAYH |
| 7 | TIKDIVSKSYDKRWKEDNTLRGNLVNSELNAKRAEFKSPLNDEGPDGEDARIRRSFTLGSEQEERLRKLLFR |
| SEQ ID NO: | HIPLLTPIMADVIAMQFKETTNEHQEANRTLHDATLADCLKELSNIARCLTDSRNFYTHKNPYDSIEAQRTK |
| 4650 | FKLQQIIASNLDKAFIGSRRIAKKRNDYSEKDLTFLTGHDDNCRMEEVFVLDENGEKIWKVEKDKNGKDKL |
| | DKNKNSIYVYKKVKVKDKNGRNKLDEKGKPIYETLLENGEPVHEYETKFVXXXXXXXXXXXXXXXXXX |
| | XXXXXXXXXXG |
| IMG_ | LTAESIIKNKYNALNVFFEFVTSGADLNSIKKKQIDLGLADNELPDKIRCFIGTKKLFNIDGKPLLDKNTREQ |
| 3300026539 | LLKEWRPEAELRRHTINRLKAIIEEDTYRIESLGKKREKIEVGGRNNRYGRKGRADIRPGAIARYITKSLML |
| SEQ ID NO: | WQPAMPVAGGGKLTSANHQALAKYLEEYGSNDESLNNLHSIFQRAGLIGGTHPHPFINKVLKQKPMSILQL |
| 4651 | YTFYLEVEKAYAERMLAEVKTNTDDITLPPFAHPNGLRWSTTLTEAAKRYTTVPNEQNDASTDSHRAVMS |
| | LPDGLFTSHIISLLRQALPHNSELEPMRKILEGNNNMLGAAYIIRFWFDQVEGDAPQAFYNNDGDQYRRFY |
| | KTLSLLNPHRMKNRQLIPDYFSESEIKELLQIMKKKNRDQLRSAVMKAYGLKENKAEDIKQRQNAFLEML |
| | HDVSDSEQALHRYRIQDICLFLSGRSFLVDILTKSMGGNIEKKTLEKAKEMHLRDFGFDNEFEFLDNAKIPY |
| | VFKIGNMTISMPAMSFKNYGTIFRLLGDERLKQLLEGLSAMNIYE |
| UOOO01.1 | MLEAMNNSVSTTISKLFNKGVKQQRIWTFFNKRLYTIDTFDNLKAKILAKPLVFDRGVFDDKPTFIKNKQY |
| SEQ ID NO: | KDCPESFADWYQYTQNYTDYQAFYDYDRDYGELYELEKKNGGLTDKEKFIIRLKRDRKIKQTQIQDLFLK |
| 4652 | LIAEDLGKKVFNLSAEKSVISLSDIFTSRTERINQQVDAISQSQREKGDHSENKIKESYIWSKTFAYKQGQINE |
| | PEVKLKDFGKFRQLVEDARVKTIFSYNPSKEWTKKEIEEELQQYELIRREYVFKEIQDFEAYLWEQENTKG |
| | HPNNFEREGVPNFRKYIVEGVLGNLLRKHEPLIQESDKEWLKEVEINENNIASLSKQKTFVQKAFFLILLRN |
| | KFAHNQLIHVEYWNLLQNRYKPYSEDSFTSVADYLLQVTKNVISDLKKELEKT |
| IMG_ | MTAQRMIKEKINLFGNLSEVTKHKSDFFEKESAAQGWEFFPNPSYNWAGNNIPVYIDMIGKEGKAKEIQVQ |
| 3300028764_2 | INKYRKQLNPAPQRDKRISKKEIIEQLYKEKVVYGDPTLMLSANELMALLYELIVNGKSGAELENKIVEQIIA |
| SEQ ID NO: | RYEQIEAYDPTTQQLPTNQMPHKLQKSRKDSKVTDTDKLLKTIDKEIDEGNKKLELIACHRKEWEEAEQRK |
| 4653 | KSGKRNNPGTKSRKHLFYASEMGEEATWIANDLKRFMPKPARAEWKGTHHSELQRLLAFYSTQRLEAWQ |
| | LVESVWTANTHSFWEENFKEAFYKPEFENFYGAYIEIRTKILTTCRSILENNPEATMNNDTEKEWDKVFTLF |
| | DKRLYRTSTTDEQKKQLLTKPFAFPRGLFDDKPTFLPGSKPNENPERFAAWYSYGYTYSGKFQSFYDMPRN |
| | YSDWYKKLKEDGKLPRLDKKTEQEKILRFRMDCDLNIKHIRFQDIYVKLMVDSLYKAVFGQQPEFDLSHL |
| | YDTRSERYENNTIAQRQKSRQEGDNSDNAINENYVWNKTFAISLYNGRITESQVKLKDVGKFRRFATDPRV |
| | QTLISYDDTRTWTKLEIENELDNKADAYEPIRRTQSLKAIQQLEKNILKKNGFNGKQHPEELKHNGNPNFRK |
| | YIANGLLKHRTDIRQEELALISDTEFQEIGLERIRQTNPLIQKAYLLILLRNKFGHNQLPDQEHFRLMRSIYPY |
| | NQQESYSAYFNHVITQIIEELNT |
| IMG_ | MNRIGIKLNYNGHNRWSVPDKEINVKPDAIISTYEFLNLFLYEHLYQKKLTGLSPAEFIQDYLDRFNNFLSEF |
| 3300025308 | KAGHIRPVGDFSLEKRRGQGDEPDLTARRKSLQKELDRFVLKGKDLPDKIREYLLGYKQKSEKKQAKWIL |
| SEQ ID NO: | GGMIKETVYWRNKAEQSPEKMRSGDMAQQLARDIIFLTPPHTVKEHKQKLNSLEYDVLQYALAYFSSNRE |
| 4654 | KLYSFFKEHQLTVKGDRAHPFLYKIRLDECQGILDFFIVYMQQKEKWLGWLDRNLKSPRLNEEEFFNTYSY |
| | FIKTDTKRAIEMDYESCPNYLPRGIFNEPIAKALQK |

[0330] In some embodiments, the small Cas proteins are small Cas 13b-t. In some embodiments, the Cas 13b-t is Cas13b-t1, Cas13b-t1a, Cas13b-t2, or Cas13b-t3. Examples of small Cas13b-t are shown in Table 3 below.

TABLE 3

| Accession | |
|---|---|
| No. | Sequences |
| IMG_ | MAVDYSLKQPFYQGVHKSCFTVPLNIAADNCKQKGYRNLLKEAQRSKGGLSDQSIQEAADLIEKRLSAIRN |
| 3300034521 | YFSHTYHTDSVLTFQKEDPVKKFLETAWSYAVSETQKDIAESDYTGIVPPLFEDKEGQFQITAAGVIFLMSF |
| SEQ ID NO: | FCHRSVLNRMFGSVKGLKRSDREQMGTGEKRDYQFTRKLLSFYSLRDSYAVKAEATRPFREILSYLSCVPH |
| 4655 | ESLVWLSARGKLTEKEKKAFRHFLDPTVPKEALSEESAGDGSDSERPGVRKNNKFLLFAVQFIEAWSRKEK |
| | KGLEFARYRKSRVEAPGENQDGSEKRIVRFRSEIRDTQEDWPYYLRNNHALLRLHPGENKEPVDARIGEYE |
| | LLYLVLAIFDGKGAKAIQKLANYIFEAKKQIQNARVYDRYQDLLPSFLTAGNKPVSAETIRNRLAYIRGELE |
| | KMLEAVQKEKKSGRWEMHKGKKIGHILRFLSNSIDDIRRRPNVKEYNRLRDLLQQLQWDEFDKALQSYVN |
| | EKLLDETVYRQLRGFHSLDELFERCCRLELKRLEDMEKAGGDRLNRYIGLEPKGKPKNYADLNTLQKKGE |
| | RFLKGHQLSIPRYFLRNALYKEYQATEERKPTSLYQIVRERLPRTNPILPDRYYLLEEDPKTYSGSDSKIIREM |
| | CFTYIEDLLCMRMARWHYEQLSEKLRKKLQWKEVQTGPAGYERFRLIYKISDELSIEFHPSDLTRLDVIEKD |
| | DMLTNISQHFLTKKGTVRWTEFVSQGMKHYRDRQKQGIEALFKWEESLRIPEGLWKEEGYLGFEKVLEEA |
| | VKHGKIQDKDKEALKRIRNDFFHEHFCGTPADWEVFKRVLKRFLNQGKNEKKRFKK |
| IMG_ | MAVDYSLKQPFYQGVHKSCFTVPLNIAADNCKQKGYRNLLKEAQRSKGGLSDQSIQEAADLIEKRLSAIRN |
| 3300033999 | YFSHTYHTDSVLTFQKEDPVKKFLETAWSYAVSETQKDIAESDYTGIVPPLFEDKEGQFQITAAGVIFLMSF |
| SEQ ID NO: | FCHRSVLNRMFGSVKGLKRSDREQMGTGEKRDYQFTRKLLSFYSLRDSYAVKAEATRPFREILSYLSCVPH |
| 4656 | ESLVWLSARGKLTEKEKKAFRHFLDPTVPKEALSEESAGDGSDSERPGVRKNNKFLLFAVQFIEAWSRKEK |
| | KGLEFARYRKSRVEAPGENQDGSEKRIVRFRSEIRDTQEDWPYYLRNNHALLRLHPGENKEPVDARIGEYE |
| | LLYLVLAIFDGKGAKAIQKLANYIFEAKKQIQNARVYDRYQDLLPSFLTAGNKPVSAETIRNRLAYIRGELE |
| | KMLEAVQKEKKSGRWEMHKGKKIGHILRFLSNSIDDIRRRPNVKEYNRLRDLLQQLQWDEFDKALQSYVN |
| | EKLLDETVYROLRGFHSLDELFERCCRLELKRLEDMEKAGGDRLNRYIGLEPKGKPKNYADLNTLQKKGE |
| | RFLKGHQLSIPRYFLRNALYKEYQATEERKPTSLYQIVRERLPRTNPILPDRYYLLEEDPKTYSGSDSKIIREM |
| | CFTYIEDLLCMRMARWHYEQLSEKLRKKLQWKEVQTGPAGYERFRLIYKISDELSIEFHPSDLTRLDVIEKD |
| | DMLTNISQHFLTKKGTVRWTEFVSQGMKHYRDRQKQGIEALFKWEESLRIPEGLWKEEGYLGFEKVLEEA |
| | VKHGKIQDKDKEALKRIRNDFFHEHFCGTPADWEVFKRVLKRFLNQGKNEKKRFKK |
| IMG_ | MAVDYSLKQPFYQGVHKSCFTVPLNIAADNCKQKGYRNLLKEAQRSKGGLSDQSIQEAADLIEKRLSAIRN |
| 3300033986 | YFSHTYHTDSVLTFQKEDPVKKFLETAWSYAVSETQKDIAESDYTGIVPPLFEDKEGQFQITAAGVIFLMSF |
| SEQ ID NO: | FCHRSVLNRMFGSVKGLKRSDREQMGTGEKRDYQFTRKLLSFYSLRDSYAVKAEATRPFREILSYLSCVPH |
| 4657 | ESLVWLSARGKLTEKEKKAFRHFLDPTVPKEALSEESAGDGSDSERPGVRKNNKFLLFAVQFIEAWSRKEK |
| | KGLEFARYRKSRVEAPGENQDGSEKRIVRFRSEIRDTQEDWPYYLRNNHALLRLHPGENKEPVDARIGEYE |
| | LLYLVLAIFDGKGAKAIQKLANYIFEAKKQIQNARVYDRYQDLLPSFLTAGNKPVSAETIRNRLAYIRGELE |
| | KMLEAVQKEKKSGRWEMHKGKKIGHILRFLSNSIDDIRRRPNVKEYNRLRDLLQQLQWDEFDKALQSYVN |
| | EKLLDETVYRQLRGFHSLDELFERCCRLELKRLEDMEKAGGDRLNRYIGLEPKGKPKNYADLNTLQKKGE |
| | RFLKGHQLSIPRYFLRNALYKEYQATEERKPTSLYQIVRERLPRTNPILPDRYYLLEEDPKTYSGSDSKIIREM |
| | CFTYIEDLLCMRMARWHYEQLSEKLRKKLQWKEVQTGPAGYERFRLIYKISDELSIEFHPSDLTRLDVIEKD |
| | DMLTNISQHFLTKKGTVRWTEFVSQGMKHYRDRQKQGIEALFKWEESLRIPEGLWKEEGYLGFEKVLEEA |
| | VKHGKIQDKDKEALKRIRNDFFHEHFCGTPADWEVFKRVLKRFLNQGKNEKKRFKK |
| IMG_ | MAVDYSLKNEWYREINKSCFTVALNVAYDNCKAKGHENLLREAQRSKGGITNEQIKNVQTEIKTRLEDIRS |
| 33000316512 | HFSHFYHDEKSLIFEKDNIVKDFLESAYEKAQSSVIGSTRQSDYKGVVPPLFEPHDGMITAAGVVFLASFFC |
| SEQ ID NO: | HRSNVYRMLGAVKGFKHTGKEELSDGAKRDYGFTRRLMAHYSLRDSYVIKAEETKSFRDLLGYLSRVPQ |
| 4658 | QAVDWLNEHNQLSEDEKKEFLNQKPSDEESQEQSKTENTORQADRMPRRSLRKTDKFILFAAKFIEDWAQ |
| | KEKMDVTFARYQKTVTEDENKNQDGKQVRDVQLKYEKDTKKLNPDFDYKWTYYIRNNHAIIQIKPDEYK |
| | QAVSARISENELKYLVLLIFQGKGWEAIKKIGDYIFHIGNKIKIGRFDHNEERRMPSFLKNPPADIIGEMVEN |
| | RLKYIRDELNKVIETIKKEEPQNNKWLLYKGKKISIILKFISDSISDIKKRPDVNEYNTLRDMLQKLDFDNFY |
| | ERLKSYVSEGRIEQTLYDEIKGIKDISTLCIKICELRLAALEELEKEGGDDLNKYIGLAVQEKHKNYDDSNTP |
| | QKKAERFLESQFSVGKNFLRETFYDEYIKNRKSLYEIIKEKITGITPLNENRWYLMDKNPKEFESKDSKIIRG |
| | LCNIYIQDILCMKIALWYYENLSPSYKNKLKWDFIGQGFGYDRYKLSYKTDCGITIEFKLADLNRLDIIEKPK |
| | MIENICHSFILEKDVKKQTISWHEFRQDGIAKYRKLQKEVVEAVFEFENSLKIPDKNWLTQGYVPFNKNKRF |
| | EDKGFSTFILEEAVRKGKIKSDDKEPLRKVRTDFFHEQFDSTDAERRIFDKYMPAKHDGKNKGGKMQEKQ |
| | EKSYTRRI |
| IMG_ | MAVDYSLKNEWYREINKSCFTVALNVAYDNCKAKGHENLLREAQRSKGGITNEQIKNVQTEIKTRLEDIRS |
| 3300031620 | HFSHFYHDEKSLIFEKDNIVKDFLESAYEKAQSSVIGSTRQSDYKGVVPPLFEPHDGMITAAGVVFLASFFC |
| SEQ ID NO: | HRSNVYRMLGAVKGFKHTGKEELSDGAKRDYGFTRRLMAHYSLRDSYVIKAEETKSFRDLLGYLSRVPQ |
| 4659 | QAVDWLNEHNQLSEDEKKEFLNQKPSDEESQEQSKTENTDRQADRMPRRSLRKTDKFILFAAKFIEDWAQ |
| | KEKMDVTFARYQKTVTEDENKNQDGKQVRDVQLKYEKDTKKLNPDFDYKWTYYIRNNHAIIQIKPDEYK |
| | QAVSARISENELKYLVLLIFQGKGWEAIKKIGDYIFHIGNKIKIGRFDHNEERRMPSFLKNPPADIIGEMVEN |
| | RLKYIRDELNKVTETIKKEEPQNNKWLLYKGKKISIILKFISDSISDIKKRPDVNEYNTLRDMLQKLDFDNFY |
| | ERLKSYVSEGRIEQTLYDEIKGIKDISTLCIKICELRLAALEELEKEGGDDLNKYIGLAVQEKHKNYDDSNTP |
| | QKKAERFLESQFSVGKNFLRETFYDEYIKNRKSLYEIIKEKITGITPLNENRWYLMDKNPKEFESKDSKIIRG |
| | LCNIYIQDILCMKIALWYYENLSPSYKNKLKWDFIGQGFGYDRYKLSYKTDCGITIEFKLADLNRLDIIEKPK |
| | MIENICHSFILEKDVKKQTISWHEFRQDGIAKYRKLQKEVVEAVFEFENSLKIPDKNWLTQGYVPFNKNKRF |
| | EDKGFSTFILEEAVRKGKIKSDDKEPLRKVRTDFFHEQFDSTDAERRIFDKYMPAKHDGKNKGGKMQEKQ |
| | EKSYTRRI |
| IMG_ | MAVDYSLKNEWYREINKSCFTVALNVAYDNCKAKGHENLLREAQRSKGGITNEQIKNVQTEIKTRLEDIRS |
| 3300031654 | HFSHFYHDEKSLIFEKDNIVKDFLESAYEKAQSSVIGSTRQSDYKGVVPPLFEPHDGMITAAGVVFLASFFC |
| SEQ ID NO: | HRSNVYRMLGAVKGFKHTGKEELSDGAKRDYGFTRRLMAHYSLRDSYVIKAEETKSFRDLLGYLSRVPQ |
| 4660 | QAVDWLNEHNQLSEDEKKEFLNQKPSDEESQEQSKTENTDRQADRMPRRSLRKTDKFILFAAKFIEDWAQ |
| | KEKMDVTFARYQKTVTEDENKNQDGKQVRDVQLKYEKDTKKLNPDFDYKWTYYIRNNHAIIQIKPDEYK |
| | QAVSARISENELKYLVLLIFQGKGWEAIKKIGDYIFHIGNKIKIGRFDHNEERRMPSFLKNPPADIIGEMVEN |
| | RLKYIRDELNKVTETIKKEEPQNNKWLLYKGKKISIILKFISDSISDIKKRPDVNEYNTLRDMLQKLDFDNFY |
| | ERLKSYVSEGRIEQTLYDEIKGIKDISTLCIKICELRLAALEELEKEGGDDLNKYIGLAVQEKHKNYDDSNTP |
| | QKKAERFLESQFSVGKNFLRETFYDEYIKNRKSLYEIIKEKITGITPLNENRWYLMDKNPKEFESKDSKIIRG |
| | LCNIYIQDILCMKIALWYYENLSPSYKNKLKWDFIGQGFGYDRYKLSYKTDCGITIEFKLADLNRLDIIEKPK |
| | MIENICHSFILEKDVKKQTISWHEFRQDGIAKYRKLQKEVVEAVFEFENSLKIPDKNWLTQGYVPFNKNKRF |
| | EDKGFSTFILEEAVRKGKIKSDDKEPLRKVRTDFFHEQFDSTDAERRIFDKYMPAKHDGKNKGGKMQEKQ |
| | EKSYTRRI |
| IMG_ | MAVDYSLKNEWYREINKSCFTVALNVAYDNCKAKGHENLLREAQRSKGGITNEQIKNVQTEIKTRLEDIRS |
| 3300031575_2 | HFSHFYHDEKSLIFEKDNIVKDFLESAYEKAQSSVIGSTRQSDYKGVVPPLFEPHDGMITAAGVVFLASFFC |
| SEQ ID NO: | HRSNVYRMLGAVKGFKHTGKEELSDGAKRDYGFTRRLMAHYSLRDSYVIKAEETKSFRDLLGYLSRVPQ |
| 4661 | QAVDWLNEHNQLSEDEKKEFLNQKPSDEESQEQSKTENTDRQADRMPRRSLRKTDKFILFAAKFIEDWAQ |
| | KEKMDVTFARYQKTVTEDENKNQDGKQVRDVQLKYEKDTKKLNPDFDYKWTYYIRNNHAIIQIKPDEYK |
| | QAVSARISENELKYLVLLIFQGKGWEAIKKIGDYIFHIGNKIKIGRFDHNEERRMPSFLKNPPADIIGEMVEN |
| | RLKYIRDELNKVTETIKKEEPQNNKWLLYKGKKISIILKFISDSISDIKKRPDVNEYN |
| IMG_ | MAVNYSLNNKYYKDVEKSCFTVALNIAHDNCMVKGHENLLREAQRSKGGITDEMILNVQNQIESFLKNM |
| 3300031624_3 | RNYFSHYYHSDKCLIFEKDDPVKVFLESVYETTKSSVIGGTRQSDYKGVTPPIFEPHNGNYMITAAGVIFLAS |
| SEQ ID NO: | FFCHRSNVYRMLGAVKGFKHTGKEELSDGQKRDYGFTRKLLAHYSLRDSYSIKAEETKSFREVLGYLSLVP |
| 4662 | QKAVDWLNERNELSKDEKEEFLKQQTCEKKEDPQEQSKSENEDKRTDKIPKRSLCKTNKFILFAIKFIEELA |
| | QKEKLDVSFARYQKKVTEAENKNQDGKQARVVQLKYKRERGKQIKNPDFDRQWTYYIREEHAIIQIKPKD |
| | KQTVSARISENELKYLVLLIFEDKGREAFHELADYIFRISKSIMHNNYKPEDARRIPSFLKKSSQTVTNKMIQ |
| | NRLKYIRYDLEKVKKTIDKEDPQNDKWLIYKGTKISIILKFISGSIADISKRPNVKEYDFLRDVLQKLDFKSFY |
| | ERLKNYVSDGRIERKLYEKIKGIEDISELCKKVCELTLERLKSLEEKGGSELNRYIGLEAQEKHKEYEDWNK |
| | PQKKAGRFLDSQFSIGKNFLRETFYDEYIRDRKSLYEIIKEKLKDILPLNEYRWYLMDRDPREYERKEGKLIR |
| | QICNTFIQDVLCMKMALWYYENLSPSYKDKLKWDSSGQGFGYDRYKLSYRTNCGVTIEFKLADLTRLDIIE |
| | KPTMIENICRSFIVKKKDSNDKIIS |
| IMG_ | MGIDYSLTSDCYRGINKSCFAVALNIAYDNCDHKGCRTLLSEVLRSKGGISDEQIKSQVVDGIQKRLKDIRN |
| 3300025161 | YFSHYYHAEDCLRFGDQDAVKVFLEEIYKNAESKTVGATKESDYKGVVPPLFELHNGTYMITAAGVIFLAS |
| SEQ ID NO: | FFCHRSNVYRMLGAVKGFKHTGKEQLSDGQKRDYGFTRRLLAYYALRDSYSVGAEDKTRCFREILSYLSR |
| 4663 | VPQLAVDWLNEQQLLTPEEKEAFLNQPAEDEGGDISDSSSSDKNKKSKEKRRSLRRDEKFILFAIQFIEGWA |
| | AEQGLDVTFARYQKTVEKAENKNQDGKQARAVQLKYRNQGLNPDFNNEWMYYIQNEHAIIQIKLNNKKA |
| | VAARISENELKYLVLLIFEEKGNDAVQKLNCYIYSMSQKIEGEWKHRPEDERWMPSFTKRADRTVTPEAVQ |
| | SRLSYIRKQLQETIEKIGQEEPRNNKWLIYKGKKISMILKFISDSIRDIQRRPNVKQYHILRDALQRLDFDGFY |
| | KELQNYVNDGRIAVSLYDQIKGVNDISGLCKKVCELTLERLAGLEAKNGSELRRYIGLEAQEKHPKYGEW |
| | NTLQEKAKRFLESQFSIGKNFLRKMFYGDCCQKRCFDEEKGYNTQAKERKSLYSIVKEKLKDIKPIHDDRW |
| | YLIDRNPKNYDNKHSRIIRQMCNTYIQDVLCMKMAMWHYEKLISATEFRNKLEWNCIGQGNMGYERYSL |
| | WYKTGCGVVIQFTPADFLRLDIIEKPAMIENICQCFVLGNKKLNSGAEKKITWDKFNKDGIAKYRKRQAEA |
| | VRAIFAFEEGLKIQEDKWSHERYFPFCNILDEAVKQGKIKDTGKDKEALNRGRNDFFHEEFKSTEDQQAIFQ |
| | KYFPIVERKDDTKKRRDKKQK |
| IMG_ | MGIDYSLTSDCYRGINKSCFAVALNIAYDNCDHKGCRTLLSEVLRSKGGISDEQIKSQVVDGIQKRLKDIRN |
| 3300007072 | YFSHYYHAEDCLRFGDQDAVKVFLEEIYKNAESKTVGATKESDYKGVVPPLFELHNGTYMITAAGVIFLAS |
| SEQ ID NO: | FFCHRSNVYRMLGAVKGFKHTGKEQLSDGQKRDYGFTRRLLAYYALRDSYSVGAEDKTRCFREILSYLSR |
| 4664 | VPQLAVDWLNEQQLLTPEEKEAFLNQPAEDEGGDISDSSSSDKNKKSKEKRRSLRRDEKFILFAIQFIEGWA |
| | AEQGLDVTFARYQKTVEKAENKNQDGKQARAVQLKYRNQGLNPDFNNEWMYYIQNEHAIIQIKLNNKKA |
| | VAARISENELKYLVLLIFEEKGNDAVQKLNCYIYSMSQKIEGEWKHRPEDERWMPSFTKRADRTVTPEAVQ |
| | SRLSYIRKQLQETIEKIGQEEPRNNKWLIYKGKKISMILKFISDSIRDIQRRPNVKQYHILRDALQRLDFDGFY |
| | KELQNYVNDGRIAVSLYDQIKGVNDISGLCKKVCELTLERLAGLEAKNGSELRRYIGLEAQEKHPKYGEW |
| | NTLQEKAKRFLESQFSIGKNFLRKMFYGDCCQKRCFDEEKGYNTQAKERKSLYSIVKEKLKDIKPIHDDRW |
| | YLIDRNPKNYDNKHSRIIRQMCNTYIQDVLCMKMAMWHYEKLISATEFRNKLEWNCIGQGNMGYERYSL |
| | WYKTGCGVVIQFTPADFLRLDIIEKPAMIENICQCFVLGNKKLNSGAEKKITWDKFNKDGIAKYRKRQAEA |
| | VRAIFAFEEGLKIQEDKWSHERYFPFCNILDEAVKQGKIKDTGKDKEALNRGRNDFFHEEFKSTEDQQAIFQ |
| | KYFPIVERKDDTKKRRDKKQK |
| IMG_ | MDNKKKGNNYSIENYKEDRFLFTAALNIAYDNCKQKGCLNILAECQHSKGGISDEQIKNVKDGIESRLRDI |
| 3300028603 | RNYFSHYYHNENCLMFEKDDPIKVFMEATFDKAVSNLSGSTKESDYKGIEPEQLRLFEEYDKKYRITMPGV |
| SEQ ID NO: | VFLASFFCHRSNVNRMMGAIKGLKRADRAEMDDGTKRDYNFTRRLLSYYSLRDSYAVKNEETRPFREILG |
| 4665 | YLSLVPHEAVDWLDSRGELSNEEKKEFLKEAKNQESKEDNDSTDEKTRRGLRKGNKFMRFAIMFTEDWSK |
| | KENLEVTFARYEKQEVHLENKKQDGKKERNIKFPHEISASDDDWPYYIRNNHAIIRIKLKDKDAVSARISEN |
| | ELKYLVLLIFENKGKEAIQKLGDYIFDMSQKIRYDNYEPKDARRIPSFLKITRKEPTYEEVNNRLTHIRRELG |
| | KIIETIEKELKESKWLIYKGKKITIILKFLSSSIADIKKRFNVEQHDALRDMLQKLKFDEFYKRLSSYVGDGTL |
| | DKKTYESIQGIKDISQLCKKACELRLARLDELEKNGGSVLYRYIGLEAEEKNKEYEKLNTNQAKAERFLES |
| | QFSTGKDFLRESFYEQEREQKKSLIKIVKEQFANVVPMNEERWYLMNKNPKKFKDKDNKAIKALCNTYVQ |
| | DILCMKIARWYYEGLSHAYKDKIEWDSTVETGGCGYTRFRLNYKTDCGVVIEFKPSDFTRLDIIEKPKMVE |
| | NICRSFITSNNDKKRTISWYDFNKEGVTKYRKQQVKAIERIFAFEKGLKIQDEKWQVQGYVPFIKRPEYENK |
| | GFKTFILEDAIQQSKIAEADKETLNKVRKDYFHEQFFSSDEDRKVFEKCMPVVDDKKKFGKKNNRMYGKK |
| | G |
| IMG_ | MEKYLIKNFEGINKSKFTVALNIANDNCKNKGIQELLKEAQRSKGGITDTQITEVQEHIKERLNSVRNYFSH |
| 3300029891 | CYHEKKPLYFEANDPVKIFLEETFAKAVENLQGRFLSDKYKLTVPPLFEPNQNNTITAAGVIFLASFFCHRSY |
| SEQ ID NO: | VYRMLGGIPGFKRSDKKKWGDGQKIDYGFTRKLMSFYSLRDSYSVNVQENKELTAFRDILGYLARVPGQA |
| 4666 | IDWLIEKGKLTKEEGKQFYLGEQSEEREEKAKKEEIKYALRKTDKFMLFAVRFIEDWAEQERIKVEFARYE |
| | KMTIVNENKKQDEKEERKVKFVSDEPTAAGWTYYIRNNHAIIKIIPDDKKKKAVSARISENELKYLVLTIID |
| | GNGKNAIAYIGDYIFRTARQIENKSYNAESEKYAPAFVRGGQKKSVDKRIKYIRDEIQQVINDIEAEQEKQK |
| | NEQDAPAENRTWLIYKGKKISIILRYVNDNIAEYKKRLSVTEYNELRGYLQQLDFINFHRKLAEYQHHGRLP |
| | NGFAESINKFQDLSKLCIEVCERQKKKLQEMAAKGGIELEQYIGLAPKEENQEQNKYATKANNFIKVWLSIP |
| | ENFLRQKFYDKFCKQQECKNKGSDKPDNTSVPQRKYFIAIIREKNIRPIHADKYYLLGQNPKDYERPDGKII |
| | RQLCDVYCKDGLCMAMAKWYYENRLGKFKDLIEWQTGDDKQQHGYAGHTLEYQATEKIKIRFKLADFT |
| | RLDIIEPPERVKNICRQWETELLKKTRDGTISWYDFKLNGLEPYRQWQGYAVADIFWFEESLKINETQWQG |
| | RTHMPFNFEKDKPLWCNILDEAVKQNKIEKQDTQALRRVRHDCFHEEFLANYEQLKIFKNLISDKAKDAKP |
| | KDKKSRKNEQKYGKR |
| IMG_ | MPVNYSLDQDYYKGTHKSCFTVPLNIAWDNGSKKGCENLLKEAMRTRGGFTQEDIEKVHRSLAEKLNGIR |
| 3300025629 | DYFSHYYHEDKPLEFKKGDDDAVKDFLEKTFSYAAGETQKRVKESGYQGIIPPIFELCGDQVRITAAGVIFL |
| SEQ ID NO: | ASFFVPRSTLERMFGAVQGFKRSDRGDLDTGQKRDYYFTRSLLSFYTLRDSYYLQADETRPFREILSYLSCV |
| 4667 | PFDSVQWLQAHGKLSKSEEKEFFGRPVEEQDEENPAQTEKQTAPAGRRMRKKNKFILFAVRFIEAWARNE |
| | KLSVEFGRYRNIQNEEDRRKQSGKKVREVFFPSALNNLSAEEQDLEGLLYIRNNHALIRIHLKAKTPVTVRIS |
| | EHELMYLVLAILSGKGGNAVQKLSKYVWDVRMRSRGPLTNMPRNFPAFLRSPASEVSEQAVQNRLNYIRK |
| | TLKEIQANLQKEAQTGQWILDKGQKIRHILRFISDSMPDFRRRPSVKEYNELRELLQTLAFDDFYRKLASFQ |
| | TERKLDAAVWNNLAQCKSINELCERCCQLQQQRLDELEKQGGDELKRYIGLLPKEKGKHYEEQNTPARKF |
| | ERFIENQLSVPKYFLRCKLFVTGGSRRTNLLKLVQEHLKPKTSVFHEERLYLREEQPGDYPWSDRKIIQKMY |
| | YLYVQDLLCMQMAQWHYEHLTPQVKGKIDWEINSESKESDGYNRFKVEYKGPQGCRIIFRVQDFGRLDFL |
| | NKAPMLDNICQWFLSGRKEITWPEFLRDGLQRYRQRQILVVRALFRFEENLKIPEEEWKGKSHLSFDEVLE |
| | RFSGKNRLSEEEKESIRRVRNDFFHEEFEATPSQWRDFERRMSEYLNKEKREKPKKKKR |
| IMG_ | MPVNYSLDQDYYKGTHKSCFTVPLNIAWDNGSKKGCENLLKEAMRTRGGFTQEDIEKVHRSLAEKLNGIR |
| 3300025638 | DYFSHYYHEDKPLEFKKGDDDAVKDFLEKTFSYAAGETQKRVKESGYQGIIPPIFELCGDQVRITAAGVIFL |
| SEQ ID NO: | ASFFVPRSTLERMFGAVQGFKRSDRGDLDTGQKRDYYFTRSLLSFYTLRDSYYLQADETRPFREILSYLSCV |
| 4668 | PFDSVQWLQAHGKLSKSEEKEFFGRPVEEQDEENPAQTEKQTAPAGRRMRKKNKFILFAVRFIEAWARNE |
| | KLSVEFGRYRNIQNEEDRRKQSGKKVREVFFPSALNNLSAEEQDLEGLLYIRNNHALIRIHLKAKTPVTVRIS |
| | EHELMYLVLAILSGKGGNAVQKLSKYVWDVRMRSRGPLTNMPRNFPAFLRSPASEVSEQAVQNRLNYIRK |
| | TLKEIQANLQKEAQTGQWILDKGQKIRHILRFISDSMPDFRRRPSVKEYNELRELLQTLAFDDFYRKLASFQ |
| | TERKLDAAVWNNLAQCKSINELCERCCQLQQQRLDELEKQGGDELKRYIGLLPKEKGKHYEEQNTPARKF |
| | ERFIENQLSVPKYFLRCKLFVTGGSRRTNLLKLVQEHLKPKTSVFHEERLYLREEQPGDYPWSDRKIIQKMY |
| | YLYVQDLLCMQMAQWHYEHLTPQVKGKIDWEINSESKESDGYNRFKVEYKGPQGCRIIFRVQDFGRLDFL |
| | NKAPMLDNICQWFLSGRKEITWPEFLRDGLQRYRQRQILVVRALFRFEENLKIPEEEWKGKSHLSFDEVLE |
| | RFSGKNRLSEEEKESIRRVRNDFFHEEFEATPSQWRDFERRMSEYLNKEKREKPKKKKR |
| IMG_ | MPVNYSLDQDYYKGTHKSCFTVPLNIAWDNGSKKGCENLLKEAMRTRGGFTQEDIEKVHRSLAEKLNGIR |
| 3300025629_2 | DYFSHYYHEDKPLEFKKGDDDAVKDFLEKTFSYAAGETQKRVKESGYQGIIPPIFELCGDQVRITAAGVIFL |
| SEQ ID NO: | ASFFVPRSTLERMFGAVQGFKRSDRGDLDTGQKRDYYFTRSLLSFYTLRDSYYLQADETRPFREILSYLSCV |
| 4669 | PFDSVQWLQAHGKLSKSEEKEFFGRPVEEQDEENPAQTEKQTAPAGRRMRKKNKFILFAVRFIEAWARNE |
| | KLSVEFGRYRNIQNEEDRRKQSGKKVREVFFPSALNNLSAEEQDLEGLLYIRNNHALIRIHLKAKTPVTVRIS |
| | EHELMYLVLAILSGKGGNAVQKLSKYVWDVRMRSRGPLTNMPRNFPAFLRSPASEVSEQAVQNRLNYIRK |
| | TLKEIQANLQKEAQTGQWILDKGQKIRHILRFISDSMPDFRRRPSVKEYNELRELLQTLAFDDFYRKLASFQ |
| | TERKLDAAVWNNLAQCKSINELCERCCQLQQQRLDELEKQGGDELKRYIGLLPKEKGKHYEEQNTPARKF |
| | ERFIENQLSVPKYFLRCKLFVTGGSRRTNLLKLVQEHLKPKTSVFHEERLYLREEQPGDYPWSDRKIIQKMY |
| | YLYVQDLLCMQMAQWHYEHLTPQVKGKIDWEINSESKESDGYNRFKVEYKGPQGCRIIFRVQDFGRLDFL |
| | NKAPMLDNICQWFLSGRKEITWPEFLRDGLQRYRQRQILVVRALFRFEENLKIPEEEWKGKSHLSFDEVLE |
| | RFSGKNRLSEEEKESIRRVRNDFFHEEFEATPSQWRDFERRMSEYLNKEKREKPKKKKR |
| IMG_ | MPVNYSLDQDYYKGTHKSCFTVPLNIAWDNGSKKGCENLLKEAMRTRGGFTQEDIEKVHRSLAEKLNGIR |
| 3300009658 | DYFSHYYHEDKPLEFKKGDDDAVKDFLEKTFSYAAGETQKRVKESGYQGIIPPIFELCGDQVRITAAGVIFL |
| SEQ ID NO: | ASFFVPRSTLERMFGAVQGFKRSDRGDLDTGQKRDYYFTRSLLSFYTLRDSYYLQADETRPFREILSYLSCV |
| 4670 | PFDSVQWLQAHGKLSKSEEKEFFGRPVEEQDEENPAQTEKQTAPAGRRMRKKNKFILFAVRFIEAWARNE |
| | KLSVEFGRYRNIQNEEDRRKQSGKKVREVFFPSALNNLSAEEQDLEGLLYIRNNHALIRIHLKAKTPVTVRIS |
| | EHELMYLVLAILSGKGGNAVQKLSKYVWDVRMRSRGPLTNMPRNFPAFLRSPASEVSEQAVQNRLNYIRK |
| | TLKEIQANLQKEAQTGQWILDKGQKIRHILRFISDSMPDFRRRPSVKEYNELRELLQTLAFDDFYRKLASFQ |
| | TERKLDAAVWNNLAQCKSINELCERCCQLQQQRLDELEKQGGDELKRYIGLLPKEKGKHYEEQNTPARKF |
| | ERFIENQLSVPKYFLRCKLFVTGGSRRTNLLKLVQEHLKPKTSVFHEERLYLREEQPGDYPWSDRKIIQKMY |
| | YLYVQDLLCMQMAQWHYEHLTPQVKGKIDWEINSESKESDGYNRFKVEYKGPQGCRIIFRVQDFGRLDFL |
| | NKAPMLDNICQWFLSGRKEITWPEFLRDGLQRYRQRQILVVRALFRFEENLKIPEEEWKGKSHLSFDEVLE |
| | RFSGKNRLSEEEKESIRRVRNDFFHEEFEATPSQWRDFERRMSEYLNKEKREKPKKKKR |
| IMG_ | MPVNYSLDQDYYKGTHKSCFTVPLNIAWDNGSKKGCENLLKEAMRTRGGFTQEDIEKVHRSLAEKLNGIR |
| 3300009658_2 | DYFSHYYHEDKPLEFKKGDDDAVKDFLEKTFSYAAGETQKRVKESGYQGIIPPIFELCGDQVRITAAGVIFL |
| SEQ ID NO: | ASFFVPRSTLERMFGAVQGFKRSDRGDLDTGQKRDYYFTRSLLSFYTLRDSYYLQADETRPFREILSYLSCV |
| 4671 | PFDSVQWLQAHGKLSKSEEKEFFGRPVEEQDEENPAQTEKQTAPAGRRMRKKNKFILFAVRFIEAWARNE |
| | KLSVEFGRYRNIQNEEDRRKQSGKKVREVFFPSALNNLSAEEQDLEGLLYIRNNHALIRIHLKAKTPVTVRIS |
| | EHELMYLVLAILSGKGGNAVQKLSKYVWDVRMRSRGPLTNMPRNFPAFLRSPASEVSEQAVQNRLNYIRK |
| | TLKEIQANLQKEAQTGQWILDKGQKIRHILRFISDSMPDFRRRPSVKEYNELRELLQTLAFDDFYRKLASFQ |
| | TERKLDAAVWNNLAQCKSINELCERCCQLQQQRLDELEKQGGDELKRYIGLLPKEKGKHYEEQNTPARKF |
| | ERFIENQLSVPKYFLRCKLFVTGGSRRTNLLKLVQEHLKPKTSVFHEERLYLREEQPGDYPWSDRKIIQKMY |
| | YLYVQDLLCMQMAQWHYEHLTPQVKGKIDWEINSESKESDGYNRFKVEYKGPQGCRIIFRVQDFGRLDFL |
| | NKAPMLDNICQWFLSGRKEITWPEFLRDGLQRYRQRQILVVRALFRFEENLKIPEEEWKGKSHLSFDEVLE |
| | RFSGKNRLSEEEKESIRRVRNDFFHEEFEATPSQWRDFERRMSEYLNKEKREKPKKKKR |
| IMG_ | MPVNYSLDQDYYKGTHKSCFTVPLNIAWDNGSKKGCENLLKEAMRTRGGFTQEDIEKVHRSLAEKLNGIR |
| 3300025638_2 | DYFSHYYHEDKPLEFKKGDDDAVKDFLEKTFSYAAGETQKRVKESGYQGIIPPIFELCGDQVRITAAGVIFL |
| SEQ ID NO: | ASFFVPRSTLERMFGAVQGFKRSDRGDLDTGQKRDYYFTRSLLSFYTLRDSYYLQADETRPFREILSYLSCV |
| 4672 | PFDSVQWLQAHGKLSKSEEKEFFGRPVEEQDEENPAQTEKQTAPAGRRMRKKNKFILFAVRFIEAWARNE |
| | KLSVEFGRYRNIQNEEDRRKQSGKKVREVFFPSALNNLSAEEQDLEGLLYIRNNHALIRIHLKAKTPVTVRIS |
| | EHELMYLVLAILSGKGGNAVQKLSKYVWDVRMRSRGPLTNMPRNFPAFLRSPASEVSEQAVQNRLNYIRK |
| | TLKEIQANLQKEAQTGQWILDKGQKIRHILRFISDSMPDFRRRPSVKEYNELRELLQTLAFDDFYRKLASFQ |
| | TERKLDAAVWNNLAQCKSINELCERCCQLQQQRLDELEKQGGDELKRYIGLLPKEKGKHYEEQNTPARKF |
| | ERFIENQLSVPKYFLRCKLFVTGGSRRTNLLKLVQEHLKPKTSVFHEERLYLREEQPGDYPWSDRKIIQKMY |
| | YLYVQDLLCMQMAQWHYEHLTPQVKGKIDWEINSESKESDGYNRFKVEYKGPQGCRIIFRVQDFGRLDFL |
| | NKAPMLDNICQWFLSGRKEITWPEFLRDGLQRYRQRQILVVRALFRFEENLKIPEEEWKGKSHLSFDEVLE |
| | RFSGKNRLSEEEKESIRRVRNDFFHEEFEATPSQWRDFERRMSEYLNKEKREKPKKKKR |
| IMG_ | MPVNYSLDQDYYKGTHKSCFTVPLNIAWDNGSKKGCENLLKEAMRTRGGFTQEDIEKVHRSLAEKLNGIR |
| 3300025613 | DYFSHYYHEDKPLEFKKGDDDAVKDFLEKTFSYAAGETQKRVKESGYQGIIPPIFELCGDQVRITAAGVIFL |
| SEQ ID NO: | ASFFVPRSTLERMFGAVQGFKRSDRGDLDTGQKRDYYFTRSLLSFYTLRDSYYLQADETRPFREILSYLSCV |
| 4673 | PFDSVQWLQAHGKLSKSEEKEFFGRPVEEQDEENPAQTEKQTAPAGRRMRKKNKFILFAVRFIEAWARNE |
| | KLSVEFGRYRNIQNEEDRRKQSGKKVREVFFPSALNNLSAEEQDLEGLLYIRNNHALIRIHLKAKTPVTVRIS |
| | EHELMYLVLAILSGKGGNAVQKLSKYVWDVRMRSRGPLTNMPRNFPAFLRSPASEVSEQAVQNRLNYIRK |
| | TLKEIQANLQKEAQTGQWILDKGQKIRHILRFISDSMPDFRRRPSVKEYNELRELLQTLAFDDFYRKLASFQ |
| | TERKLDAAVWNNLAQCKSINELCERCCQLQQQRLDELEKQGGDELKRYIGLLPKEKGKHYEEQNTPARKF |
| | ERFIENQLSVPKYFLRCKLFVTGGSRRTNLLKLVQEHLKPKTSVFHEERLYLREEQPGDYPWSDRKIIQKMY |
| | YLYVQDLLCMQMAQWHYEHLTPQVKGKIDWEINSESKESDGYNRFKVEYKGPQGCRIIFRVQDFGRLDFL |
| | NKAPMLDNICQWFLSGRKEITWPEFLRDGLQRYRQRQILVVRALFRFEENLKIPEEEWKGKSHLSFDEVLE |
| | RFSGKNRLSEEEKESIRRVRNDFFHEEFEATPSQWRDFERRMSEYLNKEKREKPKKKKR |
| IMG_ | MPVNYSLDQDYYKGTHKSCFTVPLNIAWDNGSKKGCENLLKEAMRTRGGFTQEDIEKVHRSLAEKLNGIR |
| 3300025613_2 | DYFSHYYHEDKPLEFKKGDDDAVKDFLEKTFSYAAGETQKRVKESGYQGIIPPIFELCGDQVRITAAGVIFL |
| SEQ ID NO: | ASFFVPRSTLERMFGAVQGFKRSDRGDLDTGQKRDYYFTRSLLSFYTLRDSYYLQADETRPFREILSYLSCV |
| 4674 | PFDSVQWLQAHGKLSKSEEKEFFGRPVEEQDEENPAQTEKQTAPAGRRMRKKNKFILFAVRFIEAWARNE |
| | KLSVEFGRYRNIQNEEDRRKQSGKKVREVFFPSALNNLSAEEQDLEGLLYIRNNHALIRIHLKAKTPVTVRIS |
| | EHELMYLVLAILSGKGGNAVQKLSKYVWDVRMRSRGPLTNMPRNFPAFLRSPASEVSEQAVQNRLNYIRK |
| | TLKEIQANLQKEAQTGQWILDKGQKIRHILRFISDSMPDFRRRPSVKEYNELRELLQTLAFDDFYRKLASFQ |
| | TERKLDAAVWNNLAQCKSINELCERCCQLQQQRLDELEKQGGDELKRYIGLLPKEKGKHYEEQNTPARKF |
| | ERFIENQLSVPKYFLRCKLFVTGGSRRTNLLKLVQEHLKPKTSVFHEERLYLREEQPGDYPWSDRKIIQKMY |
| | YLYVQDLLCMQMAQWHYEHLTPQVKGKIDWEINSESKESDGYNRFKVEYKGPQGCRIIFRVQDFGRLDFL |
| | NKAPMLDNICQWFLSGRKEITWPEFLRDGLQRYRQRQILVVRALFRFEENLKIPEEEWKGKSHLSFDEVLE |
| | RFSGKNRLSEEEKESIRRVRNDFFHEEFEATPSQWRDFERRMSEYLNKEKREKPKKKKR |
| IMG_ | MPVNYSLDQDYYKGTHKSCFTVPLNIAWDNGSKKGCENLLKEAMRTRGGFTQEDIEKVHRSLAEKLNGIR |
| 3300025686 | DYFSHYYHEDKPLEFKKGDDDAVKDFLEKTFSYAAGETQKRVKESGYQGIIPPIFELCGDQVRITAAGVIFL |
| SEQ ID NO: | ASFFVPRSTLERMFGAVQGFKRSDRGDLDTGQKRDYYFTRSLLSFYTLRDSYYLQADETRPFREILSYLSCV |
| 4675 | PFDSVQWLQAHGKLSKSEEKEFFGRPVEEQDEENPAQTEKQTAPAGRRMRKKNKFILFAVRFIEAWARNE |
| | KLSVEFGRYRNIQNEEDRRKQSGKKVREVFFPSALNNLSAEEQDLEGLLYIRNNHALIRIHLKAKTPVTVRIS |
| | EHELMYLVLAILSGKGGNAVQKLSKYVWDVRMRSRGPLTNMPRNFPAFLRSPASEVSEQAVQNRLNYIRK |
| | TLKEIQANLQKEAQTGQWILDKGQKIRHILRFISDSMPDFRRRPSVKEYNELRELLQTLAFDDFYRKLASFQ |
| | TERKLDAAVWNNLAQCKSINELCERCCQLQQQRLDELEKQGGDELKRYIGLLPKEKGKHYEEQNTPARKF |
| | ERFIENQLSVPKYFLRCKLFVTGGSRRTNLLKLVQEHLKPKTSVFHEERLYLREEQPGDYPWSDRKIIQKMY |
| | YLYVQDLLCMQMAQWHYEHLTPQVKGKIDWEINSESKESDGYNRFKVEYKGPQGCRIIFRVQDFGRLDFL |
| | NKAPMLDNICQWFLSGRKEITWPEFLRDGLQRYRQRQILVVRALFRFEENLKIPEEEWKGKSHLSFDEVLE |
| | RFSGKNRLSEEEKESIRRVRNDFFHEEFEATPSQWRDFERRMSEYLNKEKREKPKKKKR |
| IMG_ | MPVNYSLDQDYYKGTHKSCFTVPLNIAWDNGSKKGCENLLKEAMRTRGGFTQEDIEKVHRSLAEKLNGIR |
| 3300025686_2 | DYFSHYYHEDKPLEFKKGDDDAVKDFLEKTFSYAAGETQKRVKESGYQGIIPPIFELCGDQVRITAAGVIFL |
| SEQ ID NO: | ASFFVPRSTLERMFGAVQGFKRSDRGDLDTGQKRDYYFTRSLLSFYTLRDSYYLQADETRPFREILSYLSCV |
| 4676 | PFDSVQWLQAHGKLSKSEEKEFFGRPVEEQDEENPAQTEKQTAPAGRRMRKKNKFILFAVRFIEAWARNE |
| | KLSVEFGRYRNIQNEEDRRKQSGKKVREVFFPSALNNLSAEEQDLEGLLYIRNNHALIRIHLKAKTPVTVRIS |
| | EHELMYLVLAILSGKGGNAVQKLSKYVWDVRMRSRGPLTNMPRNFPAFLRSPASEVSEQAVQNRLNYIRK |
| | TLKEIQANLQKEAQTGQWILDKGQKIRHILRFISDSMPDFRRRPSVKEYNELRELLQTLAFDDFYRKLASFQ |
| | TERKLDAAVWNNLAQCKSINELCERCCQLQQQRLDELEKQGGDELKRYIGLLPKEKGKHYEEQNTPARKF |
| | ERFIENQLSVPKYFLRCKLFVTGGSRRTNLLKLVQEHLKPKTSVFHEERLYLREEQPGDYPWSDRKIIQKMY |
| | YLYVQDLLCMQMAQWHYEHLTPQVKGKIDWEINSESKESDGYNRFKVEYKGPQGCRIIFRVQDFGRLDFL |
| | NKAPMLDNICQWFLSGRKEITWPEFLRDGLQRYRQRQILVVRALFRFEENLKIPEEEWKGKSHLSFDEVLE |
| | RFSGKNRLSEEEKESIRRVRNDFFHEEFEATPSQWRDFERRMSEYLNKEKREKPKKKKR |
| IMG_ | MPVNYSLDQDYYKGTHKSCFTVPLNIAWDNGSKKGCENLLKEAMRTRGGFTQEDIEKVHRSLAEKLNGIR |
| 3300009714 | DYFSHYYHEDKPLEFKKGDDDAVKDFLEKTFSYAAGETQKRVKESGYQGIIPPIFELCGDQVRITAAGVIFL |
| SEQ ID NO: | ASFFVPRSTLERMFGAVQGFKRSDRGDLDTGQKRDYYFTRSLLSFYTLRDSYYLQADETRPFREILSYLSCV |
| 4677 | PFDSVQWLQAHGKLSKSEEKEFFGRPVEEQDEENPAQTEKQTAPAGRRMRKKNKFILFAVRFIEAWARNE |
| | KLSVEFGRYRNIQNEEDRRKQSGKKVREVFFPSALNNLSAEEQDLEGLLYIRNNHALIRIHLKAKTPVTVRIS |
| | EHELMYLVLAILSGKGGNAVQKLSKYVWDVRMRSRGPLTNMPRNFPAFLRSPASEVSEQAVQNRLNYIRK |
| | TLKEIQANLQKEAQTGQWILDKGQKIRHILRFISDSMPDFRRRPSVKEYNELRELLQTLAFDDFYRKLASFQ |
| | TERKLDAAVWNNLAQCKSINELCERCCQLQQQRLDELEKQGGDELKRYIGLLPKEKGKHYEEQNTPARKF |
| | ERFIENQLSVPKYFLRCKLFVTGGSRRTNLLKLVQEHLKPKTSVFHEERLYLREEQPGDYPWSDRKIIQKMY |
| | YLYVQDLLCMQMAQWHYEHLTPQVKGKIDWEINSESKESDGYNRFKVEYKGPQGCRIIFRVQDFGRLDFL |
| | NKAPMLDNICQWFLSGRKEITWPEFLRDGLQRYRQRQILVVRALFRFEENLKIPEEEWKGKSHLSFDEVLE |
| | RFSGKNRLSEEEKESIRRVRNDFFHEEFEATPSQWRDFERRMSEYLNKEKREKPKKKKR |
| IMG_ | MPVNYSLDQDYYKGTHKSCFTVPLNIAWDNGSKKGCENLLKEAMRTRGGFTQEDIEKVHRSLAEKLNGIR |
| 3300009714_2 | DYFSHYYHEDKPLEFKKGDDDAVKDFLEKTFSYAAGETQKRVKESGYQGIIPPIFELCGDQVRITAAGVIFL |
| SEQ ID NO: | ASFFVPRSTLERMFGAVQGFKRSDRGDLDTGQKRDYYFTRSLLSFYTLRDSYYLQADETRPFREILSYLSCV |
| 4678 | PFDSVQWLQAHGKLSKSEEKEFFGRPVEEQDEENPAQTEKQTAPAGRRMRKKNKFILFAVRFIEAWARNE |
| | KLSVEFGRYRNIQNEEDRRKQSGKKVREVFFPSALNNLSAEEQDLEGLLYIRNNHALIRIHLKAKTPVTVRIS |
| | EHELMYLVLAILSGKGGNAVQKLSKYVWDVRMRSRGPLTNMPRNFPAFLRSPASEVSEQAVQNRLNYIRK |
| | TLKEIQANLQKEAQTGQWILDKGQKIRHILRFISDSMPDFRRRPSVKEYNELRELLQTLAFDDFYRKLASFQ |
| | TERKLDAAVWNNLAQCKSINELCERCCQLQQQRLDELEKQGGDELKRYIGLLPKEKGKHYEEQNTPARKF |
| | ERFIENQLSVPKYFLRCKLFVTGGSRRTNLLKLVQEHLKPKTSVFHEERLYLREEQPGDYPWSDRKIIQKMY |
| | YLYVQDLLCMQMAQWHYEHLTPQVKGKIDWEINSESKESDGYNRFKVEYKGPQGCRIIFRVQDFGRLDFL |
| | NKAPMLDNICQWFLSGRKEITWPEFLRDGLQRYRQRQILVVRALFRFEENLKIPEEEWKGKSHLSFDEVLE |
| | RFSGKNRLSEEEKESIRRVRNDFFHEEFEATPSQWRDFERRMSEYLNKEKREKPKKKKR |
| IMG_ | MPVNYSLDQDYYKGTHKSCFTVPLNIAWDNGSKKGCENLLKEAMRTRGGFTQEDIEKVHRSLAEKLNGIR |
| 3300009655 | DYFSHYYHEDKPLEFKKGDDDAVKDFLEKTFSYAAGETQKRVKESGYQGIIPPIFELCGDQVRITAAGVIFL |
| SEQ ID NO: | ASFFVPRSTLERMFGAVQGFKRSDRGDLDTGQKRDYYFTRSLLSFYTLRDSYYLQADETRPFREILSYLSCV |
| 4679 | PFDSVQWLQAHGKLSKSEEKEFFGRPVEEQDEENPAQTEKQTAPAGRRMRKKNKFILFAVRFIEAWARNE |
| | KLSVEFGRYRNIQNEEDRRKQSGKKVREVFFPSALNNLSAEEQDLEGLLYIRNNHALIRIHLKAKTPVTVRIS |
| | EHELMYLVLAILSGKGGNAVQKLSKYVWDVRMRSRGPLTNMPRNFPAFLRSPASEVSEQAVQNRLNYIRK |
| | TLKEIQANLQKEAQTGQWILDKGQKIRHILRFISDSMPDFRRRPSVKEYNELRELLQTLAFDDFYRKLASFQ |
| | TERKLDAAVWNNLAQCKSINELCERCCQLQQQRLDELEKQGGDELKRYIGLLPKEKGKHYEEQNTPARKF |
| | ERFIENQLSVPKYFLRCKLFVTGGSRRTNLLKLVQEHLKPKTSVFHEERLYLREEQPGDYPWSDRKIIQKMY |
| | YLYVQDLLCMQMAQWHYEHLTPQVKGKIDWEINSESKESDGYNRFKVEYKGPQGCRIIFRVQDFGRLDFL |
| | NKAPMLDNICQWFLSGRKEITWPEFLRDGLQRYRQRQILVVRALFRFEENLKIPEEEWKGKSHLSFDEVLE |
| | RFSGKNRLSEEEKESIRRVRNDFFHEEFEATPSQWRDFERRMSEYLNKEKREKPKKKKR |
| IMG_ | MPVNYSLDQDYYKGTHKSCFTVPLNIAWDNGSKKGCENLLKEAMRTRGGFTQEDIEKVHRSLAEKLNGIR |
| 3300009655_2 | DYFSHYYHEDKPLEFKKGDDDAVKDFLEKTFSYAAGETQKRVKESGYQGIIPPIFELCGDQVRITAAGVIFL |
| SEQ ID NO: | ASFFVPRSTLERMFGAVQGFKRSDRGDLDTGQKRDYYFTRSLLSFYTLRDSYYLQADETRPFREILSYLSCV |
| 4680 | PFDSVQWLQAHGKLSKSEEKEFFGRPVEEQDEENPAQTEKQTAPAGRRMRKKNKFILFAVRFIEAWARNE |
| | KLSVEFGRYRNIQNEEDRRKQSGKKVREVFFPSALNNLSAEEQDLEGLLYIRNNHALIRIHLKAKTPVTVRIS |
| | EHELMYLVLAILSGKGGNAVQKLSKYVWDVRMRSRGPLTNMPRNFPAFLRSPASEVSEQAVQNRLNYIRK |
| | TLKEIQANLQKEAQTGQWILDKGQKIRHILRFISDSMPDFRRRPSVKEYNELRELLQTLAFDDFYRKLASFQ |
| | TERKLDAAVWNNLAQCKSINELCERCCQLQQQRLDELEKQGGDELKRYIGLLPKEKGKHYEEQNTPARKF |
| | ERFIENQLSVPKYFLRCKLFVTGGSRRTNLLKLVQEHLKPKTSVFHEERLYLREEQPGDYPWSDRKIIQKMY |
| | YLYVQDLLCMQMAQWHYEHLTPQVKGKIDWEINSESKESDGYNRFKVEYKGPQGCRIIFRVQDFGRLDFL |
| | NKAPMLDNICQWFLSGRKEITWPEFLRDGLQRYRQRQILVVRALFRFEENLKIPEEEWKGKSHLSFDEVLE |
| | RFSGKNRLSEEEKESIRRVRNDFFHEEFEATPSQWRDFERRMSEYLNKEKREKPKKKKR |
| IMG_ | MPVNYSLDQDYYKGTHKSCFTVPLNIAWDNGSKKGCENLLKEAMRTRGGFTQEDIEKVHRSLAEKLNGIR |
| 3300009704 | DYFSHYYHEDKPLEFKKGDDDAVKDFLEKTFSYAAGETQKRVKESGYQGIIPPIFELCGDQVRITAAGVIFL |
| SEQ ID NO: | ASFFVPRSTLERMFGAVQGFKRSDRGDLDTGQKRDYYFTRSLLSFYTLRDSYYLQADETRPFREILSYLSCV |
| 4681 | PFDSVQWLQAHGKLSKSEEKEFFGRPVEEQDEENPAQTEKQTAPAGRRMRKKNKFILFAVRFIEAWARNE |
| | KLSVEFGRYRNIQNEEDRRKQSGKKVREVFFPSALNNLSAEEQDLEGLLYIRNNHALIRIHLKAKTPVTVRIS |
| | EHELMYLVLAILSGKGGNAVQKLSKYVWDVRMRSRGPLTNMPRNFPAFLRSPASEVSEQAVQNRLNYIRK |
| | TLKEIQANLQKEAQTGQWILDKGQKIRHILRFISDSMPDFRRRPSVKEYNELRELLQTLAFDDFYRKLASFQ |
| | TERKLDAAVWNNLAQCKSINELCERCCQLQQQRLDELEKQGGDELKRYIGLLPKEKGKHYEEQNTPARKF |
| | ERFIENQLSVPKYFLRCKLFVTGGSRRTNLLKLVQEHLKPKTSVFHEERLYLREEQPGDYPWSDRKIIQKMY |
| | YLYVQDLLCMQMAQWHYEHLTPQVKGKIDWEINSESKESDGYNRFKVEYKGPQGCRIIFRVQDFGRLDFL |
| | NKAPMLDNICQWFLSGRKEITWPEFLRDGLQRYRQRQILVVRALFRFEENLKIPEEEWKGKSHLSFDEVLE |
| | RFSGKNRLSEEEKESIRRVRNDFFHEEFEATPSQWRDFERRMSEYLNKEKREKPKKKKR |
| IMG_ | MPVNYSLDQDYYKGTHKSCFTVPLNIAWDNGSKKGCENLLKEAMRTRGGFTQEDIEKVHRSLAEKLNGIR |
| 3300009664 | DYFSHYYHEDKPLEFKKGDDDAVKDFLEKTFSYAAGETQKRVKESGYQGIIPPIFELCGDQVRITAAGVIFL |
| SEQ ID NO: | ASFFVPRSTLERMFGAVQGFKRSDRGDLDTGQKRDYYFTRSLLSFYTLRDSYYLQADETRPFREILSYLSCV |
| 4682 | PFDSVQWLQAHGKLSKSEEKEFFGRPVEEQDEENPAQTEKQTAPAGRRMRKKNKFILFAVRFIEAWARNE |
| | KLSVEFGRYRNIQNEEDRRKQSGKKVREVFFPSALNNLSAEEQDLEGLLYIRNNHALIRIHLKAKTPVTVRIS |
| | EHELMYLVLAILSGKGGNAVQKLSKYVWDVRMRSRGPLTNMPRNFPAFLRSPASEVSEQAVQNRLNYIRK |
| | TLKEIQANLQKEAQTGQWILDKGQKIRHILRFISDSMPDFRRRPSVKEYNELRELLQTLAFDDFYRKLASFQ |
| | TERKLDAAVWNNLAQCKSINELCERCCQLQQQRLDELEKQGGDELKRYIGLLPKEKGKHYEEQNTPARKF |
| | ERFIENQLSVPKYFLRCKLFVTGGSRRTNLLKLVQEHLKPKTSVFHEERLYLREEQPGDYPWSDRKIIQKMY |
| | YLYVQDLLCMQMAQWHYEHLTPQVKGKIDWEINSESKESDGYNRFKVEYKGPQGCRIIFRVQDFGRLDFL |
| | NKAPMLDNICQWFLSGRKEITWPEFLRDGLQRYRQRQILVVRALFRFEENLKIPEEEWKGKSHLSFDEVLE |
| | RFSGKNRLSEEEKESIRRVRNDFFHEEFEATPSQWRDFERRMSEYLNKEKREKPKKKKR |
| IMG_ | MPVNYSLDQDYYKGTHKSCFTVPLNIAWDNGSKKGCENLLKEAMRTRGGFTQEDIEKVHRSLAEKLNGIR |
| 3300009704_2 | DYFSHYYHEDKPLEFKKGDDDAVKDFLEKTFSYAAGETQKRVKESGYQGIIPPIFELCGDQVRITAAGVIFL |
| SEQ ID NO: | ASFFVPRSTLERMFGAVQGFKRSDRGDLDTGQKRDYYFTRSLLSFYTLRDSYYLQADETRPFREILSYLSCV |
| 4683 | PFDSVQWLQAHGKLSKSEEKEFFGRPVEEQDEENPAQTEKQTAPAGRRMRKKNKFILFAVRFIEAWARNE |
| | KLSVEFGRYRNIQNEEDRRKQSGKKVREVFFPSALNNLSAEEQDLEGLLYIRNNHALIRIHLKAKTPVTVRIS |
| | EHELMYLVLAILSGKGGNAVQKLSKYVWDVRMRSRGPLTNMPRNFPAFLRSPASEVSEQAVQNRLNYIRK |
| | TLKEIQANLQKEAQTGQWILDKGQKIRHILRFISDSMPDFRRRPSVKEYNELRELLQTLAFDDFYRKLASFQ |
| | TERKLDAAVWNNLAQCKSINELCERCCQLQQQRLDELEKQGGDELKRYIGLLPKEKGKHYEEQNTPARKF |
| | ERFIENQLSVPKYFLRCKLFVTGGSRRTNLLKLVQEHLKPKTSVFHEERLYLREEQPGDYPWSDRKIIQKMY |
| | YLYVQDLLCMQMAQWHYEHLTPQVKGKIDWEINSESKESDGYNRFKVEYKGPQGCRIIFRVQDFGRLDFL |
| | NKAPMLDNICQWFLSGRKEITWPEFLRDGLQRYRQRQILVVRALFRFEENLKIPEEEWKGKSHLSFDEVLE |
| | RFSGKNRLSEEEKESIRRVRNDFFHEEFEATPSQWRDFERRMSEYLNKEKREKPKKKKR |
| IMG_ | MPVNYSLDQDYYKGTHKSCFTVPLNIAWDNGSKKGCENLLKEAMRTRGGFTQEDIEKVHRSLAEKLNGIR |
| 3300009664_2 | DYFSHYYHEDKPLEFKKGDDDAVKDFLEKTFSYAAGETQKRVKESGYQGIIPPIFELCGDQVRITAAGVIFL |
| SEQ ID NO: | ASFFVPRSTLERMFGAVQGFKRSDRGDLDTGQKRDYYFTRSLLSFYTLRDSYYLQADETRPFREILSYLSCV |
| 4684 | PFDSVQWLQAHGKLSKSEEKEFFGRPVEEQDEENPAQTEKQTAPAGRRMRKKNKFILFAVRFIEAWARNE |
| | KLSVEFGRYRNIQNEEDRRKQSGKKVREVFFPSALNNLSAEEQDLEGLLYIRNNHALIRIHLKAKTPVTVRIS |
| | EHELMYLVLAILSGKGGNAVQKLSKYVWDVRMRSRGPLTNMPRNFPAFLRSPASEVSEQAVQNRLNYIRK |
| | TLKEIQANLQKEAQTGQWILDKGQKIRHILRFISDSMPDFRRRPSVKEYNELRELLQTLAFDDFYRKLASFQ |
| | TERKLDAAVWNNLAQCKSINELCERCCQLQQQRLDELEKQGGDELKRYIGLLPKEKGKHYEEQNTPARKF |
| | ERFIENQLSVPKYFLRCKLFVTGGSRRTNLLKLVQEHLKPKTSVFHEERLYLREEQPGDYPWSDRKIIQKMY |
| | YLYVQDLLCMQMAQWHYEHLTPQVKGKIDWEINSESKESDGYNRFKVEYKGPQGCRIIFRVQDFGRLDFL |
| | NKAPMLDNICQWFLSGRKEITWPEFLRDGLQRYRQRQILVVRALFRFEENLKIPEEEWKGKSHLSFDEVLE |
| | RFSGKNRLSEEEKESIRRVRNDFFHEEFEATPSQWRDFERRMSEYLNKEKREKPKKKKR |
| IMG_ | MPVNYSLDQDYYKGTHKSCFTVPLNIAWDNGSKKGCENLLKEAMRTRGGFTQEDIEKVHRSLAEKLNGIR |
| 3300025689 | DYFSHYYHEDKPLEFKKGDDDAVKDFLEKTFSYAAGETQKRVKESGYQGIIPPIFELCGDQVRITAAGVIFL |
| SEQ ID NO: | ASFFVPRSTLERMFGAVQGFKRSDRGDLDTGQKRDYYFTRSLLSFYTLRDSYYLQADETRPFREILSYLSCV |
| 4685 | PFDSVQWLQAHGKLSKSEEKEFFGRPVEEQDEENPAQTEKQTAPAGRRMRKKNKFILFAVRFIEAWARNE |
| | KLSVEFGRYRNIQNEEDRRKQSGKKVREVFFPSALNNLSAEEQDLEGLLYIRNNHALIRIHLKAKTPVTVRIS |
| | EHELMYLVLAILSGKGGNAVQKLSKYVWDVRMRSRGPLTNMPRNFPAFLRSPASEVSEQAVQNRLNYIRK |
| | TLKEIQANLQKEAQTGQWILDKGQKIRHILRFISDSMPDFRRRPSVKEYNELRELLQTLAFDDFYRKLASFQ |
| | TERKLDAAVWNNLAQCKSINELCERCCQLQQQRLDELEKQGGDELKRYIGLLPKEKGKHYEEQNTPARKF |
| | ERFIENQLSVPKYFLRCKLFVTGGSRRTNLLKLVQEHLKPKTSVFHEERLYLREEQPGDYPWSDRKIIQKMY |
| | YLYVQDLLCMQMAQWHYEHLTPQVKGKIDWEINSESKESDGYNRFKVEYKGPQGCRIIFRVQDFGRLDFL |
| | NKAPMLDNICQWFLSGRKEITWPEFLRDGLQRYRQRQILVVRALFRFEENLKIPEEEWKGKSHLSFDEVLE |
| | RFSGKNRLSEEEKESIRRVRNDFFHEEFEATPSQWRDFERRMSEYLNKEKREKPKKKKR |
| IMG_ | MPVNYSLDQDYYKGTHKSCFTVPLNIAWDNGSKKGCENLLKEAMRTRGGFTQEDIEKVHRSLAEKLNGIR |
| 3300025689_2 | DYFSHYYHEDKPLEFKKGDDDAVKDFLEKTFSYAAGETQKRVKESGYQGIIPPIFELCGDQVRITAAGVIFL |
| SEQ ID NO: | ASFFVPRSTLERMFGAVQGFKRSDRGDLDTGQKRDYYFTRSLLSFYTLRDSYYLQADETRPFREILSYLSCV |
| 4686 | PFDSVQWLQAHGKLSKSEEKEFFGRPVEEQDEENPAQTEKQTAPAGRRMRKKNKFILFAVRFIEAWARNE |
| | KLSVEFGRYRNIQNEEDRRKQSGKKVREVFFPSALNNLSAEEQDLEGLLYIRNNHALIRIHLKAKTPVTVRIS |
| | EHELMYLVLAILSGKGGNAVQKLSKYVWDVRMRSRGPLTNMPRNFPAFLRSPASEVSEQAVQNRLNYIRK |
| | TLKEIQANLQKEAQTGQWILDKGQKIRHILRFISDSMPDFRRRPSVKEYNELRELLQTLAFDDFYRKLASFQ |
| | TERKLDAAVWNNLAQCKSINELCERCCQLQQQRLDELEKQGGDELKRYIGLLPKEKGKHYEEQNTPARKF |
| | ERFIENQLSVPKYFLRCKLFVTGGSRRTNLLKLVQEHLKPKTSVFHEERLYLREEQPGDYPWSDRKIIQKMY |
| | YLYVQDLLCMQMAQWHYEHLTPQVKGKIDWEINSESKESDGYNRFKVEYKGPQGCRIIFRVQDFGRLDFL |
| | NKAPMLDNICQWFLSGRKEITWPEFLRDGLQRYRQRQILVVRALFRFEENLKIPEEEWKGKSHLSFDEVLE |
| | RFSGKNRLSEEEKESIRRVRNDFFHEEFEATPSQWRDFERRMSEYLNKEKREKPKKKKR |
| IMG_ | MPVNYSLDQDYYKGTHKSCFTVPLNIAWDNGSKKGCENLLKEAMRTRGGFTQEDIEKVHRSLAEKLNGIR |
| 3300009667 | DYFSHYYHEDKPLEFKKGDDDAVKDFLEKTFSYAAGETQKRVKESGYQGIIPPIFELCGDQVRITAAGVIFL |
| SEQ ID NO: | ASFFVPRSTLERMFGAVQGFKRSDRGDLDTGQKRDYYFTRSLLSFYTLRDSYYLQADETRPFREILSYLSCV |
| 4687 | PFDSVQWLQAHGKLSKSEEKEFFGRPVEEQDEENPAQTEKQTAPAGRRMRKKNKFILFAVRFIEAWARNE |
| | KLSVEFGRYRNIQNEEDRRKQSGKKVREVFFPSALNNLSAEEQDLEGLLYIRNNHALIRIHLKAKTPVTVRIS |
| | EHELMYLVLAILSGKGGNAVQKLSKYVWDVRMRSRGPLTNMPRNFPAFLRSPASEVSEQAVQNRLNYIRK |
| | TLKEIQANLQKEAQTGQWILDKGQKIRHILRFISDSMPDFRRRPSVKEYNELRELLQTLAFDDFYRKLASFQ |
| | TERKLDAAVWNNLAQCKSINELCERCCQLQQQRLDELEKQGGDELKRYIGLLPKEKGKHYEEQNTPARKF |
| | ERFIENQLSVPKYFLRCKLFVTGGSRRTNLLKLVQEHLKPKTSVFHEERLYLREEQPGDYPWSDRKIIQKMY |
| | YLYVQDLLCMQMAQWHYEHLTPQVKGKIDWEINSESKESDGYNRFKVEYKGPQGCRIIFRVQDFGRLDFL |
| | NKAPMLDNICQWFLSGRKEITWPEFLRDGLQRYRQRQILVVRALFRFEENLKIPEEEWKGKSHLSFDEVLE |
| | RFSGKNRLSEEEKESIRRVRNDFFHEEFEATPSQWRDFERRMSEYLNKEKREKPKKKKR |
| IMG_ | MPVNYSLDQDYYKGTHKSCFTVPLNIAWDNGSKKGCENLLKEAMRTRGGFTQEDIEKVHRSLAEKLNGIR |
| 3300009667_2 | DYFSHYYHEDKPLEFKKGDDDAVKDFLEKTFSYAAGETQKRVKESGYQGIIPPIFELCGDQVRITAAGVIFL |
| SEQ ID NO: | ASFFVPRSTLERMFGAVQGFKRSDRGDLDTGQKRDYYFTRSLLSFYTLRDSYYLQADETRPFREILSYLSCV |
| 4688 | PFDSVQWLQAHGKLSKSEEKEFFGRPVEEQDEENPAQTEKQTAPAGRRMRKKNKFILFAVRFIEAWARNE |
| | KLSVEFGRYRNIQNEEDRRKQSGKKVREVFFPSALNNLSAEEQDLEGLLYIRNNHALIRIHLKAKTPVTVRIS |
| | EHELMYLVLAILSGKGGNAVQKLSKYVWDVRMRSRGPLTNMPRNFPAFLRSPASEVSEQAVQNRLNYIRK |
| | TLKEIQANLQKEAQTGQWILDKGQKIRHILRFISDSMPDFRRRPSVKEYNELRELLQTLAFDDFYRKLASFQ |
| | TERKLDAAVWNNLAQCKSINELCERCCQLQQQRLDELEKQGGDELKRYIGLLPKEKGKHYEEQNTPARKF |
| | ERFIENQLSVPKYFLRCKLFVTGGSRRTNLLKLVQEHLKPKTSVFHEERLYLREEQPGDYPWSDRKIIQKMY |
| | YLYVQDLLCMQMAQWHYEHLTPQVKGKIDWEINSESKESDGYNRFKVEYKGPQGCRIIFRVQDFGRLDFL |
| | NKAPMLDNICQWFLSGRKEITWPEFLRDGLQRYRQRQILVVRALFRFEENLKIPEEEWKGKSHLSFDEVLE |
| | RFSGKNRLSEEEKESIRRVRNDFFHEEFEATPSQWRDFERRMSEYLNKEKREKPKKKKR |
| IMG_ | MKVENIKEKSKKAMYLINHYEGPKKWCFAIVLNRACDNYEDNPHLFSKSLLEFEKTSRKDWFDEETRELV |
| 3300031643 | EQADTEIQPNPNLKPNTTANRKLKDIRNYFSHHYHKNECLYFKNDDPIRCIMEAAYEKSKIYIKGKQIEQSDI |
| SEQ ID NO: | PLPELFESSGWITPAGILLLASFFVERGILHRLMGNIGGFKDNRGEYGLTHDIFTTYCLKGSYSIRAQDHDAV |
| 4689 | MFRDILGYLSRVPTESFQRIKQPQIRKEGQLSERKTDKFITFALNYLEDYGLKDLEGCKACFARSKIVREQEN |
| | VESINDKEYKPHENKKKVEIHFDQSKEDRFYINRNNVILKIQKKDGHSNIVRMGVYELKYLVLMSLVGKAK |
| | EAVEKIDNYIQDLRDQLPYIEGKNKEEIKEYVRFFPRFIRSHLGLLQINDEEKIKARLDYVKTKWLDKKEKS |
| | KELELHKKGRDILRYINERCDRELNRNVYNRILELLVSKDLTGFYRELEELKRTRRIDKNIVQNLSGQKTIN |
| | ALHEKVCDLVLKEIESLDTENLRKYLGLIPKEEKEVTFKEKVDRILKQPVIYKGFLRYQFFKDDKKSFVLLV |
| | EDALKEKGGGCDVPLGKEYYKIVSLDKYDKENKTLCETLAMDRLCLMMARQYYLSLNAKLAQEAQQIE |
| | WKKEDSIELIIFTLKNPDQSKQSFSIRFSVRDFTKLYVTDDPEFLARLCSYFFPVEKEIEYHKLYSEGINKYTN |
| | LQKEGIEAILELEKKLIERNRIQSAKNYLSFNEIMNKSGYNKDEQDDLKKVRNSLLHYKLIFEKEHLKKFYE |
| | VMRGEGIEKKWSLIV |
| IMG_ | MKVENIKEKSKKAMYLINHYEGPKKWCFAIVLNRACDNYEDNPHLFSKSLLEFEKTSRKDWFDEETRELV |
| 3300031651 | EQADTEIQPNPNLKPNTTANRKLKDIRNYFSHHYHKNECLYFKNDDPIRCIMEAAYEKSKIYIKGKQIEQSDI |
| SEQ ID NO: | PLPELFESSGWITPAGILLLASFFVERGILHRLMGNIGGFKDNRGEYGLTHDIFTTYCLKGSYSIRAQDHDAV |
| 4690 | MFRDILGYLSRVPTESFQRIKQPQIRKEGQLSERKTDKFITFALNYLEDYGLKDLEGCKACFARSKIVREQEN |
| | VESINDKEYKPHENKKKVEIHFDQSKEDRFYINRNNVILKIQKKDGHSNIVRMGVYELKYLVLMSLVGKAK |
| | EAVEKIDNYIQDLRDQLPYIEGKNKEEIKEYVRFFPRFIRSHLGLLQINDEEKIKARLDYVKTKWLDKKEKS |
| | KELELHKKGRDILRYINERCDRELNRNVYNRILELLVSKDLTGFYRELEELKRTRRIDKNIVQNLSGQKTIN |
| | ALHEKVCDLVLKEIESLDTENLRKYLGLIPKEEKEVTFKEKVDRILKQPVIYKGFLRYQFFKDDKKSFVLLV |
| | EDALKEKGGGCDVPLGKEYYKIVSLDKYDKENKTLCETLAMDRLCLMMARQYYLSLNAKLAQEAQQIE |
| | WKKEDSIELIIFTLKNPDQSKQSFSIRFSVRDFTKLYVTDDPEFLARLCSYFFPVEKEIEYHKLYSEGINKYTN |
| | LQKEGIEAILELEKKLIERNRIQSAKNYLSFNEIMNKSGYNKDEQDDLKKVRNSLLHYKLIFEKEHLKKFYE |
| | VMRGEGIEKKWSLIV |
| IMG_ | MKVENIKEKSKKAMYLINHYEGPKKWCFAIVLNRACDNYEDNPHLFSKSLLEFEKTSRKDWFDEETRELV |
| 3300031365_2 | EQADTEIQPNPNLKPNTTANRKLKDIRNYFSHHYHKNECLYFKNDDPIRCIMEAAYEKSKIYIKGKQIEQSDI |
| SEQ ID NO: | PLPELFESSGWITPAGILLLASFFVERGILHRLMGNIGGFKDNRGEYGLTHDIFTTYCLKGSYSIRAQDHDAV |
| 4691 | MFRDILGYLSRVPTESFQRIKQPQIRKEGQLSERKTDKFITFALNYLEDYGLKDLEGCKACFARSKIVREQEN |
| | VESINDKEYKPHENKKKVEIHFDQSKEDRFYINRNNVILKIQKKDGHSNIVRMGVYELKYLVLMSLVGKAK |
| | EAVEKIDNYIQDLRDQLPYIEGKNKEEIKEYVRFFPRFIRSHLGLLQINDEEKIKARLDYVKTKWLDKKEKS |
| | KELELHKKGRDILRYINERCDRELNRNVYNRILELLVSKDLTGFYRELEELKRTRRIDKNIVQNLSGQKTIN |
| | ALHEKVCDLVLKEIESLDTENLRKYLGLIPKEEKEVTFKEKVDRILKQPVIYKGFLRYQFFKDDKKSFVLLV |
| | EDALKEKGGGCDVPLGKEYYKIVSLDKYDKENKTLCETLAMDRLCLMMARQYYLSLNAKLAQEAQQIE |
| | WKKEDSIELIIFTLKNPDQSKQSFSIRFSVRDFTKLYVTDDPEFLARLCSYFFPVEKEIEYHKLYSEGINKYTN |
| | LQKEGIEAILELEKKLIERNRIQSAKNYLSFNEIMNKSGYNKDEQDDLKKVRNSLLHYKLIFEKEHLKKFYE |
| | VMRGEGIEKKWSLIV |
| IMG_ | MKVENIKEKSKKAMYLINHYEGPKKWCFAIVLNRACDNYEDNPHLFSKSLLEFEKTSRKDWFDEETRELV |
| 3300032029_3 | EQADTEIQPNPNLKPNTTANRKLKDIRNYFSHHYHKNECLYFKNDDPIRCIMEAAYEKSKIYIKGKQIEQSDI |
| SEQ ID NO: | PLPELFESSGWITPAGILLLASFFVERGILHRLMGNIGGFKDNRGEYGLTHDIFTTYCLKGSYSIRAQDHDAV |
| 4692 | MFRDILGYLSRVPTESFQRIKQPQIRKEGQLSERKTDKFITFALNYLEDYGLKDLEGCKACFARSKIVREQEN |
| | VESINDKEYKPHENKKKVEIHFDQSKEDRFYINRNNVILKIQKKDGHSNIVRMGVYELKYLVLMSLVGKAK |
| | EAVEKIDNYIQDLRDQLPYIEGKNKEEIKEYVRFFPRFIRSHLGLLQINDEEKIKARLDYVKTKWLDKKEKS |
| | KELELHKKGRDILRYINERCDRELNRNVYNRILELLVSKDLTGFYRELEELKRTRRIDKNIVQNLSGQKTIN |
| | ALHEKVCDLVLKEIESLDTENLRKYLGLIPKEEKEVTFKEKVDRILKQPVIYKGFLRYQFFKDDKKSFVLLV |
| | EDALKEKGGGCDVPLGKEYYKIVSLDKYDKENKTLCETLAMDRLCLMMARQYYLSLNAKLAQEAQQIE |
| | WKKEDSIELIIFTLKNPDQSKQSFSIRFSVRDFTKLYVTDDPEFLARLCSYFFPVEKEIEYHKLYSEGINKYTN |
| | LQKEGIEAILELEKKLIERNRIQSAKNYLSFNEIMNKSGYNKDEQDDLKKVRNSLLHYKLIFEKEHLKKFYE |
| | VMRGEGIEKKWSLIV |
| IMG_ | MKVENIKEKSKKAMYLINHYEGPKKWCFAIVLNRACDNYEDNPHLFSKSLLEFEKTSRKDWFDEETRELV |
| 3300031620_2 | EQADTEIQPNPNLKPNTTANRKLKDIRNYFSHHYHKNECLYFKNDDPIRCIMEAAYEKSKIYIKGKQIEQSDI |
| SEQ ID NO: | PLPELFESSGWITPAGILLLASFFVERGILHRLMGNIGGFKDNRGEYGLTHDIFTTYCLKGSYSIRAQDHDAV |
| 4693 | MFRDILGYLSRVPTESFQRIKQPQIRKEGQLSERKTDKFITFALNYLEDYGLKDLEGCKACFARSKIVREQEN |
| | VESINDKEYKPHENKKKVEIHFDQSKEDRFYINRNNVILKIQKKDGHSNIVRMGVYELKYLVLMSLVGKAK |
| | EAVEKIDNYIQDLRDQLPYIEGKNKEEIKEYVRFFPRFIRSHLGLLQINDEEKIKARLDYVKTKWLDKKEKS |
| | KELELHKKGRDILRYINERCDRELNRNVYNRILELLVSKDLTGFYRELEELKRTRRIDKNIVQNLSGQKTIN |
| | ALHEKVCDLVLKEIESLDTENLRKYLGLIPKEEKEVTFKEKVDRILKQPVIYKGFLRYQFFKDDKKSFVLLV |
| | EDALKEKGGGCDVPLGKEYYKIVSLDKYDKENKTLCETLAMDRLCLMMARQYYLSLNAKLAQEAQQIE |
| | WKKEDSIELIIFTLKNPDQSKQSFSIRFSVRDFTKLYVTDDPEFLARLCSYFFPVEKEIEYHKLYSEGINKYTN |
| | LQKEGIEAILELEKKLIERNRIQSAKNYLSFNEIMNKSGYNKDEQDDLKKVRNSLLHYKLIFEKEHLKKFYE |
| | VMRGEGIEKKWSLIV |
| IMG_ | MKVENIKEKSKKAMYLINHYEGPKKWCFAIVLNRACDNYEDNPHLFSKSLLEFEKTSRKDWFDEETRELV |
| 33000313312 | EQADTEIQPNPNLKPNTTANRKLKDIRNYFSHHYHKNECLYFKNDDPIRCIMEAAYEKSKIYIKGKQIEQSDI |
| SEQ ID NO: | PLPELFESSGWITPAGILLLASFFVERGILHRLMGNIGGFKDNRGEYGLTHDIFTTYCLKGSYSIRAQDHDAV |
| 4694 | MFRDILGYLSRVPTESFQRIKQPQIRKEGQLSERKTDKFITFALNYLEDYGLKDLEGCKACFARSKIVREQEN |
| | VESINDKEYKPHENKKKVEIHFDQSKEDRFYINRNNVILKIQKKDGHSNIVRMGVYELKYLVLMSLVGKAK |
| | EAVEKIDNYIQDLRDQLPYIEGKNKEEIKEYVRFFPRFIRSHLGLLQINDEEKIKARLDYVKTKWLDKKEKS |
| | KELELHKKGRDILRYINERCDRELNRNVYNRILELLVSKDLTGFYRELEELKRTRRIDKNIVQNLSGQKTIN |
| | ALHEKVCDLVLKEIESLDTENLRKYLGLIPKEEKEVTFKEKVDRILKQPVIYKGFLRYQFFKDDKKSFVLLV |
| | EDALKEKGGGCDVPLGKEYYKIVSLDKYDKENKTLCETLAMDRLCLMMARQYYLSLNAKLAQEAQQIE |
| | WKKEDSIELIIFTLKNPDQSKQSFSIRFSVRDFTKLYVTDDPEFLARLCSYFFPVEKEIEYHKLYSEGINKYTN |
| | LQKEGIEAILELEKKLIERNRIQSAKNYLSFNEIMNKSGYNKDEQDDLKKVRNSLLHYKLIFEKEHLKKFYE |
| | VMRGEGIEKKWSLIV |
| IMG_ | MKVENIKEKSKKAMYLINHYEGPKKWCFAIVLNRACDNYEDNPHLFSKSLLEFEKTSRKDWFDEETRELV |
| 3300031586_3 | EQADTEIQPNPNLKPNTTANRKLKDIRNYFSHHYHKNECLYFKNDDPIRCIMEAAYEKSKIYIKGKQIEQSDI |
| SEQ ID NO: | PLPELFESSGWITPAGILLLASFFVERGILHRLMGNIGGFKDNRGEYGLTHDIFTTYCLKGSYSIRAQDHDAV |
| 4695 | MFRDILGYLSRVPTESFQRIKQPQIRKEGQLSERKTDKFITFALNYLEDYGLKDLEGCKACFARSKIVREQEN |
| | VESINDKEYKPHENKKKVEIHFDQSKEDRFYINRNNVILKIQKKDGHSNIVRMGVYELKYLVLMSLVGKAK |
| | EAVEKIDNYIQDLRDQLPYIEGKNKEEIKEYVRFFPRFIRSHLGLLQINDEEKIKARLDYVKTKWLDKKEKS |
| | KELELHKKGRDILRYINERCDRELNRNVYNRILELLVSKDLTGFYRELEELKRTRRIDKNIVONLSGOKTIN |
| | ALHEKVCDLVLKEIESLDTENLRKYLGLIPKEEKEVTFKEKVDRILKQPVIYKGFLRYQFFKDDKKSFVLLV |
| | EDALKEKGGGCDVPLGKEYYKIVSLDKYDKENKTLCETLAMDRLCLMMARQYYLSLNAKLAQEAQQIE |
| | WKKEDSIELIIFTLKNPDQSKQSFSIRFSVRDFTKLYVTDDPEFLARLCSYFFPVEKEIEYHKLYSEGINKYTN |
| | LQKEGIEAILELEKKLIERNRIQSAKNYLSFNEIMNKSGYNKDEQDDLKKVRNSLLHYKLIFEKEHLKKFYE |
| | VMRGEGIEKKWSLIV |
| IMG_ | MKVENIKEKSKKAMYLINHYEGPKKWCFAIVLNRACDNYEDNPHLFSKSLLEFEKTSRKDWFDEETRELV |
| 3300031369_2 | EQADTEIQPNPNLKPNTTANRKLKDIRNYFSHHYHKNECLYFKNDDPIRCIMEAAYEKSKIYIKGKQIEQSDI |
| SEQ ID NO: | PLPELFESSGWITPAGILLLASFFVERGILHRLMGNIGGFKDNRGEYGLTHDIFTTYCLKGSYSIRAQDHDAV |
| 4696 | MFRDILGYLSRVPTESFQRIKQPQIRKEGQLSERKTDKFITFALNYLEDYGLKDLEGCKACFARSKIVREQEN |
| | VESINDKEYKPHENKKKVEIHFDQSKEDRFYINRNNVILKIQKKDGHSNIVRMGVYELKYLVLMSLVGKAK |
| | EAVEKIDNYIQDLRDQLPYIEGKNKEEIKEYVRFFPRFIRSHLGLLQINDEEKIKARLDYVKTKWLDKKEKS |
| | KELELHKKGRDILRYINERCDRELNRNVYNRILELLVSKDLTGFYRELEELKRTRRIDKNIVQNLSGQKTIN |
| | ALHEKVCDLVLKEIESLDTENLRKYLGLIPKEEKEVTFKEKVDRILKQPVIYKGFLRYQFFKDDKKSFVLLV |
| | EDALKEKGGGCDVPLGKEYYKIVSLDKYDKENKTLCETLAMDRLCLMMARQYYLSLNAKLAQEAQQIE |
| | WKKEDSIELIIFTLKNPDQSKQSFSIRFSVRDFTKLYVTDDPEFLARLCSYFFPVEKEIEYHKLYSEGINKYTN |
| | LQKEGIEAILELEKKLIERNRIQSAKNYLSFNEIMNKSGYNKDEQDDLKKVRNSLLHYKLIFEKEHLKKFYE |
| | VMRGEGIEKKWSLIV |
| IMG_ | MKVENIKEKSKKAMYLINHYEGPKKWCFAIVLNRACDNYEDNPHLFSKSLLEFEKTSRKDWFDEETRELV |
| 3300031864 | EQADTEIQPNPNLKPNTTANRKLKDIRNYFSHHYHKNECLYFKNDDPIRCIMEAAYEKSKIYIKGKQIEQSDI |
| SEQ ID NO: | PLPELFESSGWITPAGILLLASFFVERGILHRLMGNIGGFKDNRGEYGLTHDIFTTYCLKGSYSIRAQDHDAV |
| 4697 | MFRDILGYLSRVPTESFQRIKQPQIRKEGQLSERKTDKFITFALNYLEDYGLKDLEGCKACFARSKIVREQEN |
| | VESINDKEYKPHENKKKVEIHFDQSKEDRFYINRNNVILKIQKKDGHSNIVRMGVYELKYLVLMSLVGKAK |
| | EAVEKIDNYIQDLRDQLPYIEGKNKEEIKEYVRFFPRFIRSHLGLLQINDEEKIKARLDYVKTKWLDKKEKS |
| | KELELHKKGRDILRYINERCDRELNRNVYNRILELLVSKDLTGFYRELEELKRTRRIDKNIVQNLSGQKTIN |
| | ALHEKVCDLVLKEIESLDTENLRKYLGLIPKEEKEVTFKEKVDRILKQPVIYKGFLRYQFFKDDKKSFVLLV |
| | EDALKEKGGGCDVPLGKEYYKIVSLDKYDKENKTLCETLAMDRLCLMMARQYYLSLNAKLAQEAQQIE |
| | WKKEDSIELIIFTLKNPDQSKQSFSIRFSVRDFTKLYVTDDPEFLARLCSYFFPVEKEIEYHKLYSEGINKYTN |
| | LQKEGIEAILELEKKLIERNRIQSAKNYLSFNEIMNKSGYNKDEQDDLKKVRNSLLHYKLIFEKEHLKKFYE |
| | VMRGEGIEKKWSLIV |
| IMG_ | MKVENIKEKSKKAMYLINHYEGPKKWCFAIVLNRACDNYEDNPHLFSKSLLEFEKTSRKDWFDEETRELV |
| 3300031368 | EQADTEIQPNPNLKPNTTANRKLKDIRNYFSHHYHKNECLYFKNDDPIRCIMEAAYEKSKIYIKGKQIEQSDI |
| SEQ ID NO: | PLPELFESSGWITPAGILLLASFFVERGILHRLMGNIGGFKDNRGEYGLTHDIFTTYCLKGSYSIRAQDHDAV |
| 4698 | MFRDILGYLSRVPTESFQRIKQPQIRKEGQLSERKTDKFITFALNYLEDYGLKDLEGCKACFARSKIVREQEN |
| | VESINDKEYKPHENKKKVEIHFDQSKEDRFYINRNNVILKIQKKDGHSNIVRMGVYELKYLVLMSLVGKAK |
| | EAVEKIDNYIQDLRDQLPYIEGKNKEEIKEYVRFFPRFIRSHLGLLQINDEEKIKARLDYVKTKWLDKKEKS |
| | KELELHKKGRDILRYINERCDRELNRNVYNRILELLVSKDLTGFYRELEELKRTRRIDKNIVQNLSGQKTIN |
| | ALHEKVCDLVLKEIESLDTENLRKYLGLIPKEEKEVTFKEKVDRILKQPVIYKGFLRYQFFKDDKKSFVLLV |
| | EDALKEKGGGCDVPLGKEYYKIVSLDKYDKENKTLCETLAMDRLCLMMARQYYLSLNAKLAQEAQQIE |
| | WKKEDSIELIIFTLKNPDQSKQSFSIRFSVRDFTKLYVTDDPEFLARLCSYFFPVEKEIEYHKLYSEGINKYTN |
| | LQKEGIEAILELEKKLIERNRIQSAKNYLSFNEIMNKSGYNKDEQDDLKKVRNSLLHYKLIFEKEHLKKFYE |
| | VMRGEGIEKKWSLIV |
| IMG_ | MKVENIKEKSKKAMYLINHYEGPKKWCFAIVLNRACDNYEDNPHLFSKSLLEFEKTSRKDWFDEETRELV |
| 3300031575 | EQADTEIQPNPNLKPNTTANRKLKDIRNYFSHHYHKNECLYFKNDDPIRCIMEAAYEKSKIYIKGKQIEQSDI |
| SEQ ID NO: | PLPELFESSGWITPAGILLLASFFVERGILHRLMGNIGGFKDNRGEYGLTHDIFTTYCLKGSYSIRAQDHDAV |
| 4699 | MFRDILGYLSRVPTESFQRIKQPQIRKEGQLSERKTDKFITFALNYLEDYGLKDLEGCKACFARSKIVREQEN |
| | VESINDKEYKPHENKKKVEIHFDQSKEDRFYINRNNVILKIQKKDGHSNIVRMGVYELKYLVLMSLVGKAK |
| | EAVEKIDNYIQDLRDQLPYIEGKNKEEIKEYVRFFPRFIRSHLGLLQINDEEKIKARLDYVKTKWLDKKEKS |
| | KELELHKKGRDILRYINERCDRELNRNVYNRILELLVSKDLTGFYRELEELKRTRRIDKNIVQNLSGQKTIN |
| | ALHEKVCDLVLKEIESLDTENLRKYLGLIPKEEKEVTFKEKVDRILKQPVIYKGFLRYQFFKDDKKSFVLLV |
| | EDALKEKGGGCDVPLGKEYYKIVSLDKYDKENKTLCETLAMDRLCLMMARQYYLSLNAKLAQEAQQIE |
| | WKKEDSIELIIFTLKNPDQSKQSFSIRFSVRDFTKLYVTDDPEFLARLCSYFFPVEKEIEYHKLYSEGINKYTN |
| | LQKEGIEAILELEKKLIERNRIQSAKNYLSFNEIMNKSGYNKDEQDDLKKVRNSLLHYKLIFEKEHLKKFYE |
| | VMRGEGIEKKWSLIV |
| IMG_ | MKVENIKEKSKKAMYLINHYEGPKKWCFAIVLNRACDNYEDNPHLFSKSLLEFEKTSRKDWFDEETRELV |
| 3300031278_3 | EQADTEIQPNPNLKPNTTANRKLKDIRNYFSHHYHKNECLYFKNDDPIRCIMEAAYEKSKIYIKGKQIEQSDI |
| SEQ ID NO: | PLPELFESSGWITPAGILLLASFFVERGILHRLMGNIGGFKDNRGEYGLTHDIFTTYCLKGSYSIRAQDHDAV |
| 4700 | MFRDILGYLSRVPTESFQRIKQPQIRKEGQLSERKTDKFITFALNYLEDYGLKDLEGCKACFARSKIVREQEN |
| | VESINDKEYKPHENKKKVEIHFDQSKEDRFYINRNNVILKIQKKDGHSNIVRMGVYELKYLVLMSLVGKAK |
| | EAVEKIDNYIQDLRDQLPYIEGKNKEEIKEYVRFFPRFIRSHLGLLQINDEEKIKARLDYVKTKWLDKKEKS |
| | KELELHKKGRDILRYINERCDRELNRNVYNRILELLVSKDLTGFYRELEELKRTRRIDKNIVQNLSGQKTIN |
| | ALHEKVCDLVLKEIESLDTENLRKYLGLIPKEEKEVTFKEKVDRILKQPVIYKGFLRYQFFKDDKKSFVLLV |
| | EDALKEKGGGCDVPLGKEYYKIVSLDKYDKENKTLCETLAMDRLCLMMARQYYLSLNAKLAQEAQQIE |
| | WKKEDSIELIIFTLKNPDQSKQSFSIRFSVRDFTKLYVTDDPEFLARLCSYFFPVEKEIEYHKLYSEGINKYTN |
| | LQKEGIEAILELEKKLIERNRIQSAKNYLSFNEIMNKSGYNKDEQDDLKKVRNSLLHYKLIFEKEHLKKFYE |
| | VMRGEGIEKKWSLIV |
| IMG_ | MKVENIKEKSKKAMYLINHYEGPKKWCFAIVLNRACDNYEDNPHLFSKSLLEFEKTSRKDWFDEETRELV |
| 3300031356_3 | EQADTEIQPNPNLKPNTTANRKLKDIRNYFSHHYHKNECLYFKNDDPIRCIMEAAYEKSKIYIKGKQIEQSDI |
| SEQ ID NO: | PLPELFESSGWITPAGILLLASFFVERGILHRLMGNIGGFKDNRGEYGLTHDIFTTYCLKGSYSIRAQDHDAV |
| 4701 | MFRDILGYLSRVPTESFQRIKQPQIRKEGQLSERKTDKFITFALNYLEDYGLKDLEGCKACFARSKIVREQEN |
| | VESINDKEYKPHENKKKVEIHFDQSKEDRFYINRNNVILKIQKKDGHSNIVRMGVYELKYLVLMSLVGKAK |
| | EAVEKIDNYIQDLRDQLPYIEGKNKEEIKEYVRFFPRFIRSHLGLLQINDEEKIKARLDYVKTKWLDKKEKS |
| | KELELHKKGRDILRYINERCDRELNRNVYNRILELLVSKDLTGFYRELEELKRTRRIDKNIVQNLSGQKTIN |
| | ALHEKVCDLVLKEIESLDTENLRKYLGLIPKEEKEVTFKEKVDRILKQPVIYKGFLRYQFFKDDKKSFVLLV |
| | EDALKEKGGGCDVPLGKEYYKIVSLDKYDKENKTLCETLAMDRLCLMMARQYYLSLNAKLAQEAQQIE |
| | WKKEDSIELIIFTLKNPDQSKQSFSIRFSVRDFTKLYVTDDPEFLARLCSYFFPVEKEIEYHKLYSEGINKYTN |
| | LQKEGIEAILELEKKLIERNRIQSAKNYLSFNEIMNKSGYNKDEQDDLKKVRNSLLHYKLIFEKEHLKKFYE |
| | VMRGEGIEKKWSLIV |
| IMG_ | MKVENIKEKSKKAMYLINHYEGPKKWCFAIVLNRACDNYEDNPHLFSKSLLEFEKTSRKDWFDEETRELV |
| 3300031358_3 | EQADTEIQPNPNLKPNTTANRKLKDIRNYFSHHYHKNECLYFKNDDPIRCIMEAAYEKSKIYIKGKQIEQSDI |
| SEQ ID NO: | PLPELFESSGWITPAGILLLASFFVERGILHRLMGNIGGFKDNRGEYGLTHDIFTTYCLKGSYSIRAQDHDAV |
| 4702 | MFRDILGYLSRVPTESFQRIKQPQIRKEGQLSERKTDKFITFALNYLEDYGLKDLEGCKACFARSKIVREQEN |
| | VESINDKEYKPHENKKKVEIHFDQSKEDRFYINRNNVILKIQKKDGHSNIVRMGVYELKYLVLMSLVGKAK |
| | EAVEKIDNYIQDLRDQLPYIEGKNKEEIKEYVRFFPRFIRSHLGLLQINDEEKIKARLDYVKTKWLDKKEKS |
| | KELELHKKGRDILRYINERCDRELNRNVYNRILELLVSKDLTGFYRELEELKRTRRIDKNIVQNLSGQKTIN |
| | ALHEKVCDLVLKEIESLDTENLRKYLGLIPKEEKEVTFKEKVDRILKQPVIYKGFLRYQFFKDDKKSFVLLV |
| | EDALKEKGGGCDVPLGKEYYKIVSLDKYDKENKTLCETLAMDRLCLMMARQYYLSLNAKLAQEAQQIE |
| | WKKEDSIELIIFTLKNPDQSKQSFSIRFSVRDFTKLYVTDDPEFLARLCSYFFPVEKEIEYHKLYSEGINKYTN |
| | LQKEGIEAILELEKKLIERNRIQSAKNYLSFNEIMNKSGYNKDEQDDLKKVRNSLLHYKLIFEKEHLKKFYE |
| | VMRGEGIEKKWSLIV |
| IMG_ | MKVENIKEKSKKAMYLINHYEGPKKWCFAIVLNRACDNYEDNPHLFSKSLLEFEKTSRKDWFDEETRELV |
| 3300031553_2 | EQADTEIQPNPNLKPNTTANRKLKDIRNYFSHHYHKNECLYFKNDDPIRCIMEAAYEKSKIYIKGKQIEQSDI |
| SEQ ID NO: | PLPELFESSGWITPAGILLLASFFVERGILHRLMGNIGGFKDNRGEYGLTHDIFTTYCLKGSYSIRAQDHDAV |
| 4703 | MFRDILGYLSRVPTESFQRIKQPQIRKEGQLSERKTDKFITFALNYLEDYGLKDLEGCKACFARSKIVREQEN |
| | VESINDKEYKPHENKKKVEIHFDQSKEDRFYINRNNVILKIQKKDGHSNIVRMGVYELKYLVLMSLVGKAK |
| | EAVEKIDNYIQDLRDQLPYIEGKNKEEIKEYVRFFPRFIRSHLGLLQINDEEKIKARLDYVKTKWLDKKEKS |
| | KELELHKKGRDILRYINERCDRELNRNVYNRILELLVSKDLTGFYRELEELKRTRRIDKNIVQNLSGQKTIN |
| | ALHEKVCDLVLKEIESLDTENLRKYLGLIPKEEKEVTFKEKVDRILKQPVIYKGFLRYQFFKDDKKSFVLLV |
| | EDALKEKGGGCDVPLGKEYYKIVSLDKYDKENKTLCETLAMDRLCLMMARQYYLSLNAKLAQEAQQIE |
| | WKKEDSIELIIFTLKNPDQSKQSFSIRFSVRDFTKLYVTDDPEFLARLCSYFFPVEKEIEYHKLYSEGINKYTN |
| | LQKEGIEAILELEKKLIERNRIQSAKNYLSFNEIMNKSGYNKDEQDDLKKVRNSLLHYKLIFEKEHLKKFYE |
| | VMRGEGIEKKWSLIV |
| IMG_ | MKVENIKEKSKKAMYLINHYEGPKKWCFAIVLNRACDNYEDNPHLFSKSLLEFEKTSRKDWFDEETRELV |
| 3300031355 | EQADTEIQPNPNLKPNTTANRKLKDIRNYFSHHYHKNECLYFKNDDPIRCIMEAAYEKSKIYIKGKQIEQSDI |
| SEQ ID NO: | PLPELFESSGWITPAGILLLASFFVERGILHRLMGNIGGFKDNRGEYGLTHDIFTTYCLKGSYSIRAQDHDAV |
| 4704 | MFRDILGYLSRVPTESFQRIKQPQIRKEGQLSERKTDKFITFALNYLEDYGLKDLEGCKACFARSKIVREQEN |
| | VESINDKEYKPHENKKKVEIHFDQSKEDRFYINRNNVILKIQKKDGHSNIVRMGVYELKYLVLMSLVGKAK |
| | EAVEKIDNYIQDLRDQLPYIEGKNKEEIKEYVRFFPRFIRSHLGLLQINDEEKIKARLDYVKTKWLDKKEKS |
| | KELELHKKGRDILRYINERCDRELNRNVYNRILELLVSKDLTGFYRELEELKRTRRIDKNIVQNLSGQKTIN |
| | ALHEKVCDLVLKEIESLDTENLRKYLGLIPKEEKEVTFKEKVDRILKQPVIYKGFLRYQFFKDDKKSFVLLV |
| | EDALKEKGGGCDVPLGKEYYKIVSLDKYDKENKTLCETLAMDRLCLMMARQYYLSLNAKLAQEAQQIE |
| | WKKEDSIELIIFTLKNPDQSKQSFSIRFSVRDFTKLYVTDDPEFLARLCSYFFPVEKEIEYHKLYSEGINKYTN |
| | LQKEGIEAILELEKKLIERNRIQSAKNYLSFNEIMNKSGYNKDEQDDLKKVRNSLLHYKLIFEKEHLKKFYE |
| | VMRGEGIEKKWSLIV |
| IMG_ | MKVENIKEKSKKAMYLINHYEGPKKWCFAIVLNRACDNYEDNPHLFSKSLLEFEKTSRKDWFDEETRELV |
| 3300031379 | EQADTEIQPNPNLKPNTTANRKLKDIRNYFSHHYHKNECLYFKNDDPIRCIMEAAYEKSKIYIKGKQIEQSDI |
| SEQ ID NO: | PLPELFESSGWITPAGILLLASFFVERGILHRLMGNIGGFKDNRGEYGLTHDIFTTYCLKGSYSIRAQDHDAV |
| 4705 | MFRDILGYLSRVPTESFQRIKQPQIRKEGQLSERKTDKFITFALNYLEDYGLKDLEGCKACFARSKIVREQEN |
| | VESINDKEYKPHENKKKVEIHFDQSKEDRFYINRNNVILKIQKKDGHSNIVRMGVYELKYLVLMSLVGKAK |
| | EAVEKIDNYIQDLRDQLPYIEGKNKEEIKEYVRFFPRFIRSHLGLLQINDEEKIKARLDYVKTKWLDKKEKS |
| | KELELHKKGRDILRYINERCDRELNRNVYNRILELLVSKDLTGFYRELEELKRTRRIDKNIVQNLSGQKTIN |
| | ALHEKVCDLVLKEIESLDTENLRKYLGLIPKEEKEVTFKEKVDRILKQPVIYKGFLRYQFFKDDKKSFVLLV |
| | EDALKEKGGGCDVPLGKEYYKIVSLDKYDKENKTLCETLAMDRLCLMMARQYYLSLNAKLAQEAQQIE |
| | WKKEDSIELIIFTLKNPDQSKQSFSIRFSVRDFTKLYVTDDPEFLARLCSYFFPVEKEIEYHKLYSEGINKYTN |
| | LQKEGIEAILELEKKLIERNRIQSAKNYLSFNEIMNKSGYNKDEQDDLKKVRNSLLHYKLIFEKEHLKKFYE |
| | VMRGEGIEKKWSLIV |
| IMG_ | MKVENIKEKSKKAMYLINHYEGPKKWCFAIVLNRACDNYEDNPHLFSKSLLEFEKTSRKDWFDEETRELV |
| 3300031654_2 | EQADTEIQPNPNLKPNTTANRKLKDIRNYFSHHYHKNECLYFKNDDPIRCIMEAAYEKSKIYIKGKQIEQSDI |
| SEQ ID NO: | PLPELFESSGWITPAGILLLASFFVERGILHRLMGNIGGFKDNRGEYGLTHDIFTTYCLKGSYSIRAQDHDAV |
| 4706 | MFRDILGYLSRVPTESFQRIKQPQIRKEGQLSERKTDKFITFALNYLEDYGLKDLEGCKACFARSKIVREQEN |
| | VESINDKEYKPHENKKKVEIHFDQSKEDRFYINRNNVILKIQKKDGHSNIVRMGVYELKYLVLMSLVGKAK |
| | EAVEKIDNYIQDLRDQLPYIEGKNKEEIKEYVRFFPRFIRSHLGLLQINDEEKIKARLDYVKTKWLDKKEKS |
| | KELELHKKGRDILRYINERCDRELNRNVYNRILELLVSKDLTGFYRELEELKRTRRIDKNIVQNLSGQKTIN |
| | ALHEKVCDLVLKEIESLDTENLRKYLGLIPKEEKEVTFKEKVDRILKQPVIYKGFLRYQFFKDDKKSFVLLV |
| | EDALKEKGGGCDVPLGKEYYKIVSLDKYDKENKTLCETLAMDRLCLMMARQYYLSLNAKLAQEAQQIE |
| | WKKEDSIELIIFTLKNPDQSKQSFSIRFSVRDFTKLYVTDDPEFLARLCSYFFPVEKEIEYHKLYSEGINKYTN |
| | LQKEGIEAILELEKKLIERNRIQSAKNYLSFNEIMNKSGYNKDEQDDLKKVRNSLLHYKLIFEKEHLKKFYE |
| | VMRGEGIEKKWSLIV |
| IMG_ | MKVENIKEKSKKAMYLINHYEGPKKWCFAIVLNRACDNYEDNPHLFSKSLLEFEKTSRKDWFDEETRELV |
| 3300031257 | EQADTEIQPNPNLKPNTTANRKLKDIRNYFSHHYHKNECLYFKNDDPIRCIMEAAYEKSKIYIKGKQIEQSDI |
| SEQ ID NO: | PLPELFESSGWITPAGILLLASFFVERGILHRLMGNIGGFKDNRGEYGLTHDIFTTYCLKGSYSIRAQDHDAV |
| 4707 | MFRDILGYLSRVPTESFQRIKQPQIRKEGQLSERKTDKFITFALNYLEDYGLKDLEGCKACFARSKIVREQEN |
| | VESINDKEYKPHENKKKVEIHFDQSKEDRFYINRNNVILKIQKKDGHSNIVRMGVYELKYLVLMSLVGKAK |
| | EAVEKIDNYIQDLRDQLPYIEGKNKEEIKEYVRFFPRFIRSHLGLLQINDEEKIKARLDYVKTKWLDKKEKS |
| | KELELHKKGRDILRYINERCDRELNRNVYNRILELLVSKDLTGFYRELEELKRTRRIDKNIVQNLSGQKTIN |
| | ALHEKVCDLVLKEIESLDTENLRKYLGLIPKEEKEVTFKEKVDRILKQPVIYKGFLRYQFFKDDKKSFVLLV |
| | EDALKEKGGGCDVPLGKEYYKIVSLDKYDKENKTLCETLAMDRLCLMMARQYYLSLNAKLAQEAQQIE |
| | WKKEDSIELIIFTLKNPDQSKQSFSIRFSVRDFTKLYVTDDPEFLARLCSYFFPVEKEIEYHKLYSEGINKYTN |
| | LQKEGIEAILELEKKLIERNRIQSAKNYLSFNEIMNKSGYNKDEQDDLKKVRNSLLHYKLIFEKEHLKKFYE |
| | VMRGEGIEKKWSLIV |
| IMG_ | MKVENIKEKSKKAMYLINHYEGPKKWCFAIVLNRACDNYEDNPHLFSKSLLEFEKTSRKDWFDEETRELV |
| 3300031337_2 | EQADTEIQPNPNLKPNTTANRKLKDIRNYFSHHYHKNECLYFKNDDPIRCIMEAAYEKSKIYIKGKQIEQSDI |
| SEQ ID NO: | PLPELFESSGWITPAGILLLASFFVERGILHRLMGNIGGFKDNRGEYGLTHDIFTTYCLKGSYSIRAQDHDAV |
| 4708 | MFRDILGYLSRVPTESFQRIKQPQIRKEGQLSERKTDKFITFALNYLEDYGLKDLEGCKACFARSKIVREQEN |
| | VESINDKEYKPHENKKKVEIHFDQSKEDRFYINRNNVILKIQKKDGHSNIVRMGVYELKYLVLMSLVGKAK |
| | EAVEKIDNYIQDLRDQLPYIEGKNKEEIKEYVRFFPRFIRSHLGLLQINDEEKIKARLDYVKTKWLDKKEKS |
| | KELELHKKGRDILRYINERCDRELNRNVYNRILELLVSKDLTGFYRELEELKRTRRIDKNIVQNLSGQKTIN |
| | ALHEKVCDLVLKEIESLDTENLRKYLGLIPKEEKEVTFKEKVDRILKQPVIYKGFLRYQFFKDDKKSFVLLV |
| | EDALKEKGGGCDVPLGKEYYKIVSLDKYDKENKTLCETLAMDRLCLMMARQYYLSLNAKLAQEAQQIE |
| | WKKEDSIELIIFTLKNPDQSKQSFSIRFSVRDFTKLYVTDDPEFLARLCSYFFPVEKEIEYHKLYSEGINKYTN |
| | LQKEGIEAILELEKKLIERNRIQSAKNYLSFNEIMNKSGYNKDEQDDLKKVRNSLLHYKLIFEKEHLKKFYE |
| | VMRGEGIEKKWSLIV |
| IMG_ | MKVENIKEKSKKAMYLINHYEGPKKWCFAIVLNRACDNYEDNPHLFSKSLLEFEKTSRKDWFDEETRELV |
| 3300031280 | EQADTEIQPNPNLKPNTTANRKLKDIRNYFSHHYHKNECLYFKNDDPIRCIMEAAYEKSKIYIKGKQIEQSDI |
| SEQ ID NO: | PLPELFESSGWITPAGILLLASFFVERGILHRLMGNIGGFKDNRGEYGLTHDIFTTYCLKGSYSIRAQDHDAV |
| 4709 | MFRDILGYLSRVPTESFQRIKQPQIRKEGQLSERKTDKFITFALNYLEDYGLKDLEGCKACFARSKIVREQEN |
| | VESINDKEYKPHENKKKVEIHFDQSKEDRFYINRNNVILKIQKKDGHSNIVRMGVYELKYLVLMSLVGKAK |
| | EAVEKIDNYIQDLRDQLPYIEGKNKEEIKEYVRFFPRFIRSHLGLLQINDEEKIKARLDYVKTKWLDKKEKS |
| | KELELHKKGRDILRYINERCDRELNRNVYNRILELLVSKDLTGFYRELEELKRTRRIDKNIVQNLSGQKTIN |
| | ALHEKVCDLVLKEIESLDTENLRKYLGLIPKEEKEVTFKEKVDRILKQPVIYKGFLRYQFFKDDKKSFVLLV |
| | EDALKEKGGGCDVPLGKEYYKIVSLDKYDKENKTLCETLAMDRLCLMMARQYYLSLNAKLAQEAQQIE |
| | WKKEDSIELIIFTLKNPDQSKQSFSIRFSVRDFTKLYVTDDPEFLARLCSYFFPVEKEIEYHKLYSEGINKYTN |
| | LQKEGIEAILELEKKLIERNRIQSAKNYLSFNEIMNKSGYNKDEQDDLKKVRNSLLHYKLIFEKEHLKKFYE |
| | VMRGEGIEKKWSLIV |
| IMG_ | MKVENIKEKSKKAMYLINHYEGPKKWCFAIVLNRACDNYEDNPHLFSKSLLEFEKTSRKDWFDEETRELV |
| 3300031650_2 | EQADTEIQPNPNLKPNTTANRKLKDIRNYFSHHYHKNECLYFKNDDPIRCIMEAAYEKSKIYIKGKQIEQSDI |
| SEQ ID NO: | PLPELFESSGWITPAGILLLASFFVERGILHRLMGNIGGFKDNRGEYGLTHDIFTTYCLKGSYSIRAQDHDAV |
| 4710 | MFRDILGYLSRVPTESFQRIKQPQIRKEGQLSERKTDKFITFALNYLEDYGLKDLEGCKACFARSKIVREQEN |
| | VESINDKEYKPHENKKKVEIHFDQSKEDRFYINRNNVILKIQKKDGHSNIVRMGVYELKYLVLMSLVGKAK |
| | EAVEKIDNYIQDLRDQLPYIEGKNKEEIKEYVRFFPRFIRSHLGLLQINDEEKIKARLDYVKTKWLDKKEKS |
| | KELELHKKGRDILRYINERCDRELNRNVYNRILELLVSKDLTGFYRELEELKRTRRIDKNIVQNLSGQKTIN |
| | ALHEKVCDLVLKEIESLDTENLRKYLGLIPKEEKEVTFKEKVDRILKQPVIYKGFLRYQFFKDDKKSFVLLV |
| | EDALKEKGGGCDVPLGKEYYKIVSLDKYDKENKTLCETLAMDRLCLMMARQYYLSLNAKLAQEAQQIE |
| | WKKEDSIELIIFTLKNPDQSKQSFSIRFSVRDFTKLYVTDDPEFLARLCSYFFPVEKEIEYHKLYSEGINKYTN |
| | LQKEGIEAILELEKKLIERNRIQSAKNYLSFNEIMNKSGYNKDEQDDLKKVRNSLLHYKLIFEKEHLKKFYE |
| | VMRGEGIEKKWSLIV |
| IMG_ | MKVENIKEKSKKAMYLINHYEGPKKWCFAIVLNRACDNYEDNPHLFSKSLLEFEKTSRKDWFDEETRELV |
| 3300031275 | EQADTEIQPNPNLKPNTTANRKLKDIRNYFSHHYHKNECLYFKNDDPIRCIMEAAYEKSKIYIKGKQIEQSDI |
| SEQ ID NO: | PLPELFESSGWITPAGILLLASFFVERGILHRLMGNIGGFKDNRGEYGLTHDIFTTYCLKGSYSIRAQDHDAV |
| 4711 | MFRDILGYLSRVPTESFQRIKQPQIRKEGQLSERKTDKFITFALNYLEDYGLKDLEGCKACFARSKIVREQEN |
| | VESINDKEYKPHENKKKVEIHFDQSKEDRFYINRNNVILKIQKKDGHSNIVRMGVYELKYLVLMSLVGKAK |
| | EAVEKIDNYIQDLRDQLPYIEGKNKEEIKEYVRFFPRFIRSHLGLLQINDEEKIKARLDYVKTKWLDKKEKS |
| | KELELHKKGRDILRYINERCDRELNRNVYNRILELLVSKDLTGFYRELEELKRTRRIDKNIVQNLSGQKTIN |
| | ALHEKVCDLVLKEIESLDTENLRKYLGLIPKEEKEVTFKEKVDRILKQPVIYKGFLRYQFFKDDKKSFVLLV |
| | EDALKEKGGGCDVPLGKEYYKIVSLDKYDKENKTLCETLAMDRLCLMMARQYYLSLNAKLAQEAQQIE |
| | WKKEDSIELIIFTLKNPDQSKQSFSIRFSVRDFTKLYVTDDPEFLARLCSYFFPVEKEIEYHKLYSEGINKYTN |
| | LQKEGIEAILELEKKLIERNRIQSAKNYLSFNEIMNKSGYNKDEQDDLKKVRNSLLHYKLIFEKEHLKKFYE |
| | VMRGEGIEKKWSLIV |
| IMG_ | MKVENIKEKSKKAMYLINHYEGPKKWCFAIVLNRACDNYEDNPHLFSKSLLEFEKTSRKDWFDEETRELV |
| 3300032062_3 | EQADTEIQPNPNLKPNTTANRKLKDIRNYFSHHYHKNECLYFKNDDPIRCIMEAAYEKSKIYIKGKQIEQSDI |
| SEQ ID NO: | PLPELFESSGWITPAGILLLASFFVERGILHRLMGNIGGFKDNRGEYGLTHDIFTTYCLKGSYSIRAQDHDAV |
| 4712 | MFRDILGYLSRVPTESFQRIKQPQIRKEGOLSERKTDKFITFALNYLEDYGLKDLEGCKACFARSKIVREQEN |
| | VESINDKEYKPHENKKKVEIHFDQSKEDRFYINRNNVILKIQKKDGHSNIVRMGVYELKYLVLMSLVGKAK |
| | EAVEKIDNYIQDLR |
| IMG_ | MNPENIKEISKKAIYSIDQYKGAKKWCFAIVLNRACDNYEGNPHLFSESLLEFEKTNRKDWFDEETRELIEK |
| 33000316513 | ADTEIQPNPNLKPNTTANRKLKDIRNYFSHHYHKNECLYFKNDDPIRCIMEAAYEKAKIYIKGKQIEQSDIPL |
| SEQ ID NO: | PELFESSGCITPAGILLLASFFVERGILHRLMGNIGGFKDNRGEYGLTHDIFTTYCLKGSYSIQAQDHDAVMF |
| 4713 | RDILGYLSRVPTESFQRIKQPKIRKEGQLSERKTDKFIKFALNYLEHYGLKDLEGCKACFARSKIVREQEDVE |
| | SIDDKEYKPHENKKKVEIHFDQSKEYPFYINRNNVILKIQKKDGHYNIVRMGVYELKYLVLLSLSGKARDS |
| | VETIDQYIQGLRDQLPSYIEKKNEKEIQEYINFLPGFIRSHLGLLNTDDDKKLKARIAYVKAKWLDKKEKSK |
| | ELELHRKGRDILRYINERCDRELNRNVYNRILELLVGKDLAGFYRELEELKRTRRIDKNIVQNLSGQKTINA |
| | LHEKVCDLVLKEIESLDTENLKKYLGLIPKEEKEVTFKEKVNRILDQPVIYKGCRFHFT |
| IMG_ | MQVENIKKGSSQGMYSIEQYEGAKKWCFAIVLNRAQTNLQGNPKLFEETLTRFERIRKEDWFDQETKKLIY |
| 3300027901 | AKQEQNEVEEEIQKAADEKLRDLRNYFSHYFHTPDCLIFTQNDPVRIIMEKAYEKARFEQAKKEQEDISIEF |
| SEQ ID NO: | GELFEENGRITSAGVVFFASFFAERRFLNRLMGYVQGFTRTEGEYKITRDVFSTYCLRDSYSVKTPDHDAV |
| 4714 | MFRDILGYLSRVPSESYQRIKESQMRSETQLSERKTDKFILFALNYLEDYGLEDLADYTACFARTRIKREQD |
| | ENTOGKEQKPHRKKPRVEIHFERAEGDPFYIKHNNVILRTQKKGAQTYIFRMGVYELKYLVLLSLLGKGAE |
| | AVKRIDRYVHSLRNQLPHIEKKSTEEIEGYVRFLPRFVRSHLGLLGVDDEKKIKARVDYVKAKWLEKKEKS |
| | RELQLHRKGRDILRYINERCERPLNIDEYNRILELLVTKHLDGFYRELEELKKTRRIDKNIVCNLSRHKSVNA |
| | LHEKVCDLVVQELESLGREELKEYVGLIPKEEKEVSFEEKTDRVVKQPVIYKGFLRNEFFRESRKSFARLVE |
| | EAVREKGEVYDVPLGGEYYEIVSLDTFDKDNKRLYETLAMDRLLLMIARQYHLSLNKELAKRAQQIEWKK |
| | EDGEEVIIFTLKNPAQPEQSCSVRFSLRDYTKLYVMDDAEFLARLCDYFLPKDEEQIDYHRLYTQGMNRYT |
| | NLQREGIEAILELEKKTIGPEQPRPPKNYIPFSEIMDKSAYNEDDQKALRRVRNALLHHNLNFARADFKRFC |
| | GIMKREGIEKRWSLAV |
| IMG_ | MQVENIKKGSSQGMYSIEQYEGAKKWCFAIVLNRAQTNLQGNPKLFEETLTRFERIRKEDWFDQETKKLIY |
| 3300002053 | AKQEQNEVEEEIQKAADEKLRDLRNYFSHYFHTPDCLIFTQNDPVRIIMEKAYEKARFEQAKKEQEDISIEF |
| SEQ ID NO: | GELFEENGRITSAGVVFFASFFAERRFLNRLMGYVQGFTRTEGEYKITRDVFSTYCLRDSYSVKTPDHDAV |
| 4715 | MFRDILGYLSRVPSESYQRIKESQMRSETQLSERKTDKFILFALNYLEDYGLEDLADYTACFARTRIKREQD |
| | ENTOGKEQKPHRKKPRVEIHFERAEGDPFYIKHNNVILRTQKKGAQTYIFRMGVYELKYLVLLSLLGKGAE |
| | AVKRIDRYVHSLRNQLPHIEKKSTEEIEGYVRFLPRFVRSHLGLLGVDDEKKIKARVDYVKAKWLEKKEKS |
| | RELQLHRKGRDILRYINERCERPLNIDEYNRILELLVTKHLDGFYRELEELKKTRRIDKNIVCNLSRHKSVNA |
| | LHEKVCDLVVQELESLGREELKEYVGLIPKEEKEVSFEEKTDRVVKQPVIYKGFLRNEFFRESRKSFARLVE |
| | EAVREKGEVYDVPLGGEYYEIVSLDTFDKDNKRLYETLAMDRLLLMIARQYHLSLNKELAKRAQQIEWKK |
| | EDGEEVIIFTLKNPAQPEQSCSVRFSLRDYTKLYVMDDAEFLARLCDYFLPKDEEQIDYHRLYTQGMNRYT |
| | NLQREGIEAILELEKKTIGPEQPRPPKNYIPFSEIMDKSAYNEDDQKALRRVRNALLHHNLNFARADFKRFC |
| | GIMKREGIEKRWSLAV |
| IMG_ | MQVENIKKGSSQGMYSIEQYEGAKKWCFAIVLNRAQTNLQGNPKLFEETLTRFERIRKEDWFDQETKKLIY |
| 3300002052 | AKQEQNEVEEEIQKAADEKLRDLRNYFSHYFHTPDCLIFTQNDPVRIIMEKAYEKARFEQAKKEQEDISIEF |
| SEQ ID NO: | GELFEENGRITSAGVVFFASFFAERRFLNRLMGYVQGFTRTEGEYKITRDVFSTYCLRDSYSVKTPDHDAV |
| 4716 | MFRDILGYLSRVPSESYQRIKESQMRSETQLSERKTDKFILFALNYLEDYGLEDLADYTACFARTRIKREQD |
| | ENTOGKEQKPHRKKPRVEIHFERAEGDPFYIKHNNVILRTQKKGAQTYIFRMGVYELKYLVLLSLLGKGAE |
| | AVKRIDRYVHSLRNQLPHIEKKSTEEIEGYVRFLPRFVRSHLGLLGVDDEKKIKARVDYVKAKWLEKKEKS |
| | RELQLHRKGRDILRYINERCERPLNIDEYNRILELLVTKHLDGFYRELEELKKTRRIDKNIVCNLSRHKSVNA |
| | LHEKVCDLVVQELESLGREELKEYVGLIPKEEKEVSFEEKTDRVVKQPVIYKGFLRNEFFRESRKSFARLVE |
| | EAVREKGEVYDVPLGGEYYEIVSLDTFDKDNKRLYETLAMDRLLLMIARQYHLSLNKELAKRAQQIEWKK |
| | EDGEEVIIFTLKNPAQPEQSCSVRFSLRDYTKLYVMDDAEFLARLCDYFLPKDEEQIDYHRLYTQGMNRYT |
| | NLQREGIEAILELEKKTIGPEQPRPPKNYIPFSEIMDKSAYNEDDQKALRRVRNALLHHNLNFARADFKRFC |
| | GIMKREGIEKRWSLAV |
| IMG_ | MQVENIKKGSSQGMYSIEQYEGAKKWCFAIVLNRAQTNLQGNPKLFEETLTRFERIRKEDWFDQETKKLIY |
| 3300027888 | AKQEQNEVEEEIQKAADEKLRDLRNYFSHYFHTPDCLIFTQNDPVRIIMEKAYEKARFEQAKKEQEDISIEF |
| SEQ ID NO: | GELFEENGRITSAGVVFFASFFAERRFLNRLMGYVQGFTRTEGEYKITRDVFSTYCLRDSYSVKTPDHDAV |
| 4717 | MFRDILGYLSRVPSESYQRIKESQMRSETQLSERKTDKFILFALNYLEDYGLEDLADYTACFARTRIKREQD |
| | ENTOGKEQKPHRKKPRVEIHFERAEGDPFYIKHNNVILRTQKKGAQTYIFRMGVYELKYLVLLSLLGKGAE |
| | AVKRIDRYVHSLRNQLPHIEKKSTEEIEGYVRFLPRFVRSHLGLLGVDDEKKIKARVDYVKAKWLEKKEKS |
| | RELQLHRKGRDILRYINERCERPLNIDEYNRILELLVTKHLDGFYRELEELKKTRRIDKNIVCNLSRHKSVNA |
| | LHEKVCDLVVQELESLGREELKEYVGLIPKEEKEVSFEEKTDRVVKQPVIYKGFLRNEFFRESRKSFARLVE |
| | EAVREKGEVYDVPLGGEYYEIVSLDTFDKDNKRLYETLAMDRLLLMIARQYHLSLNKELAKRAQQIEWKK |
| | EDGEEVIIFTLKNPAQPEQSCSVRFSLRDYTKLYVMDDAEFLARLCDYFLPKDEEQIDYHRLYTQGMNRYT |
| | NLQREGIEAILELEKKTIGPEQPRPPKNYIPFSEIMDKSAYNEDDQKALRRVRNALLHHNLNFARADFKRFC |
| | GIMKREGIEKRWSLAV |
| IMG_ | MQVENIKKGSSQGMYSIEQYEGAKKWCFAIVLNRAQTNLQGNPKLFEETLTRFERIRKEDWFDQETKKLIY |
| 3300001752 | AKQEQNEVEEEIQKAADEKLRDLRNYFSHYFHTPDCLIFTQNDPVRIIMEKAYEKARFEQAKKEQEDISIEF |
| SEQ ID NO: | GELFEENGRITSAGVVFFASFFAERRFLNRLMGYVQGFTRTEGEYKITRDVFSTYCLRDSYSVKTPDHDAV |
| 4718 | MFRDILGYLSRVPSESYQRIKESQMRSETQLSERKTDKFILFALNYLEDYGLEDLADYTACFARTRIKREQD |
| | ENTOGKEQKPHRKKPRVEIHFERAEGDPFYIKHNNVILRTQKKGAQTYIFRMGVYELKYLVLLSLLGKGAE |
| | AVKRIDRYVHSLRNQLPHIEKKSTEEIEGYVRFLPRFVRSHLGLLGVDDEKKIKARVDYVKAKWLEKKEKS |
| | RELQLHRKGRDILRYINERCERPLNIDEYNRILELLVTKHLDGFYRELEELKKTRRIDKNIVCNLSRHKSVNA |
| | LHEKVCDLVVQELESLGREELKEYVGLIPKEEKEVSFEEKTDRVVKQPVIYKGFLRNEFFRESRKSFARLVE |
| | EAVREKGEVYDVPLGGEYYEIVSLDTFDKDNKRLYETLAMDRLLLMIARQYHLSLNKELAKRAQQIEWKK |
| | EDGEEVIIFTLKNPAQPEQSCSVRFSLRDYTKLYVMDDAEFLARLCDYFLPKDEEQIDYHRLYTQGMNRYT |
| | NLQREGIEAILELEKKTIGPEQPRPPKNYIPFSEIMDKSAYNEDDQKALRRVRNALLHHNLNFARADFKRFC |
| | GIMKREGIEKRWSLAV |
| IMG_ | MEFENIKKTSNKEVYSIEQYEGEKKWCFAIVLNRAQTNLEENPKLFEQTLTRFEKIMKQDWFNEETKKLIYE |
| 3300009529 | KEEENKVKEEIQIAASERLKNLRNYFSHYLHAPDCLIFNRNDTIRIIMEKAYEKSRFEAKKKQQEDISIEFPEL |
| SEQ ID NO: | FEEEDKITSAGVVFFVSFFIERRFLNRLMGYVQGFRKTEGEYNITRQVFSKYCLKDSYSVQAQDHDAVMFR |
| 4719 | DILGYLSRVPTEIYQHIKLTRKRSQDQLSERKTDKFILFALKYLEDYGLKDLADYTACFARSKIKRENEDTK |
| | ETDGNKHKFHREKPVVEIHFDKEKQDQFYIKRNNVILKAQKKGGQSNVFRMGVYELKYLVLLSLLGKAEE |
| | AIQRIDRYISSLKKQLPYLDKISNEEIQKSINFLPRFVRSRLGLLQVDDEKRLKTRLEYVKAKWTDKKEGSRK |
| | LELHRKGRDILRYINERCDRPLSRKEYNNILKFIVNKDFAGFYNELEELKRTRRLDKNIIQKLSGHTTLNALH |
| | ERVCDLVLQELGSLQSENLKEYIGLIPKEEKEVTFREKVDRILEQPVVYKGFLRYEFFKEDKKSFARLVEEAI |
| | KTKWSDFDIPLGEEYYNIPSLDRFDRTNKKLYETLAMDRLCLMMARQYYLRLNEKLAEKAQHIYWKKED |
| | GREVIIFKFQNPKEQKKSFSIRFSILDYTKMYVMDDPEFLSRLWEYFIPKEAKEIDYHKHYARAFDKYTNLQ |
| | KEGIDAILKLEGRIIERRKIKPAKNYIEFQEIMNRSGYNNDQQVALKRVRNALLHYNLNFEREHLKRFYGVV |
| | KREGIEKKWSLIV |
| IMG_ | MEFENIKKTSNKEVYSIEQYEGEKKWCFAIVLNRAQTNLEENPKLFEQTLTRFEKIMKQDWFNEETKKLIYE |
| 3300024433 | KEEENKVKEEIQIAASERLKNLRNYFSHYLHAPDCLIFNRNDTIRIIMEKAYEKSRFEAKKKQQEDISIEFPEL |
| SEQ ID NO: | FEEEDKITSAGVVFFVSFFIERRFLNRLMGYVQGFRKTEGEYNITRQVFSKYCLKDSYSVQAQDHDAVMFR |
| 4720 | DILGYLSRVPTEIYQHIKLTRKRSQDQLSERKTDKFILFALKYLEDYGLKDLADYTACFARSKIKRENEDTK |
| | ETDGNKHKFHREKPVVEIHFDKEKQDQFYIKRNNVILKAQKKGGQSNVFRMGVYELKYLVLLSLLGKAEE |
| | AIQRIDRYISSLKKQLPYLDKISNEEIQKSINFLPRFVRSRLGLLQVDDEKRLKTRLEYVKAKWTDKKEGSRK |
| | LELHRKGRDILRYINERCDRPLSRKEYNNILKFIVNKDFAGFYNELEELKRTRRLDKNIIQKLSGHTTLNALH |
| | ERVCDLVLQELGSLQSENLKEYIGLIPKEEKEVTFREKVDRILEQPVVYKGFLRYEFFKEDKKSFARLVEEAI |
| | KTKWSDFDIPLGEEYYNIPSLDRFDRTNKKLYETLAMDRLCLMMARQYYLRLNEKLAEKAQHIYWKKED |
| | GREVIIFKFQNPKEQKKSFSIRFSILDYTKMYVMDDPEFLSRLWEYFIPKEAKEIDYHKHYARAFDKYTNLQ |
| | KEGIDAILKLEGRIIERRKIKPAKNYIEFQEIMNRSGYNNDQQVALKRVRNALLHYNLNFEREHLKRFYGVV |
| | KREGIEKKWSLIV |
| IMG_ | MQFENIKDTGQKPIYSIDQYEGAKKWCFAIVLNRACDNYEDNPQLFSESLLRFEEVNRRDWFDKDIRDLIK |
| 3300031885 | KADTEDQIEPKRKPNTPVNRRLHDIRNYFSHSRHQDDCLYFKNDDPMRCIMEAAYEKAKIHIKGRQTEQSD |
| SEQ ID NO: | IPLPELFDANNKITSAGVLFLASFFVERGILHRLMGNIGGFKDNRGKYGLTHDIFTTYCLKDSYSIHASDPKV |
| 4721 | VLFRDIAGYLSLVACEYYPTYLSKIPKENAGEKSSDEEKYAERKTDKFILFALKYLEEFVLPSLKDDYLVDIG |
| | RIDIIREESKETEEKDEQYKPHPNQGKVKVVFDSINKELPYYINHNTVILRIQKNGVMAYSCKIGVNDLKYL |
| | LLLCLQGKTDKALDAIYNYLHSMQDPPEVVKIGATDKLFQGLPEFILKQSGIKVQDKNKEKAARIKYIRDK |
| | WEKKKSESADMELHRKGRDILRYVNWHCETPLGTEKYDQLLVLLVNKNFVVFGDELNQLKRTEIISKDILE |
| | KLSGFQTINTLHQKVCNLVLEELSSLEKNDPGKLAEHIGLVRKPAPENNPPPEYKEKVRRFVEQPMIYKGFL |
| | RDQFFVNKDQDGKKLKEQKTFAKLVEETLGQNADVPLGKDFYYVPNIEKDEKKNRFHKDNAVLYETLAL |
| | DRLCAMMARKCLTQINKNLAEKSEEIDWRNEDGKDFIYLKLVKSDRPQETFKIRFKVNDFAKLYVMDDPD |
| | FLGGLMKHFFPQEHSIEYHKLYRNGIERYTDRQKDGIEAILRLEDSVIRQKGMKPKPAKNYISFSEIMAQTD |
| | YPEHDQKVLNKVRRAVLHYHLKFEPADYNRFVDIMKKNKFWDGERKNKESRGR |
| IMG_ | MQFENIKDTGQKPIYSIDQYEGAKKWCFAIVLNRACDNYEDNPQLFSESLLRFEEVNRRDWFDKDIRDLIK |
| 3300031952 | KADTEDQIEPKRKPNTPVNRRLHDIRNYFSHSRHQDDCLYFKNDDPMRCIMEAAYEKAKIHIKGRQTEQSD |
| SEQ ID NO: | IPLPELFDANNKITSAGVLFLASFFVERGILHRLMGNIGGFKDNRGKYGLTHDIFTTYCLKDSYSIHASDPKV |
| 4722 | VLFRDIAGYLSLVACEYYPTYLSKIPKENAGGKSSDEEKYAERKTDKFILFALKYLEEFVLPSLKDDYLVDI |
| | GRIDIIREESKETEEKDEQYKPHPNQGKVKVVFDSINKELPYYINHNTVILRIQKNGVMAYSCKIGVNDLKY |
| | LLLLCLQGKTDKALDAIYNYLHSMQDPPEVVKIGATDKLFQGLPEFILKQSGIKVQDKNKEKAARIKYIRD |
| | KWEKKKSESADIELHRKGRDILRYVNWHCETPLGTEKYDQLLVLLVNKNFAGFGDELNQLKRTEIISKDIF |
| | EKLSGFKTINTLHQKVCNLVLEELSFFEKSNPEKLEEYIGLIRKPAPENNPPPEYKEKVRRFVEQPMIYKGFL |
| | RDQFFVNKDQDGKKLKEQKTFAKLVEETLGQNADVPLGKDFYYVPNIEKDEKKNRFHKDNAVLYETLAL |
| | DRLCAMMARKCLTQINKNLAEKSEEIDWRNEDGKDFIYLKLVKSDRPQETFKIRFKVNDFAKLYVMDDPD |
| | FLGGLMKHFFPQEHSIEYHKLYRNGIERYTDRQKDGIEAILRLEDSVIRQKGMKPKPAKNYISFSEIMAQTD |
| | YPEHDQKVLNKVRRALLHYHLKFEPADYNRFVDIMKKDKFWDGERKNEESRGK |
| GCA_ | MAQVSKQTSKKRELSIDEYQGARKWCFTIAFNKALVNRDKNDGLFVESLLRHEKYSKHDWYDEDTRALIK |
| 003644175.1_ | CSTQAANAKAEALRNYFSHYRHSPGCLTFTAEDELRTIMERAYERAIFECRRRETEVIIEFPSLFEGDRITTA |
| ASM364417v1_ | GVVFFVSFFVERRVLDRLYGAVSGLKKNEGQYKLTRKALSMYCLKDSRFTKAWDKRVLLFRDILAQLGRI |
| genomic | PAEAYEYYHGEQGDKKRANDNEGTNPKRHKDKFIEFALHYLEAQHSEICFGRRHIVREEAGAGDEHKKHR |
| SEQ ID NO: | TKGKVVVDFSKKDEDQSYYISKNNVIVRIDKNAGPRSYRMGLNELKYLVLLSLQGKGDDAIAKLYRYRQH |
| 4723 | VENILDVVKVTDKDNHVFLPRFVLEQHGIGRKAFKQRIDGRVKHVRGVWEKKKAATNEMTLHEKARDIL |
| | QYVNENCTRSFNPGEYNRLLVCLVGKDVENFQAGLKRLQLAERIDGRVYSIFAQTSTINEMHQVVCDQILN |
| | RLCRIGDQKLYDYVGLGKKDEIDYKQKVAWFKEHISIRRGFLRKKFWYDSKKGFAKLVEEHLESGGGQRD |
| | VGLDKKYYHIDAIGRFEGANPALYETLARDRLCLMMAQYFLGSVRKELGNKIVWSNDSIELPVEGSVGNE |
| | KSIVFSVSDYGKLYVLDDAEFLGRICEYFMPHEKGKIRYHTVYEKGFRAYNDLQKKCVEAVLAFEEKVVK |
| | AKKMSEKEGAHYIDFREILAQTMCKEAEKTAVNKVRRAFFHHHLKFVIDEFGLFSDVMKKYGIEKEWKFP |
| | VK |
| IMG_ | MAQVSKQTSKKRELSIDEYQGARKWCFTIAFNKALVNRDKNDGLFVESLLRHEKYSKHDWYDEDTRALIK |
| 3300014911 | CSTQAANAKAEALRNYFSHYRHSPGCLTFTAEDELRTIMERAYERAIFECRRRETEVIIEFPSLFEGDRITTA |
| SEQ ID NO: | GVVFFVSFFVERRVLDRLYGAVSGLKKNEGQYKLTRKALSMYCLKDSRFTKAWDKRVLLFRDILAQLGRI |
| 4724 | PAEAYEYYHGEQGDKKRANDNEGTNPKRHKDKFIEFALHYLEAQHSEICFGRRHIVREEAGAGDEHKKHR |
| | TKGKVVVDFSKKDEDQSYYISKNNVIVRIDKNAGPRSYRMGLNELKYLVLLSLQGKGDDAIAKLYRYRQH |
| | VENILDVVKVTDKDNHVFLPRFVLEQHGIGRKAFKQRIDGRVKHVRGVWEKKKAATNEMTLHEKARDIL |
| | QYVNENCTRSFNPGEYNRLLVCLVGKDVENFQAGLKRLQLAERIDGRVYSIFAQTSTINEMHQVVCDQILN |
| | RLCRIGDQKLYDYVGLGKKDEIDYKQKVAWFKEHISIRRGFLRKKFWYDSKKGFAKLVEEHLESGGGQRD |
| | VGLDKKYYHIDAIGRFEGANPALYETLARDRLCLMMAQYFLGSVRKELGNKIVWSNDSIELPVEGSVGNE |
| | KSIVFSVSDYGKLYVLDDAEFLGRICEYFMPHEKGKIRYHTVYEKGFRAYNDLQKKCVEAVLAFEEKVVK |
| | AKKMSEKEGAHYIDFREILAQTMCKEAEKTAVNKVRRAFFHHHLKFVIDEFGLFSDVMKKYGIEKEWKFP |
| | VK |
| IMG_ | MQTATQEQKQKQSIYSILNYQGQRKWCFAIVLNRALDNINPKRETETGKYKNKELFYKSLLRFEGIKKQPW |
| 3300031698 | FDETKAEKENVTAKEIIDSKDKAAELLLNLRNYFSHNYHTEKCLYFGTESQHKQIRLIMEAAYERAKAELT |
| SEQ ID NO: | GRRTGQEISAEAEKDKDGNIKKYKLSDVPWPPLFDEKDIITTAGVVFFASFFTEAGQIFRLMNWINGLKRND |
| 4725 | DKFNITRRALSFYSLPDSYAEAIAEYEVEEDGASRTIRYKAKIFKDILNYLRRIPSETYKLYHSGEENKISGKK |
| | EEKGEDENTPVERKTDKFAEFAMRYLEDFEGVRFARYRINTKTRENEVFFDEDELKKLIDKKGVPEQEKDK |
| | KFEDYRYYYVKNNAILKTEKGSIRIGINELKYFVLLSLDKMGQQAKEKINSFLSKFTGDNLGNREFIKANIEE |
| | LPPFILKKFDPLAEDKEKRIEKRVGASEKPLFSIDIL |
| IMG_ | MNGIELKKEEAAFYFNQAELNLKAIEDNIFDKERRKTLLNNPQILAKMENFIFNFRDVTKNAKGEIDCLLLK |
| 3300031365 | LRELRNFYSHYVHKRDVRELSKGEKPILEKYYQFAIESTGSENVKLEIIENDAWLADAGVLFFLCIFLKKSQ |
| SEQ ID NO: | ANKLISGISGFKRNDDTGQPRRNLFTYFSIREGYKVVPEMQKHFLLFSLVNHLSNQDDYIEKAHQPYDIGEG |
| 4726 | LFFHRIASTFLNISGILRNMKFYTYQSKRLVEQRGELKREKDIFAWEEPFQGNSYFEINGHKGVIGEDELKEL |
| | CYAFLIGNQDANKVEGRITQFLEKFRNANSVQQVKDDEMLKPEYFPANYFAESGVGRIKDRVLNRLNKAI |
| | KSNKAKKGEIIAYDKMREVMAFINNSLPVDEKLKPKDYKRYLGMVRFWDREKDNIKREFETKEWSKYLPS |
| | NFWTAKNLERVYGLAREKNAELFNKLKADVEKMDERELEKYQKINDAKDLANLRRLASDFGVKWEEKD |
| | WDEYSGQIKKQITDSQKLTIMKQRITAGLKKKHGIENLNLRITIDINKSRKAVLNRIAIPRGFVKRHILGWQE |
| | SEKVSKKIREAECEILLSKEYEELSKQFFQSKDYDKMTRINGLYEKNKLIALMAVYLMGQLRILFKEHTKLD |
| | DITKTTVDFKISDKVTVKIPFSNYPSLVYTMSSKYVDNIGNYGFSNKDKDKPILGKIDVIEKQRMEFIKEVLG |
| | FEKYLFDDKIIDKSKFADTATHISFAEIVEELVEKGWDKDRLTKLKDARNKALHGEILTGTSFDETKSLINEL |
| | KK |
| IMG_ | MNGIELKKEEAAFYFNQAELNLKAIEDNIFDKERRKTLLNNPQILAKMENFIFNFRDVTKNAKGEIDCLLLK |
| 3300032029_2 | LRELRNFYSHYVHKRDVRELSKGEKPILEKYYQFAIESTGSENVKLEIIENDAWLADAGVLFFLCIFLKKSQ |
| SEQ ID NO: | ANKLISGISGFKRNDDTGQPRRNLFTYFSIREGYKVVPEMQKHFLLFSLVNHLSNQDDYIEKAHQPYDIGEG |
| 4727 | LFFHRIASTFLNISGILRNMKFYTYQSKRLVEQRGELKREKDIFAWEEPFQGNSYFEINGHKGVIGEDELKEL |
| | CYAFLIGNQDANKVEGRITQFLEKFRNANSVQQVKDDEMLKPEYFPANYFAESGVGRIKDRVLNRLNKAI |
| | KSNKAKKGEIIAYDKMREVMAFINNSLPVDEKLKPKDYKRYLGMVRFWDREKDNIKREFETKEWSKYLPS |
| | NFWTAKNLERVYGLAREKNAELFNKLKADVEKMDERELEKYQKINDAKDLANLRRLASDFGVKWEEKD |
| | WDEYSGQIKKQITDSQKLTIMKQRITAGLKKKHGIENLNLRITIDINKSRKAVLNRIAIPRGFVKRHILGWQE |
| | SEKVSKKIREAECEILLSKEYEELSKQFFQSKDYDKMTRINGLYEKNKLIALMAVYLMGQLRILFKEHTKLD |
| | DITKTTVDFKISDKVTVKIPFSNYPSLVYTMSSKYVDNIGNYGFSNKDKDKPILGKIDVIEKQRMEFIKEVLG |
| | FEKYLFDDKIIDKSKFADTATHISFAEIVEELVEKGWDKDRLTKLKDARNKALHGEILTGTSFDETKSLINEL |
| | KK |
| IMG_ | MNGIELKKEEAAFYFNQAELNLKAIEDNIFDKERRKTLLNNPQILAKMENFIFNFRDVTKNAKGEIDCLLLK |
| 33000313313 | LRELRNFYSHYVHKRDVRELSKGEKPILEKYYQFAIESTGSENVKLEIIENDAWLADAGVLFFLCIFLKKSQ |
| SEQ ID NO: | ANKLISGISGFKRNDDTGQPRRNLFTYFSIREGYKVVPEMQKHFLLFSLVNHLSNQDDYIEKAHQPYDIGEG |
| 4728 | LFFHRIASTFLNISGILRNMKFYTYQSKRLVEQRGELKREKDIFAWEEPFQGNSYFEINGHKGVIGEDELKEL |
| | CYAFLIGNQDANKVEGRITQFLEKFRNANSVQQVKDDEMLKPEYFPANYFAESGVGRIKDRVLNRLNKAI |
| | KSNKAKKGEIIAYDKMREVMAFINNSLPVDEKLKPKDYKRYLGMVRFWDREKDNIKREFETKEWSKYLPS |
| | NFWTAKNLERVYGLAREKNAELFNKLKADVEKMDERELEKYQKINDAKDLANLRRLASDFGVKWEEKD |
| | WDEYSGQIKKQITDSQKLTIMKQRITAGLKKKHGIENLNLRITIDINKSRKAVLNRIAIPRGFVKRHILGWQE |
| | SEKVSKKIREAECEILLSKEYEELSKQFFQSKDYDKMTRINGLYEKNKLIALMAVYLMGQLRILFKEHTKLD |
| | DITKTTVDFKISDKVTVKIPFSNYPSLVYTMSSKYVDNIGNYGFSNKDKDKPILGKIDVIEKQRMEFIKEVLG |
| | FEKYLFDDKIIDKSKFADTATHISFAEIVEELVEKGWDKDRLTKLKDARNKALHGEILTGTSFDETKSLINEL |
| | KK |
| IMG_ | MNGIELKKEEAAFYFNQAELNLKAIEDNIFDKERRKTLLNNPQILAKMENFIFNFRDVTKNAKGEIDCLLLK |
| 3300031369 | LRELRNFYSHYVHKRDVRELSKGEKPILEKYYQFAIESTGSENVKLEIIENDAWLADAGVLFFLCIFLKKSQ |
| SEQ ID NO: | ANKLISGISGFKRNDDTGQPRRNLFTYFSIREGYKVVPEMQKHFLLFSLVNHLSNQDDYIEKAHQPYDIGEG |
| 4729 | LFFHRIASTFLNISGILRNMKFYTYQSKRLVEQRGELKREKDIFAWEEPFQGNSYFEINGHKGVIGEDELKEL |
| | CYAFLIGNQDANKVEGRITQFLEKFRNANSVQQVKDDEMLKPEYFPANYFAESGVGRIKDRVLNRLNKAI |
| | KSNKAKKGEIIAYDKMREVMAFINNSLPVDEKLKPKDYKRYLGMVRFWDREKDNIKREFETKEWSKYLPS |
| | NFWTAKNLERVYGLAREKNAELFNKLKADVEKMDERELEKYQKINDAKDLANLRRLASDFGVKWEEKD |
| | WDEYSGQIKKQITDSQKLTIMKQRITAGLKKKHGIENLNLRITIDINKSRKAVLNRIAIPRGFVKRHILGWQE |
| | SEKVSKKIREAECEILLSKEYEELSKQFFQSKDYDKMTRINGLYEKNKLIALMAVYLMGQLRILFKEHTKLD |
| | DITKTTVDFKISDKVTVKIPFSNYPSLVYTMSSKYVDNIGNYGFSNKDKDKPILGKIDVIEKQRMEFIKEVLG |
| | FEKYLFDDKIIDKSKFADTATHISFAEIVEELVEKGWDKDRLTKLKDARNKALHGEILTGTSFDETKSLINEL |
| | KK |
| IMG_ | MNGIELKKEEAAFYFNQAELNLKAIEDNIFDKERRKTLLNNPQILAKMENFIFNFRDVTKNAKGEIDCLLLK |
| 3300031278 | LRELRNFYSHYVHKRDVRELSKGEKPILEKYYQFAIESTGSENVKLEIIENDAWLADAGVLFFLCIFLKKSQ |
| SEQ ID NO: | ANKLISGISGFKRNDDTGQPRRNLFTYFSIREGYKVVPEMQKHFLLFSLVNHLSNQDDYIEKAHQPYDIGEG |
| 4730 | LFFHRIASTFLNISGILRNMKFYTYQSKRLVEQRGELKREKDIFAWEEPFQGNSYFEINGHKGVIGEDELKEL |
| | CYAFLIGNQDANKVEGRITQFLEKFRNANSVQQVKDDEMLKPEYFPANYFAESGVGRIKDRVLNRLNKAI |
| | KSNKAKKGEIIAYDKMREVMAFINNSLPVDEKLKPKDYKRYLGMVRFWDREKDNIKREFETKEWSKYLPS |
| | NFWTAKNLERVYGLAREKNAELFNKLKADVEKMDERELEKYQKINDAKDLANLRRLASDFGVKWEEKD |
| | WDEYSGQIKKQITDSQKLTIMKQRITAGLKKKHGIENLNLRITIDINKSRKAVLNRIAIPRGFVKRHILGWQE |
| | SEKVSKKIREAECEILLSKEYEELSKQFFQSKDYDKMTRINGLYEKNKLIALMAVYLMGQLRILFKEHTKLD |
| | DITKTTVDFKISDKVTVKIPFSNYPSLVYTMSSKYVDNIGNYGFSNKDKDKPILGKIDVIEKQRMEFIKEVLG |
| | FEKYLFDDKIIDKSKFADTATHISFAEIVEELVEKGWDKDRLTKLKDARNKALHGEILTGTSFDETKSLINEL |
| | KK |
| IMG_ | MNGIELKKEEAAFYFNQAELNLKAIEDNIFDKERRKTLLNNPQILAKMENFIFNFRDVTKNAKGEIDCLLLK |
| 3300031356 | LRELRNFYSHYVHKRDVRELSKGEKPILEKYYQFAIESTGSENVKLEIIENDAWLADAGVLFFLCIFLKKSQ |
| SEQ ID NO: | ANKLISGISGFKRNDDTGQPRRNLFTYFSIREGYKVVPEMQKHFLLFSLVNHLSNQDDYIEKAHQPYDIGEG |
| 4731 | LFFHRIASTFLNISGILRNMKFYTYQSKRLVEQRGELKREKDIFAWEEPFQGNSYFEINGHKGVIGEDELKEL |
| | CYAFLIGNQDANKVEGRITQFLEKFRNANSVQQVKDDEMLKPEYFPANYFAESGVGRIKDRVLNRLNKAI |
| | KSNKAKKGEIIAYDKMREVMAFINNSLPVDEKLKPKDYKRYLGMVRFWDREKDNIKREFETKEWSKYLPS |
| | NFWTAKNLERVYGLAREKNAELFNKLKADVEKMDERELEKYQKINDAKDLANLRRLASDFGVKWEEKD |
| | WDEYSGQIKKQITDSQKLTIMKQRITAGLKKKHGIENLNLRITIDINKSRKAVLNRIAIPRGFVKRHILGWQE |
| | SEKVSKKIREAECEILLSKEYEELSKQFFQSKDYDKMTRINGLYEKNKLIALMAVYLMGQLRILFKEHTKLD |
| | DITKTTVDFKISDKVTVKIPFSNYPSLVYTMSSKYVDNIGNYGFSNKDKDKPILGKIDVIEKQRMEFIKEVLG |
| | FEKYLFDDKIIDKSKFADTATHISFAEIVEELVEKGWDKDRLTKLKDARNKALHGEILTGTSFDETKSLINEL |
| | KK |
| IMG_ | MNGIELKKEEAAFYFNQAELNLKAIEDNIFDKERRKTLLNNPQILAKMENFIFNFRDVTKNAKGEIDCLLLK |
| 3300031358 | LRELRNFYSHYVHKRDVRELSKGEKPILEKYYQFAIESTGSENVKLEIIENDAWLADAGVLFFLCIFLKKSQ |
| SEQ ID NO: | ANKLISGISGFKRNDDTGQPRRNLFTYFSIREGYKVVPEMQKHFLLFSLVNHLSNQDDYIEKAHQPYDIGEG |
| 4732 | LFFHRIASTFLNISGILRNMKFYTYQSKRLVEQRGELKREKDIFAWEEPFQGNSYFEINGHKGVIGEDELKEL |
| | CYAFLIGNQDANKVEGRITQFLEKFRNANSVQQVKDDEMLKPEYFPANYFAESGVGRIKDRVLNRLNKAI |
| | KSNKAKKGEIIAYDKMREVMAFINNSLPVDEKLKPKDYKRYLGMVRFWDREKDNIKREFETKEWSKYLPS |
| | NFWTAKNLERVYGLAREKNAELFNKLKADVEKMDERELEKYQKINDAKDLANLRRLASDFGVKWEEKD |
| | WDEYSGQIKKQITDSQKLTIMKQRITAGLKKKHGIENLNLRITIDINKSRKAVLNRIAIPRGFVKRHILGWQE |
| | SEKVSKKIREAECEILLSKEYEELSKQFFQSKDYDKMTRINGLYEKNKLIALMAVYLMGQLRILFKEHTKLD |
| | DITKTTVDFKISDKVTVKIPFSNYPSLVYTMSSKYVDNIGNYGFSNKDKDKPILGKIDVIEKQRMEFIKEVLG |
| | FEKYLFDDKIIDKSKFADTATHISFAEIVEELVEKGWDKDRLTKLKDARNKALHGEILTGTSFDETKSLINEL |
| | KK |
| IMG_ | MNGIELKKEEAAFYFNQAELNLKAIEDNIFDKERRKTLLNNPQILAKMENFIFNFRDVTKNAKGEIDCLLLK |
| 3300031624_2 | LRELRNFYSHYVHKRDVRELSKGEKPILEKYYQFAIESTGSENVKLEIIENDAWLADAGVLFFLCIFLKKSQ |
| SEQ ID NO: | ANKLISGISGFKRNDDTGQPRRNLFTYFSIREGYKVVPEMQKHFLLFSLVNHLSNQDDYIEKAHQPYDIGEG |
| 4733 | LFFHRIASTFLNISGILRNMKFYTYQSKRLVEQRGELKREKDIFAWEEPFQGNSYFEINGHKGVIGEDELKEL |
| | CYAFLIGNQDANKVEGRITQFLEKFRNANSVQQVKDDEMLKPEYFPANYFAESGVGRIKDRVLNRLNKAI |
| | KSNKAKKGEIIAYDKMREVMAFINNSLPVDEKLKPKDYKRYLGMVRFWDREKDNIKREFETKEWSKYLPS |
| | NFWTAKNLERVYGLAREKNAELFNKLKADVEKMDERELEKYQKINDAKDLANLRRLASDFGVKWEEKD |
| | WDEYSGQIKKQITDSQKLTIMKQRITAGLKKKHGIENLNLRITIDINKSRKAVLNRIAIPRGFVKRHILGWQE |
| | SEKVSKKIREAECEILLSKEYEELSKQFFQSKDYDKMTRINGLYEKNKLIALMAVYLMGQLRILFKEHTKLD |
| | DITKTTVDFKISDKVTVKIPFSNYPSLVYTMSSKYVDNIGNYGFSNKDKDKPILGKIDVIEKQRMEFIKEVLG |
| | FEKYLFDDKIIDKSKFADTATHISFAEIVEELVEKGWDKDRLTKLKDARNKALHGEILTGTSFDETKSLINEL |
| | KK |
| IMG_ | MNGIELKKEEAAFYFNQAELNLKAIEDNIFDKERRKTLLNNPQILAKMENFIFNFRDVTKNAKGEIDCLLLK |
| 3300032062 | LRELRNFYSHYVHKRDVRELSKGEKPILEKYYQFAIESTGSENVKLEIIENDAWLADAGVLFFLCIFLKKSQ |
| SEQ ID NO: | ANKLISGISGFKRNDDTGQPRRNLFTYFSIREGYKVVPEMQKHFLLFSLVNHLSNQDDYIEKAHQPYDIGEG |
| 4734 | LFFHRIASTFLNISGILRNMKFYTYQSKRLVEQRGELKREKDIFAWEEPFQGNSYFEINGHKGVIGEDELKEL |
| | CYAFLIGNQDANKVEGRITQFLEKFRNANSVQQVKDDEMLKPEYFPANYFAESGVGRIKDRVLNRLNKAI |
| | KSNKAKKGEIIAYDKMREVMAFINNSLPVDEKLKPKDYKRYLGMVRFWDREKDNIKREFETKEWSKYLPS |
| | NFWTAKNLERVYGLAREKNAELFNKLKADVEKMDERELEKYQKINDAKDLANLRRLASDFGVKWEEKD |
| | WDEYSGQIKKQITDSQKLTIMKQRITAGLKKKHGIENLNLRITIDINKSRKAVLNRIAIPRGFVKRHILGWQE |
| | SEKVSKKIREAECEILLSKEYEELSKQFFQSKDYDKMTRINGLYEKNKLIALMAVYLMGQLRILFKEHTKLD |
| | DITKTTVDFKISDKVTVKIPFSNYPSLVYTMSSKYVDNIGNYGFSNKDKDKPILGKIDVIEKQRMEFIKEVLG |
| | FEKYLFDDKIIDKSKFADTATHISFAEIVEELVEKGWDKDRLTKLKDARNKALHGEILTGTSFDETKSLINEL |
| | KK |
| IMG_ | MNGIELKKEEAAFYFNQAELNLKAIEDNIFDKERRKTLLNNPQILAKMENFIFNFRDVTKNAKGEIDCLLLK |
| 3300031553 | LRELRNFYSHYVHKRDVRELSKGEKPILEKYYQFAIESTGSENVKLEIIENDAWLADAGVLFFLCIFLKKSQ |
| SEQ ID NO: | ANKLISGISGFKRNDDTGQPRRNLFTYFSIREGYKVVPEMQKHFLLFSLVNHLSNQDDYIEKAHQPYDIGEG |
| 4735 | LFFHRIASTFLNISGILRNMKFYTYQSKRLVEQRGELKREKDIFAWEEPFQGNSYFEINGHKGVIGEDELKEL |
| | CYAFLIGNQDANKVEGRITQFLEKFRNANSVQQVKDDEMLKPEYFPANYFAESGVGRIKDRVLNRLNKAI |
| | KSNKAKKGEIIAYDKMREVMAFINNSLPVDEKLKPKDYKRYLGMVRFWDREKDNIKREFETKEWSKYLPS |
| | NFWTAKNLERVYGLAREKNAELFNKLKADVEKMDERELEKYQKINDAKDLANLRRLASDFGVKWEEKD |
| | WDEYSGQIKKQITDSQKLTIMKQRITAGLKKKHGIENLNLRITIDINKSRKAVLNRIAIPRGFVKRHILGWQE |
| | SEKVSKKIREAECEILLSKEYEELSKQFFQSKDYDKMTRINGLYEKNKLIALMAVYLMGQLRILFKEHTKLD |
| | DITKTTVDFKISDKVTVKIPFSNYPSLVYTMSSKYVDNIGNYGFSNKDKDKPILGKIDVIEKQRMEFIKEVLG |
| | FEKYLFDDKIIDKSKFADTATHISFAEIVEELVEKGWDKDRLTKLKDARNKALHGEILTGTSFDETKSLINEL |
| | KK |
| IMG_ | MNGIELKKEEAAFYFNQAELNLKAIEDNIFDKERRKTLLNNPQILAKMENFIFNFRDVTKNAKGEIDCLLLK |
| 3300031355_2 | LRELRNFYSHYVHKRDVRELSKGEKPILEKYYQFAIESTGSENVKLEIIENDAWLADAGVLFFLCIFLKKSQ |
| SEQ ID NO: | ANKLISGISGFKRNDDTGQPRRNLFTYFSIREGYKVVPEMQKHFLLFSLVNHLSNQDDYIEKAHQPYDIGEG |
| 4736 | LFFHRIASTFLNISGILRNMKFYTYQSKRLVEQRGELKREKDIFAWEEPFQGNSYFEINGHKGVIGEDELKEL |
| | CYAFLIGNQDANKVEGRITQFLEKFRNANSVQQVKDDEMLKPEYFPANYFAESGVGRIKDRVLNRLNKAI |
| | KSNKAKKGEIIAYDKMREVMAFINNSLPVDEKLKPKDYKRYLGMVRFWDREKDNIKREFETKEWSKYLPS |
| | NFWTAKNLERVYGLAREKNAELFNKLKADVEKMDERELEKYQKINDAKDLANLRRLASDFGVKWEEKD |
| | WDEYSGQIKKQITDSQKLTIMKQRITAGLKKKHGIENLNLRITIDINKSRKAVLNRIAIPRGFVKRHILGWQE |
| | SEKVSKKIREAECEILLSKEYEELSKQFFQSKDYDKMTRINGLYEKNKLIALMAVYLMGQLRILFKEHTKLD |
| | DITKTTVDFKISDKVTVKIPFSNYPSLVYTMSSKYVDNIGNYGFSNKDKDKPILGKIDVIEKQRMEFIKEVLG |
| | FEKYLFDDKIIDKSKFADTATHISFAEIVEELVEKGWDKDRLTKLKDARNKALHGEILTGTSFDETKSLINEL |
| | KK |
| IMG_ | MNGIELKKEEAAFYFNQAELNLKAIEDNIFDKERRKTLLNNPQILAKMENFIFNFRDVTKNAKGEIDCLLLK |
| 33000315513 | LRELRNFYSHYVHKRDVRELSKGEKPILEKYYQFAIESTGSENVKLEIIENDAWLADAGVLFFLCIFLKKSQ |
| SEQ ID NO: | ANKLISGISGFKRNDDTGQPRRNLFTYFSIREGYKVVPEMQKHFLLFSLVNHLSNQDDYIEKAHQPYDIGEG |
| 4737 | LFFHRIASTFLNISGILRNMKFYTYQSKRLVEQRGELKREKDIFAWEEPFQGNSYFEINGHKGVIGEDELKEL |
| | CYAFLIGNQDANKVEGRITQFLEKFRNANSVQQVKDDEMLKPEYFPANYFAESGVGRIKDRVLNRLNKAI |
| | KSNKAKKGEIIAYDKMREVMAFINNSLPVDEKLKPKDYKRYLGMVRFWDREKDNIKREFETKEWSKYLPS |
| | NFWTAKNLERVYGLAREKNAELFNKLKADVEKMDERELEKYQKINDAKDLANLRRLASDFGVKWEEKD |
| | WDEYSGQIKKQITDSQKLTIMKQRITAGLKKKHGIENLNLRITIDINKSRKAVLNRIAIPRGFVKRHILGWQE |
| | SEKVSKKIREAECEILLSKEYEELSKQFFQSKDYDKMTRINGLYEKNKLIALMAVYLMGQLRILFKEHTKLD |
| | DITKTTVDFKISDKVTVKIPFSNYPSLVYTMSSKYVDNIGNYGFSNKDKDKPILGKIDVIEKQRMEFIKEVLG |
| | FEKYLFDDKIIDKSKFADTATHISFAEIVEELVEKGWDKDRLTKLKDARNKALHGEILTGTSFDETKSLINEL |
| | KK |
| IMG_ | MNGIELKKEEAAFYFNQAELNLKAIEDNIFDKERRKTLLNNPQILAKMENFIFNFRDVTKNAKGEIDCLLLK |
| 3300031586_4 | LRELRNFYSHYVHKRDVRELSKGEKPILEKYYQFAIESTGSENVKLEIIENDAWLADAGVLFFLCIFLKKSQ |
| SEQ ID NO: | ANKLISGISGFKRNDDTGQPRRNLFTYFSIREGYKVVPEMQKHFLLFSLVNHLSNQDDYIEKAHQPYDIGEG |
| 4738 | LFFHRIASTFLNISGILRNMKFYTYQSKRLVEQRGELKREKDIFAWEEPFQGNSYFEINGHKGVIGEDELKEL |
| | CYAFLIGNQDANKVEGRITQFLEKFRNANSVQQVKDDEMLKPEYFPANYFAESGVGRIKDRVLNRLNKAI |
| | KSNKAKKGEIIAYDKMREVMAFINNSLPVDEKLKPKDYKRYLGMVRFWDREKDNIKREFETKEWSKYLPS |
| | NFWTAKNLERVYGLAREKNAELFNKLKADVEKMDERELEKYQKINDAKDLANLRRLASDFGVKWEEKD |
| | WDEYSGQIKKQITDSQKLTIMKQRITAGLKKKHGIENLNLRITIDINKSRKAVLNRIAIPRGFVKRHILGWQE |
| | SEKVSKKIREAECEILLSKEYEELSKQFFQSKDYDKMTRINGLYEKNKLIALMAVYLMGQLRILFKEHTKLD |
| | DITKTTVDFKISDKVTVKIPFSNYPSLVYTMSSKYVDNIGNYGFSNKDKDKPILGKIDVIEKQRMEFIKEVLG |
| | FEKYLFDDKIIDKSKFADTATHISFAEIVEELVEKGWDKDRLTKLKDARNKALHGEILTGTSFDETKSLINEL |
| | KK |
| IMG_ | MNGIELKKEEAAFYFNQAELNLKAIEDNIFDKERRKTLLNNPQILAKMENFIFNFRDVTKNAKGEIDCLLLK |
| 3300031643_2 | LRELRNFYSHYVHKRDVRELSKGEKPILEKYYQFAIESTGSENVKLEIIENDAWLADAGVLFFLCIFLKKSQ |
| SEQ ID NO: | ANKLISGISGFKRNDDTGQPRRNLFTYFSIREGYKVVPEMQKHFLLFSLVNHLSNQDDYIEKAHQPYDIGEG |
| 4739 | LFFHRIASTFLNISGILRNMKFYTYQSKRLVEQRGELKREKDIFAWEEPFQGNSYFEINGHKGVIGEDELKEL |
| | CYAFLIGNQDANKVEGRITQFLEKFRNANSVQQVKDDEMLKPEYFPANYFAESGVGRIKDRVLNRLNKAI |
| | KSNKAKKGEIIAYDKMREVMAFINNSLPVDEKLKPKDYKRYLGMVRFWDREKDNIKREFETKEWSKYLPS |
| | NFWTAKNLERVYGLAREKNAELFNKLKADVEKMDERELEKYQKINDAKDLANLRRLASDFGVKWEEKD |
| | WDEYSGQIKKQITDSQKLTIMKQRITAGLKKKHGIENLNLRITIDINKSRKAVLNRIAIPRGFVKRHILGWQE |
| | SEKVSKKIREAECEILLSKEYEELSKQFFQSKDYDKMTRINGLYEKNKLIALMAVYLMGQLRILFKEHTKLD |
| | DITKTTVDFKISDKVTVKIPFSNYPSLVYTMSSKYVDNIGNYGFSNKDKDKPILGKIDVIEKQRMEFIKEVLG |
| | FEKYLFDDKIIDKSKFADTATHISFAEIVEELVEKGWDKDRLTKLKDARNKALHGEILTGTSFDETKSLINEL |
| | KK |
| IMG_ | MNGIELKKEEAAFYFNQAELNLKAIEDNIFDKERRKTLLNNPQILAKMENFIFNFRDVTKNAKGEIDCLLLK |
| 3300031654_3 | LRELRNFYSHYVHKRDVRELSKGEKPILEKYYQFAIESTGSENVKLEIIENDAWLADAGVLFFLCIFLKKSQ |
| SEQ ID NO: | ANKLISGISGFKRNDDTGQPRRNLFTYFSIREGYKVVPEMQKHFLLFSLVNHLSNQDDYIEKAHQPYDIGEG |
| 4740 | LFFHRIASTFLNISGILRNMKFYTYQSKRLVEQRGELKREKDIFAWEEPFQGNSYFEINGHKGVIGEDELKEL |
| | CYAFLIGNQDANKVEGRITQFLEKFRNANSVQQVKDDEMLKPEYFPANYFAESGVGRIKDRVLNRLNKAI |
| | KSNKAKKGEIIAYDKMREVMAFINNSLPVDEKLKPKDYKRYLGMVRFWDREKDNIKREFETKEWSKYLPS |
| | NFWTAKNLERVYGLAREKNAELFNKLKADVEKMDERELEKYQKINDAKDLANLRRLASDFGVKWEEKD |
| | WDEYSGQIKKQITDSQKLTIMKQRITAGLKKKHGIENLNLRITIDINKSRKAVLNRIAIPRGFVKRHILGWQE |
| | SEKVSKKIREAECEILLSKEYEELSKQFFQSKDYDKMTRINGLYEKNKLIALMAVYLMGQLRILFKEHTKLD |
| | DITKTTVDFKISDKVTVKIPFSNYPSLVYTMSSKYVDNIGNYGFSNKDKDKPILGKIDVIEKQRMEFIKEVLG |
| | FEKYLFDDKIIDKSKFADTATHISFAEIVEELVEKGWDKDRLTKLKDARNKALHGEILTGTSFDETKSLINEL |
| | KK |
| IMG_ | MNGIELKKEEAAFYFNQAELNLKAIEDNIFDKERRKTLLNNPQILAKMENFIFNFRDVTKNAKGEIDCLLLK |
| 33000316514 | LRELRNFYSHYVHKRDVRELSKGEKPILEKYYQFAIESTGSENVKLEIIENDAWLADAGVLFFLCIFLKKSQ |
| SEQ ID NO: | ANKLISGISGFKRNDDTGQPRRNLFTYFSIREGYKVVPEMQKHFLLFSLVNHLSNQDDYIEKAHQPYDIGEG |
| 4741 | LFFHRIASTFLNISGILRNMKFYTYQSKRLVEQRGELKREKDIFAWEEPFQGNSYFEINGHKGVIGEDELKEL |
| | CYAFLIGNQDANKVEGRITQFLEKFRNANSVQQVKDDEMLKPEYFPANYFAESGVGRIKDRVLNRLNKAI |
| | KSNKAKKGEIIAYDKMREVMAFINNSLPVDEKLKPKDYKRYLGMVRFWDREKDNIKREFETKEWSKYLPS |
| | NFWTAKNLERVYGLAREKNAELFNKLKADVEKMDERELEKYQKINDAKDLANLRRLASDFGVKWEEKD |
| | WDEYSGQIKKQITDSQKLTIMKQRITAGLKKKHGIENLNLRITIDINKSRKAVLNRIAIPRGFVKRHILGWQE |
| | SEKVSKKIREAECEILLSKEYEELSKQFFQSKDYDKMTRINGLYEKNKLIALMAVYLMGQLRILFKEHTKLD |
| | DITKTTVDFKISDKVTVKIPFSNYPSLVYTMSSKYVDNIGNYGFSNKDKDKPILGKIDVIEKQRMEFIKEVLG |
| | FEKYLFDDKIIDKSKFADTATHISFAEIVEELVEKGWDKDRLTKLKDARNKALHGEILTGTSFDETKSLINEL |
| | KK |
| IMG_ | MNGIELKKEEAAFYFNQAELNLKAIEDNIFDKERRKTLLNNPQILAKMENFIFNFRDVTKNAKGEIDCLLLK |
| 3300031337 | LRELRNFYSHYVHKRDVRELSKGEKPILEKYYQFAIESTGSENVKLEIIENDAWLADAGVLFFLCIFLKKSQ |
| SEQ ID NO: | ANKLISGISGFKRNDDTGQPRRNLFTYFSIREGYKVVPEMQKHFLLFSLVNHLSNQDDYIEKAHQPYDIGEG |
| 4742 | LFFHRIASTFLNISGILRNMKFYTYQSKRLVEQRGELKREKDIFAWEEPFQGNSYFEINGHKGVIGEDELKEL |
| | CYAFLIGNQDANKVEGRITQFLEKFRNANSVQQVKDDEMLKPEYFPANYFAESGVGRIKDRVLNRLNKAI |
| | KSNKAKKGEIIAYDKMREVMAFINNSLPVDEKLKPKDYKRYLGMVRFWDREKDNIKREFETKEWSKYLPS |
| | NFWTAKNLERVYGLAREKNAELFNKLKADVEKMDERELEKYQKINDAKDLANLRRLASDFGVKWEEKD |
| | WDEYSGQIKKQITDSQKLTIMKQRITAGLKKKHGIENLNLRITIDINKSRKAVLNRIAIPRGFVKRHILGWQE |
| | SEKVSKKIREAECEILLSKEYEELSKQFFQSKDYDKMTRINGLYEKNKLIALMAVYLMGQLRILFKEHTKLD |
| | DITKTTVDFKISDKVTVKIPFSNYPSLVYTMSSKYVDNIGNYGFSNKDKDKPILGKIDVIEKQRMEFIKEVLG |
| | FEKYLFDDKII |
| IMG_ | MNGIELKKEEAAFYFNQAELNLKAIEDNIFDKERRKTLLNNPQILAKMENFIFNFRDVTKNAKGEIDCLLLK |
| 3300031554_3 | LRELRNFYSHYVHKRDVRELSKGEKPILEKYYQFAIESTGSENVKLEIIENDAWLADAGVLFFLCIFLKKSQ |
| SEQ ID NO: | ANKLISGISGFKRNDDTGQPRRNLFTYFSIREGYKVVPEMQKHFLLFSLVNHLSNQDDYIEKAHQPYDIGEG |
| 4743 | LFFHRIASTFLNISGILRNMKFYTYQSKRLVEQRGELKREKDIFAWEEPFQGNSYFEINGHKGVIGEDELKEL |
| | CYAFLIGNQDANKVEGRITQFLEKFRNANSVQQVKDDEMLKPEYFPANYFAESGVGRIKDRVLNRLNKAI |
| | KSNKAKKGEIIAYDKMREVMAFINNSLPVDEKLKPKDYKRYLGMVRFWDREKDNIKREFETKEWSKYLPS |
| | NFWTAKNLERVYGLAREKNAELFNKLKADVEKMDERELEKYQKINDAKDLANLRRLASDFGVKWEEKD |
| | WDEYSGQIKKQITDSQKLTIMKQRITAGLKKKHGIENLNLRITIDINKSRKAVLNRIAIPRGFVKRHILGWQE |
| | SEKVSKKIREAECEILLSKEYEELSKQFFQSKDYDKMTRINGLYEKNKLIALMAVYLMGQLRILFKEHTKLD |
| | DITKTTVDFKISDKVTVKIPFSNYPSLVYTMSSKYVDNIGNYGFSNKDKDKPILGKIDVIEKQRMEFIKEVLG |
| | FEKYLFDDKIIDKSKFADTAT |
| IMG_ | MSGIELKKEEAAFYFNQAELNLKAIEVSIFDEGRRKTLLNNPKILAKVENFIFNSEDVTKNAKGEIDCLLSKL |
| 3300032020 | MELRNFYSHYVHKPDVKELSKGEKPILEKYYQFAIDATASADVKLEIIENDTWLTOAGVLLLLCMFLKKSQ |
| SEQ ID NO: | ANKLIGGISGFKRNDPTGQPRRNLFTYYSVREGYKVVPEMQKHFLLFALVNHLSNQDDYIEKAQQPYDIGE |
| 4744 | GLFFHRIASTFLDISGILRNMKFYTYQSKRLKEQRGELKREKDSFEWIEPFQGNSYFSVDGQKGVIGEDELKE |
| | LCYALLIGKQDANKVEGRITQFLKKFKNADDAQKVSDDEMLDRGNFPASYFAERRVGSIKDKILSSLEQAI |
| | KSYKTSGADVKAYNKMKEVMEFINNSLPVDEKLKRKDYKRYLGMVRLWGSERDNIKREFEAKGWSKYF |
| | TSGFWMAKNLERVYGLAREKNAELFNKLKTAVEKMDEREFVKYQQINDAKDLASLRQLANDFGVNWEE |
| | KDWEKYSGQIKKQITDSQKLTIMKQRITAGLKRKHGIENLNLRITIDSSKSRKAVLNRIAIPRGFVKKHILDW |
| | QGSEKVPKKIREAKCKILLSKEYEELSRQFYKVKDYDKMTQINSLYEKNKLIALMAVYLMEQLRIQLKEHT |
| | ELRNLDKTTVDFRISDKVTEKIPFSQYPSLVYAMSREYADNVDNYKFSEEDKKKLDKIKKNLFLGKIDIIEK |
| | QRMEFIKEVLGFEEYLFDDKIIDRSKFADTATHISFGEIVGELIGKGWDKDKLTKLEYARNKALHGEIPEATS |
| | FNEAKQLINELKK |
| IMG_ | MENIKLEKQKAAFYFNQAELNLKAIEGNIFDKGRRKTLFDNPKILSKVENFIFNFKDVTKNAKGEIDCLLSK |
| 3300032029 | LMELRNFYSHYVHKPDVKELSKGEKPLLERYYQIAIEATGSENVKLEIIENDKWLTDAGVLLFLCMFLKKS |
| SEQ ID NO: | QANKLISGISGFKRNDTFGQPRRNLFNYFSVRERYKVVPDMQKHFLLFVLVNHLSEQDDYIEKAQQPYNIG |
| 4745 | EGLFFHRIASTFLNVSGILRNMEFYTYQSKRLKEQRGELKREKDIFTWEEPFQGNSYFEINGHKGVIGEDELK |
| | ELCYALLSYNKSKYAVEQIEKFLKGFGEVKSEQEIRDSDILNESYFPTNYFAESNIGSIKEKILNRLGKTODSY |
| | KKTGTKIKPYDMMKEVMEFINNSLPADEKLKRKDYRRYLKMVRIWDSEKDNIKREFESKEWSKYFSSNFW |
| | MAKNLERVYGLAREKNAELFNKLKAVVEKMDEREFEKYRQINSAEDLASLRRLANDYGVKWEEKDWQE |
| | YSGQIKKQISDRQKLTIMKQRITAELKKKHGIENLNLRITIDSNKSRKAVLNRIAVPRGFVKEHILGWQGSEK |
| | VSKKTREAKCKILLSKEYEELSKQFFQTRNYDKMTQVNSLYEKNKLIAFMAVYRAIEHPV |
| IMG_ | MENIKLEKQKAAFYFNQAELNLKAIEGNIFDKGRRKTLFDNPKILSKVENFIFNFKDVTKNAKGEIDCLLSK |
| 3300031586_2 | LMELRNFYSHYVHKPDVKELSKGEKPLLERYYQIAIEATGSENVKLEIIENDKWLTDAGVLLFLCMFLKKS |
| SEQ ID NO: | QANKLISGISGFKRNDTFGQPRRNLFNYFSVRERYKVVPDMQKHFLLFVLVNHLSEQDDYIEKAQQPYNIG |
| 4746 | EGLFFHRIASTFLNVSGILRNMEFYTYQSKRLKEQRGELKREKDIFTWEEPFQGNSYFEINGHKGVIGEDELK |
| | ELCYALLSYNKSKYAVEQIEKFLKGFGEVKSEQEIRDSDILNESYFPTNYFAESNIGSIKEKILNRLGKTODSY |
| | KKTGTKIKPYDMMKEVMEFINNSLPADEKLKRKDYRRYLKMVRIWDSEKDNIKREFESKEWSKYFSSNFW |
| | MAKNLERVYGLAREKNAELFNKLKAVVEKMDEREFEKYRQINSAEDLASLRRLANDYGVKWEEKDWQE |
| | YSGQIKKQISDRQKLTIMKQRITAELKKKHGIENLNLRITIDSNKSRKAVLNRIAVPRGFVKEHILGWQGSEK |
| | VSKKTREAKCKILLSKEYEELSKQFFQTRNYDKMTQVNSLYEKNKLIAFMAVYLMGQLNIRFDKPTRLNEL |
| | EKAEVDFKISDKVTAKIPFSQYPSLVYAMSSKYADSVGSYKFENDEKNKPFLGKIDIIEKQRMEFIKEVLGFE |
| | EYLFEKKIIDKSKFADTATHISFREICDELIQKGWDENKLTNLKDARNAALHGEIPAETSFREAKPLINGLKK |
| IMG_ | MENIKLEKQKAAFYFNQAELNLKAIEGNIFDKGRRKTLFDNPKILSKVENFIFNFKDVTKNAKGEIDCLLSK |
| 33000315512 | LMELRNFYSHYVHKPDVKELSKGEKPLLERYYQIAIEATGSENVKLEIIENDKWLTDAGVLLFLCMFLKKS |
| SEQ ID NO: | QANKLISGISGFKRNDTFGQPRRNLFNYFSVRERYKVVPDMQKHFLLFVLVNHLSEQDDYIEKAQQPYNIG |
| 4747 | EGLFFHRIASTFLNVSGILRNMEFYTYQSKRLKEQRGELKREKDIFTWEEPFQGNSYFEINGHKGVIGEDELK |
| | ELCYALLSYNKSKYAVEQIEKFLKGFGEVKSEQEIRDSDILNESYFPTNYFAESNIGSIKEKILNRLGKTODSY |
| | KKTGTKIKPYDMMKEVMEFINNSLPADEKLKRKDYRRYLKMVRIWDSEKDNIKREFESKEWSKYFSSNFW |
| | MAKNLERVYGLAREKNAELFNKLKAVVEKMDEREFEKYRQINSAEDLASLRRLANDYGVKWEEKDWQE |
| | YSGQIKKQISDRQKLTIMKQRITAELKKKHGIENLNLRITIDSNKSRKAVLNRIAVPRGFVKEHILGWQGSEK |
| | VSKKTREAKCKILLSKEYEELSKQFFQTRNYDKMTQVNSLYEKNKLIAFMAVYLMGQLNIRFDKPTRLNEL |
| | EKAEVDFKISDKVTAKIPFSQYPSLVYAMSSKYADSVGSYKFENDEKNKPFLGKIDIIEKQRMEFIKEVLGFE |
| | EYLFEKKIIDKSKFADTATHISFREICDELIQKGWDENKLTNLKDARNAALHGEIPAETSFREAKPLINGLKK |
| IMG_ | MENIKLEKQKAAFYFNQAELNLKAIEGNIFDKGRRKTLFDNPKILSKVENFIFNFKDVTKNAKGEIDCLLSK |
| 3300031624_4 | LMELRNFYSHYVHKPDVKELSKGEKPLLERYYQIAIEATGSENVKLEIIENDKWLTDAGVLLFLCMFLKKS |
| SEQ ID NO: | QANKLISGISGFKRNDTFGQPRRNLFNYFSVRERYKVVPDMQKHFLLFVLVNHLSEQDDYIEKAQQPYNIG |
| 4748 | EGLFFHRIASTFLNVSGILRNMEFYTYQSKRLKEQRGELKREKDIFTWEEPFQGNSYFEINGHKGVIGEDELK |
| | ELCYALLSYNKSKYAVEQIEKFLKGFGEVKSEQEIRDSDILNESYFPTNYFAESNIGSIKEKILNRLGKTODSY |
| | KKTGTKIKPYDMMKEVMEFINNSLPADEKLKRKDYRRYLKMVRIWDSEKDNIKREFESKEWSKYFSSNFW |
| | MAKNLERVYGLAREKNAELFNKLKAVVEKMDEREFEKYRQINSAEDLASLRRLANDYGVKWEEKDWQE |
| | YSGQIKKQISDRQKLTIMKQRITAELKKKHGIENLNLRITIDSNKSRKAVLNRIAVPRGFVKEHILGWQGSEK |
| | VSKKTREAKCKILLSKEYEELSKQFFQTRNYDKMTQVNSLYEKNKLIAFMAVYLMGQLNIRFDKPTRLNEL |
| | EKAEVDFKISDKVTAKIPFSQYPSLVYAMSSKYADSVGSYKFENDEKNKPFLGKIDIIEKQRMEFIKEVLGFE |
| | EYLFEKKIIDKSKFADTATHISFREICDELIQKGWDENKLTNLKDARNAALHGEIPAETSFREAKPLINGLKK |
| IMG_ | MENIKLEKQKAAFYFNQAELNLKAIEGNIFDKGRRKTLFDNPKILSKVENFIFNFKDVTKNAKGEIDCLLSK |
| 3300031650_3 | LMELRNFYSHYVHKPDVKELSKGEKPLLERYYQIAIEATGSENVKLEIIENDKWLTDAGVLLFLCMFLKKS |
| SEQ ID NO: | QANKLISGISGFKRNDTFGQPRRNLFNYFSVRERYKVVPDMQKHFLLFVLVNHLSEQDDYIEKAQQPYNIG |
| 4749 | EGLFFHRIASTFLNVSGILRNMEFYTYQSKRLKEQRGELKREKDIFTWEEPFQGNSYFEINGHKGVIGEDELK |
| | ELCYALLSYNKSKYAVEQIEKFLKGFGEVKSEQEIRDSDILNESYFPTNYFAESNIGSIKEKILNRLGKTODSY |
| | KKTGTKIKPYDMMKEVMEFINNSLPADEKLKRKDYRRYLKMVRIWDSEKDNIKREFESKEWSKYFSSNFW |
| | MAKNLERVYGLAREKNAELFNKLKAVVEKMDEREFEKYRQINSAEDLASLRRLANDYGVKWEEKDWQE |
| | YSGQIKKQISDRQKLTIMKQRITAELKKKHGIENLNLRITIDSNKSRKAVLNRIAVPRGFVKEHILGWQGSEK |
| | VSKKTREAKCKILLSKEYEELSKQFFQTRNYDKMTQVNSLYEKNKLIAFMAVYLMGQLNIRFDKPTRLNEL |
| | EKAEVDFKISDKVTAKIPFSQYPSLVYAMSSKYADSVGSYKFENDEKNKPFLGKIDIIEKQRMEFIKEVLGFE |
| | EYLFEKKIIDKSKFADTATHISFREICDELIQKGWDENKLTNLKDARNAALHGEIPAETSFREAKPLINGLKK |
| IMG_ | MENIKLEKQKAAFYFNQAELNLKAIEGNIFDKGRRKTLFDNPKILSKVENFIFNFKDVTKNAKGEIDCLLSK |
| 3300031554_2 | LMELRNFYSHYVHKPDVKELSKGEKPLLERYYQIAIEATGSENVKLEIIENDKWLTOAGVLLFLCMFLKKS |
| SEQ ID NO: | QANKLISGISGFKRNDTFGQPRRNLFNYFSVRERYKVVPDMQKHFLLFVLVNHLSEQDDYIEKAQQPYNIG |
| 4750 | EGLFFHRIASTFLNVSGILRNMEFYTYQSKRLKEQRGELKREKDIFTWEEPFQGNSYFEINGHKGVIGEDELK |
| | ELCYALLSYNKSKYAVEQIEKFLKGFGEVKSEQEIRDSDILNESYFPTNYFAESNIGSIKEKILNRLGKTODSY |
| | KKTGTKIKPYDMMKEVMEFINNSLPADEKLKRKDYRRYLKMVRIWDSEKDNIKREFESKEWSKYFSSNFW |
| | MAKNLERVYGLAREKNAELFNKLKAVVEKMDEREFEKYRQINSAEDLASLRRLANDYGVKWEEKDWQE |
| | YSGQIKKQISDRQKLTIMKQRITAELKKKHGIENLNLRITIDSNKSRKAVLNRIAVPRGFVKEHILGWQGSEK |
| | VSKKTREAKCKILLSKEYEELSKQFFQTRNYDKMTQVNSLYEKNKLIAFMAVYLMGQLNIRFDKPTRLNEL |
| | EKAEVDFKISDKVTAKIPFSQYPSLVYAMSSKYADSVGSYKFENDEKNKPFLGKIDIIEKQRMEFIKEVLGFE |
| | EYLFEKKIIDKSKFADTATHISFREICDELIQKGWDENKLTNLKDARNAALHGEIPAETSFREAKPLINGLKK |
| IMG_ | MSPDFIKLEKQEAAFYFNQTELNLKAIESNIFDKQQRVILLNNPQILAKVGDFIFNFRDVTKNAKGEIDCLLL |
| 3300031331 | KLRELRNFYSHYVYTDDVKILSNGERPLLEKYYQFAIEATGSENVKLEIIESNNRLTEAGVLFFLCMFLKKS |
| SEQ ID NO: | QANKLISGISGFKRNDPTGQPRRNLFTYFSVREGYKVVPDMQKHFLLFVLVNHLSGQDDYIEKAQKPYDIG |
| 4751 | EGLFFHRIASTFLNISGILRNMEFYIYQSKRLKEQQGELKREKDIFPWIEPFQGNSYFEINGNKGIIGEDELKEL |
| | CYALLVAGKDVRAVEGKITQFLEKFKNADNAQQVEKDEMLDRNNFPANYFAESNIGSIKEKILNRLGKTD |
| | DSYNKTGTKIKPYDMMKEVMEFINNSLPADEKLKRKDYRRYLKMVRIWDSEKDNIKREFESKEWSKYFSS |
| | DFWMAKNLERVYGLAREKNAELFNKLKAVVEKMDEREFEKYRLINSAEDLASLRRLAKDFGLKWEEKD |
| | WQEYSGQIKKQISDRQKLTIMKQRITAELKKKHGIENLNLRITIDSNKSRKAVLNRIAVPRGFVKEHILGWQ |
| | GSEKVSKKTREAKCKILLSKEYEELSKQFFQTRNYDKMTQVNGLYEKNKLLAFMVVYLMERLNILLNKPT |
| | ELNELEKAEVDFKISDKVMAKIPFSQYPSLVYAMSSKYADSVGSYKFENDEKNKPFLGKIDTIEKQRMEFIK |
| | EVLGFEEYLFEKKIIDKSEFADTATHISFDE |
| IMG_ | MSPDFIKLEKQEAAFYFNQTELNLKAIESNIFDKQQRVILLNNPQILAKVGDFIFNFRDVTKNAKGEIDCLLL |
| 3300031278_2 | KLRELRNFYSHYVYTDDVKILSNGERPLLEKYYQFAIEATGSENVKLEIIESNNRLTEAGVLFFLCMFLKKS |
| SEQ ID NO: | QANKLISGISGFKRNDPTGQPRRNLFTYFSVREGYKVVPDMQKHFLLFVLVNHLSGQDDYIEKAQKPYDIG |
| 4752 | EGLFFHRIASTFLNISGILRNMEFYIYQSKRLKEQQGELKREKDIFPWIEPFQGNSYFEINGNKGIIGEDELKEL |
| | CYALLVAGKDVRAVEGKITQFLEKFKNADNAQQVEKDEMLDRNNFPANYFAESNIGSIKEKILNRLGKTD |
| | DSYNKTGTKIKPYDMMKEVMEFINNSLPADEKLKRKDYRRYLKMVRIWDSEKDNIKREFESKEWSKYFSS |
| | DFWMAKNLERVYGLAREKNAELFNKLKAVVEKMDEREFEKYRLINSAEDLASLRRLAKDFGLKWEEKD |
| | WQEYSGQIKKQISDRQKLTIMKQRITAELKKKHGIENLNLRITIDSNKSRKAVLNRIAVPRGFVKEHILGWQ |
| | GSEKVSKKTREAKCKILLSKEYEELSKQFFQTRNYDKMTQVNGLYEKNKLLAFMVVYLMERLNILLNKPT |
| | ELNELEKAEVDFKISDKVMAKIPFSQYPSLVYAMSSKYADSVGSYKFENDEKNKPFLGKIDTIEKQRMEFIK |
| | EVLGFEEYLFEKKIIDKSEFADTATHISFDEICNELIKKGWDKDKLTKLKDARNAALHGEIPAETSFREAKPLI |
| | NGLKK |
| IMG_ | MSPDFIKLEKQEAAFYFNQTELNLKAIESNILDKQQRMILLNNPRILAKVGNFIFNFRDVTKNAKGEIDCLLF |
| 3300031575_3 | KLEELRNFYSHYVHTDNVKELSNGEKPLLERYYQIAIQATRSEDVKFELFETRNENKITDAGVLFFLCMFLK |
| SEQ ID NO: | KSQANKLISGISGFKRNDPTGQPRRNLFTYFSAREGYKALPDMQKHFLLFTLVNYLSNQDEYISELKQYGEI |
| 4753 | GQGAFFNRIASTFLNISGISGNTKFYSYQSKRIKEQRGELNSEKDSFEWIEPFQGNSYFEINGHKGVIGEDELK |
| | ELCYALLVAKQDINAVEGKIMQFLKKFRNTGNLQQVKDDEMLEIEYFPASYFNESKKEDIKKEILGRLDKKI |
| | RSCSAKAEKAYDKMKEVMEFINNSLPAEEKLKRKDYRRYLKMVRFWSREKGNIEREFRTKEWSKYFSSDF |
| | WRKNNLEDVYKLATQKNAELFKNLKAAAEKMGETEFEKYQQINDVKDLASLRRLTQDFGLKWEEKDWE |
| | EYSEQIKKQITDRQKLTIMKQRVTAELKKKHGIENLNLRITIDSNKSRKAVLNRIAIPRGFVKKHILGWQGSE |
| | KISKNIREAECKILLSKKYEELSRQFFEAGNFDKLTQINGLYEKNKLTAFMSVYLMGRLNIQLNKHTELGNL |
| | KKTEVDFKISDKVTEKIPFSQYPSLVYAMSRKYVDNVDKYKFSHQDKKKPFLGKIDSIEKERIEFIKEVLDFE |
| | EYLFKNKVIDKSKFSDTATHISFKEICDEMGKKGCNRNKLTELNNARNAALHGEIPSETSFREAKPLINELK |
| | K |
| IMG_ | MSPDFIKLEKQEAAFYFNQTELNLKAIESNILDKQQRMILLNNPRILAKVGNFIFNFRDVTKNAKGEIDCLLF |
| 3300031356_2 | KLEELRNFYSHYVHTDNVKELSNGEKPLLERYYQIAIQATRSEDVKFELFETRNENKITDAGVLFFLCMFLK |
| SEQ ID NO: | KSQANKLISGISGFKRNDPTGQPRRNLFTYFSAREGYKALPDMQKHFLLFTLVNYLSNQDEYISELKQYGEI |
| 4754 | GQGAFFNRIASTFLNISGISGNTKFYSYQSKRIKEQRGELNSEKDSFEWIEPFQGNSYFEINGHKGVIGEDELK |
| | ELCYALLVAKQDINAVEGKIMQFLKKFRNTGNLQQVKDDEMLEIEYFPASYFNESKKEDIKKEILGRLDKKI |
| | RSCSAKAEKAYDKMKEVMEFINNSLPAEEKLKRKDYRRYLKMVRFWSREKGNIEREFRTKEWSKYFSSDF |
| | WRKNNLEDVYKLATQKNAELFKNLKAAAEKMGETEFEKYQQINDVKDLASLRRLTQDFGLKWEEKDWE |
| | EYSEQIKKQITDRQKLTIMKQRVTAELKKKHGIENLNLRITIDSNKSRKAVLNRIAIPRGFVKKHILGWQGSE |
| | KISKNIREAECKILLSKKYEELSRQFFEAGNFDKLTQINGLYEKNKLTAFMSVYLMGRLNIQLNKHTELGNL |
| | KKTEVDFKISDKVTEKIPFSQYPSLVYAMSRKYVDNVDKYKFSHQDKKKPFLGKIDSIEKERIEFIKEVLDFE |
| | EYLFKNKVIDKSKFSDTATHISFKEICDEMGKKGCNRNKLTELNNARNAALHGEIPSETSFREAKPLINELK |
| | K |
| IMG_ | MSPDFIKLEKQEAAFYFNQTELNLKAIESNILDKQQRMILLNNPRILAKVGNFIFNFRDVTKNAKGEIDCLLF |
| 3300031358_2 | KLEELRNFYSHYVHTDNVKELSNGEKPLLERYYQIAIQATRSEDVKFELFETRNENKITDAGVLFFLCMFLK |
| SEQ ID NO: | KSQANKLISGISGFKRNDPTGQPRRNLFTYFSAREGYKALPDMQKHFLLFTLVNYLSNQDEYISELKQYGEI |
| 4755 | GQGAFFNRIASTFLNISGISGNTKFYSYQSKRIKEQRGELNSEKDSFEWIEPFQGNSYFEINGHKGVIGEDELK |
| | ELCYALLVAKQDINAVEGKIMQFLKKFRNTGNLQQVKDDEMLEIEYFPASYFNESKKEDIKKEILGRLDKKI |
| | RSCSAKAEKAYDKMKEVMEFINNSLPAEEKLKRKDYRRYLKMVRFWSREKGNIEREFRTKEWSKYFSSDF |
| | WRKNNLEDVYKLATQKNAELFKNLKAAAEKMGETEFEKYQQINDVKDLASLRRLTQDFGLKWEEKDWE |
| | EYSEQIKKQITDRQKLTIMKQRVTAELKKKHGIENLNLRITIDSNKSRKAVLNRIAIPRGFVKKHILGWQGSE |
| | KISKNIREAECKILLSKKYEELSRQFFEAGNFDKLTQINGLYEKNKLTAFMSVYLMGRLNIQLNKHTELGNL |
| | KKTEVDFKISDKVTEKIPFSQYPSLVYAMSRKYVDNVDKYKFSHQDKKKPFLGKIDSIEKERIEFIKEVLDFE |
| | EYLFKNKVIDKSKFSDTATHISFKEICDEMGKKGCNRNKLTELNNARNAALHGEIPSETSFREAKPLINELK |
| | K |
| IMG_ | MINIELKKEEAAFYFNQANLNISGLDEVIEKQLPHIGSKKENAKKAIDKIFDNITVLKKVENFVFYFKDVAK |
| 3300031620_3 | NERVELDALLLKLIDLRNFYSHYVHNDNVKILSDGEETLLEKYYQIAIEATGSKDVKLEIIDNEKKLTDAGIL |
| SEQ ID NO: | FLLCMFLKKSQANKLISSISGFKRNDKEWQPRRNLFTYYSLREGYKVVPDMEKHFLLFTLVNHLSTQDENIE |
| 4756 | NTQPSDDIGRGLFFHRIASTFLNISGIFNNMEFYPYQSNRLKERRGDIAPDKDSFAWIEPFQGNSYFKINGYK |
| | GVIGENELKELCFAVLLHNKSKYAVEQIEKFLKCFKEVQSKQEIIECDILDECYFPANYLNQPETKSLKEKLL |
| | SRITGKINYSFDTAEKAFDKMKDVMEFINGCLPSDEKLKRKDYSRYLKMVRFWGGEKDNIKREFEGKKWT |
| | RFFPSELWHKRTLEDVYKFALKKNKKRLEELKVKIEGLNEDDLLKYQKVNNIKNLENLRLLAHDLDLSWR |
| | EKDWGEYSGQIKKQISDNQKLTIMKQRVIAELKKKHGIENINLRISLDSNKSIQAVLNRIAIPKGFIKRHVLH |
| | LQENEKTSRKIREAKCKILLSKKYEYLSRKFLDEKNFDKLTQINGLYEKNRLIAFMVIYLLKKLGLELKNET |
| | KLIELKKTRVKYKISDKVAEDIPLSHYPSLVYAMSRKYVDNIDNYEFPDEYAKKAILDKVDIIENQRMEFIK |
| | QVLGFEKYLFDNNIIDKSKFTDVETHISFVKIHDELIEKGWDTEKLSKLKHARNKALHGEIPGGTSFEKAKLL |
| | INELKK |
| IMG_ | MINIELKKEEAAFYFNQANLNISGLDEVIEKQLPHIGSKKENAKKAIDKIFDNITVLKKVENFVFYFKDVAK |
| 3300031586 | NERVELDALLLKLIDLRNFYSHYVHNDNVKILSDGEETLLEKYYQIAIEATGSKDVKLEIIDNEKKLTDAGIL |
| SEQ ID NO: | FLLCMFLKKSQANKLISSISGFKRNDKEWQPRRNLFTYYSLREGYKVVPDMEKHFLLFTLVNHLSTQDENIE |
| 4757 | NTQPSDDIGRGLFFHRIASTFLNISGIFNNMEFYPYQSNRLKERRGDIAPDKDSFAWIEPFQGNSYFKINGYK |
| | GVIGENELKELCFAVLLHNKSKYAVEQIEKFLKCFKEVQSKQEIIECDILDECYFPANYLNQPETKSLKEKLL |
| | SRITGKINYSFDTAEKAFDKMKDVMEFINGCLPSDEKLKRKDYSRYLKMVRFWGGEKDNIKREFEGKKWT |
| IMG_ | MINIELKKEEAAFYFNQANLNISGLDEVIEKQLPHIGSKKENAKKAIDKIFDNITVLKKVENFVFYFKDVAK |
| 3300031650 | NERVELDALLLKLIDLRNFYSHYVHNDNVKILSDGEETLLEKYYQIAIEATGSKDVKLEIIDNEKKLTDAGIL |
| SEQ ID NO: | FLLCMFLKKSQANKLISSISGFKRNDKEWQPRRNLFTYYSLREGYKVVPDMEKHFLLFTLVNHLSTQDENIE |
| 4758 | NTQPSDDIGRGLFFHRIASTFLNISGIFNNMEFYPYQSNRLKERRGDIAPDKDSFAWIEPFQGNSYFKINGYK |
| | GVIGENELKELCFAVLLHNKSKYAVEQIEKFLKCFKEVQSKQEIIECDILDECYFPANYLNQPETKSLKEKLL |
| | SRITGKINYSFDTAEKAFDKMKDVMEFINGCLPSDEKLKRKDYSRYLKMVRFWGGEKDNIKREFEGKKWT |
| | RFFPSELWHKR |
| IMG_ | MINIELKKEEAAFYFNQANLNISGLDEVIEKQLPHIGSKKENAKKAIDKIFDNITVLKKVENFVFYFKDVAK |
| 3300031624 | NERVELDALLLKLIDLRNFYSHYVHNDNVKILSDGEETLLEKYYQIAIEATGSKDVKLEIIDNEKKLTDAGIL |
| SEQ ID NO: | FLLCMFLKKSQANKLISSISGFKRNDKEWQPRRNLFTYYSLREGYKVVPDMEKHFLLFTLVNHLSTQDENIE |
| 4759 | NTQPSDDIGRGLFFHRIASTFLNISGIFNNMEFYPYQSNRLKERRGDIAPDKDSFAWIEPFQGNSYFKINGYK |
| | GVIGENELKELCFAVLLHNKSKYAVEQIEKFLKCFKEVQSKQEIIECDILDECYFPANYLNQPETKSLKEKLL |
| | SRITGKINYSFDTAEKAFDKMKDVMEFINGCLPSDEKLKRKDYSRYLKMVRFWGGEKDNIKREFEGKKWT |
| | RFFPSELWHKRTLEDVYKFALKKNKKRLEELKVKIEGLNEDDLLKYQKVNNIKNLENLRLLAHDLDLSWR |
| | EKDWGEYSGQIKKQISDNQKLTIMKQRVIAELKKKHGIENINLRISLDSNKSIQAVLNRIAIPKGFIKRHVLH |
| | LQENEKTSRKIREAKCKILLSKKYEYLSRKFLDEKNFDKLTQINGLYEKNRLIAFMVIYLLKQLGLELKNET |
| | KLIELKKTRVKYKISDKVAEDIPLSHYPSLVYAMSRKYVDNIDNYEFPDEYAKKAILDKVDIIENQRMEFIK |
| | QVLGFEKYLFDNNIIDKSKFTDVETHISFVKIHDELIEKGWDTEKLSKLKHARNKALHGEIPGGTSFEKAKLL |
| | INELKK |
| IMG_ | MINIELKKEEAAFYFNQANLNISGLDEVIEKQLPHIGSKKENAKKAIDKIFDNITVLKKVENFVFYFKDVAK |
| 3300031551 | NERVELDALLLKLIDLRNFYSHYVHNDNVKILSDGEETLLEKYYQIAIEATGSKDVKLEIIDNEKKLTDAGIL |
| SEQ ID NO: | FLLCMFLKKSQANKLISSISGFKRNDKEWQPRRNLFTYYSLREGYKVVPDMEKHFLLFTLVNHLSTQDENIE |
| 4760 | NTQPSDDIGRGLFFHRIASTFLNISGIFNNMEFYPYQSNRLKERRGDIAPDKDSFAWIEPFQGNSYFKINGYK |
| | GVIGENELKELCFAVLLHNKSKYAVEQIEKFLKCFKEVQSKQEIIECDILDECYFPANYLNQPETKSLKEKLL |
| | SRITGKINYSFDTAEKAFDKMKDVMEFINGCLPSDEKLKRKDYSRYLKMVRFWGGEKDNIKREFEGKKWT |
| | RFFPSELWHKRTLEDVYKFALKKNKKRLEELKVKIEGLNEDDLLKYQKVNNIKNLENLRLLAHDLDLSWR |
| | EKDWGEYSGQIKKKQISDNQKLTIMKQRVIAELKKKHGIENINLRISLDSNKSIQAVLNRIAIPKGFIKRHVLH |
| | LQENEKTSRKIREAKCKILLSKKYEYLSRKFLDEKNFDKLTQINGLYEKNRLIAFMVIYLLKQLGLELKNET |
| | KLIELKKTRVKYKISDKVAEDIPLSHYPSLVYAMSRKYVDNIDNYEFPDEYAKKAILDKVDIIENQRMEFIK |
| | QVLGFEKYLFDNNIIDKSKFTOVETHISFVKIHDELIEKGWDTEKLSKLKHARNKALHGEIPGGTSFEKAKLL |
| | INELKK |
| IMG_ | MINIELKKEEAAFYFNQANLNISGLDEVIEKQLPHIGSKKENAKKAIDKIFDNITVLKKVENFVFYFKDVAK |
| 3300032062_2 | NERVELDALLLKLIDLRNFYSHYVHNDNVKILSDGEETLLEKYYQIAIEATGSKDVKLEIIDNEKKLTDAGIL |
| SEQ ID NO: | FLLCMFLKKSQANKLISSISGFKRNDKEWQPRRNLFTYYSLREGYKVVPDMEKHFLLFTLVNHLSTQDENIE |
| 4761 | NTQPSDDIGRGLFFHRIASTFLNISGIFNNMEFYPYQSNRLKERRGDIAPDKDSFAWIEPFQGNSYFKINGYK |
| | GVIGENELKELCFAVLLHNKSKYAVEQIEKFLKCFKEVQSKQEIIECDILDECYFPANYLNQPETKSLKEKLL |
| | SRITGKINYSFDTAEKAFDKMKDVMEFINGCLPSDEKLKRKDYSRYLKMVRFWGGEKDNIKREFEGKKWT |
| | RFFPSELWHKRTLEDVYKFALKKNKKRLEELKVKIEGLNEDDLLKYQKVNNIKNLENLRLLAHDLDLSWR |
| | EKDWGEYSGQIKKQISDNQKLTIMKQRVIAELKKKHGIENINLRISLDSNKSIQAVLNRIAIPKGFIKRHVLH |
| | LQENEKTSRKIREAKCKILLSKKYEYLSRKFLDEKNFDKLTQINGLYEKNRLIAFMVIYLLKQLGLELKNET |
| | KLIELKKTRVKYKISDKVAEDIPLSHYPSLVYAMSRKYVDNIDNYEFPDEYAKKAILDKVDIIENQRMEFIK |
| | QVLGFEKYLFDNNIIDKSKFTDVETHISFVKIHDELIEKGWDTEKLSKLKHARNKALHGEIPGGTSFEKAKLL |
| | INELKK |
| IMG_ | MINIELKKEEAAFYFNQANLNISGLDEVIEKQLPHIGSKKENAKKAIDKIFDNITVLKKVENFVFYFKDVAK |
| 3300031554 | NERVELDALLLKLIDLRNFYSHYVHNDNVKILSDGEETLLEKYYQIAIEATGSKDVKLEIIDNEKKLTDAGIL |
| SEQ ID NO: | FLLCMFLKKSQANKLISSISGFKRNDKEWQPRRNLFTYYSLREGYKVVPDMEKHFLLFTLVNHLSTQDENIE |
| 4762 | NTQPSDDIGRGLFFHRIASTFLNISGIFNNMEFYPYQSNRLKERRGDIAPDKDSFAWIEPFQGNSYFKINGYK |
| | GVIGENELKELCFAVLLHNKSKYAVEQIEKFLKCFKEVQSKQEIIECDILDECYFPANYLNQPETKSLKEKLL |
| | SRITGKINYSFDTAEKAFDKMKDVMEFINGCLPSDEKLKRKDYSRYLKMVRFWGGEKDNIKREFEGKKWT |
| | RFFPSELWHKRTLEDVYKFALKKNKKRLEELKVKIEGLNEDDLLKYQKVNNIKNLENLRLLAHDLDLSWR |
| | EKDWGEYSGQIKKQISDNQKLTIMKQRVIAELKKKHGIENINLRISLDSNKSIQAVLNRIAIPKGFIKRHVLH |
| | LQENEKTSRKIREAKCKILLSKKYEYLSRKFLDEKNFDKLTQINGLYEKNRLIAFMVIYLLKQLGLELKNET |
| | KLIELKKTRVKYKISDKVAEDIPLSHYPSLVYAMSRKYVDNIDNYEFPDEYAKKAILDKVDIIENQRMEFIK |
| | QVLGFEKYLFDNNIIDKSKFTDVETHISFVKIHDELIEKGWDTEKLSKLKHARNKALHGEIPGGTSFEKAKLL |
| | INELKK |
| IMG_ | MNIIKLKKEEAAFYFNQTILNLSGLDEIIEKQIPHIISNKENAKKVIDKIFNNRLLLKSVENYIYNFKDVAKNA |
| 3300017991 | RTEIEAILLKLVELRNFYSHYVHNDTVKILSNGEKPILEKYYQIAIEATGSKNVKLVIIENNNCLTDSGVLFLL |
| SEQ ID NO: | CMFLKKSQANKLISSVSGFKRNDKEGQPRRNLFTYYSVREGYKVVPDMQKHFLLFALVNHLSEQDDHIEK |
| 4763 | QQQSDELGKGLFFHRIASTFLNESGIFNKMQFYTYQSNRLKEKRGELKHEKDTFTWIEPFQGNSYFTLNGH |
| | KGVISEDQLKELCYTILIEKQNVDSLEGKIIQFLKKFQNVSSKQQVDEDELLKREYFPANYFGRAGTGTLKE |
| | KILNRLDKRMDPTSKVTDKAYDKMIEVMEFINMCLPSDEKLRQKDYRRYLKMVRFWNKEKHNIKREFDS |
| | KKWTRFLPTELWNKRNLEEAYQLARKENKKKLEDMRNQVRSLKENDLEKYQQINYVNDLENLRLLSQEL |
| | GVKWQEKDWVEYSGQIKKQISDNQKLTIMKQRITAELKKMHGIENLNLRISIDTNKSRQTVMNRIALPKGF |
| | VKNHIQQNSSEKISKRIREDYCKIELSGKYEELSRQFFDKKNFDKMTLINGLCEKNKLIAFMVIYLLERLGFE |
| | LKEKTKLGELKQTRMTYKISDKVKEDIPLSYYPKLVYAMNRKYVDNIDSYAFAAYESKKAILDKVDIIEKQ |
| | RMEFIKQVLCFEEYIFENRIIEKSKFNDEETHISFTQIHDELIKKGRDTEKLSKLKHARNKALHGEIPDGTSFE |
| | KAKLLINEIKK |
| IMG_ | MNIIKLKKEEAAFYFNQTILNLSGLDEIIEKQIPHIISNKENAKKVIDKIFNNRLLLKSVENYIYNFKDVAKNA |
| 3300018080 | RTEIEAILLKLVELRNFYSHYVHNDTVKILSNGEKPILEKYYQIAIEATGSKNVKLVIIENNNCLTDSGVLFLL |
| SEQ ID NO: | CMFLKKSQANKLISSVSGFKRNDKEGQPRRNLFTYYSVREGYKVVPDMQKHFLLFALVNHLSEQDDHIEK |
| 4764 | QQQSDELGKGLFFHRIASTFLNESGIFNKMQFYTYQSNRLKEKRGELKHEKDTFTWIEPFQGNSYFTLNGH |
| | KGVISEDQLKELCYTILIEKQNVDSLEGKIIQFLKKFQNVSSKQQVDEDELLKREYFPANYFGRAGTGTLKE |
| | KILNRLDKRMDPTSKVTDKAYDKMIEVMEFINMCLPSDEKLRQKDYRRYLKMVRFWNKEKHNIKREFDS |
| | KKWTRFLPTELWNKRNLEEAYQLARKENKKKLEDMRNQVRSLKENDLEKYQQINYVNDLENLRLLSQEL |
| | GVKWQEKDWVEYSGQIKKQISDNQKLTIMKQRITAELKKMHGIENLNLRISIDTNKSRQTVMNRIALPKGF |
| | VKNHIQQNSSEKISKRIREDYCKIELSGKYEELSRQFFDKKNFDKMTLINGLCEKNKLIAFMVIYLLERLGFE |
| | LKEKTKLGELKQTRMTYKISDKVKEDIPLSYYPKLVYAMNRKYVDNIDSYAFAAYESKKAILDKVDIIEKQ |
| | RMEFIKQVLCFEEYIFENRIIEKSKFNDEETHISFTQIHDELIKKGRDTEKLSKLKHARNKALHGEIPDGTSFE |
| | KAKLLINEIKK |
| IMG_ | MKFKNLRNDNEGIALAIGFNLAVANLEYFYNHIHGKKNVDISKIISANRTHNANEKLADFIWHEAKFKLFY |
| 3300026534 | KTPEKTLQNNLTIIIKRLNNLRNYYSHFCHSDEVLKIGKDEVDLITKLFNNALAFEKDYSEEIILFENNSFTKE |
| SEQ ID NO: | GVIWFVALFLYKFQAKQLFPHISGFKKNTGLYKSKHKLFSFYCTDFKNTNVKNDDPDFEHFLQIIQYLNRNP |
| 4765 | FANENEDNFRKTNMFIHFVVKFFDDFNVFPEIEFLKKERYNNLNEDDTKNEISENNVYQYLINRNNIFFEWN |
| | IDNFNYKIEDNNQTKKLKGIIGYQTLVYLVYAAFLKPNYSIISDEVKKFYTTYNKLLEDINNFNNYLKDIEYV |
| | GEQNLPKVIRAKIEDTNDKVTLKQKVLNRIEFILFQLNNNQNGLNRNGKPLRPYDKIAIVTDYINSELTDSQ |
| | KNENIKKSKTKFNAVKYKEIMSYIRYYKRDKETLIKILKNERWKFKSKIIKLLEDNSSLEELFLSVTDLKKGK |
| | YTDLKKEVENNKSNISEVAKELNIKKTKERKIDNSYLTGIKSNGIALPAEFIKRKLLKINKNIFN |
| IMG_ | MKFKNLRNDNEGIALAIGFNLAVANLEYFYNHIHGKKNVDISKIISANRTHNANEKLADFIWHEAKFKLFY |
| 3300026534_2 | KTPEKTLQNNLTIIIKRLNNLRNYYSHFCHSDEVLKIGKDEVDLITKLFNNALAFEKDYSEEIILFENNSFTKE |
| SEQ ID NO: | GVIWFVALFLYKFQAKQLFPHISGFKKNTGLYKSKHKLFSFYCTDFKNTNVKNDDPDFEHFLQIIQYLNRNP |
| 4766 | FANENEDNFRKTNMFIHFVVKFFDDFNVFPEIEFLKKERYNNLNEDDTKNEISENNVYQYLINRNNIFFEWN |
| | IDNFNYKIEDNNQTKKLKGIIGYQTLVYLVYAAFLKPNYSIISDEVKKFYTTYNKLLEDINNFNNYLKDIEYV |
| | GEQNLPKVIRAKIEDTNDKVTLKQKVLNRIEFILFQLNNNQNGLNRNGKPLRPYDKIAIVTDYINSELTDSQ |
| | KNENIKKSKTKFNAVKYKEIMSYIRYYKRDKETLIKILKNERWKFKSKIIKLLEDNSSLEELFLSVTDLKKGK |
| | YTDLKKEVENNKSNISEVAKELNIKKTKERKIDNSYLTGIKSNGIALPAEFIKRKLLKINKNIFN |
| IMG_ | MASAAPFVQNNSGYKRESRPPRTPTQKEVFTGGKVDYTELTVFFNIAYFRLAGVIHHLMGKPYEFEIDDKG |
| 3300011249 | VTKIIGKRAIEKVYNEESITEWQTDKKVLAGLNDYLFKGFKKAKNSSGYEMDEKDEKLVIFMVKKFKSIRN |
| SEQ ID NO: | FHSHYYHDNTVLVFPKNEKETIIKLHNEAISALMATQPKEVEKYVESISKNPFFKEHDREFYMTREGKIFLLS |
| 4767 | FFLTRSEMARLLQQCKGFKRNDTAEFKIKQSVYRHFTHRDGAARQHYGQEENMLNSLEPNDKKDILNARQ |
| | AFKIISYLNDVPPEANDTELFPLFLENKPVVLVEEFRTFCNAHSIFSEITIVPLVKTVKDAENDKLTKDITLDN |
| | WLVVKMNDYDIQITKTTFHKLILDSLRRNDSGKLVEAQLLKFVDERNYLYELVKTFKPKGALSENNKLTLT |
| | DELDEYYRFKLRSDFLQKTMGKWLEGKEESPKQPVPRNYRYITESEKFVNRIKLEPIEVNYYDFYFEADEKP |
| | RAADLFMKYAVQYLIDFEKVRDWYFMVEHFEFVEETKTVMEYGVPVVNKFMVNKRIISYANTIEESKRLS |
| | LTPDNQIVVGFYTDTENKTVPPKNKFLLGARALKNLLIALHQSNDINPFFDDIVTDLNQIRKGVQPDDLTTL |
| | KNYDIPASYKYAINNESIDIEAQKAKAQKRIETLVTELRTLLGNTAPKMSRADKNRQIMRCYKYFDWKYA |
| | NSEFKFLRQDEYQQVSVYHYSLEKRRGKDLERGDLSFLLKGAIDHMPEVVKELLRASSHIDKLLESTIEKTI |
| | NKL |
| IMG_ | MASAAPFVQNNSGYKRESRPPRTPTQKEVFTGGKVDYTELTVFFNIAYFRLAGVIHHLMGKPYEFEIDDKG |
| 3300015024 | VTKIIGKRAIEKVYNEESITEWQTDKKVLAGLNDYLFKGFKKAKNSSGYEMDEKDEKLVIFMVKKFKSIRN |
| SEQ ID NO: | FHSHYYHDNTVLVFPKNEKETIIKLHNEAISALMATQPKEVEKYVESISKNPFFKEHDREFYMTREGKIFLLS |
| 4768 | FFLTRSEMARLLQQCKGFKRNDTAEFKIKQSVYRHFTHRDGAARQHYGQEENMLNSLEPNDKKDILNARQ |
| | AFKIISYLNDVPPEANDTELFPLFLENKPVVLVEEFRTFCNAHSIFSEITIVPLVKTVKMQKTTN |

[0331] In some embodiments, the small Cas proteins are small Cas 13c. Examples of small Cas13c are shown in Table 4 below.

TABLE 4

| Accession | |
|---|---|
| No. | Sequences |
| GCA_ | MKKLKNPSNRNSLPSIIISKFDSSKIYEIKVKYEKLARLDRLEIGDMSLDENLNILFKKVNFNGIDLEILNPL |
| 004116325.1_ | LLDFDSYTISGKLQKNSTNKTILTLKKDGKIIKYNVLEKDNKYFKNGKEFVIPKDVKEEGKRLVNDKFLL |
| ASM411632v1_ | TIEDKKREENSLPKKRKKETQRDILKDETIEIYKRISSNSNIKSEDIYRIKRYMLFRSDMMFFYTFIDNFFYC |
| genomic | LYKNKNEQLWNTNFKEKENLGKFIEFTLNDTLKNPRNGILKSYSKDLKVVQEDFVKIKDIFEKIRHALAH |
| SEQ ID NO: | FDFTFIDNLLSNNIEFDFNIKLLNIVIEDSQDLYYEAKKEFIEDEKMDILDEKDISIKKLYTFYSKIDIKKPAF |
| 4769 | NKLINSFLIKDGVENSKLKEYIKEKYNCHYFIDIHDNKEYKKIYNEHKKLISENQNLQLNSKENGQKIKIN |
| | NDRLEELKGKMNELTKANSLKRLEFKLRLAFGFIKVEYNIFKDFKNNFSEDIKKDMNIDLEKIKSYLDTS |
| | YSNNQFFNYKVYNKKTKQKDIDKDIFDDIEKETLKELVENDSLLKIILLFYIFTPKELKGEFLGFIKKFYHD |
| | TKNIDKDTKDKEEPLEQIKQEVPLKLKILEKNLTILTIFNYSISLNIEYDKNNNSFYERGNKFKKIYKDLKIS |
| | HNQEEFDKSLLAPLLKYYMNLYKLLNDFEIYLLLKYKNKDNLNKESLNKLINDEQLKHNDHYNFTTLLS |
| | EYFNFDPKKNKKYETLTILRNSISHQKIDNLIYNLDKNKILEQRVKIVELIKEQRDIKETLKFDPINDFTMK |
| | TVQLLKSLENQSEKRDKIEEILKQQDLSANDFYNIYKLKGVESIKKELFIRLGKTKIEEKIQEDIAKGSI |
| GCA_ | LNSIEKIKKPSNRNSIPSIIISDYDENKIKEIKVKYLKLARLDKITIQDMEIRDNIVEFKKILLNGIEHTIKDNQ |
| 002837275.1_ | KIEFDNYEITAYVRASKQRRDGKITQAKYVVTITDKYLRDNEKEKRFKSTERELPNDTLLMRYKQISGFD |
| ASM283727v1_ | TLTSKDIYKIKRYIDFKNEMLFYFQFIEEFFSPLLPKGTNFYSLNIEQNKDKVVKYIVYRLNDDFKNQSLN |
| genomic | QFIKKTDTIKYDFLKIQKILSDFRHALAHFDFDFIQKFFDDELDKNRFDISTISLIKTMLQEKEEKYYQEKN |
| SEQ ID NO: | NYIEDSDTLTLFDEKESNFSKIHNFYIKISQKKPAFNKLINSFLSKDGVPNEELKSYLATKKIDFFEDIHSNK |
| 4770 | EYKKIYIKHKNLVVEKQKEESQEKPNGQKLKNYNDELQKLKDEMNKITKQNSLNRLEVKLRLAFGFIAN |
| | EYNYNFKNFNDKFTLDVKKEQKIKVFKNSSNEKLKEYFESTFIEKRFFHFCVKFFNKKTKKEETKQKNIF |
| | NLIENETLEELVKESPLLQIITLLYLFIPKELQGEFVGFILKIYHHTKNITNDTKEDEKSIEDTQNSFSLKLKIL |
| | AKNLRGLQLFNYSLSHNTLYNTKEHFFYEKGNRWQSVYKSLEISHNQDEFDIHLVIPVIKYYINLNKLIGD |
| | FEIYALLTYADKNSITEKLSDITKRDDLKFRGYYNFSTLLFKTFMINTNYEQNQKSTQYIKQTRNDIAHQN |
| | IENMLKAFENNEIFAQREEIVNYLQKEHKMQEILHYNPINDFTMKTVQYLKSLNIHSQKESKIADIHKKES |
| | LVPNDYYLIYKLKVIELLKQKVIEAIGETKDEEKIKNAIAKEEQIKKGYNK |
| GCA_ | LNSIEKIKKPSNRNSIPSIIISDYDENKIKEIKVKYLKLARLDKITIQDMEIRDNIVEFKKILLNGIEHTIKDNQ |
| 003346755.1_ | KIEFDNYEITAYVRASKQRRDGKITQAKYVVTITDKYLRDNEKEKRFKSTERELPNDTLLMRYKQISGFD |
| ASM334675v1_ | TLTSKDIYKIKRYIDFKNEMLFYFQFIEEFFSPLLPKGTNFYSLNIEQNKDKVVKYIVYRLNDDFKNQSLN |
| genomic | QFIKKTDTIKYDFLKIQKILSDFRHALAHFDFDFIQKFFDDELDKNRFDISTISLIKTMLQEKEEKYYQEKN |
| SEQ ID NO: | NYIEDSDTLTLFDEKESNFSKIHNFYIKISQKKPAFNKLINSFLSKDGVPNEELKSYLATKKIDFFEDIHSNK |
| 4771 | EYKKIYIKHKNLVVEKQKEESQEKPNGQKLKNYNDELQKLKDEMNKITKQNSLNRLEVKLRLAFGFIAN |
| | EYNYNFKNFNDKFTLDVKKEQKIKVFKNSSNEKLKEYFESTFIEKRFFHFCVKFFNKKTKKEETKQKNIF |
| | NLIENETLEELVKESPLLQIITLLYLFIPKELQGEFVGFILKIYHHTKNITNDTKEDEKSIEDTQNSFSLKLKIL |
| | AKNLRGLQLFNYSLSHNTLYNTKEHFFYEKGNRWQSVYKSLEISHNQDEFDIHLVIPVIKYYINLNKLIGD |
| | FEIYALLTYADKNSITEKLSDITKRDDLKFRGYYNFSTLLFKTFMINTNYEQNQKSTQYIKQTRNDIAHQN |
| | IENMLKAFENNEIFAQREEIVNYLQKEHKMQEILHYNPINDFTMKTVQYLKSLNIHSQKESKIADIHKKES |
| | LVPNDYYLIYKLKVIELLKQKVIEAIGETKDEEKIKNAIAKEEQIKKGYNK |
| GCF_ | LNSIEKIKKPSNRNSIPSIIISDYDENKIKEIKVKYLKLARLDKITIQDMEIRDNIVEFKKILLNGIEHTIKDNQ |
| 003346755.1_ | KIEFDNYEITAYVRASKQRRDGKITQAKYVVTITDKYLRDNEKEKRFKSTERELPNDTLLMRYKQISGFD |
| ASM334675v1_ | TLTSKDIYKIKRYIDFKNEMLFYFQFIEEFFSPLLPKGTNFYSLNIEQNKDKVVKYIVYRLNDDFKNQSLN |
| genomic | QFIKKTDTIKYDFLKIQKILSDFRHALAHFDFDFIQKFFDDELDKNRFDISTISLIKTMLQEKEEKYYQEKN |
| SEQ ID NO: | NYIEDSDTLTLFDEKESNFSKIHNFYIKISQKKPAFNKLINSFLSKDGVPNEELKSYLATKKIDFFEDIHSNK |
| 4772 | EYKKIYIKHKNLVVEKQKEESQEKPNGQKLKNYNDELQKLKDEMNKITKQNSLNRLEVKLRLAFGFIAN |
| | EYNYNFKNFNDKFTLDVKKEQKIKVFKNSSNEKLKEYFESTFIEKRFFHFCVKFFNKKTKKEETKQKNIF |
| | NLIENETLEELVKESPLLQIITLLYLFIPKELQGEFVGFILKIYHHTKNITNDTKEDEKSIEDTQNSFSLKLKIL |
| | AKNLRGLQLFNYSLSHNTLYNTKEHFFYEKGNRWQSVYKSLEISHNQDEFDIHLVIPVIKYYINLNKLIGD |
| | FEIYALLTYADKNSITEKLSDITKRDDLKFRGYYNFSTLLFKTFMINTNYEQNQKSTQYIKQTRNDIAHQN |
| | IENMLKAFENNEIFAQREEIVNYLQKEHKMQEILHYNPINDFTMKTVQYLKSLNIHSQKESKIADIHKKES |
| | LVPNDYYLIYKLKVIELLKQKVIEAIGETKDEEKIKNAIAKEEQIKKGYNK |
| IMG_ | MEKIKKPSNRNSIPSIIISDYDANKIKEIKVKYLKLARLDKITIQDMEIVDNIVEFKKILLNGVEHTIIDNQKI |
| 3300028602 | EFDNYEITGCIKPSNKRRDGRISQAKYVVTITDKYLRENEKEKRFKSTERELPNNTLLSRYKQISGFDTLTS |
| SEQ ID NO: | KDIYKIKRYIDFKNEMLFYFQFIEEFFNPLLPKGKNFYDLNIEQNKDKVAKFIVYRLNDDFKNKSLNSYIT |
| 4773 | DTCMIINDFKKIQKILSDFRHALAHFDFDFIQKFFDDQLDKNKFDINTISLIETLLDQKEEKNYQEKNNYID |
| | DNDILTIFDEKGSKFSKLHNFYTKISQKKPAFNKLINSFLSQDGVPNEEFKSYLVTKKLDFFEDIHSNKEYK |
| | KIYIQHKNLVIKKQKEESQEKPDGQKLKNYNDELQKLKDEMNTITKQNSLNRLEVKLRLAFGFIANEYN |
| | YNFKNFNDEFTNDVKNEQKIKAFKNSSNEKLKEYFESTFIEKRFFHFSVNFFNKKTKKEETKQKNIFNSIE |
| | NETLEELVKESPLLQIITLLYLFIPRELQGEFVGFILKIYHHTKNITSDTKEDEISIEDAQNSFSLKFKILAKNL |
| | RGLQLFHYSLSHNTLYNNKQCFFYEKGNRWQSVYKSFQISHNQDEFDIHLVIPVIKYYINLNKLMGDFEI |
| | YALLKYADKNSITVKLSDITSRDDLKYNGHYNFATLLFKTFGIDTNYKQNKVSIQNIKKTRNNLAHQNIE |
| | NMLKAFENSEIFAQREEIVNYLQTEHRMQEVLHYNPINDFTMKTVQYLKSLSVHSQKEGKIADIHKKESL |
| | VPNDYYLIYKLKAIELLKQKVIEVIGESEDEKKIKNAIAKEEQIKKGNN |
| IMG_ | LQTLVQDNPLLQIITLLYLFIPKELQGDFIGFILHIYHQTKNITSDTKEDEISLEESQNSFALKLKVLAKSLRG |
| 3300000233 | LQLFNYSLSHDTLYNTKEHFFYEKGNRWKNIYKALGISHNTEEFDIHLVTPIIKYHINLYKLIGDFEIYALL |
| SEQ ID NO: | TFTKKSRSHETLSVISKSDALKFKENYNFSTLLSKAFRIDVNNKNNPPYIQTLKQIRNDISHQNIEKMMTAF |
| 4774 | EQNDIFEQRKEIIIYLQTDHQEMQKLLHYNPVNDFTMKTVQYCIMLDKYKMGVADNDEKIENRADLIIK |
| | NLKKETPNDYYLIYKLKAIELLKQKMIEAIGETEQEKKIRKAIAK |
| IMG_ | MSQLKNPSNKNSLPRIIISDFNEIKINEIKIKYHKLDRLDKIIVKEMEIINNKIFFKKILFNNQIKDINSENIELE |
| 3300019761 | NYILAGEVKPSNTKIILNRDGKEKSFIVYDGFTFKYKPNDKRISETKTNAKYILTIKDKTRHRESSTQRDIL |
| SEQ ID NO: | KSSIIETYKQISGFENITSKDIYTIKRYIDFKNEMMFYYTFIDDFFFPITGKNKQDKKNNFYNYKIKENAKKF |
| 4775 | ISLINYRINDDFKNKNGILYDYLSNKEEIIINDFIHIQTILKDVRHAIAHFNFDFIQKLFDNEQAFNSKFDGIEI |
| | LNILFNQKQEKYFEAQTNYIEEETIKILDEKELSFKKLHSFYSQICQKKPAFNKLINSFIIQDGIENKELKDYI |
| | SQKYNSKFDYYLDIHTCKIYKDIYNQHKKFVADKQFLENQKTDGQKIKKLNDQINQLKTKMNNLTKKN |
| | SLKRLEIKFRLAFGFIFTEYQTFKNFNERFIEDIKANKYSTKIELLDYGKIKEYISITHEEKRFFNYKTFNKK |
| | TNKNINKTIFQSLEKETFENLVKNDNLIKMMFLFQLLLPRELKGEFLGFILKIYHDLKNIDNDTKPDEKSLS |
| | ELNISTALKLKILVKNIRQINLFNYTISNNTKYEEKEKRFYEEGNQWKDIYKKLYISHDFDIFDIHLIIPIIKY |
| | NINLYKLIGDFEVYLLLKYLERNTNYKTLDKLIEAEELKYKGYYNFTTLLSKAINIALNDKEYHNITHLRN |
| | NTSHQDIQNIISSFKNNKLLEQRENIIELISKESLKKKLHFDPINDFTMKTLQLLKSLEVHSDKSEKIENLLK |
| | KEPLLPNDVYLLYKLKGIEFIKKELISNIGITKYEEKIQEKIAKGVEK |
| IMG_ | MVKNPANRHALPKVIISEVDNNNILEFKIKYEKLARLDKVEVKSMHFDNNKQVVFDEVVINGGLIEPTYE |
| 3300021977 | DKHKKLVVTAGEKSYSIVGQKVGGKPRLLEDRVSKTKVQLELTNYVEDKEGKKRVSKTERELIVADNIE |
| SEQ ID NO: | LYSQIVGREVKTTKEIYLIKRFLEYRSDLLFYYGFVDNFFKVAGNGKELWKIDFTNSDSLHLIEYFKFSIND |
| 4776 | NLKNDENYLKNYVSDNTKIENDLVKCQNNFNSLRHALMHFDYDFFEKLFNGEDVGFDFDIEFLNIMIDK |
| | VDKLNIDTKKEFIDDEEVTLFGEALSLKKLYGLFSHIAINRVAFNKLINSFIIEDGIENKELKDFFNNKKESQ |
| | AYEIDIHSNAEYKALYVQHKKLVMATSAMTDGDEIAKKNQEISDLKEKMKVITKENSLARLEHKLRLAF |
| | GFIYTEYKDYKTFKKHFDQDIKGAKYKGLNVEKLKEYYETTLKNSKPKTDEKLEDVAKKIDKLSLKELI |
| | DDDTLLKFVLLLFIFMPQELKGDFLGFIKKYYHDKKHIDQDTKDKDTEIEELSTGLKLKVLDKNIRSLSIL |
| | KHSFSFQVKYNRKDKNFYEDGNLHGKFYKKLSISHNQEEFNKSVYAPLFRYYSALYKLINDFEIYALAQ |
| | HVENHETLADQVNKSQFIQKSYFNFRKLLDNTDSISQSSSYNTLIVMRNDISHLSYEPLFNYPLDERKSYK |
| | KKTQKGVKTFHVELLYISRAKIIELISLQTDMKKLLGYDAVNDFNMKVVHLRKRLSVYANKEESIRKMQ |
| | ADAKTPNDFYNIYKVKGVESINQHLLKVIGVTEAEKSIEKQINEGNKKHNT |
| IMG_ | MIKNPSNRYALPKVIISKIDNQNILEFKIKYKKLSKLDIVKVKSMHYDDRAIIFDEVIVNDGLIDVEYRDNH |
| 3300026521 | KTIFVKVGNKSYSISGQKVGGKERLLENRVSKTKVQLELKDKATNRVSKTERELIVDDNIKIYSQIVGRD |
| SEQ ID NO: | VKTTKDIYLIKRFLAYRSDLLFYYGFVNNFFHVANNRSEFWKIDFNDSNNSKLIEYFKFTINDHLKNDEN |
| 4777 | YLKDYISDNEKLKNDLIKVKNSFEKIRHALMHFDYDFFVKLFNGEDVGLELDIEFLDIMIDKLDKLNIDTK |
| | KEFIDDEKITIFGEELSLAKLYRFYAHTAINRVAFNKLINSFIIENGVENQSLKEYFNQQAGGIAYEIDIHQN |
| | REYKNLYNEHKKLVSRVLSISDGQEIAILNQKIAKLKDQMKQITKANSIKRLEYKLRLALGFIYTEYENYE |
| | EFKNNFDTDIKNGRFTPKDNDGNKRAFDSRELEQLKGYYEATIQTQKPKTDEKIEEVSKKIDRLSLKSLIA |
| | DDILLKFILLMFTFMPQELKGEFLGFIKKYYHDTKHIDQDTISDSDDTIETLSIGLKLKILDKNIRSLSILKHS |
| | LSFQTKYNKKDRNYYEDGNIHGKFFKKLGISHNQEEFNKSVYAPLFRYYSALYKLINDFEIYTLSLHIVGS |
| | ETLTDQVNKSQFLSGRYFNFRKLLTQSYHINNNSTHSTIFNAVINMRNDISHLSYEPLFDCPLNGKKSYKR |
| | KIRNQFKTINIKPLVESRKIIIDFITLQTDMQKVLGYDAVNDFTMKIVQLRTRLKAYANKEQTIQKMITEA |
| | KTPNDFYNIYKVQGVEEINKYLLEVIGETQAEKEIREKIERGNIANF |
| IMG_ | MIKNPSNRHSLPKVIISEVDHEKILEFKIKYEKLARLDRFEVKAMHYEGKEIVFDEVLVNGGLIEVEYQDD |
| 3300028030 | NKTLFVKVGEKSYSIRGKKVGGKQRLLEDRVSKTKVQLELSDGVVDNKGNLRKSRTERELIVADNIKLY |
| SEQ ID NO: | SQIVGREVTTTKEIYLVKRFLAYRSDLLFYYSFVDNFFKVAGNEKELWKINFDDATSAQFMGYIPFMVND |
| 4778 | NLKNDNAYLKDYVRNDVQIKDDLKKVQTIFSALRHTLLHFNYEFFEKLFNGEDVGFDFDIGFLNLLIENI |
| | DKLNIDAKKEFIDNEKIRLFGENLSLAKVYRLYSDICVNRVGFNKFINSMLIKDGVENQVLKAEFNRKFG |
| | GNAYTIDIHSNQEYKRIYNEHKKLVIKVSTLKDGQAIRRGNKKISELKEQMKSMTKKNSLARLECKMRL |
| | AFGFLYGEYNNYKAFKNNFDTNIKNSQFDVNDVEKSKAYFLSTYERRKPRTREKLEKVAKDIESLELKT |
| | VIANDTLLKFILLMFVFMPQELKGDFLGFVKKYYHDVHSIDDDTKEQEEDVVEAMSTSLKLKILGRNIRS |
| | LTLFKYALSSQVNYNSTDNIFYVEGNRYGKIYKKLGISHNQEEFDKTLVVPLLRYYSSLFKLMNDFEIYSL |
| | AKANPTAVSLQELVDDETSPYKQGNYFNFNKMLRDIYGLTSDEIKSGQVVFMRNKIAHFDTEVLLSKPL |
| | LGQTKMNLQRKDIVSFIEARGDIKELLGYDAINDFRMKVIHLRTKMRVYSDKLQTMMDLLRNAKTPND |
| | FYNVYKVKGVESINKHLLEVLAQTAEERTVEKQIRDGNEKYDL |
| IMG_ | MIKNPSNRHSLPKVIISEVDHEKILEFKIKYEKLARLDRFEVKAMHYEGKEIVFDEVLVNGGLIEVEYQDD |
| 3300028030_2 | NKTLFVKVGEKSYSIRGKKVGGKQRLLEDRVSKTKVQLELSDGVVDNKGNLRKSRTERELIVADNIKLY |
| SEQ ID NO: | SQIVGREVTTTKEIYLVKRFLAYRSDLLFYYSFVDNFFKVAGNEKELWKINFDDATSAQFMGYIPFMVND |
| 4779 | NLKNDNAYLKDYVRNDVQIKDDLKKVQTIFSALRHTLLHFNYEFFEKLFNGEDVGFDFDIGFLNLLIENI |
| | DKLNIDAKKEFIDNEKIRLFGENLSLAKVYRLYSDICVNRVGFNKFINSMLIKDGVENQVLKAEFNRKFG |
| | GNAYTIDIHSNQEYKRIYNEHKKLVIKVSTLKDGQAIRRGNKKISELKEQMKSMTKKNSLARLECKMRL |
| | AFGFLYGEYNNYKAFKNNFDTNIKNSQFDVNDVEKSKAYFLSTYERRKPRTREKLEKVAKDIESLELKT |
| | VIANDTLLKFILLMFVFMPQELKGDFLGFVKKYYHDVHSIDDDTKEQEEDVVEAMSTSLKLKILGRNIRS |
| | LTLFKYALSSQVNYNSTDNIFYVEGNRYGKIYKKLGISHNQEEFDKTLVVPLLRYYSSLFKLMNDFEIYSL |
| | AKANPTAVSLQELVDDETSPYKQGNYFNFNKMLRDIYGLTSDEIKSGQVVFMRNKIAHFDTEVLLSKPL |
| | LGQTKMNLQRKDIVSFIEARGDIKELLGYDAINDFRMKVIHLRTKMRVYSDKLQTMMDLLRNAKTPND |
| | FYNVYKVKGVESINKHLLEVLAQTAEERTVEKQIRDGNEKYDL |
| IMG_ | MMTKKPANRHALPKVIISEVDNTNILEFKIKYEKLARLDRVEVKAMHYEDGRIIFDEVVVNGGLIEVEYQ |
| 3300026544 | DDHKTLFVQVGEKSYSISGQKVGGKQRLLEDRVSKTKVQLELSDGSSERVSRTERELIVADNIKLYSQIV |
| SEQ ID NO: | GHEVKTTKEIYLAKRFLGYRSDLLFYYGFVDNFFRESKNLKYGKQPVELWEDKFQVNDKLTAYTKFMF |
| 4780 | NDDLQNSESYLKEYVKDNHKIKNDLESARDIFATFRHNLMHFNYSFFTRLFNGEDVKIKNLQTKKFESLS |
| | DVLRNVEFLNKVIQSIDKLNIDTRKEFIDKEKITLFNEELDLQQLYGFFAYTAINRVAFNKLINSFIIKDGIE |
| | NEQLKEYFNQRVDGTAYEIDIHQNREYKELYKKHKNLVSKVSTLSDGKEIARGNTEISVLKEQMNKITK |
| | ANSLKRLEHKLRLAFGFIYTEYGSYKAFVSRFNEDTKRKKIKNVEFEKIGVEKQKEYYESTFTSNNKDKL |
| | GELIQEYEKLSLNDLIENDTFLKVILLLFIFMPKEVKGDFLGFIKKYYHDTKHIEEDTKEKDEGFTNTLPIG |
| | LKLKIVERNIAKLSVLKHSLSLKVKYNRGQYEEDNTYRKVFKKLNISHNQEEFHKSMFSPLLRYYASLYK |
| | LINDFEIYTLSHYITDKYSTLNKVIASEQFHYRYGWNREEKKGELVKTDNYTFSTLLSKKYGHKNSQEISE |
| | MRNKISHFDEKILFKFPLEEVSSVPKGKGKYKKDEPIKSLKEKREEIVSLMEKQTDMQKVLGYDAINDFR |
| | MKTVQFQTKLKVYSNKEETIKKMIVEAKTPNDYYNIYKVKGVEGINEHLLNVIGETEAEKSIQEQIAEGN |
| | KVNV |
| IMG_ | MTKKPSNRNSLPKVIINKVDESSILEFKIKYEKLARLDRFEVRSMRYDGDGRIIFDEVVANAGLLDVDYE |
| 3300021977_2 | DDNRTIVVKIENKAYNIYGKKVGGEKRLNGKISKAKVQLILTDSIRKNANDTHRHSLTERELINKNEVDL |
| SEQ ID NO: | YSKIAEREISTTKDIYLVKRFLAYRSDLLLYYAFINHYVRVNGNKKEFWKTEIDDKIIDYFIYTINDTLKNK |
| 4781 | EGYLEKYIVDRDQIKKDLEKIKQIFSHLRHKLMHYDFRFFTDLFDGKDVDIKVDNSIQKISELLDIEFLNIVI |
| | DKLEKLNIDAKKEFIDDEKITLFGQEIELKKLYSLYAHTSINRVAFNKLINSFLIKDGVENKELKEYFNAHN |
| | QGKESYYIDIHQNQEYKKLYIEHKNLVAKLSATTDGKEIAKINRELADKKEQMKQITKANSLKRLEYKL |
| | RLAFGFIYTEYKDYERFKNSFDTDTKKKKFDAIDNAKIIEYFEATNKAKKIEKLEEILKGIDKLSLKTLIQD |
| | DILLKFLLLFFTFLPQEIKGEFLGFIKKYYHDITSLDEDTKDKDDEITELPRSLKLKIFSKNIRKLSILKHSLS |
| | YQIKYNKKESSYYEAGNVFNKMFKKQAISHNLEEFGKSIYLPMLKYYSALYKLINDFEIYALYKDMDTS |
| | ETLSQQVDKQEYKRNEYFNFETLLRKKFGNDIEKVLVTYRNKIAHLDFNFLYDKPINKFISLYKSREKIVN |
| | YIKNHDIQAVLKYDAVNDFVMKVIQLRTKLKVYADKEQTIESMIQNTQNPNGFYNIYKVKAVENINRHL |
| | LKVIGYTESEKAVEEKIRAGNTSKS |
| IMG_ | MLKHKRKNKNSLARVVLSNYDSNNIYEIKIKYEKLAKLDKINIIEMDYDADNNVMFKKVLFNNKEIDLS |
| 3300026382 | HKDKTKINIELDNKKYNISAKKQIGKTHLVVRNKQTSKISRIKKIQDTYYRGKDVFILDNNIEILDKKQTK |
| SEQ ID NO: | DKFIVTLNDITNNKTTSTEAELIDDTKDIFKKISAKKDLKSSDIYKIKRFISIRSNFSFYYTFVDNYFKIFHAK |
| 4782 | KDKNKEELYKIKFKDEINIKPYLENILDNMKNKNGILYNYANDRKKVLNDLRNIQYVFKEFRHKLAHFD |
| | YNFLDNFFSNSVEEKYKQKVNEIKLLDILLDNIDSLNVVPKQNYIEDETISVFDAKDIKLKRLYTYYIKLTI |
| | NYPGFKKLINSFFIQDGIENQELKEYINNKEKDTQVLKELDNKAYYMDISQYRKYKNIYNKHKELVSEKE |
| | LSSDGKKINSLNQKINKLKIDMKNITKPNALNRLIYRLRVAFGFIYKEYATINNFNKSFLQDTKTKRFENIS |
| | QQDIKSYLDISYQDKGKFFVKSKKTFKNKTTVKYTFEDLDLTLNEIITQDDIFVKVIFLFSIFMPKELNGDF |
| | FGFINMYYHKMKNISYDTKDIDMLDTISQNMKLKILEQNIKKTYVFKYYLDLDSSIYSKLVQNIKITEDID |
| | SKKYLYAKIFKYYQHLYKLISDVEIYLLYKYNSKENLSITIDKDELKHRGYYNFQSLLIKNNINKDDAYW |
| | SIVNMRNNLSHQNIDELVGHFCKGCLRKSTTDIAELWLRKDILTITNEIINKIESFKDIKITLGYDCVNDFT |
| | QKVKQYKQKLKASNERLAKKIEEKQNQVVDEKNKEELEKNILNMKNIQKINRYILDIL |
| IMG_ | MLKHKRKNKNSLARVVLSNYDSNNIYEIKIKYEKLAKLDKINIIEMDYDADNNVMFKKVLFNNKEIDLS |
| 3300026382_2 | HKDKTKINIELDNKKYNISAKKQIGKTHLVVRNKQTSKISRIKKIQDTYYRGKDVFILDNNIEILDKKQTK |
| SEQ ID NO: | DKFIVTLNDITNNKTTSTEAELIDDTKDIFKKISAKKDLKSSDIYKIKRFISIRSNFSFYYTFVDNYFKIFHAK |
| 4783 | KDKNKEELYKIKFKDEINIKPYLENILDNMKNKNGILYNYANDRKKVLNDLRNIQYVFKEFRHKLAHFD |
| | YNFLDNFFSNSVEEKYKQKVNEIKLLDILLDNIDSLNVVPKQNYIEDETISVFDAKDIKLKRLYTYYIKLTI |
| | NYPGFKKLINSFFIQDGIENQELKEYINNKEKDTQVLKELDNKAYYMDISQYRKYKNIYNKHKELVSEKE |
| | LSSDGKKINSLNQKINKLKIDMKNITKPNALNRLIYRLRVAFGFIYKEYATINNFNKSFLQDTKTKRFENIS |
| | QQDIKSYLDISYQDKGKFFVKSKKTFKNKTTVKYTFEDLDLTLNEIITQDDIFVKVIFLFSIFMPKELNGDF |
| | FGFINMYYHKMKNISYDTKDIDMLDTISQNMKLKILEQNIKKTYVFKYYLDLDSSIYSKLVQNIKITEDID |
| | SKKYLYAKIFKYYQHLYKLISDVEIYLLYKYNSKENLSITIDKDELKHRGYYNFQSLLIKNNINKDDAYW |
| | SIVNMRNNLSHQNIDELVGHFCKGCLRKSTTDIAELWLRKDILTITNEIINKIESFKDIKITLGYDCVNDFT |
| | QKVKQYKQKLKASNERLAKKIEEKQNQVVDEKNKEELEKNILNMKNIQKINRYILDIL |
| IMG_ | MLKHKRKNKNSLARVVLSNYDSNNIYEIKIKYEKLAKLDKINIIEMDYDADNNVMFKKVLFNNKEIDLS |
| 3300026512 | HKDKTKINIELDNKKYNISAKKQIGKTHLVVRDKQTSKISRIKKIQDTYYRGKDVFILDNNIEILDKKQTK |
| SEQ ID NO: | DKFIVTLNDITNDKTTSTEAELIDDTKDIFKKISAKKDLKSSDIYKIKRFISIRSNFSFYYTFVDNYFKIFHAK |
| 4784 | KDKNKEELYKIKFKDEINIKPYLENILDNMKNKNGILYDYADDREKVLNDLKNIQYVFTEFRHKLAHFD |
| | YNFLDNFFSNSVTDQYKQKVNEIKLLDILLDNIDSLNVVPKQNYIEDETISVFDAKDIKLKRLYTYYIKLTI |
| | NYPGFKKLINSFFIQDGIENQELKEYINNKEKDTQVLKELDNKAYYMDISQYRKYKNIYNKHKELVSEKE |
| | LSSDGQKINSLNQKINKLKIEMKNITKPNALNRLIYRLRVAFGFIYKEYATINNFNKSFLQDTKIKRFENIS |
| | QQDIKNYLDISYQDKGKFFVKSKKTFKNKTTIKYTFEDLDLTLNEIITQDDIFVKVIFLFSIFMPKELNGDFF |
| | GFINMYYHKMKNISYDTKDIDMLDTISQNMKLKILEQNIKKTYVFKYYLDLDSSIYSKLVQNIKITEDIDS |
| | KKYLYAKIFKYYQHLYKLISDVEIYLLYKYNSKENLSITIDKDELKHRGYYNFQSLLIKNNINKDDAYWSI |
| | VNMRNNLSHQNIDELVGHFCKGCLRKSTTDIAELWLRKDILTITNEIINKIESFKDIKITLGYDCVNDFTQK |
| | VKQYKQKLKASNERLAKKIEEKQNQVVDEKNKEELEKKILNMKNIQKINRYILDIL |
| IMG_ | MLKHKRKNKNSLARVVLSNYDSNNIYEIKIKYEKLAKLDKINIIEMDYDADNNVMFKKVLFNNKEIDLS |
| 3300026512_2 | HKDKTKINIELDNKKYNISAKKQIGKTHLVVRDKQTSKISRIKKIQDTYYRGKDVFILDNNIEILDKKQTK |
| SEQ ID NO: | DKFIVTLNDITNDKTTSTEAELIDDTKDIFKKISAKKDLKSSDIYKIKRFISIRSNFSFYYTFVDNYFKIFHAK |
| 4785 | KDKNKEELYKIKFKDEINIKPYLENILDNMKNKNGILYDYADDREKVLNDLKNIQYVFTEFRHKLAHFD |
| | YNFLDNFFSNSVTDQYKQKVNEIKLLDILLDNIDSLNVVPKQNYIEDETISVFDAKDIKLKRLYTYYIKLTI |
| | NYPGFKKLINSFFIQDGIENQELKEYINNKEKDTQVLKELDNKAYYMDISQYRKYKNIYNKHKELVSEKE |
| | LSSDGQKINSLNQKINKLKIEMKNITKPNALNRLIYRLRVAFGFIYKEYATINNFNKSFLQDTKIKRFENIS |
| | QQDIKNYLDISYQDKGKFFVKSKKTFKNKTTIKYTFEDLDLTLNEIITQDDIFVKVIFLFSIFMPKELNGDFF |
| | GFINMYYHKMKNISYDTKDIDMLDTISQNMKLKILEQNIKKTYVFKYYLDLDSSIYSKLVQNIKITEDIDS |
| | KKYLYAKIFKYYQHLYKLISDVEIYLLYKYNSKENLSITIDKDELKHRGYYNFQSLLIKNNINKDDAYWSI |
| | VNMRNNLSHQNIDELVGHFCKGCLRKSTTDIAELWLRKDILTITNEIINKIESFKDIKITLGYDCVNDFTQK |
| | VKQYKQKLKASNERLAKKIEEKQNQVVDEKNKEELEKKILNMKNIQKINRYILDIL |
| GCA_ | LTEKKSIIFKNKSSVEIVKKDIFSQTPDNMIRNYKITLKISEKNPRVVEAEIEDLMNSTILKDGRRSARREKS |
| 000242215.1_ | MTERKLIEEKVAENYSLLANCPMEEVDSIKIYKIKRFLTYRSNMLLYFASINSFLCEGIKGKDNETEEIWH |
| Fuso_necr_1_ | LKDNDVRKEKVKENFKNKLIQSTENYNSSLKNQIEEKEKLLRKESKKGAFYRTIIKKLQQERIKELSEKSL |
| 1_36S_V1_ | TEDCEKIIKLYSELRHPLMHYDYQYFENLFENKENSELTKNLNLDIFKSLPLVRKMKLNNKVNYLEDNDT |
| genomic | LFVLQKTKKAKTLYQIYDALCEQKNGFNKFINDFFVSDGEENTVFKQIINEKFQSEMEFLEKRISESEKKN |
| SEQ ID NO: | EKLKKKFDSMKAHFHNINSEDTKEAYFWDIHSSSNYKTKYNERKNLVNEYTELLGSSKEKKLLREEITQI |
| 4786 | NRKLLKLKQEMEEITKKNSLFRLEYKMKIAFGFLFCEFDGNISKFKDEFDASNQEKIIQYHKNGEKYLTYF |
| | LKEEEKEKFNLEKMQKIIQKTEEEDWLLPETKNNLFKFYLLTYLLLPYELKGDFLGFVKKHYYDIKNVDF |
| | MDENQNNIQVSQTVEKQEDYFYHKIRLFEKNTKKYEIVKYSIVPNEKLKQYFEDLGIDIKYLTGSVESGE |
| | KWLGENLGIDIKYLTVEQKSEVSEEKIKKFL |
| GCA_ | MENKGNNKKIDFDENYNILVAQIKEYFTKEIENYNNRIDNIIDKKELLKYSEKKEESEKNKKLEELNKLKS |
| 000158315.2_ | QKLKILTDEEIKADVIKIIKIFSDLRHSLMHYEYKYFENLFENKKNEELAELLNLNLFKNLTLLRQMKIEN |
| Fuso_ulc_ | KTNYLEGREEFNIIGKNIKAKEVLGHYNLLAEQKNGFNNFINSFFVQDGTENLEFKKLIDEHFVNAKKRL |
| ATCC49185_ | ERNIKKSKKLEKELEKMEQHYQRLNCAYVWDIHTSTTYKKLYNKRKSLIEEYNKQINEIKDKEVITAINV |
| V2_genomic | ELLRIKKEMEEITKSNSLFRLKYKMQIAYAFLEIEFGGNIAKFKDEFDCSKMEEVQKYLKKGVKYLKYYK |
| SEQ ID NO: | DKEAQKNYEFPFEEIFENKDTHNEEWLENTSENNLFKFYILTYLLLPMEFKGDFLGVVKKHYYDIKNVDF |
| 4787 | TDESEKELSQVQLDKMIGDSFFHKIRLFEKNTKRYEIIKYSILTSDEIKRYFRLLELDVPYFEYEKGTDEIGI |
| | FNKNIILTIFKYYQIIFRLYNDLEIHGLFNISSDLDKILRDLKSYGNKNINFREFLYVIKQNNNSSTEEEYRKI |
| | WENLEAKYLRLHLLTPEKEEIKTKTKEELEKLNEISNLRNGICHLNYKEIIEEILKTEISEKNKEATLNEKIR |
| | KVINFIKENELDKVELGFNFINDFFMKKEQFMFGQIKQVKEGNSDSITTERERKEKNNKKLKETYELNCD |
| | NLSEFYETSNNLRERANSSSLLEDSAFLKKIGLYKVKNNKVNSKVKDEEKRIENIKRKLLKDSSDIMGMY |
| | KAEVVKKLKEKLILIFKHDEEKRIYVTVYDTSKAVPENISKEILVKRNNSKEEYFFEDNNKKYVTEYYTL |
| | EITETNELKVIPAKKLEGKEFKTEKNKENKLMLNNHYCFNVKIIY |
| OWDV01.1 | MENKNKTKPNRGSIVRIIISNYDTKGIKEIKVRYRKQAQLDTFILQTTLDKGNNSILISEFRVKAREKNRYS |
| SEQ ID NO: | FTYDGKEKFSAPSNSVVITKIDNAAPEKFKEIRKYKITLEIDEKCKTGNMITAAIEDLLEDDIAREGIRNPRR |
| 4788 | KASKTERKLIAESICHNYAQIAQCPVEEIDAVKIYKVKRFLSYRSNMLLFFALINDFLCKNLKNKKGEKIN |
| | EIWKMENKGNNKKIDFDENYNILVAQIKEYFTKEIENYNNRIDNIIDKKELLKYSEKKEESEKNKKLEELN |
| | KLKSQKLKILTDEEIKADVIKIIKIFSDLRHSLMHYEYKYFENLFENKKNEELAELLNLNLFKNLTLLRQM |
| | KIENKTNYLEGREEFNIIGKNIKAKEVLGHYNLLAEQKNGFNNFINSFFVQDGTENLEFKKLIDEHFVNAK |
| | KRLERNIKKSKKLEKELEKMEQHYQRLNCAYVWDIHTSTTYKKLYNKRKSLIEEYNKQINEIKDKEVITA |
| | INVELLRIKKEMEEITKSNSLFRLKYKMQIAYAFLEIEFGGNIAKFKDEFDCSKMEEVQKYLKKGVKYLK |
| | YYKDKEAQKNYEFPFEEIFENKDTHNEEWLENTSENNLFKFYILTYLLLPMEFKGDFLGVVKKHYYDIK |
| | NVDFTDESEKELLFLVK |
| OVXT01.1 | MENKNKSNRGSIVRIIISNYDMKGIKELKVRYRKQAQLDTFILQTTLDKSNNSILISEFRVKVREKYRYSFT |
| SEQ ID NO: | YDGKEKFSVPSNSVIVTKIDNAAPEKSKEIRKYKITLGIDEKCKTGSMITAAIEDLLEDDRVREGIRNPRRK |
| 4789 | VSKTERKLIAETICHNYAQIAQCPVEEIDAVKIYKVKRFLSYRSNMLLFFALINDFLCKNLKDKKGEKIREI |
| | WKIENKGNKNWIDYDRYYNILVAQIKEYFTKEIENYNNRIDNIISKKELLKYSEEKKESEKNKKLEELKR |
| | KGREYFKYLDELEILRREKVNTPKREEELIKKIEESSCPGQSFFQAV |
| GCA_ | MEKDKTYKPKQNRSSIIRIILSNYDMIGIKELKILYQKQGGVDTFNLESSIDLDSRKVIIKSFKVKAKEIKRY |
| 002436145.1_ | SFSYDTGDNFSEDKNSVTITKVDNILNKEIRKYKITLSLKEKTTDVILAEVEDKLEESEKKVSGIRTNFRNR |
| ASM243614v1_ | TSKTERKLLSQEVCKNYSEIARVSTEDIDSLKIYKIKRFLSYRSNLLMYFALINNFLCAPLKNEGITEIWKIS |
| genomic | KEDAPLSDERLEKITGHVFNTLSKEIENRVNQLQKRISKNNREIEELKISCNYKNNNKRKYNQLELLNKDL |
| SEQ ID NO: | DKKISELSGYSSKENLKQDLKKVIEIFSNFRHALMHYDYMYFENLFENKACDNLKNLLDLNFFKYTKLIE |
| 4790 | EFKIENKTNYLDGEEKLSVLGKTKNIKNLY |
| OGIA01.1 | MLYSSTFIIESQIEEGVFILKNIKWKAKEKYRYELFIKEVNSTSVEIIKKDRFLNNEIVRGYILNFKVSSKNK |
| SEQ ID NO: | DVVVEIEDILPLKSVQQGEKANIRRITSQTERKLLNEETQISYSKIANCSPKDIDSIKIYKIKRYLSYRSNML |
| 4791 | LFFSLINDFLCEGLYDEKGKKINELWRITNKVDKDIIDERVNKIAKNLDDTLFIELKNYNNGIRKSIEKKNN |
| | SITDCKNKIVSCERKIEKLDEEKNRKKINQFKRDIANCNEKIKEYEESIALKEKEKLFNLGFEKIKADVYKI |
| | LEIYTELRHKLSHYNYIYFENLFENREKDLKLAELLNLNIFNYLTLSKKLRIENKTNYLEENTKFSILGVSG |
| | SAKKYYSLYNTLCEQKNGFNNFINSFFVKDGVENSEFKEKVEAKLKEDIKYLESLETKNNLNKKIPRKNK |
| | ELELLKTQYSELGIVYFWDIHNSLRYKKLYNKRKDNVKEYNQTLKGNRNKTTLRNCGRKLFSKKNEME |
| | KITKRNSIVRLKYKLQIAYAFIMKEYQGDISRFKSDFDISKIEQIKKY |
| OGMZ01.1 | MEGGTKIKANRSSIIRIIISNYDSNGIKEIKVRYNKQAQLDTFLIDSKLENGIFTLKDVKWKAKEKNRYDMI |
| SEQ ID NO: | IGELIDNTVKITKIDKFSNKAIREYIIKFSVSPKNKDVVVVDIKDCMEHNLTIKGERSNTRRDTSQTERKLL |
| 4792 | SKETQISYSKIACCSPENIDSLKIYKIKRYLSYRSNMLLFFSLINDFICEGIKEEKIVELYKITSKVDKNIIEER |
| | VTKIAQYLRENLSNELENYNNGIEKTISKKSNSINDCNNRIESCKKKINKLDKIKNKKQIRNLERIIQDSEN |
| | KIKEYSKIIAEKEKERLVALAEDKIKEDVYKILELYSDLRHKLAHYNYAYFE |
| IMG_ | MNKKQNKSNKNSIIRIIASNYDDKQIKELKVLYTKQGGVDNITIEDMRLDIESERIQFTTAKSPSTQVDIEV |
| 3300010430 | QTEGSMLIQRRQRYTEAVVILRKYKVWGECKKTNDGGTQVKLFVEDLMAEDERNTPINKRRIQSSTERK |
| SEQ ID NO: | LLGSEVKSNYSLILKCTPDEVDSRSIYKAKRFLSYRSNMILFFNFINDFMIKGLPEPEIEKGQIKELWQIVSS |
| 4793 | TKTDPERFNTIIESIAEHIDAHICEFFENHNNYADRMNEKNSEKKGFRPEIIRFDSIDKDSIVEDVKNIVIILS |
| | DFRHKLAHYEFEYFDRLYTGEGVNVTHNKSAIALNKLLNLNIFKELSKITEFKEDKSTTYLDDDDTVRIL |
| | GKSKNAKKFYTMYSKICSRKNGFNQFINSFFTVDGDEDPVFKAAINNEFESRIEFLKTTLKSGKINDKSIK |
| | KRTRTNMEYELKELEQIKTYTGSAYAWDIHLCPEYKTLYNQRKNLIEKQSALISSGNSKVHRKEITEINK |
| | KLLSLKQKMERITKLNSKCRLRYKLQVAYGFLYTEFKMNLKQFGDKFDMSRDELIKGFRSKGEDYLKTR |
| | KNDVEFDLEKLRKKVNDIKQANMDL |
| GCA_ | VEKDKKGEKIDISQEMIEEDLRKILILFSRLRHSMVHYDYEFYQALYSGKDFVISDKNNLENRMISQLLDL |
| 002266425.1_ | NIFKELSKVKLIKDKAISNYLDKNTTIHVLGQDIKAIRLLDIYRDICGSKNGFNKFINTMITISGEEDREYKE |
| ASM226642vl1_ | KVIEHFNKKMENLSTYLEKLEKQDNAKRNNKRVYNLLKQKLIEQQKLKEWFGGPYVYDIHSSKRYKEL |
| genomic | YIERKKLVDRHSKLFEEGLDEKNKKELTKINDELSKLNSEMKEMTKLNSKYRLQYKLQLAFGFILEEFDL |
| SEQ ID NO: | NIDTFINNFDKDKDLIISNFMKKRDIYLNRVLDRGDNRLKNIIKEYKFRDTEDIFCNDRDNNLVKLYILMY |
| 4794 | ILLPVEIRGDFLGFVKKNYYDMKHVDFIDKKDKEDKDTFFHDLRLFEKNIRKLEITDYSLSSGFLSKEHKV |
| | DIEKKINDFINRNGAMKLPEDITIEEFNKSLILPIMKNYQINFKLLNDIEISALFKIAKDRSITFKQAIDEIKNE |
| | DIKKNSKKNDKNNHKDKNINFTQLMKRALHEKIPYKAGMYQIRNNISHIDMEQLYIDPLNSYMNSNKNN |
| | ITISEQIEKIIDVCVTGGVTGKELNNNIINDYYMKKEKLVFNLKLRKQNDIVSIESQEKNKREEFVFKKYGL |
| | DYKDGEINIIEVIQKVNSLQEELRNIKETSKEKLKNKETLFRDISLINGTIRKNINFKIKEMVLDIVRMDEIR |
| | HINIHIYYKGENYTRSNIIKFKYAIDGENKKYYLKQHEINDINLELKDKFVTLICNMDKHPNKNKQTINLE |
| | SNYIQNVKFIIP |
| UOOT01.1 | MDSGNKKKLKPNKSSIVRIIISNFDDKQIKEIKVLYSKQGGVDVIRLNGTEPDEKGRIKFNFKSASNRLEDE |
| SEQ ID NO: | QTYSLGENDGQTFFVTTNEDETELCVTKRSKFTNEIIKEYRLFGEYVATNSNEKKVIVSVSDDIDYSGEKY |
| 4795 | QNSQRKNKRTINQSTNRMLLDLDVINNYRQIGSESDKIDKNVIIDSKEIYKINKFLNYRSDMIIYYQIINNFL |
| | MQGSAKRDDFENEIWKYVKSTDSKTKKKFLNELRVEYLPEDCRKRLKELKTLNFIEEGRNIILAGSELLF |
| | TFLSLRAERKSTIITTNLSFDRWNEIFNDPVLTAALIDRLTHKSYVINMNGDSYRIKETREWLEETN |
| IMG_ | MIVAETPENELDRLKALFELDILDTPLEADFDQLTELAASICGSPIALVSLLDDKRQWFKSHFGLDASETP |
| 3300001201 | RDYAFCAHAINQDEVFEICDSRKDERFHDNPLVTGDPRVIFYAGAPLVTGDGHKLGTVCVIDNEPRSLTD |
| SEQ ID NO: | LQKKQLSILSRQVMALIESRQAVRLKNEAFNKLMSLTKNINEQNKELSQFTTRASHDIQGPIRQIKQLARF |
| 4796 | CQKSAREDSTEFIDDDCEKIISRCDDLSHFISSIFDLTGSSVVVENKREINLKKLVLLAISNNESLIDQYKVN |
| | VTYGVDVSSPFLSEPVRVLQILNNLISNAVKYSNPEKENKTVDVSVSEKNEVIVIKVVDNGLGIPKEFQSR |
| | LFDQFERFHTNSASGTGLGTSIIQKHVKMLLGGITFESDQNGTAFTVTLPFSS |
| mgm4527699.3 | MRKLRAVFYARVSTEEEKQLNALEKQIQENRDIIKEQGWELVGEYIDEGKSGTTTKRRSDYKRLLDDME |
| SEQ ID NO: | GGSFDIVVCKDQDRLQRNTLDWYLFVDNLVRNNLKLYMYLDSKFFTPSEDALITGIKAIIAEEYSRNLSK |
| 4797 | KLNNSNKRRIEKALNGEELSAMGNGKSLGYAIERSEGGKKSKWVQVPEEIEVCKIVWDLYEKYDSIRKV |
| | RDEINNMGYRNSVGKPFTSESIARILKNEKAKGIIVLGKYHHDFDLKKIVRMPEEDLVRVPAPELAYVSEE |
| | RFDRVNARLKAKSNNGRGRNVGRDPLSGKIFCGKCGSVLWRRESSQRNKAGEKKTYYHWACSAKYAK |
| | GDIVCEGTGTTTVAIRNVYKELTSEIEVDRKALRSYFVKWLNQLKTSLSDTSGNAKVEKELEKLERQRA |
| | KLLEAYLEEIISKEDYKSKYADIESKIEEKKKLLAPVEDNEDIKEIERILANLDEELDEFIKTLDVEENKIDF |
| | LIEHTKKITVLENKDLVIELDLVAGAIIAGKKFLLYVHDSMPFPHGRICHEGHREPGRPQRRFFHRLCGYQ |
| | HGGNRERYPLWYPCDFQGEADTLHGA |

[0332] In some embodiments, the small Cas proteins are small Cas 13d. Examples of small Cas13d are shown in Table 5 below.

TABLE 5

| Accession | |
|---|---|
| No. | Sequences |
| IMG_ | MKKNSNDKTNAKRMGIKSFIKNGDERFITTSIKNEFPVELKLDVIKKTCEPAHEPVSFDYDPKKIDFE |
| 3300001784 | KPVLKEKLTSGQSGQKLSTRLFIQKDRDICGIRRKYLEKIFNSNFIEEKKDSNLPMQIVAKVLSTEKVF |
| SEQ ID NO: | SNALNKIISQFLSMPRGGVTDNHGEYEIIGNIINHKSLQELNKEKKTKRIKKYLQSVIKNQSYLYNKQF |
| 4798 | LLSLDESKGSRNDIDENELYDYIRFLAILRNGIAHVFYEKNEPETAKESLFRLVDFIKNDKKLEGAFAK |
| | IKIQVNTLYKCRKEEYIKKSGKNFEIIRKIYQNDKPDEKVKDWIRYDFDKSYKYIGLSVAKLGNYTSW |
| | AKDIDNLRDKSNPDSGYAGIMHRLNEFSVYLKVKALSTEEKDKYLKNLISKENCEEKDKYYKNIAQF |
| | FCSSDLKFANVLQMVKEIKKNKGCTSEDKNCKLCVDERKFNDLSVIVYFISCFLDNKDQNIFLSDLIN |
| | RFGALSDLLRIQNKILGAGNKYNENYSFLKNERYVTEIKMELETIFALVKVSYKKEDKAFNRLLEDG |
| | LVMFGFSKDEAGMKVAGLKEIKEKKEGHYKNKSRSFLINSIVNSRKFAYLAKSIDPQKVPAIIKNEHI |
| | VRYILGRINKTNPGQIGRYWRYIMSQNHAGTDKVDDLTNEIIKINIKNILNDAGGWQKSKLNDNNNK |
| | KKLKYQQLIGLYLTVAYIFVKNMLECNARYFSAFAQIEKDYLIYTNSDEFYYIDKNKKNLVTERYLK |
| | LVKDIIEKNKNTVRKDKIFRKKRQRKHLADISKSIIEFEKLPCCIFTLLRNITEHLNVASNIDIIEGYGKR |
| | AGKYHKNAPASYFIFYHYIIQKILADKICTRNLLNIINTYGEPSISFIKIIYVPFAYNLPRYLNLTDARIFC |
| | NMDDK |
| IMG_ | MKKNSNDKTNAKRMGIKSFIKNGDERFITTSIKNEFPVELKLDVIKKTCEPAHEPVSFDYDPKKIDFE |
| 3300001784_2 | KPVLKEKLTSGQSGQKLSTRLFIQKDRDICGIRRKYLEKIFNSNFIEEKKDSNLPMQIVAKVLSTEKVF |
| SEQ ID NO: | SNALNKIISQFLSMPRGGVTDNHGEYEIIGNIINHKSLQELNKEKKTKRIKKYLQSVIKNQSYLYNKQF |
| 4799 | LLSLDESKGSRNDIDENELYDYIRFLAILRNGIAHVFYEKNEPETAKESLFRLVDFIKNDKKLEGAFAK |
| | IKIQVNTLYKCRKEEYIKKSGKNFEIIRKIYQNDKPDEKVKDWIRYDFDKSYKYIGLSVAKLGNYTSW |
| | AKDIDNLRDKSNPDSGYAGIMHRLNEFSVYLKVKALSTEEKDKYLKNLISKENCEEKDKYYKNIAQF |
| | FCSSDLKFANVLQMVKEIKKNKGCTSEDKNCKLCVDERKFNDLSVIVYFISCFLDNKDQNIFLSDLIN |
| | RFGALSDLLRIQNKILGAGNKYNENYSFLKNERYVTEIKMELETIFALVKVSYKKEDKAFNRLLEDG |
| | LVMFGFSKDEAGMKVAGLKEIKEKKEGHYKNKSRSFLINSIVNSRKFAYLAKSIDPQKVPAIIKNEHI |
| | VRYILGRINKTNPGQIGRYWRYIMSQNHAGTDKVDDLTNEIIKINIKNILNDAGGWQKSKLNDNNNK |
| | KKLKYQQLIGLYLTVAYIFVKNMLECNARYFSAFAQIEKDYLIYTNSDEFYYIDKNKKNLVTERYLK |
| | LVKDIIEKNKNTVRKDKIFRKKRQRKHLADISKSIIEFEKLPCCIFTLLRNITEHLNVASNIDIIEGYGKR |
| | AGKYHKNAPASYFIFYHYIIQKILADKICTRNLLNIINTYGEPSISFIKIIYVPFAYNLPRYLNLTDARIFC |
| | NMDDK |
| IMG_ | MKKNSNDKTNAKRMGIKSFIKNGDERFITTSIKNEFPVELKLDVIKKTCEPAHEPVSFDYDPKKIDFE |
| 3300001784_3 | KPVLKEKLTSGQSGQKLSTRLFIQKDRDICGIRRKYLEKIFNSNFIEEKKDSNLPMQIVAKVLSTEKVF |
| SEQ ID NO: | SNALNKIISQFLSMPRGGVTDNHGEYEIIGNIINHKSLQELNKEKKTKRIKKYLQSVIKNQSYLYNKQF |
| 4800 | LLSLDESKGSRNDIDENELYDYIRFLAILRNGIAHVFYEKNEPETAKESLFRLVDFIKNDKKLEGAFAK |
| | nCIQVNTLYKCRKEEYIKKSGKNFEIIRKIYQNDKPDEKVKDWIRYDFDKSYKYIGLSVAKLGNYTSW |
| | AKDIDNLRDKSNPDSGYAGIMHRLNEFSVYLKVKALSTEEKDKYLKNLISKENCEEKDKYYKNIAQF |
| | FCSSDLKFANVLQMVKEIKKNKGCTSEDKNCKLCVDERKFNDLSVIVYFISCFLDNKDQNIFLSDLIN |
| | RFGALSDLLRIQNKILGAGNKYNENYSFLKNERYVTEIKMELETIFALVKVSYKKEDKAFNRLLEDG |
| | LVMFGFSKDEAGMKVAGLKEIKEKKEGHYKNKSRSFLINSIVNSRKFAYLAKSIDPQKVPAIIKNEHI |
| | VRYILGRINKTNPGQIGRYWRYIMSQNHAGTDKVDDLTNEIIKINIKNILNDAGGWQKSKLNDNNNK |
| | KKLKYQQLIGLYLTVAYIFVKNMLECNARYFSAFAQIEKDYLIYTNSDEFYYIDKNKKNLVTERYLK |
| | LVKDIIEKNKNTVRKDKIFRKKRQRKHLADISKSIIEFEKLPCCIFTLLRNITEHLNVASNIDIIEGYGKR |
| | AGKYHKNAPASYFIFYHYIIQKILADKICTRNLLNIINTYGEPSISFIKIIYVPFAYNLPRYLNLTDARIFC |
| | NMDDK |
| IMG_ | MKKNSNDKTNAKRMGIKSFIKNGDERFITTSIKNEFPVELKLDVIKKTCEPAHEPVSFDYDPKKIDFE |
| 3300001784_4 | KPVLKEKLTSGQSGQKLSTRLFIQKDRDICGIRRKYLEKIFNSNFIEEKKDSNLPMQIVAKVLSTEKVF |
| SEQ ID NO: | SNALNKIISQFLSMPRGGVTDNHGEYEIIGNIINHKSLQELNKEKKTKRIKKYLQSVIKNQSYLYNKQF |
| 4801 | LLSLDESKGSRNDIDENELYDYIRFLAILRNGIAHVFYEKNEPETAKESLFRLVDFIKNDKKLEGAFAK |
| | IKIQVNTLYKCRKEEYIKKSGKNFEIIRKIYQNDKPDEKVKDWIRYDFDKSYKYIGLSVAKLGNYTSW |
| | AKDIDNLRDKSNPDSGYAGIMHRLNEFSVYLKVKALSTEEKDKYLKNLISKENCEEKDKYYKNIAQF |
| | FCSSDLKFANVLQMVKEIKKNKGCTSEDKNCKLCVDERKFNDLSVIVYFISCFLDNKDQNIFLSDLIN |
| | RFGALSDLLRIQNKILGAGNKYNENYSFLKNERYVTEIKMELETIFALVKVSYKKEDKAFNRLLEDG |
| | LVMFGFSKDEAGMKVAGLKEIKEKKEGHYKNKSRSFLINSIVNSRKFAYLAKSIDPQKVPAIIKNEHI |
| | VRYILGRINKTNPGQIGRYWRYIMSQNHAGTDKVDDLTNEIIKINIKNILNDAGGWQKSKLNDNNNK |
| | KKLKYQQLIGLYLTVAYIFVKNMLECNARYFSAFAQIEKDYLIYTNSDEFYYIDKNKKNLVTERYLK |
| | LVKDIIEKNKNTVRKDKIFRKKRQRKHLADISKSIIEFEKLPCCIFTLLRNITEHLNVASNIDIIEGYGKR |
| | AGKYHKNAPASYFIFYHYIIQKILADKICTRNLLNIINTYGEPSISFIKIIYVPFAYNLPRYLNLTDARIFC |
| | NMDDK |
| IMG_ | MKKNSNDKTNAKRMGIKSFIKNGDERFITTSIKNEFPVELKLDVIKKTCEPAHEPVSFDYDPKKIDFE |
| 3300028582 | KPVLKEKLTSGQSGQKLSTRLFIQKDRDICGIRRKYLEKIFNSNFIEEKKDSNLPMQIVAKVLSTEKVF |
| SEQ ID NO: | SNALNKIISQFLSMPRGGVTDNHGEYEIIGNIINHKSLQELNKEKKTKRIKKYLQSVIKNQSYLYNKQF |
| 4802 | LLSLDESKGSRNDIDENELYDYIRFLAILRNGIAHVFYEKNEPETAKESLFRLVDFIKNDKKLEGAFAK |
| | IKIQVNTLYKCRKEEYIKKSGKNFEIIRKIYQNDKPDEKVKDWIRYDFDKSYKYIGLSVAKLGNYTSW |
| | AKDIDNLRDKSNPDSGYAGIMHRLNEFSVYLKVKALSTEEKDKYLKNLISKENCEEKDKYYKNIAQF |
| | FCSSDLKFANVLQMVKEIKKNKGCTSEDKNCKLCVDERKFNDLSVIVYFISCFLDNKDQNIFLSDLIN |
| | RFGALSDLLRIQNKILGAGNKYNENYSFLKNERYVTEIKMELETIFALVKVSYKKEDKAFNRLLEDG |
| | LVMFGFSKDEAGMKVAGLKEIKEKKEGHYKNKSRSFLINSIVNSRKFAYLAKSIDPQKVPAIIKNEHI |
| | VRYILGRINKTNPGQIGRYWRYIMSQNHAGTDKVDDLTNEIIKINIKNILNDAGGWQKSKLNDNNNK |
| | KKLKYQQLIGLYLTVAYIFVKNMLECNARYFSAFAQIEKDYLIYTNSDEFYYIDKNKKNLVTERYLK |
| | LVKDIIEKNKNTVRKDKIFRKKRQRKHLADISKSIIEFEKLPCCIFTLLRNITEHLNVASNIDIIEGYGKR |
| | AGKYHKNAPASYFIFYHYIIQKILADKICTRNLLNIINTYGEPSISFIKIIYVPFAYNLPRYLNLTDARIFC |
| | NMDDK |
| IMG_ | MKKNSNDKTNAKRMGIKSFIKNGDERFITTSIKNEFPVELKLDVIKKTCEPAHEPVSFDYDPKKIDFE |
| 3300028326 | KPVLKEKLTSGQSGQKLSTRLFIQKDRDICGIRRKYLEKIFNSNFIEEKKDSNLPMQIVAKVLSTEKVF |
| SEQ ID NO: | SNALNKIISQFLSMPRGGVTDNHGEYEIIGNIINHKSLQELNKEKKTKRIKKYLQSVIKNQSYLYNKQF |
| 4803 | LLSLDESKGSRNDIDENELYDYIRFLAILRNGIAHVFYEKNEPETAKESLFRLVDFIKNDKKLEGAFAK |
| | nCIQVNTLYKCRKEEYIKKSGKNFEIIRKIYQNDKPDEKVKDWIRYDFDKSYKYIGLSVAKLGNYTSW |
| | AKDIDNLRDKSNPDSGYAGIMHRLNEFSVYLKVKALSTEEKDKYLKNLISKENCEEKDKYYKNIAQF |
| | FCSSDLKFANVLQMVKEIKKNKGCTSEDKNCKLCVDERKFNDLSVIVYFISCFLDNKDQNIFLSDLIN |
| | RFGALSDLLRIQNKILGAGNKYNENYSFLKNERYVTEIKMELETIFALVKVSYKKEDKAFNRLLEDG |
| | LVMFGFSKDEAGMKVAGLKEIKEKKEGHYKNKSRSFLINSIVNSRKFAYLAKSIDPQKVPAIIKNEHI |
| | VRYILGRINKTNPGQIGRYWRYIMSQNHAGTDKVDDLTNEIIKINIKNILNDAGGWQKSKLNDNNNK |
| | KKLKYQQLIGLYLTVAYIFVKNMLECNARYFSAFAQIEKDYLIYTNSDEFYYIDKNKKNLVTERYLK |
| | LVKDIIEKNKNTVRKDKIFRKKRQRKHLADISKSIIEFEKLPCCIFTLLRNITEHLNVASNIDIIEGYGKR |
| | AGKYHKNAPASYFIFYHYIIQKILADKICTRNLLNIINTYGEPSISFIKIIYVPFAYNLPRYLNLTDARIFC |
| | NMDDK |
| IMG_ | MKKNSNDKTNAKRMGIKSFIKNGDERFITTSIKNEFPVELKLDVIKKTCEPAHEPVSFDYDPKKIDFE |
| 3300016738 | KPVLKEKLTSGQSGQKLSTRLFIQKDRDICGIRRKYLEKIFNSNFIEEKKDSNLPMQIVAKVLSTEKVF |
| SEQ ID NO: | SNALNKIISQFLSMPRGGVTDNHGEYEIIGNIINHKSLQELNKEKKTKRIKKYLQSVIKNQSYLYNKQF |
| 4804 | LLSLDESKGSRNDIDENELYDYIRFLAILRNGIAHVFYEKNEPETAKESLFRLVDFIKNDKKLEGAFAK |
| | IKIQVNTLYKCRKEEYIKKSGKNFEIIRKIYQNDKPDEKVKDWIRYDFDKSYKYIGLSVAKLGNYTSW |
| | AKDIDNLRDKSNPDSGYAGIMHRLNEFSVYLKVKALSTEEKDKYLKNLISKENCEEKDKYYKNIAQF |
| | FCSSDLKFANVLQMVKEIKKNKGCTSEDKNCKLCVDERKFNDLSVIVYFISCFLDNKDQNIFLSDLIN |
| | RFGALSDLLRIQNKILGAGNKYNENYSFLKNERYVTEIKMELETIFALVKVSYKKEDKAFNRLLEDG |
| | LVMFGFSKDEAGMKVAGLKEIKEKKEGHYKNKSRSFLINSIVNSRKFAYLAKSIDPQKVPAIIKNEHI |
| | VRYILGRINKTNPGQIGRYWRYIMSQNHAGTDKVDDLTNEIIKINIKNILNDAGGWQKSKLNDNNNK |
| | KKLKYQQLIGLYLTVAYIFVKNMLECNARYFSAFAQIEKDYLIYTNSDEFYYIDKNKKNLVTERYLK |
| | LVKDIIEKNKNTVRKDKIFRKKRQRKHLADISKSIIEFEKLPCCIFTLLRNITEHLNVASNIDIIEGYGKR |
| | AGKYHKNAPASYFIFYHYIIQKILADKICTRNLLNIINTYGEPSISFIKIIYVPFAYNLPRYLNLTDARIFC |
| | NMDDK |
| IMG_ | MKKNSNDKTNAKRMGIKSFIKNGDERFITTSIKNEFPVELKLDVIKKTCEPAHEPVSFDYDPKKIDFE |
| 3300004628 | KPVLKEKLTSGQSGQKLSTRLFIQKDRDICGIRRKYLEKIFNSNFIEEKKDSNLPMQIVAKVLSTEKVF |
| SEQ ID NO: | SNALNKIISQFLSMPRGGVTDNHGEYEIIGNIINHKSLQELNKEKKTKRIKKYLQSVIKNQSYLYNKQF |
| 4805 | LLSLDESKGSRNDIDENELYDYIRFLAILRNGIAHVFYEKNEPETAKESLFRLVDFIKNDKKLEGAFAK |
| | IKIQVNTLYKCRKEEYIKKSGKNFEIIRKIYQNDKPDEKVKDWIRYDFDKSYKYIGLSVAKLGNYTSW |
| | AKDIDNLRDKSNPDSGYAGIMHRLNEFSVYLKVKALSTEEKDKYLKNLISKENCEEKDKYYKNIAQF |
| | FCSSDLKFANVLQMVKEIKKNKGCTSEDKNCKLCVDERKFNDLSVIVYFISCFLDNKDQNIFLSDLIN |
| | RFGALSDLLRIQNKILGAGNKYNENYSFLKNERYVTEIKMELETIFALVKVSYKKEDKAFNRLLEDG |
| | LVMFGFSKDEAGMKVAGLKEIKEKKEGHYKNKSRSFLINSIVNSRKFAYLAKSIDPQKVPAIIKNEHI |
| | VRYILGRINKTNPGQIGRYWRYIMSQNHAGTDKVDDLTNEIIKINIKNILNDAGGWQKSKLNDNNNK |
| | KKLKYQQLIGLYLTVAYIFVKNMLECNARYFSAFAQIEKDYLIYTNSDEFYYIDKNKKNLVTERYLK |
| | LVKDIIEKNKNTVRKDKIFRKKRQRKHLADISKSIIEFEKLPCCIFTLLRNITEHLNVASNIDIIEGYGKR |
| | AGKYHKNAPASYFIFYHYIIQKILADKICTRNLLNIINTYGEPSISFIKIIYVPFAYNLPRYLNLTDARIFC |
| | NMDDK |
| IMG_330002 | MKKNSNDKTNAKRMGIKSFIKNGDERFITTSIKNEFPVELKLDVIKKTCEPAHEPVSFDYDPKKIDFE |
| 8580 | KPVLKEKLTSGQSGQKLSTRLFIQKDRDICGIRRKYLEKIFNSNFIEEKKDSNLPMQIVAKVLSTEKVF |
| SEQ ID NO: | SNALNKIISQFLSMPRGGVTDNHGEYEIIGNIINHKSLQELNKEKKTKRIKKYLQSVIKNQSYLYNKQF |
| 4806 | LLSLDESKGSRNDIDENELYDYIRFLAILRNGIAHVFYEKNEPETAKESLFRLVDFIKNDKKLEGAFAK |
| | IKIQVNTLYKCRKEEYIKKSGKNFEIIRKIYQNDKPDEKVKDWIRYDFDKSYKYIGLSVAKLGNYTSW |
| | AKDIDNLRDKSNPDSGYAGIMHRLNEFSVYLKVKALSTEEKDKYLKNLISKENCEEKDKYYKNIAQF |
| | FCSSDLKFANVLQMVKEIKKNKGCTSEDKNCKLCVDERKFNDLSVIVYFISCFLDNKDQNIFLSDLIN |
| | RFGALSDLLRIQNKILGAGNKYNENYSFLKNERYVTEIKMELETIFALVKVSYKKEDKAFNRLLEDG |
| | LVMFGFSKDEAGMKVAGLKEIKEKKEGHYKNKSRSFLINSIVNSRKFAYLAKSIDPQKVPAIIKNEHI |
| | VRYILGRINKTNPGQIGRYWRYIMSQNHAGTDKVDDLTNEIIKINIKNILNDAGGWQKSKLNDNNNK |
| | KKLKYQQLIGLYLTVAYIFVKNMLECNARYFSAFAQIEKDYLIYTNSDEFYYIDKNKKNLVTERYLK |
| | LVKDIIEKNKNTVRKDKIFRKKRQRKHLADISKSIIEFEKLPCCIFTLLRNITEHLNVASNIDIIEGYGKR |
| | AGKYHKNAPASYFIFYHYIIQKILADKICTRNLLNIINTYGEPSISFIKIIYVPFAYNLPRYLNLTDARIFC |
| | NMDDK |
| IMG_ | MKKNSNDKTNAKRMGIKSFIKNGDERFITTSIKNEFPVELKLDVIKKTCEPAHEPVSFDYDPKKIDFE |
| 3300012889 | KPVLKEKLTSGQSGQKLSTRLFIQKDRDICGIRRKYLEKIFNSNFIEEKKDSNLPMQIVAKVLSTEKVF |
| SEQ ID NO: | SNALNKIISQFLSMPRGGVTDNHGEYEIIGNIINHKSLQELNKEKKTKRIKKYLQSVIKNQSYLYNKQF |
| 4807 | LLSLDESKGSRNDIDENELYDYIRFLAILRNGIAHVFYEKNEPETAKESLFRLVDFIKNDKKLEGAFAK |
| | IKIQVNTLYKCRKEEYIKKSGKNFEIIRKIYQNDKPDEKVKDWIRYDFDKSYKYIGLSVAKLGNYTSW |
| | AKDIDNLRDKSNPDSGYAGIMHRLNEFSVYLKVKALSTEEKDKYLKNLISKENCEEKDKYYKNIAQF |
| | FCSSDLKFANVLQMVKEIKKNKGCTSEDKNCKLCVDERKFNDLSVIVYFISCFLDNKDQNIFLSDLIN |
| | RFGALSDLLRIQNKILGAGNKYNENYSFLKNERYVTEIKMELETIFALVKVSYKKEDKAFNRLLEDG |
| | LVMFGFSKDEAGMKVAGLKEIKEKKEGHYKNKSRSFLINSIVNSRKFAYLAKSIDPQKVPAIIKNEHI |
| | VRYILGRINKTNPGQIGRYWRYIMSQNHAGTDKVDDLTNEIIKINIKNILNDAGGWQKSKLNDNNNK |
| | KKLKYQQLIGLYLTVAYIFVKNMLECNARYFSAFAQIEKDYLIYTNSDEFYYIDKNKKNLVTERYLK |
| | LVKDIIEKNKNTVRKDKIFRKKRQRKHLADISKSIIEFEKLPCCIFTLLRNITEHLNVASNIDIIEGYGKR |
| | AGKYHKNAPASYFIFYHYIIQKILADKICTRNLLNIINTYGEPSISFIKIIYVPFAYNLPRYLNLTDARIFC |
| | NMDDK |
| IMG_ | MKKNSNDKTNAKRMGIKSFIKNGDERFITTSIKNEFPVELKLDVIKKTCEPAHEPVSFDYDPKKIDFE |
| 3300012886 | KPVLKEKLTSGQSGQKLSTRLFIQKDRDICGIRRKYLEKIFNSNFIEEKKDSNLPMQIVAKVLSTEKVF |
| SEQ ID NO: | SNALNKIISQFLSMPRGGVTDNHGEYEIIGNIINHKSLQELNKEKKTKRIKKYLQSVIKNQSYLYNKQF |
| 4808 | LLSLDESKGSRNDIDENELYDYIRFLAILRNGIAHVFYEKNEPETAKESLFRLVDFIKNDKKLEGAFAK |
| | IKIQVNTLYKCRKEEYIKKSGKNFEIIRKIYQNDKPDEKVKDWIRYDFDKSYKYIGLSVAKLGNYTSW |
| | AKDIDNLRDKSNPDSGYAGIMHRLNEFSVYLKVKALSTEEKDKYLKNLISKENCEEKDKYYKNIAQF |
| | FCSSDLKFANVLQMVKEIKKNKGCTSEDKNCKLCVDERKFNDLSVIVYFISCFLDNKDQNIFLSDLIN |
| | RFGALSDLLRIQNKILGAGNKYNENYSFLKNERYVTEIKMELETIFALVKVSYKKEDKAFNRLLEDG |
| | LVMFGFSKDEAGMKVAGLKEIKEKKEGHYKNKSRSFLINSIVNSRKFAYLAKSIDPQKVPAIIKNEHI |
| | VRYILGRINKTNPGQIGRYWRYIMSQNHAGTDKVDDLTNEIIKINIKNILNDAGGWQKSKLNDNNNK |
| | KKLKYQQLIGLYLTVAYIFVKNMLECNARYFSAFAQIEKDYLIYTNSDEFYYIDKNKKNLVTERYLK |
| | LVKDIIEKNKNTVRKDKIFRKKRQRKHLADISKSIIEFEKLPCCIFTLLRNITEHLNVASNIDIIEGYGKR |
| | AGKYHKNAPASYFIFYHYIIQKILADKICTRNLLNIINTYGEPSISFIKIIYVPFAYNLPRYLNLTDARIFC |
| | NMDDK |
| UZMO01.1 | MAKKNKMKPRELREAQKKARQLKAAEINNNATPTIAAMPAAEVIAPAAEKKKSSVKAAGMKSILV |
| SEQ ID NO: | SKNKMYITSFGKGNSAVLEYEVDNNDYNQTQLSSKNSSNIELRGVNEVNITFSSKHGFESGVEINTSN |
| 4809 | PTHRSGESSSVRGDMLGLKSELEKRFFGKTFDDNIHIQLIYNILDIEKILAVYVTNIVYALNNMLGIKD |
| | SESYDDFIGYLSARNTYKVFTHPDKSNLSDKVKGNIKKSFSTFNDLLKTKRLGYFGLEEPKTKDTRVS |
| | QAYKKRVYHMLAIVGQIRQSVFHDKSSKLDEDLYSFIDIIDPEYRETLDYLVDERFDSINKGFIQGNK |
| | VNISLLIDMMKGYEADDIIRLYYDFIVLKSQKNLGFSIKKLREKMLDEYGFRFKDKQYDSVRSKMYK |
| | LMDFLLFCNYYRNDVVAGEALVRKLRFSMTDDEKRGDIC |
| UPPC01.1_2 | MAKKNKMKPRELREAQKKARQLKAAEINNNAAPAIAAMPAAEVIAPAAEKKKSSVKAAGMKSILV |
| SEQ ID NO: | SKNKMYITSFGKGNSAVLEYEVDKVDNNNYNKTQLSSESSSNIELCGVTKVNITFSSKHGLESGVEIS |
| 4810 | TSNPTHRSGESSPVRWDMLGLKSELEKRFFGKTFDDNIHIQLIYNILDIEKILAVYVTNIVYALNNMLG |
| | VKGSESHDDFIGYLSTNNTYDVFIDPDNSSLSDDKKANVRKSLSKFNVLLKTKRLGYFGLEEPKTKD |
| | TRASQAYKKRVYHMLAIVGQIRQCVFHDKSGAKRFDLYSFINNIYPEYRDTLDYLVEERLKSINKDFI |
| | EGNKVNISLLIDMMKGYEADDIIRLYYDFIVLKSQKNLGFSIKKLREKMLDEYGFRFKDKQYDSVRS |
| | KMYKLMDFLLFCNYYRNDVAAGEALVRKLRFSMTDDEKEGIYADEAAKLWGKFRNDFENIADHM |
| | NGDVIKELGKADMDFDEKILDSEKKNASDLLYFSKMIYMLTYFLDGKEINDLLTTLISKFDNIKEF |
| OWCF01.1 | MAKKNKMKPRELREAQKKARQLKAAEINNNAAPAIAAMPAAEVIAPAAEKKKSSVKAAGMKSILV |
| SEQ ID NO: | SKNKMYITSFGKGNSAVLEYEVDKVDNNNYNKTQLSSESSSNIELCGVTKVNITFSSKHGLESGVEIS |
| 4811 | TSNPTHRSGESSPVRWDMLGLKSELEKRFFGKTFDDNIHIQLIYNILDIEKILAVYVTNIVYALNNMLG |
| | VKGSESHDDFIGYLSTNNTYDVFIDPDNSSLSDDKKANVRKSLSKFNVLLKTKRLGYFGLEEPKTKD |
| | TRASQAYKKRVYHMLAIVGQIRQCVFHDKSGAKRFDLYSFINNIYPEYRDTLDYLVEERLKSINKDFI |
| | EGNKVNISLLIDMMKGYEADDIIRLYYDFIVLKSQKNLGFSIKKLREKMLDEYGFRFKDKQYDSVRS |
| | KMYKLMDFLLFCNYYRNDVAAGEALVRKLRFSMTDDEKEGIYADEAAKLWGKFRNDFENIADHM |
| | NGDVIKELGKADMDFDEKILDSEKKNASDLLYFSKMIYMLTYFLDGKEINDLLTTLISKFDNIKEF |
| OGLN01.1 | MAKKNKMKPRELREAQKKARQLKAAEINNNAAPAIAAMPAAEVIAPAAEKKKSSVKAAGMKSILV |
| SEQ ID NO: | SKNKMYITSFGKGNSAVLEYEVDKVDNNNYNKTQLSSESSSNIELCGVTKVNITFSSKHGLESGVEIS |
| 4812 | TSNPTHRSGESSPVRWDMLGLKSELEKRFFGKTFDDNIHIQLIYNILDIEKILAVYVTNIVYALNNMLG |
| | VKGSESHDDFIGYLSTNNTYDVFIDPDNSSLSDDKKANVRKSLSKFNVLLKTKRLGYFGLEEPKTKD |
| | TRASQAYKKRVYHMLAIVGQIRQCVFHDKSGAKRFDLYSFINNIYPEYRDTLDYLVEERLKSINKDFI |
| | EGNKVNISLLIDMMKGYEADDIIRLYYDFIVLKSQKNLGFSIKKLREKMLDEYGFRFKDKQYDSVRS |
| | KMYKLMDFLLFCNYYRNDVAAGEALVRKLRFSMTDDEKEGIYADEAAKLWGKFRNDFENIADHM |
| | NGDVIKELGKADMDFDEKILDSEKKNASDLLYFSKMIYMLTYFLDGKEINDLLTTLISKFDNIKEF |
| UZLM01.1 | MAKKNKMKPRELREAQKKARQLKAAEINNNAAPAIAAMPAAEVIAPAAEKKKSSVKAAGMKSILV |
| SEQ ID NO: | SKNKMYITSFGKGNSAVLEYEVDKVDNNNYNKTQLSSESSSNIELCGVTKVNITFSSKHGLESGVEIS |
| 4813 | TSNPTHRSGESSPVRWDMLGLKSELEKRFFGKTFDDNIHIQLIYNILDIEKILAVYVTNIVYALNNMLG |
| | VKGSESHDDFIGYLSTNNTYDVFIDPDNSSLSDDKKANVRKSLSKFNVLLKTKRLGYFGLEEPKTKD |
| | TRASQAYKKRVYHMLAIVGQIRQCVFHDKSGAKRFDLYSFINNIYPEYRDTLDYLVEERLKSINKDFI |
| | EGNKVNISLLIDMMKGYEADDIIRLYYDFIVLKSQKNLGFSIKKLREKMLDEYGFRFKDKQYDSVRS |
| | KMYKLMDFLLFCNYYRNDVAAGEALVRKLRFSMTDDEKEGIYADEAAKLWGKFRNDFENIADHM |
| | NGDVIKELGKADMDFDEKILDSEKKNASDLLYFSKMIYMLTYFLDGKEINDLLTTLISKFDNIKEF |
| OGWR01.1_2 | MAKKNKMKPRELREAQKKARQLKAAEINNNAAPAIAAMPAAEVIAPAAEKKKSSVKAAGMKSILV |
| SEQ ID NO: | SKNKMYITSFGKGNSAVLEYEVDKVDNNNYNKTQLSSESSSNIELCGVTKVNITFSSKHGLESGVEIS |
| 4814 | TSNPTHRSGESSPVRWDMLGLKSELEKRFFGKTFDDNIHIQLIYNILDIEKILAVYVTNIVYALNNMLG |
| | VKGSESHDDFIGYLSTNNTYDVFIDPDNSSLSDDKKANVRKSLSKFNVLLKTKRLGYFGLEEPKTKD |
| | TRASQAYKKRVYHMLAIVGQIRQCVFHDKSGAKRFDLYSFINNIYPEYRDTLDYLVEERLKSINKDFI |
| | EGNKVNISLLIDMMKGYEADDIIRLYYDFIVLKSQKNLGFSIKKLREKMLDEYGFRFKDKQYDSVRS |
| | KMYKLMDFLLFCNYYRNDVAAGEALVRKLRFSMTDDEKEGIYADEAAKLWGKFRNDFENIADHM |
| | NGDVIKELGKADMDFDEKILDSEKKNASDLLYFSKMIYMLTYFLDGKEINDLLTTLISKFDNIKEF |
| OHAD01.1 | MAKKNKMKPRELREAQKKARQLKAAEINNNAAPAIAAMPAAEVIAPAAEKKKSSVKAAGMKSILV |
| SEQ ID NO: | SKNKMYITSFGKGNSAVLEYEVDKVDNNNYNKTQLSSESSSNIELCGVTKVNITFSSKHGLESGVEIS |
| 4815 | TSNPTHRSGESSPVRWDMLGLKSELEKRFFGKTFDDNIHIQLIYNILDIEKILAVYVTNIVYALNNMLG |
| | VKGSESHDDFIGYLSTNNTYDVFIDPDNSSLSDDKKANVRKSLSKFNVLLKTKRLGYFGLEEPKTKD |
| | TRASQAYKKRVYHMLAIVGQIRQCVFHDKSGAKRFDLYSFINNIYPEYRDTLDYLVEERLKSINKDFI |
| | EGNKVNISLLIDMMKGYEADDIIRLYYDFIVLKSQKNLGFSIKKLREKMLDEYGFRFKDKQYDSVRS |
| | KMYKLMDFLLFCNYYRNDVAAGEALVRKLRFSMTDDEKEGIYADEAAKLWGKFRNDFENIADHM |
| | NGDVIKELGKADMDFDEKILDSEKKNASDLLYFSKMIYMLTYFLDGKEINDLLTTLISKFDNIKEF |
| USXY01.1_2 | MAKKNKMKPRELREAQKKARQLKAAEINNNAAPAIAAMPAAEVIAPAAEKKKSSVKAAGMKSILV |
| SEQ ID NO: | SKNKMYITSFGKGNSAVLEYEVDKVDNNNYNKTQLSSESSSNIELCGVTKVNITFSSKHGLESGVEIS |
| 4816 | TSNPTHRSGESSPVRWDMLGLKSELEKRFFGKTFDDNIHIQLIYNILDIEKILAVYVTNIVYALNNMLG |
| | VKGSESHDDFIGYLSTNNTYDVFIDPDNSSLSDDKKANVRKSLSKFNVLLKTKRLGYFGLEEPKTKD |
| | TRASQAYKKRVYHMLAIVGQIRQCVFHDKSGAKRFDLYSFINNIYPEYRDTLDYLVEERLKSINKDFI |
| | EGNKVNISLLIDMMKGYEADDIIRLYYDFIVLKSQKNLGFSIKKLREKMLDEYGFRFKDKQYDSVRS |
| | KMYKLMDFLLFCNYYRNDVAAGEALVRKLRFSMTDDEKEGIYADEAAKLWGKFRNDFENIADHM |
| | NGDVIKELGKADMDFDEKILDSEKKNASDLLYFSKMIYMLTYFLDGKEINDLLTTLISKFDNIKEF |
| OZEI01.1 | MAKKNKMKPRELREAQKKARQFKAAEINNNAAPAIAAMPAAEVIAPVAEKKKSSVKAAGMKSILV |
| SEQ ID NO: | SENKMYITSFGKGNSAVLEYEVDNNDYNKTQLSSKDNSNIELGDVDEVNITFSSKHGFGSGVEINTS |
| 4817 | NPTHRSGESSPVRWDMLGLKSELEKRFFGKTFDDNIHIQLIYNILDIEKILAVYVTNIVYALNNMLGV |
| | KGSESHDDFIGYLSTNNIYDVFIDPDNSSLSDDKKANVRKSLSKFNVLLKTKRLGYFGLEEPKTKDNR |
| | VSEAYKKRVYHMLAIVGQIRQCVFHDKSGAKRFDLYSFINNIDPEYRDTLDYLVDERFDSINKGFVQ |
| | GNKVNISLLIDMMKGYEADDIIRLYYDFIVLKSQKNLGFSIKKLREKMLDEYGYRFKDKQYDSVRSK |
| | MYKLMDFLLFCNYYRNDVVAGEALVRKLRFSMTDDEKEGIYADEAEKLWGKFRNDFENIADHMN |
| | GDVIKELGKADMDFDEKILDSEKKNASDLLYFSKMIYMLTYFLDGKEINDLLTTLISKFDNIKEFLKI |
| | MKSSAVDVECELTAGYKLFNDSQRITNELFIVKNIASMRKPAA |
| OCPU01.1 | MAKKNKMKPRELREAQKKARQFKAAEINNNAVPAIAAMPAAEAAAPAAEKKKSSVKAAGMKSIL |
| SEQ ID NO: | VSENKMYITSFGKGNSAVLEYEVDNNDYNKTQLSSEDSSNIELCGVNEVNITFSSKHGFESGVEINTS |
| 4818 | NPTHRSGESSPVRGDMLGLKSELEKRFFGKTFDDNIHIQLIYNILDIEKILAVYVTNIVYALNNMLGV |
| | KGSESHDDFIGYLSTNNIYDVFIDPDNSSLSDDKKANVRKSLSKFNALLKTKRLGYFGLEEPKTKDTR |
| | ASEAYKKRVYHMLAIVGQIRQCVFHDKSGAKRFDLYSFINNIDPEYRDTLDYLVDERFDSINKGFIQG |
| | NKVNISLLIDMMKGYEADDIIRLYYDFIVLKSQKNLGFSIKKLREKMLEEYGYRFKDKQYDSVRSKM |
| | YKLMDFLLFCNYYRNDVVAGEALVRKLRFSMTDDEKEGIYADEAAKLWGKFRNDFENIADHMNG |
| | DVIKELGKADMDFDEKILDSEKKNASDLLYFSKMIYMLTYFLDGKEINDLLTTLISKFDNIKEFLKIM |
| | KSSAVDVECELTAGYKLFNDSQRITNELFIVKNIASMRKPAASAKLTMFRDALTILGIDDKITDDRISE |
| | ILKLKEKGKGIHGLRNFITNNVTESSRFVYLIKYANAQKIREVAKNEKWMFVLGGIPDTQIERYYKS |
| | CVEFPDMNSSLGVKRSELARMIKNISFDDFKNVKQQAKGRENVAKERAKAVIGLYLTVMYLLVKNL |
| | VNVNARYVIAIHCLERDFGLYKEIIPELASKNLKNDYRILSQTLCELCDKSPNLFCASALKSILIMQTA |
| | A |
| OGTB01.1 | MAKKNKMKPRELREAQKKARQFKAAEINNNAVPAIAAMPAAEAAAPAAEKKKSSVKAAGMKSIL |
| SEQ ID NO: | VSENKMYITSFGKGNSAVLEYEVDNNDYNKTQLSSEDSSNIELCGVNEVNITFSSKHGFESGVEINTS |
| 4819 | NPTHRSGESSPVRGDMLGLKSELEKRFFGKTFDDNIHIQLIYNILDIEKILAVYVTNIVYALNNMLGV |
| | KGSESHDDFIGYLSTNNIYDVFIDPDNSSLSDDKKANVRKSLSKFNALLKTKRLGYFGLEEPKTKDTR |
| | ASEAYKKRVYHMLAIVGQIRQCVFHDKSGAKRFDLYSFINNIDPEYRDTLDYLVDERFDSINKGFIQG |
| | NKVNISLLIDMMKGYEADDIIRLYYDFIVLKSQKNLGFSIKKLREKMLEEYGYRFKDKQYDSVRSKM |
| | YKLMDFLLFCNYYRNDVVAGEALVRKLRFSMTDDEKEGIYADEAAKLWGKFRNDFENIADHMNG |
| | DVIKELGKADMDFDEKILDSEKKNASDLLYFSKMIYMLTYFLDGKEINDLLTTLISKFDNIKEFLKIM |
| | KSSAVNVECELTAGYKLFNDSQRITNELFIVKNIASMRKPAAYDVP |
| IMG_ | MAKKNKMKPRELREAQKKARQFKAAEINNNAAPAIAAMPAAQVIAPVAEKKKSSVKAAGMKSILV |
| 3300008520 | SENKMYITSFGKGNSAVLEYEVDNNDYNKTQLSSKDNSNIELCGVNEVNITFSSKHGFESGVEINTSN |
| SEQ ID NO: | PTHRSGESSPVRWDMLGLKSELEKRFFGKTFDDNIHIQLIYNILDIEKILAVYVTNIVYALNNMLGVK |
| 4820 | GSESHDDFIGYLSTNNTYDVFIDPDNSSLSDDKKANVRKSLSKFNVLLKTKRLGYFGLEEPKTKDNR |
| | VSEAYKKRVYHMLAIVGQIRQCVFHDKSGAKRFDLYSFINNIDPEYRDTLDYLVEERLKSINKDFIQG |
| | NKVNISLLIDMMKGYEADDIIRLYYDFIVLKSQKNLGFSIKKLREKMLEEYGFRFKDKQYDSVRSKM |
| | YKLMDFLLFCNYYRNDIAAGEALVRKLRFSMTDDEKEGLYADEAAKLWGKFRNDFENIADHMNG |
| | DVIKELGKADMDFDEKILDSEKKNASDLLYFSKMIYMLTL |
| IMG_ | MAKKNKMKPRELREAQKKARQFKAAEINNNAAPAIAAMPAAQVIAPVAEKKKSSVKAAGMKSILV |
| 3300008672 | SENKMYITSFGKGNSAVLEYEVDNNDYNKTQLSSKDNSNIELCGVNEVNITFSSKHGFESGVEINTSN |
| SEQ ID NO: | PTHRSGESSPVRWDMLGLKSELEKRFFGKTFDDNIHIQLIYNILDIEKILAVYVTNIVYALNNMLGVK |
| 4821 | GSESHDDFIGYLSTNNTYDVFIDPDNSSLSDDKKANVRKSLSKFNVLLKTKRLGYFGLEEPKTKDNR |
| | VSEAYKKRVYHMLAIVGQIRQCVFHDKSGAKRFDLYSFINNIDPEYRDTLDYLVEERLKSINKDFIQG |
| | NKVNISLLIDMMKGYEADDIIRLYYDFIVLKSQKNLGFSIKKLREKMLEEYGFRFKDKQYDSVRSKM |
| | YKLMDFLLFCNYYRNDIAAGEALVRKLRFSMTDDEKEGLYADEAAKLWGKFRNDFENIADHMNG |
| | DVIKELGKADMDFDEKILDSEKKNASDLLYFSKMIYMLTL |
| OWRJ01.1 | MAKKNKMKPRELREAQKKARQLKAAEINNNAIPAIAAMPAAEVIAPAEKKKSSVKAAGMKSILVSK |
| SEQ ID NO: | NKMYITSFGKGNSAVLEYEVDNNDYNKTQLSSKDNSNIELGDVNEVNITFSSKHGFGSGMKINTSNP |
| 4822 | THRSGESSPVRWDMLGLKSELEKRFFGKTFDDNIHIQLIYNILDIEKILAVYVTNIVYALNNMLGVKG |
| | SESHDDFIGYLSTNNIYDVFIDPDNSSLSDDKKANVRKSLSKFNVLLKTKRLGYFGLEEPKTKDNRVS |
| | EAYKKRVYHMLAIVGQIRQCVFHDKSGAKRFDLYSFINNIDPEYRDTLDYLVEERLKSINKDFIQGN |
| | KVNISLLIDMMKGYEADDIIRLYYDFIVLKSQKNLGFSIKKLREKMLEEYGFRFKDKQYDSVRSKMY |
| | KLMDFLLFCNYYRNDVVAGEALVRKLRFSMTDDEKEGIYADEAAKLWGKFRNDFENIADHMNGD |
| | VIKELGKADMDFDEKILDSEKKNASDLLYFSKMIYMLTYFLDGKEINDLLTTLISKFDNIKEFLKIMK |
| | SSAVDVECELTAGYKLFNDSQRITNELFIVKNIASMRKPAASAKLTMFRDALTILGIDDNITDDRISEIL |
| | KLKEKGKGIHGLRNFITNNVIESSRFVYLIKYANAQKIREVAKNEKVVMFVLGGIPDTQIERYYKSCV |
| | EFPDMNSSLEAKRSELARMIKNISFDDFKNVKQQAKGRENVAKERAKAVIGLYLTVMYLLVKNLVN |
| | VNARYVIAIHCLERDFGLYKEIIPELASKNLKNDYRILSQTLCELCDDRDESPNLFLKKNKRLRKCVE |
| | VDINNADSSMTRKYRNCIAHLTVVRELKEYIGDIRTVDSYFSIYHYVMQRCITKREMTQSKKRK |
| ULWL01.1 | VLSGIFVNAFSSKHGFESGVEINTSNPTHRSGESSPVRGDMLGLKSELEKRFFGKTFDDNIHIQLIYNIL |
| SEQ ID NO: | DIEKILAVYVTNIVYALNNMLGVKGSESHDDFIGYLSTNNTYDVFIDPDNSSLSDDKKANVRKSLSKF |
| 4823 | NVLLKTKRLGYFGLEEPKTKDNRVSEAYKKRVYHMLAIVGQIRQCVFHDKSGAKRFDLYSFINNIDP |
| | EYRDTLDYLVEERLKSINKDFIQGNKVNISLLIDMMKGYEADDIIRLYYDFIVLKSQKNLGFSIKKLRE |
| | KMLEEYGFRFKDKQYDSVRSKMYKLMDFLLFCNYYRNDIAAGEALVRKLRFSMTDDEKEGLYADE |
| | AAKLWGKFRNDFENIADHMNGDVIKELGKADMDFDEKILDSEKKNASDLLYFSKMIYMLTYFLDG |
| | KEINDLLTTLISKFDNIKEFLKIMKSSAVNVECELTAGYKLFNDSQRITNELFIVKNIASMRKPAASAK |
| | LTMFRDALTILGIDDKITDDRISEILKLKEKGKGIHGLRNFITNNVIESSRFVYLIKYANAQKIREVAEN |
| | EKVVMFVLGGIPDTQIERYYKSCVEFPDMNSSLEAKRSELARMIKNIRFDDFKNVKQQAKGRENVA |
| | KERAKAVIGLYLTVMYLLVKNLVNVNARYVIAIHCLERDFGLYKEIIPELASKNLKNDYRILSQTLCE |
| | LCDDRDESP |
| OLWE01.1 | VLSGIFVNAFSSKHGFESGVEINTSNPTHRSGESSPVRGDMLGLKSELEKRFFGKTFDDNIHIQLIYNIL |
| SEQ ID NO: | DIEKILAVYVTNIVYALNNMLGVKGSESHDDFIGYLSTNNIYDVFIDPDNSSLSDDKKANVRKSLSKF |
| 4824 | NVLLKTKRLGYFGLEEPKTKDNRVSEAYKKRVYHMLAIVGQIRQCVFHDKSGAKRFDLYSFINNIDP |
| | EYRDTLDYLVEERLKSINKDFIQGNKVNISLLIDMMKGYEADDIIRLYYDFIVLKSQKNLGFSIKKLRE |
| | KMLEEYGFRFKDKQYDSVRSKMYKLMDFLLFCNYYRNDVVAGEALVRKLRFSMTDDEKEGIYAD |
| | EAAKLWGKFRNDFENIADHMNGDVIKELGKADMDFDEKILDSEKKNASDLLYFSKMIYMLTYFLD |
| | GKEINDLLTTLISKFDNIKEFLKIMKSSAVDVECELTAGYKLFNDSQRITNELFIVKNIASMRKPAASA |
| | KLTMFRDALTILGIDDNITDDRISEILKLKEKGKGIHGLRNFITNNVIESSRFVYLIKYANAQKIREVAK |
| | NEKVVMFVLGGIPDTQIERYYKSCVEFPDMNSSLEAKRSELARMIKNISFDDFKNVKQQAKGRENV |
| | AKERAKAVIGLYLTVMYLLVKNLVNVNARYVIAIHCLERDFGLYKEIIPELASKNLKNDYRILSQTLC |
| | ELCDDRDESPNLFLKKNKRLRKC |
| OHUI01.1 | VIFMAKKNKMKPRELREAQKKARQLKAAEINNNAAPAIAAMPAAEVIAPAAEKKKSSVKAAGMKS |
| SEQ ID NO: | ILVSENKMYITSFGKGNSAVLEYEVDNNDYNQTQLSSKDNSNIQLGGVNEVNITFSSKHGFESGVEIN |
| 4825 | TSNPTHRSGESSPVRGDMLGLKSELEKRFFGKTFDDNIHIQLIYNILDIEKILAVYVTNIVYALNNMLG |
| | VKGSESHDDFIGYLSTNNIYDVFIDPDNSSLSDDKKANVRKSLSKFNALLKTKRLGYFGLEEPKTKDN |
| | RVSQAYKKRVYHMLAIVGQIRQCVFHDKSGAKRFDLYSFINNIDPEYRDTLDYLVEERLKSINKDFIE |
| | DNKVNISLLIDMMKGYEADDIIRLYYDFIVLKSQKNLGFSIKKLREKMLDEYGFRFKDKQYDSVRSK |
| | MYKLMDFLLFCNYYRNDIAAGESLVRKLRFSMTDDEKEGIYADEAAKLWGKFRNDFENIADHMNG |
| | DVIKELGKADMDFDEKILDSEKKNASDLLYFSKMIYMLTYFLDGKEINDLLTTLISKFDNIKEFLKIM |
| | KSSAVDVECELTAGYKLFNDSQRITNELFIVKNIASMRKPAASAKLTMFRDALTILGIDDKI |
| OKUN01.1 | VIFMAKKNKMKPRELREAQKKARQLKAAEINNNAAPAIAAMPAAEVIAPAAEKKKSSVKAAGMKS |
| SEQ ID NO: | ILVSENKMYITSFGKGNSAVLEYEVDNNDYNQTQLSSKDNSNIQLGGVNEVNITFSSKHGFESGVEIN |
| 4826 | TSNPTHRSGESSPVRGDMLGLKSELEKRFFGKTFDDNIHIQLIYNILDIEKILAVYVTNIVYALNNMLG |
| | VKGSESHDDFIGYLSTNNIYDVFIDPDNSSLSDDKKANVRKSLSKFNALLKTKRLGYFGLEEPKTKDN |
| | RVSQAYKKRVYHMLAIVGQIRQCVFHDKSGAKRFDLYSFINNIDPEYRDTLDYLVEERLKSINKDFIE |
| | DNKVNISLLIDMMKGYEADDIIRLYYDFIVLKSQKNLGFSIKKLREKMLDEYGFRFKDKQYDSVRSK |
| | MYKLMDFLLFCNYYRNDIAAGESLVRKLRFSMTDDEKEGIYADEAAKLWGKFRNDFENIADHMNG |
| | DVIKELGKADMDFDEKILDSEKKNASDLLYFSKMIYMLTYFLDGKEINDLLTTLISKFDNIKEFLKIM |
| | KSSAVDVECELTAGYKLFNDSQRITNELFIVKNIASMRKPAASAKLTMFRDALTILGIDDKITDDRISG |
| | ILKLKEKGKGIHGLRNFITNNVIESSRFVYLIKYANAQKIREVAKNEKVVMFVLGGIPDTQIERYYKS |
| | CVEFPDMNSSLGVKRSELARMIKNISFDDFKNVKQQAKGRENVAKERAKAVIGLYLTVMYLLVKNL |
| | VNVNARYVIAIHCLERDFGLYKEIIPELASKNLKNDYRILSQTLCELCDKSPNLFLKKNERL |
| OGRM01.1_2 | VIFMAKKNKMKPRELREAQKKARQLKAAEINNNAAPAIAAMPAAEAAEKKKSSVKAAGMKSILVS |
| SEQ ID NO: | ENKMYITSFGKGNSAVLEYEVDNNDYNQTQLSSKGSSNIELHGVNEVNITFSSKHGFESGVEINTSNP |
| 4827 | THRSGESSPVRWDMLGLKSELEKRFFGKTFDDNIHIQLIYNILDIEKILAVYVTNIVYALNNMLGVKG |
| | SESHDDFIGYLSTNNTYDVFIDPDNSSLSDDKKANVRKSLSKFNVLLKTKRLGYFGLEEPKTKDTRVS |
| | QAYKKRVYHMLAIVGQIRQCVFHDKSGAKRFDLYSFINNIDPEYRETLDYLVDERFDSINKGFIEGN |
| | KINISLLIDMMKGYEADDIIRLYYDFIVLKSQKNLGFSIKKLREKMLDEYGFRFKDKQYDPVRSKMY |
| | KLMDFLLFCNHYRNDVAAGEALVRKLRFSMTDDEKEGIYADEAAKLWGKFRNDFENIADHMNGD |
| | VIKELGKADMDFDEKILDSEKKNASDLLYFSKMIYMLTYFLDGKEINDLLTTLISKFDNIKEFLKIMK |
| | SSAVDVECELTAGYKLFNDSQRITNELFIVKNIASMRKPAASAKLTMFRDALTILGIDDNITDDRISEIL |
| | KLKEKGKGIHGLRNFITNNVIESSRFVYLIKYANAQKIREVAKNEKWMFVLGGIPDTQIERYYKSCV |
| | EFPDMNSSLEAKRSELARMIKNISFDDFKNVKQQAKGRENVAKERAKAVIGLYLTVMYLLVKNLVN |
| | VNARYVIAIHCLERDFGLYKEIIPELASKNLKNDYRILSQTLCEL |
| OBDE01.1 | MAKKNKMKPRELREAQKKARQLKAAEINNNAAPAIAAMPAAEAAAPAAEKKKSSVKAAGMKSIL |
| SEQ ID NO: | VSENKMYITSFGKGNSAVLEYEVDNNDYNQTQLSSKGSSNIELHGVNEVNITFSSKHGFESGVEINTS |
| 4828 | NPTHRSGESSPVRWDMLGLKSELEKRFFGKTFDDNIHIQLIYNILDIEKILAVYVTNIVYALNNMLGV |
| | KGSESHDDFIGYLSTNNTYDVFIDPDNSSLSDDKKANVRKSLSKFNVLLKTKRLGYFGLEEPKTKDT |
| | RVSQAYKKRVYHMLAIVGQIRQCVFHDKSGAKRFDLYSFINNIDPEYRETLDYLVDERFDSINKGFIE |
| | GNKINISLLIDMMKGYEADDIIRLYYDFIVLKSQKNLGFSIKKLREKMLDEYGFRFKDKQYDPVRSK |
| | MYKLMDFLLFCNHYRNDVAAGEALVRKLRFSMTDDEKEGIYADEAAKLWGKFRNDFENIADHMN |
| | GDVIKELGKADMDFDEKILDSEKKNASDLLYFSKMIYMLTYFLDGKEINDLLTTLISKFDNIKEFLKI |
| | MKSSAVDVECELTAGYKLFNDSQRITNELFIVKNIASMRKPAASAKLTMFRDALTILGIDDNITDDRI |
| | SEILKLKEKGKGIHGLRNFITNNVIESSRFVYLIKYANAQKIREVAKNEKVVMFVLGGIPDTQIERYYK |
| | SCVEFPDMNSSLEAKRSELARMIKNISFDDFKNVKQQAKGRENVAKERAKAVIGLYLTVMYLLVKN |
| | LVNVNARYVIAIHCLERDFGLYKEIIPELASKNLKNDYRILSQTLVNFVMIVMSRRICS |
| OWSQ01.1 | VIFMAKKNKMKPRELREAQKKARQLKAAEINNNAVPAIAAMPAAEVIAPAAEKKKSSVKAAGMKS |
| SEQ ID NO: | ILVSENKMYITSFGKGNSAVLEYEVDKVDNNNYNKTQLSSNDNSNIELRGVTKVNITFSSKHGLESG |
| 4829 | VEINTSNPTHRSGESSPVRWDMLGLKSELEKRFFGKTFDDNIHIQLIYNILDIEKILAVYVTNIVYALN |
| | NMLGVKGSESHDDFIGYLSTNNIYDVFIDPDNSSLSDDKKANVRKSLSKFNALLKTKRLGYFGLEEP |
| | KTKDNRVSQAYKKRVYHMLAIVGQIRQCVFHDKSGAKRFDLYSFINNIDPEYRDTLDYLVDERFDSI |
| | NKGFIEGNKINISLLIDMMKGYEADDIIRLYYDFIVLKSQKNLGFSIKKLREKMLDEYGFRFKDKQYD |
| | SVRSKMYKLMDFLLFCNYYRNDVVAGEALVRKLRFSMTDDEKEGIYADEAAKLWGKFRNDFENIA |
| | DHMNGDVTKELGKADMDFDEKILDSEKKNASDLLYFSKMIYMLTYFLDGKEINDLLTTLISKFDNIK |
| | EFLKIMKSSAVDVECELTAGYKLFNDSQRITNELFIVKNIASMRKPAASAKLTMFRDALTILGIDDKIT |
| | DDRISEILKLKEKGKGIHGLRNFITNNVIESSRFVYLIKYANAQKIREVAKNEKWMFVLGGIPDTQIE |
| | RYYKSCVEFPDMNSSLEVKRSELARMIKNISFDDFKNVKQQAKGRENVAKERAKAVIGLYLTVMYL |
| | LVKNLVNVNARYVIAIHCLERDFGLYKEIIPELASKNLKNDYRILSQTLCELCDERDKSPNLFLKKNE |
| | RLRKCVEVDINNADSIMTRKYRNCIAHLTVVREL |
| OOWK01.1 | MAKKNKMKPRELREAQKKARQFKAAEINNNAAPAIAAMPAAEAAAPAAEKKKSSVKAAGMKSIL |
| SEQ ID NO: | VSENKMYITSFGKGNSAVLEYEVDNNDYNKTQLSSKDNSNIELCDVNEVNITFSSKHGFESGVEINTS |
| 4830 | NPTHRSGESSPVRWDMLGLKSELEKRFFGKTFDDNIHIQLIYNILDIEKILAVYITNIVYALNNMLGVK |
| | GSESHDDFIGYLSTNNIYDVFIDPDNSSLSDDKKANVRKSLSKFNALLKTKRLGYFGLEEPKTKDNRV |
| | SEAYKKRVYHMLAIVGQIRQCVFHDLSEHSEYDLYSFIDNSKKVYRECRETLDYLVDERFDSINKGFI |
| | QGNKVNISLLIDMMKGYEADDIIRLYYDFIVLKSQKNLGFSIKKLREKMLEEYGFRFKDKQYDSVRS |
| | KMYKLMDFLLFCNYYRNDVVAGEALVRKLRFSMTDDEKEGIYADEAEKLWGKFRNDFENIADHM |
| | NGDVIKELGKADMDFDEKILDSEKKNASDLLYFSKMrYMLTYFLDGKEINDLLTTLISKFDNIKEFLK |
| | IMKSSAVDVECELTAGYKLFNDSQRITNELFIVKNIASMRKPAASAKLTMFRDALTILGIDDKITDDRI |
| | SEILKLKEKGKGIHGLRNFVTNNVIESSRFVYLIKYANAQKIREVAKNEKWMFVLGGILTRR |
| OPSZ01.1 | MAKKNKMKPRELREAQKKARQFKAAEINNNAAPAIAAMPAAEVIAPVAEKKKSSVKAAGMKSILV |
| SEQ ID NO: | SENKMYITSFGKGNSAVLEYEVDNNDYNKTQLSSKDNSNIELCGVNEVNITFSSKHGFESGVEINTSN |
| 4831 | PTHRSGESSPVRWDMLGLKSELEKRFFGKTFDDNIHIQLIYNILDIEKILAVYVTNIVYALNNMLGEG |
| | DESNYDFMGYLSTFNTYKVFTNPNGSTLSDDKKENIRKSLSKFNALLKTKRLGYFGLEEPKTKDTRV |
| | LEAYKKRVYHMLAIVGQIRQCVFHDLSEHSEYDLYSFIDNSKKVYRECRETLDYLVDERFDSINKGFI |
| | QGNKVNISLLIDMMKGYEADDIIRLYYDFIVLKSQKNLGFSIKKLREKILDEYGFRFKDKQYDSVRSK |
| | MYKLMDFLLFCNYYRNDIAAGESLVRKLRFSMTDDEKEGIYADEAAKLWGKFRNDFENIADHMNG |
| | DVIKELGKADMDFDEKILDSEKKNASDLLYFSKMIYMLTYFLDGKEINDLLTTLISKFDNIKEFLKIM |
| | KSSAIDVECELTAGYKLFNDSQRITNELFIVKNIASMRKPAASAKLTMFRDALTILGIDDKITDDRISEI |
| | LKLKEKGKGIHGLRNFITNNVIESSRFVYLIKYANAQKIREVAKNEKWMFVLGGIPDTQIERYYKSC |
| | VEFPDMNSSLEAKRSELARMIKNIRFDDFKNVKQQAKGRENVAKERAKAVIGLYLTVMYLLVKNL |
| | VNVNARYVIAIHCLERDFGLYKEIIPELASKNLKNDYRILSQTLCELCDNGDESPNLFLKKNKRLRKC |
| | VEVDINNADNFVSATQGNLF |
| ULRO01.1 | VIFMAKKNKMKPRELREAQKKARQLKAAEINNNAVPAIAAMPAAEAAAPAAEKKKSSVKAAGMK |
| SEQ ID NO: | SILVSENKMYITSFGKGNSAVLEYEVDNNDYNKTQLSSKDNSNIELCDVDEVNITFSSKHGFESGVEI |
| 4832 | NTSNPTHRSGESSPVRWDMLGLKSELEKRFFGKTFDDNIHIQLIYNILDIEKILAVYVTNIVYALNNML |
| | GEGDESNYDFMGYLSTFNTYKVFTNPNGSTLSDDKKENIRKSLSKFNALLKTKRLGYFGLEEPKTKD |
| | TRVLEAYKKRVYHMLAIVGQIRQCVFHDLSEHSEYDLYSFIDNSKKVYRECRETLDYLVDERFDSIN |
| | KGFIQGNKVNISLLIDMMKGYEADDIIRLYYDFIVLKSQKNLGFSIKKLREKMLEEYGFRFKDKQYDS |
| | VRSKMYKLMDFLLFCNYYRNDVVAGEALVRKLRFSMTDDEKEGIYADEAEKLWGKFRNDFENIAD |
| | HMNGDVTKELGKADMDFDEKILDSEKKNASDLLYFSKMIYMLTYFLDGKEINDLLTTLISKFDNIKEF |
| | LKIMKSSAVDVECELTAGYKLFNDSQRITNELFIV |
| OJAG01.1_2 | MAKKNKMKPRELREAQKKARQLKAAEINNNAVPAIAAMPAAEAAAPAAEKKKSSVKAAGMKSIL |
| SEQ ID NO: | VSENKMYITSFGKGNSAVLEYEVDNNDYNKTQLSSKDNSNIELCDVGKVNITFSSRRGFESGVEINTS |
| 4833 | NPTHRSGESSSVRGDMLGLKSELEKRFFGKNFDDNIHIQLIYNILDIEKILAVYVTNIVYALNNMLGE |
| | GDESNYDFMGYLSTFNTYKVFTNPNGSTLSDDKKENIRKSLSKFNALLKTKRLGYFGLEEPKTKDTR |
| | ASEAYKKRVYHMLAIVGQIRQCVFHDKSGAKRFDLYSFINNIDPEYRETLDYLVDERFDSINKGFIQG |
| | NKVNISLLIDMMKGYEADDIIRLYYDFIVLKSQKNLGFSIKKLREKMLDEYGFRFKDKQYDSVRSKM |
| | YKLMDFLLFCNYYRNDIAAGESLVRKLVFQ |
| UMGZ01.1 | VIFMAKKNKMKPRELREAQKKARQLKAAEINNNAAPAIAAMPAAEAAAPAAEKKKSSVKAAGMK |
| SEQ ID NO: | SILVSENKMYITSFGKGNSAVLEYEVDNNDYNKTQLSSKDNSNIELCDVGKVNITFSSRRGFESGVEI |
| 4834 | NTSNPTHRSGESSSVRGDMLGLKSELEKRFFGKNFDDNIHIQLIYNILDIEKILAVYVTNIVYALNNML |
| | GEGDESNYDFMGYLSTFNTYKVFTNPNGSTLSDDKKENIRKSLSKFNALLKTKRLGYFGLEEPKTKD |
| | TRASEAYKKRVYHMLAIVGQIRQCVFHDKSGAKRFDLYSFINNIDPEYRETLDYLVDERFDSINKGFI |
| | QGNKVNISLLIDMMKGYEADDIIRLYYDFIVLKSQKNLGFSIKKLREKMLDEYGFRFKDKQYDSVRS |
| | KMYKLMDFLLFCNYYRNDIAAGESLVRKLRFSMTDDEKEGIYADEAAKLWGKFRNDFENIADHMN |
| | GDVIKELGKADMDFDEKILDSEKKNASDLLYFSKMIYMLTYFLDGKEINDLLTTLISKFDNIKEFLKI |
| | MKSSAVDVECELTAGYKLFNDSQRITNELFIVKNIASMRKPAASAKLTMFRDALTILGIDDKITDDRI |
| | SEILKLKEKGKGIHGLRNFITNNVIESSRFVYLIKYANAQKIREVAKNEKVVMFVLGGIPDTQIERYYK |
| | SCVEFPDMNSSLKVKRSELARMIKNIRFDDFKNVKQQAKGRENVAKERAKAVIGLYLTVMYLLVK |
| | NLVNVNARYVIAIHCLERDFGLYKEIIPELASKNLKNDYRILSQTLCELCDKSPNLFL |
| UAHN01.1 | VIFMAKKNKMKPRELREAQKKARQLKAAEINNNAVPAIAAMPAAEAAAPAAEKKKSSVKAAGMK |
| SEQ ID NO: | SILVSENKMYITSFGKGNSAVLEYEVDNNDYNKTQLSSKDNSNIELCDVGKVNITFSSRRGFESGVEI |
| 4835 | NTSNPTHRSGESSSVRGDMLGLKSELEKRFFGKNFDDNIHIQLIYNILDIEKILAVYVTNIVYALNNML |
| | GEGDESNYDFMGYLSTFNTYKVFTNPNGSTLSDDKKENIRKSLSKFNALLKTKRLGYFGLEEPKTKD |
| | TRASEAYKKRVYHMLAIVGQIRQCVFHDKSGAKRFDLYSFINNIDPEYRETLDYLVDERFDSINKGFI |
| | QGNKVNISLLIDMMKGYEADDIIRLYYDFIVLKSQKNLGFSIKKLREKMLDEYGFRFKDKQYDSVRS |
| | KMYKLMDFLLFCNYYRNDIAAGESLVRKLRFSMTNDEKEGIYADEAAK |
| OHAE01.1 | MAKKNKMKPRELREAQKKARQLKAAEINNNAAPAIAAMPAAEVIAPAAEKKKSSVKAAGMKSILV |
| SEQ ID NO: | SENKMYITSFGKGNSAVLEYEVDNNDYNKTQLSSKDNSNIELCGVNEVNITFSSKHGFESGVEINTSN |
| 4836 | PTHRSGESSPVRWDMLGLKSELEKRFFGKTFDDNIHIQLIYNILDIEKILAVYVTNIVYALNNMLGEG |
| | DESNYDFMGYLSTFNTYKVFTNPNGSTLSDDKKENIRKSLSKFNALLKTKRLGYFGLEEPKTKDTRA |
| | SEAYKKRVYHMLAIVGQIRQCVFHDKSGAKRFDLYSFINNIDPEYRDTLDYLVDERFDSINKGFIQGN |
| | KVNISLLIDMMKGYEVDDIIRLYYDFIVLKSQKNLGFSIKKLREKMLDEYGFRFKDKQYDSVRSKMY |
| | KLMDFLLFCNYYRNDVVAGETLVRKLRFSMTDDEKEGIYADEAS |
| OWRW01.1_2 | MAKKNKMKPRELREAQKKARQLKAAEINNNAAPAIAAMPAAEVIAPAAEKKKSSVKAAGMKSILV |
| SEQ ID NO: | SENKMYITSFGKGNSAVLEYEVDNNDYNKTQLSSKDNSNIELCGVNEVNITFSSKHGFESGVEINTSN |
| 4837 | PTHRSGESSPVRWDMLGLKSELEKRFFGKTFDDNIHIQLIYNILDIEKILAVYVTNIVYALNNMLGEG |
| | DESNYDFMGYLSTFNTYKVFTNPNGSTLSDDKKENIRKSLSKFNALLKTKRLGYFGLEEPKTKDTRA |
| | SEAYKKRVYHMLAIVGQIRQCVFHDKSGAKRFDLYSFINNIDPEYRDTLDYLVDERFDSINKGFIQGN |
| | KVNISLLIDMMKGYEVDDIIRLYYDFIVLKSQKNLGFSIKKLREKMLDEYGFRFKDKQYDSVRSKMY |
| | KLMDFLLFCNYYRNDVVAGETLVRKLRFSMTDDEKEGIYADEAS |
| UPDL01.1 | MAKKNKMKPRELREAQKKARQLKAAEINNNAAPAIAAMPAAEVIAPAAEKKKSSVKAAGMKSILV |
| SEQ ID NO: | SENKMYITSFGKGNSAVLEYEVDNNDYNKTQLSSKDNSNIELCGVNEVNITFSSKHGFESGVEINTSN |
| 4838 | PTHRSGESSPVRWDMLGLKSELEKRFFGKTFDDNIHIQLIYNILDIEKILAVYVTNIVYALNNMLGEG |
| | DESNYDFMGYLSTFNTYKVFTNPNGSTLSDDKKENIRKSLSKFNALLKTKRLGYFGLEEPKTKDTRA |
| | SEAYKKRVYHMLAIVGQIRQCVFHDKSGAKRFDLYSFINNIDPEYRDTLDYLVDERFDSINKGFIQGN |
| | KVNISLLIDMMKGYEVDDIIRLYYDFIVLKSQKNLGFSIKKLREKMLDEYGFRFKDKQYDSVRSKMY |
| | KLMDFLLFCNYYRNDVVAGETLVRKLRFSMTDDEKEGIYADEAS |
| OGHH01.1_2 | MAKKNKMKPRELREAQKKARQLKAAEINNNAVPAIAAMPAAEVIAPAAEKKKSSVKAAGMKSILV |
| SEQ ID NO: | SENKMYITSFGKGNSAVLEYEVDNNDYNQTQLSSKDNSNIELGGVNEVNITFSSKHGFESGVEINTSN |
| 4839 | PTHRSGESSPVRWDMLGLKSELEKRFFGKTFDDNIHIQLIYNILDIEKILAVYVTNIVYALNNMLGEG |
| | DESNYDFMGYLSTFNTYKVFTNPNGSTLSDDKKENIRKSLSKFNALLKTKRLGYFGLEEPKTKDTRA |
| | SEAYKKRVYHMLAIVGQIRQCVFHDKSGAKRFDLYSFINNIDPEYRDTLDYLVDERFDSINKGFIQGN |
| | KVNISLLIDMMKGYEVDDIIRLYYDFIVLKSQKNLGFSIKKLREKMLDEYGFRFKDKQYDSVRSKMY |
| | KLMDFLLFCNYYRNDVVAGETLVRKLRFSMTDDEKEGIYADEAS |
| OURZ01.1 | MAKKNKMKPRELREAQKKARQLKAAEINNNAAPAIAAMPAAEVIAPAAEKKKSSVKAAGMKSILV |
| SEQ ID NO: | SKNKMYITSFGKGNSAVLEYEVDKVDNNNYNKTQLSSKDNSNIELGDVNEVNITFSSKHGFESGVEI |
| 4840 | NTSNPTHRSGESSPVRWDMLGLKSELEKRFFGKTFDDNIHIQLIYNILDIEKILAVYVTNIVYALNNML |
| | GEGEDSNYDFMGYLSTFNTYKVFTNPNGSTLSDDKKKNIRKSLSKFNALLKTKRLGYFGLEEPKTKD |
| | TRASEAYKKRVYHMLAIVGQIRQCVFHDKSGAKRFDLYSFINNIDPEYRDTLDYLVDERFDSINKGFI |
| | QGNKVNISLLIDMMKGYEADDIIRLYYDFIVLKSQKNLGFS |
| OGOM01.1 | MAKKNKMKPRELREAQKKARQLKAAEINNNAVPAIAAMPAAEVIAPAAEKKKSSVKAAGMKSILV |
| SEQ ID NO: | SENKMYITSFGKGNSAVLEYEVDKVDNNNYNKTQLSSKDNSNIELGDVNEVNITFSSKRGNESGVEI |
| 4841 | NTSNPTHRSGESSPVRWDMLGLKSELEKRFFGKTFDDNIHIQLIYNILDIEKILAVYVTNIVYALNNML |
| | GIKKSESYDDFMGYLSARNTYEVFTHPDKSNLSDKAKGNIKKSFSTFNDLLKTKRLGYFGLEEPKTK |
| | DTRVSQAYKKRVYHMLAIVGQIRQSVFHDKSSKLDEDLYSFIDIIDPEYRETLDYLVDERFDSINKGFI |
| | QGNKVNISLLIDMMKGYEADDIIRLYYDFIVLKSQKNLGFFYQKAS |
| UPFO01.1 | MAKKNKMKPRELREAQKKARQLKAAEINNNAVPAIAAMPAAEVIAPAAEKKKSSVKAAGMKSILV |
| SEQ ID NO: | SENKMYITSFGKGNSAVLEYEVDKVDNNNYNKTQLSSKDNSNIELGDVNEVNITFSSKRGNESGVEI |
| 4842 | NTSNPTHRSGESSPVRWDMLGLKSELEKRFFGKTFDDNIHIQLIYNILDIEKILAVYVTNIVYALNNML |
| | GIKKSESYDDFMGYLSARNTYEVFTHPDKSNLSDKAKGNIKKSFSTFNDLLKTKRLGYFGLEEPKTK |
| | DTRVSQAYKKRVYHMLAIVGQIRQSVFHDKSSKLDEDLYSFIDIIDPEYRETLDYLVDERFDSINKGFI |
| | QGNKVNISLLIDMMKGYEADDIIRLYYDFIVLKSQKNLGFFYQKAS |
| OVZV01.1 | MAKKNKMKPRELREAQKKARQLKAAEINNNAVPAIAAMPAAEVIAPAAEKKKSSVKAAGMKSILV |
| SEQ ID NO: | SENKMYITSFGKGNSAVLEYEVDKVDNNNYNKTQLSSKDNSNIELGDVNEVNITFSSKRGNESGVEI |
| 4843 | NTSNPTHRSGESSPVRWDMLGLKSELEKRFFGKTFDDNIHIQLIYNILDIEKILAVYVTNIVYALNNML |
| | GIKKSESYDDFMGYLSARNTYEVFTHPDKSNLSDKAKGNIKKSFSTFNDLLKTKRLGYFGLEEPKTK |
| | DTRVSQAYKKRVYHMLAIVGQIRQSVFHDKSSKLDEDLYSFIDIIDPEYRETLDYLVDERFDSINKGFI |
| | QGNKVNISLLIDMMKGYEADDIIRLYYDFIVLKSQKNLGFFYQKAS |
| OGGK01.1 | MAKKNKMKPRELREAQKKARQLKAAEINNNAVPAIAAMPAAEVIAPAAEKKKSSVKAAGMKSILV |
| SEQ ID NO: | SENKMYITSFGKGNSAVLEYEVDKVDNNNYNKTQLSSKDNSNIELGDVNEVNITFSSKRGNESGVEI |
| 4844 | NTSNPTHRSGESSPVRWDMLGLKSELEKRFFGKTFDDNIHIQLIYNILDIEKILAVYVTNIVYALNNML |
| | GIKKSESYDDFMGYLSARNTYEVFTHPDKSNLSDKAKGNIKKSFSTFNDLLKTKRLGYFGLEEPKTK |
| | DTRVSQAYKKRVYHMLAIVGQIRQSVFHDKSSKLDEDLYSFIDIIDPEYRETLDYLVDERFDSINKGFI |
| | QGNKVNISLLIDMMKGYEADDIIRLYYDFIVLKSQKNLGFFYQKAS |
| OLQT01.1 | MAKKNKMKPRELREAQKKARQLKAAEIKNNAVPAIAAMPAAEAAAPAVEKKKSSVKAAGMKSIL |
| SEQ ID NO: | VSENKMYITSFGKGNSAVLEYEVDKVDNNNYNKTQLSSKDNSNIELGDVNEVNITFSSKHGFESGVE |
| 4845 | INTSNPTHRSGESSPVRWDMLGLKSELEKRFFGKTFDDNIHIQLIYNILDIEKILAVYVTNIVYALNNM |
| | LGIKDSESYDDFMGYLSARNTYEVFTHPDKSNLSDKVKGNINKVKCNIKKSFSTFNDLLKTKRLGYF |
| | GLEEPKTKDTRVSQAYKKRVYHMLAIVGQIRQSVFHDKSSKLDEDLYSFIDIIDSEYRETLDYLVDER |
| | FDSINKGFIQGNKVNISLLIDMMKGYEADDIIRLYYDFIVLKSQKNLGFSIKKLREKILDEYGFRFKDK |
| | QYDSVRSKMYKLMDFLLFCNYYRNDIAAGESLVRKLRFSMTDDEKEGIYADEAAKLWGKFRNDFE |
| | NIADHMNGDVIKELGKADMDFDEKILDSEKKNASDLLYFSKMIYMLTYFLDGKEINDLLTTLISKFD |
| | NIKEFLKIMKSSAVNVECELTAGYKLFNDSQRITNELFIVKNIASMRKPAASAKLTMFRDALTILGIDD |
| | NITDDRISEILGHTWSEEFHNKQCYRVLSVCIPYQVCERSEDKRSG |
| USUN01.1 | MAKKNKMKPRELREAQKKARQLKAAEINNNAAPAIAAMPAAEAAAPAAEKKKSSVKAAGMKSIF |
| SEQ ID NO: | VSENKMYITSFGKGNSAVLEYEVDKVDNDNYNKTQLSSEDSSNIELCGVNEVNITFSSKHGFGSGVEI |
| 4846 | NTSNPTHRSGESSPVRWDMLGLKSELEKRFFGKTFDDNIHIQLIYNILDIEKILAVYVTNIVYALNNML |
| | GIKKSESYDDFMGYLSARNTYEVFTHPDKSNLSDKAKGNIKKSFSTFNDLLKTKRLGYFGLEEPKTK |
| | DTRVSQAYKKRVYHMLAIVGQIRQSVFHDKSSKLDEDLYSFIDIIDSEYRETLDYLVDE |
| OXWC01.1 | MAKKNKMKPRELREAQKKARQLKAAEINNNAAPAIAAMPAAQVIAPAAEKKKSSVKAAGMKSILV |
| SEQ ID NO: | SENKMYITSFGKGNSAVLEYEVDKVDNNNYNKTQLSSKDNSNIELGDVNEVNITFSSKHGFESGVEI |
| 4847 | NTSNPTHRSGESSSVRGDMLGLKSELEKRFFGKTFDDNIHIQLIYNILDIEKILAVYVTNIVYALNNML |
| | GVKGSESYDDFMGYLSAQNTYYIFTHPDKSNLSDKVKGNIKKSLSKFNDLLKTKRLGYFGLEEPKTK |
| | DKRVSEAYKKRVYHMLAIVGQIRQSVFHDKSNELDEYLYSFIDIIDSEYRDTLDYLVDERFDSINKGF |
| | VQGNKVNISLLIDMMKGYEADDIIRLYYDFIVLKSQKNLGFSIKKLREKMLDEYGFRFKDKQYDSVR |
| | SKMYKLMDFLLFCNYYRNDIAAGEALVRKLRFSMTDDEKEGLYADEAAKLWGKFRNDFENIADH |
| | MNGDVTKELGKADMDFDEKILDSEKKNASDLLYFSKMIYMLTYFLDGKEINDLLTTLISKFDNIKEFL |
| | KIMKSSAVNVECELTAGYKLFNDSQRITNELFIVKNIASMRKPAASAKLTMFRDALTILGIDDNITDD |
| | RISEILKLKEKGKGIHGLRNFITNNVTESSRFVYLIKYANAQKIREVAKNEKWMFVLGGIPDTQIERY |
| | YKSCVEFPDMNSSLEVKRSELARMIKNIRFDDFKNVKQQAKGRENVAKERAKAVIGLYLTVMYLLV |
| | KNLVNVNARYVIAIHCLERDFGLYKEIIPELASKNLKNDYRILSQTLCELCDNRDESPNLFLKKNKRL |
| | RKCVEVDINNADSSMTRKYRNCIAHLTVVRELKEYIGDIRTVDSYFSIYHYVM |
| OZPS01.1 | MAKKNKMKPRELREAQKKARQLKAAEINNNAAPAIAAMPAAQVIAPAAEKKKSSVKAAGMKSILV |
| SEQ ID NO: | SENKMYITSFGKGNSAVLEYEVDKVDNNNYNKTQLSSKDNSNIELGDVNEVNITFSSKHGFESGVEI |
| 4848 | NTSNPTHRSGESSSVRGDMLGLKSELEKRFFGKTFDDNIHIQLIYNILDIEKILAVYVTNIVYALNNML |
| | GVKGSESYDDFMGYLSAQNTYYIFTHPDKSNLSDKVKGNIKKSLSKFNDLLKTKRLGYFGLEEPKTK |
| | DKRVSEAYKKRVYHMLAIVGQIRQSVFHDKSNELDEYLYSFIDIIDSEYRDTLDYLVDERFDSINKGF |
| | VQGNKVNISLLIDMMKGYEADDIIRLYYDFIVLKSQKNLGFSIKKLREKMLDEYGFRFKDKQYDSVR |
| | SKMYKLMDFLLFCNYYRNDIAAGEALVRKLRFSMTDDEKEGLYADEAAKLWGKFRNDFENIADH |
| | MNGDVTKELGKADMDFDEKILDSEKKNASDLLYFSKMIYMLTYFLDGKEINDLLTTLISKFDNIKEFL |
| | KIMKSSAVNVECELTAGYKLFNDSQRITNELFIVKNIASMRKPAASAKLTMFRDALTILGIDDNITDD |
| | RISEILKLKEKGKGIHGLRNFITNNVTESSRFVYLIKYANAQKIREVAKNEKWMFVLGGIPDTQIERY |
| | YKSCVEFPDMNSSLEVKRSELARMIKNIRFDDFKNVKQQAKGRENVAKERAKAVIGLYLTVMYLLV |
| | KNLVNVNARYVIAIHCLERDFGLYKEIIPELASKNLKNDYRILSQTLCELCDNRDESPNLFLKKNKRL |
| | RKCVEVDINNADSSMTRKYRNCIAHLTVVRELKEYIGDIRTVDSYFSIYHYVM |
| OWFV01.1 | MAKKNKMKPRELREAQKKARQLKAAEINNNAAPAIAAMPAAQVIAPAAEKKKSSVKAAGMKSILV |
| SEQ ID NO: | SENKMYITSFGKGNSAVLEYEVDKVDNNNYNKTQLSSKDNSNIELGDVNEVNITFSSKHGFESGVEI |
| 4849 | NTSNPTHRSGESSSVRGDMLGLKSELEKRFFGKTFDDNIHIQLIYNILDIEKILAVYVTNIVYALNNML |
| | GVKGSESYDDFMGYLSAQNTYYIFTHPDKSNLSDKVKGNIKKSLSKFNDLLKTKRLGYFGLEEPKTK |
| | DKRVSEAYKKRVYHMLAIVGQIRQSVFHDKSNELDEYLYSFIDIIDSEYRDTLDYLVDERFDSINKGF |
| | VQGNKVNISLLIDMMKGYEADDIIRLYYDFIVLKSQKNLGFSIKKLREKMGVLF |
| ORWL01.1 | MAKKNKMKPRELREAQKKARQLKAAEINNNAAPAIAAMPAAEVIAPVAEKKKSSVKAAGMKSILV |
| SEQ ID NO: | SENKMYITSFGKGNSAVLEYEVDNNDYNKTQLSSKDNSNIELGDVNEVNITFSSKHGFGSGVEINTS |
| 4850 | NPTHRSGESSSVRGDMLGLKSELEKRFFGKTFDDNIHIQLIYNILDIEKILAVYVTNIVYALNNMLGV |
| | KGSESYDDFMGYLSAQNTYYIFTHPDKSNLSDKVKGNIKKSLSKFNDLLKTKRLGYFGLEEPKTKDK |
| | RVSEAYKKRVYHMLAIVGQIRQSVFHDKSNELDEYLYSFIDIIDSEYRDTLDYLVDERFDSINKGFVQ |
| | GNKVNISLLIDMMKGYEADDIIRLYYDFIVLKSQKNLGFSIKKLREKM |
| OVMH01.1 | VIFMAKKNKMKPRELREAQKKARQLKAAEINNNAVPAIAAMPAAEVIAPAAEKKKSSVKAAGMKS |
| SEQ ID NO: | ILVSKNKMYIISFGKGNSAVLEYEVDKVDDNDYNKTQLSSKDNSNIELGDVNEVNITFSSKHGFGSG |
| 4851 | VEINTSNPTHRSGESSPVRWDMLGLKSELEKRFFGKTFDDNIHIQLIYNILDIEKILAVYVTNIVYALN |
| | NMLGVKGSESYDDFMGYLSAQNTYYIFTHPDKSNLSDKVKGNIKKSLSKFNDLLKTKRLGYFGLEE |
| | PKTKDKRVSEAYKKRVYHMLAIVGQIRQSVFHDKSNELDEYLYSFIDIIDSEYRDTLDYLVDERFDSI |
| | NKGFVQGNKVNISLLIDMMKGYEADDIIRLYYDFIVLKSQKNLGFSIKKLREKMLDEYGFRFKDKQY |
| | DSVRSKMYKLMDFLLFCNYYRNDVVAGEALVRKLRFSMTDDEKEGIYADEAEKLWVKFRNDFENI |
| | ADHMNGDVTKELGKADMDFDEKILDSEKKNASDLLYFSKMIYMLTYFLDGKEINDLLTTLISKFDNI |
| | KEFLKIMKSSAVDVECELTAGYKLFNDSQRITNELFIVKNIASMRKPAASAKLTMFRDALTILGIDDNI |
| | TDDRISEILKLKEKGKGIHGLRNFITNNVTESSRFVYLIKYANAQKIREVAKNEKWMFVLGGIPDTQI |
| | ERYYKSCVEFPDMNSSLEAKRSELARMIKNISFDDFKNVKQQAKGRENVAKERAKAVIGLYLTVMY |
| | LLVKNLVNVNARYVIAIHCLERDFGLYKEIIPELASKNLKNDYRILSQTLCELCDDRDKSPNLFLKKN |
| | KRLRKCVEVDINNADSSMTRKYRNCIAHLTVVRELKEYIGDIRTVDSYFSIYHYVMQRCITKREDDT |
| | KQEDKIKYEDDLLKNHGYTKDFVKAL |
| OODG01.1 | VIFMAKKNKMKPRELREAQKKARQLKAAEINNNAVPAIAAMPAAEVIAPAAEKKKSSVKAAGMKS |
| SEQ ID NO: | ILVSKNKMYIISFGKGNSAVLEYEVDKVDDNDYNKTQLSSKDNSNIELGDVNEVNITFSSKHGFGSG |
| 4852 | VEINTSNPTHRSGESSPVRWDMLGLKSELEKRFFGKTFDDNIHIQLIYNILDIEKILAVYVTNIVYALN |
| | NMLGVKGSESYDDFMGYLSAQNTYYIFTHPDKSNLSDKVKGNIKKSLSKFNDLLKTKRLGYFGLEE |
| | PKTKDKRVSEAYKKRVYHMLAIVGQIRQSVFHDKSNELDEYLYSFIDIIDSEYRDTLDYLVDERFDSI |
| | NKGFVQGNKVNISLLIDMMKGYEADDIIRLYYDFIVLKSQKNLGFSIKKLREKMLDEYGFRFKDKQY |
| | DSVRSKMYKLMDFLLFCNYYRNDVVAGEALVRKLRFSMTDDEKEGIYADEAEKLWVKFRNDFENI |
| | ADHMNGDVTKELGKADMDFDEKILDSEKKNASDLLYFSKMIYMLTYFLDGKEINDLLTTLISKFDNI |
| | KEFLKIMKSSAVDVECELTAGYKLFNDSQRITNELFIVKNIASMRKPAASAKLTMFRDALTILGIDDNI |
| | TDDRISEILKLKEKGKGIHGLRNFITNNVTESSRFVYLIKYANAQKIREVAKNEKWMFVLGGIPDTQI |
| | ERYYKSCVEFPDMNSSLEAKRSELARMIKNISFDDFKNVKQQAKGRENVAKERAKAVIGLYLTVMY |
| | LLVKNLVNVNARYVIAIHCLERDFGLYKEIIPELASKNLKNDYRILSQTLCELCDDRDKSPNLFLKKN |
| | KRLRKCVEVDINNADSSMTRKYRNCIAHLTVVRELKEYIGDIRTVDSYFSIYHYVMQRCITKREDDT |
| | KQEDKIKYEDDLLKNHGYTKDFVKAL |
| UXRU01.1 | MAKKNKMKPRELREAQKKARQLKAAEINNNAAPAIAAMPAAQVIAPAAEKKKSSVKAAGMKSILV |
| SEQ ID NO: | SENKMYITSFGKGNSAVLEYEVDKVDNNNYNKTQLSSKDNSNIELGDVNEVNITFSSKHGFESGVEI |
| 4853 | NTSNPTHRSGESSPVRWDMLGLKSELEKRFFGKTFDDNIHIQLIYNILDIEKILAVYVTNIVYALNNML |
| | GIKGSESYDDFMGYLSARNTYEVFTHPDKSNLSDKVKGNIKKSLSKFNDLLKTKRLGYFGLEEPKTK |
| | DTRVSQAYKKRVYHMLAIVGQIRQSVFHDKSSKLDEDLYSFIDIIDSEYRETLDYLVDERFDSINKGFI |
| | QGNKVNISLLIDMMKGYEADDIIRLYYDFIVLKSQKNLGFSIKKLREKMLDEYGFRFKDKQYDSVRS |
| | KMYKLMDFLLFCNYYRNDVVAGEALVRKLRFSMTDDEKEGIYADEASKLWGKFRNDFENIADHM |
| | NGDVIKELGKADMDFDEKILDSEKKNASDLLYFSKMIYMLTYFLDGKEINDLLTTLISKFDNIKEFLK |
| | IMKSSAVDVECELTAGYKLFNDSQRITNELFIVKNIASMRKPASSAKLTMFRDALTILGIDDNITDDRI |
| | SEILKLKEKGKGIHGLRNFITNNVTESSRFVYLIKYANAQKIRKVAKNEKWMFVLGGIPDTQIERYY |
| | KSCVEFPDMNSSLEVKRSELARMIKNISFDDFKNVKQQAKGRENVAKERAKAVIGLYLTVMYLLVK |
| | NLVNVNARYVIAIHCLERDFGLYKEIIPELASKNLKNDYRILSQTLCELCDKSPNLFLKKNRRLRKCV |
| | EVDINNADSSMTRKYRNCIAHLTVVRELKEYIGDIRTVDSYFSIYHYVM |
| ULUP01.1 | MAKKNKMKPRELREAQKKARQLKAAEINNNAAPAIAAMPAAQVIAPAAEKKKSSVKAAGMKSILV |
| SEQ ID NO: | SENKMYITSFGKGNSAVLEYEVDKVDNNNYNKTQLSSKDNSNIELGDVNEVNITFSSKHGFESGVEI |
| 4854 | NTSNPTHRSGESSPVRWDMLGLKSELEKRFFGKTFDDNIHIQLIYNILDIEKILAVYVTNIVYALNNML |
| | GIKGSESYDDFMGYLSARNTYEVFTHPDKSNLSDKVKGNIKKSLSKFNDLLKTKRLGYFGLEEPKTK |
| | DTRVSQAYKKRVYHMLAIVGQIRQSVFHDKSSKLDEDLYSFIDIIDSEYRETLDYLVDERFDSINKGFI |
| | QGNKVNISLLIDMMKGYEADDIIRLYYDFIVLKSQKNLGFSIKKLREKMLDEYGFRFKDKQYDSVRS |
| | KMYKLMDFLLFCNYYRNDVVAGEALVRKLRFSMTDDEKEGIYADEASKLWGKFRNDFENIADHM |
| | NGDVIKELGKADMDFDEKILDSEKKNASDLLYFSKMIYMLTYFLDGKEINDLLTTLISKFDNIKEFLK |
| | IMKSSAVDVECELTAGYKLFNDSQRITNELFIVKNIASMRKPASSAKLTMFRDALTILGIDDNITDDRI |
| | SEILKLKEKGKGIHGLRNFITNNVTESSRFVYLIKYANAQKIRKVAKNEKWMFVLGGIPDTQIERYY |
| | KSCVEFPDMNSSLEVKRSELARMIKNISFDDFKNVKQQAKGRENVAKERAKAVIGLYLTVMYLLVK |
| | NLVNVNARYVIAIHCLERDFGLYKEIIPELASKNLKNDYRILSQTLCELCDKSPNLFLKKNRRLRKCV |
| | EVDINNADSSMTRKYRNCIAHLTVVRELKEYIGDIRTVDSYFSIYHYVM |
| OJNQ01.1 | VIFMAKKNKMKPRELREAQKKARQLKAAEINNNAAPAIAAMPAAQVIAPAAEKKKSSVKAAGMKS |
| SEQ ID NO: | ILVSENKMYITSFGKGNSAVLEYEVDKVDNNNYNKTQLSSKDNSNIELGDVNEVNITFSSKHGFESG |
| 4855 | VEINTSNPTHRSGESSPVRWDMLGLKSELEKRFFGKTFDDNIHIQLIYNILDIEKILAVYVTNIVYALN |
| | NMLGIKGSESYDDFMGYLSARNTYEVFTHPDKSNLSDKVKGNIKKSLSKFNDLLKTKRLGYFGLEEP |
| | KTKDTRVSQAYKKRVYHMLAIVGQIRQSVFHDKSSKLDEDLYSFIDIIDSEYRETLDYLVDERFDSIN |
| | KGFIQGNKVNISLLIDMMKGYEADDIIRLYYDFIVLKSQKNLGFSIKKLREKMLDEYGFRFKDKQYD |
| | SVRSKMYKLMDFLLFCNYYRNDVVAGEALVRKLRFSMTDDEKEWIYADEAEKLWGKFRNDFENIA |
| | DHMNGDVTKELGKADMDFDEKILDSEKKNASDLLYFSKMIYMLTYFLDGKEINDLLTTLISKFDNIK |
| | EFLKIMKSSAVDVECELTAGYKLFNDSQRITNELFIVKNIASMRKPAASAKLTMFRDALTILGIDDKIT |
| OHIB01.1 | MAKKNKMKPRELREAQKKARQLKAAEINNNAAPAIAAMPAAQVIAPAAEKKKSSVKAAGMKSILV |
| SEQ ID NO: | SENKMYITSFGKGNSAVLEYEVDKVDNNNYNKTQLSSKDNSNIELGDVNEVNITFSSKHGFESGVEI |
| 4856 | NTSNPTHRSGESSPVRWDMLGLKSELEKRFFGKTFDDNIHIQLIYNILDIEKILAVYVTNIVYALNNML |
| | GIKGSESYDDFMGYLSARNTYEVFTHPDKSNLSDKVKGNIKKSLSKFNDLLKTKRLGYFGLEEPKTK |
| | DTRVSQAYKKRVYHMLAIVGQIRQSVFHDKSSKLDEDLYSFIDIIDSEYRETLDYLVDERFDSINKGFI |
| | QGNKVNISLLIDMMKGYEADDIIRLYYDFIVLKSQKNLGFSIKKLREKMLDEYGFRFKDKQYDSVRS |
| | KMYKLMDFLLFCNYYRNDVVAGEALVRKLRFSMTDDEKEWIYADEAEKLWGKFRNDFENIADHM |
| | NGDVIKELGKADMDFDEKILDSEKKNASDLLYFSKMIYMLTYFLDGKEINDLLTTLISKFDNIKEFLK |
| | IMKSSAVDVECELTASYKLFNDSQRITNELFIVKNIASMRKPAASAKLTMFRDALTILGIDDKITDDRI |
| | SEILKLKEKGKGIHGLRNFITNNVIESSRFVYLIKYANAQKIREVAENEKVVMFVLGGIPDTQIERYYK |
| | SCVEFPDMNSSLEVKRSELARMIKNISFDDFKNVKQQAKGRENVAKERAKAVIGLYLTVMYLLVKN |
| | LVNVNARYVIAIHCLERDFGLYKEIIPELASKNLKNDYRILSQTLCELCDDRDESPNLFLKKNKRLRK |
| | CVISIMQTAA |
| OGFI01.1 | MAKKNKMKPRELREAQKKARQLKAAEINNNAAPAIAAMPAAEVIAPAAEKKKSSVKAAGMKSILV |
| SEQ ID NO: | SKNKMYITSFGKGNSAVLEYEVDKVDNNNYNKTQLSSKDNSNIELGDVNEVNITFSSKRGNESGVEI |
| 4857 | NTSNPTHRSGESSPVRWDMLGLKSELEKRFFGKTFDDNIHIQLIYNILDIEKILAVYVTNIVYALNNML |
| | GIKDSESYDDFMGYLSAKNTYEVFTHPDKSNLSDKVKGNIKKSFSTFNDLLKTKRLGYFGLEEPKTK |
| | DTRVSQAYKKRVYHMLAIVGQIRQSVFHDKSSKLDEDLYSFIDIIDSEYRETLDYLVDERFDSINKGFI |
| | QGNKVNISLLIDMMKGYEADDIIRLYYDFIVLKSKKNLGFSIKKLREKMLDEYGFRFKDKQYDSVRS |
| | KMYKLMDFLLFCNYYRNDVIAGEALVRKLRFSMTDDEKEGIYADEAAKLWGKFRNDFENIADHMN |
| | GDVIKELGKADMDFDEKILDSEKKNASNLLYFSKMIYMLTYFLDGKEINDLLTTLISKFDNIKEFLKI |
| | MKSSAVDVECELTAGYKLFNDSQRITNELFIVKNIASMRKPAASAKLTMFRDALTILGIDDNITDDRI |
| | SEILKLKEKGKGIHGLRNFVTNNVIESSRFVYLIKYANAQKIREVAKNEKVVMFVLGGIPDTQIERYY |
| | KSCVEVPDVNSSLEAKRSELARMIKNISFDDFKNVKQ |
| ODWP01.1 | VIFMAKKNKMKPRELREAQKKARQLKAAEINNNAVPAIAAMPAAEVIAPAAEKKKSSVKAAGMKS |
| SEQ ID NO: | ILVSENKMYITSFGKGNSAVLEYEVDKVDNNDYNQTQLSSKDNSNIELGDVNEVNITFSSKHGFESG |
| 4858 | VEINTSNPTHRSGESSPVRWDMLGLKSELEKRFFGKTFDDNIHIQLIYNILDIEKILAVYVTNIVYALN |
| | NMLGIKDSESYDDFMGYLSARNTYEVFTHPDKSNLSDKVKGNIKKSFSTFNDLLKTKRLGYFGLEEP |
| | KTKDTRVSQAYKKRVYHMLAIVGQIRQSVFHDKSSKLHEDLYSFIDIIDSEYRETLDYLVDERFDSIN |
| | KGFIQGNKVNISLLIDMMKGYEADDIIRLYYDFIVLKSQKNLGFSIKKLREKMLDEYGFRFKDKQYD |
| | SVRSKMYKLMDFLLFCNYYRNDIAAGESLVRKLRFSMTDDEKEGIYADEAAKLWGKFRNDFENIAD |
| | HMNGDAIKELGKADMDFDEKILDIEKKNASDLLYFSKMIYMLTYFLDGKEINDLLTTLISKFDNIKEF |
| | LKIMKSSAVNVECELTAGYKLFNDSQRITNELFIVKNIASMRKPAASAKLTMFRDALTILGIDDKITD |
| | DRISEILKLKEKGKGIHGLRNFITNNVIESSRFVYLIKYANAQKIREVAENEKVVMFVLGGIPDTQIER |
| | YYKSCVEFPDMNSSLEVKRSELARMIKNISFDDFKNVKQQAKGRENVAKERAKAVIGLYLTVMYLL |
| | VKNLVNVNARYVIAIHCLERDFGLYKEIIPELASKNLKNDYRILSQTLCELCDKSPNLFLKKNRRLRK |
| | CVEVDINNADSSMTRKYRNCIAHLTVVRELKEYIGDIRTVDSYFSIYHYVMQRCITKRENDTKQEEKI |
| | KYEDDLLKNHG |
| OHCR01.1 | VIFMAKKNKMKPRELREAQKKARQLKAAEINNNAVPAIAAMPAAEVIAPAAEKKKSSVKAAGMKS |
| SEQ ID NO: | ILVSENKMYITSFGKGNSAVLEYEVDNNDYSKTQLSSKDNSNIELGDVNEVNITFSSKHGFESGVEIN |
| 4859 | TSNPTHRSGESSPVRGDMLGLKSELEKRFFGKTFDDNIHIQLIYNILDIEKILAVYVTNIVYALNNMLG |
| | VKGSESYDDFMGYLSAQNTYYIFTHPDKSNLSDKVKGNIKKSLSKFNDLLKTKRLGYFGLEEPKTKD |
| | KRVSEAYKKRVYHMLAIVGQIRQSVFHDKSSKLHEDLYSFIDIIDSEYRETLDYLVDERFDSINKGFIQ |
| | GNKVNISLLIDMMKGYEADDIIRLYYDFIVLKSQKNLGFSIKKLREKMLDEYGFRFKDKQYDSVRSK |
| | MYKLMDFLLFCNYYRNDVVAGEALVRKLRFSMTDDEKEGIYADEAEKLWGKFRNDFENIADHMN |
| | GDVIKELGKADMDFDEKILDSEKKNASDLLYFSKMIYMLTYFLDGKEINDLLTTLISKFDNIKEFLKI |
| | MKSSAVDVECELTAGYKLFNDSQRITNELFIVKNIASMRKPAASAKLTMFRDALTILGIDDKITDDRI |
| | SEILK |
| OKTT01.1 | VIFMAKKNKMKPRELREAQKKARQLKAAEINNNAVPAIAAMPAAEVIAPAAEKKKSSVKAAGMKS |
| SEQ ID NO: | ILVSENKMYITSFGKGNSAVLEYEVDNNDYSKTQLSSKDNSNIELGDVNEVNITFSSKHGFESGVEIN |
| 4860 | TSNPTHRSGESSPVRGDMLGLKSELEKRFFGKTFDDNIHIQLIYNILDIEKILAVYVTNIVYALNNMLG |
| | VKGSESYDDFMGYLSAQNTYYIFTHPDKSNLSDKVKGNIKKSLSKFNDLLKTKRLGYFGLEEPKTKD |
| | KRVSEAYKKRVYHMLAIVGQIRQSVFHDKSSKLHEDLYSFIDIIDSEYRETLDYLVDERFDSINKGFIQ |
| | GNKVNISLLIDMMKGYEADDIIRLYYDFIVLKSQKNLGFSIKKLREKMLDEYGFRFKDKQYDSVRSK |
| | MYKLMDFLLFCNYYRNDVVAGEALVRKLRFSMTDDEKEGIYADEAEKLWGKFRNDFENIADHMN |
| | GDVIKELGKADMDFDEKILDSEKKNASDLLYFSKMIYMLTYFLDGKEINDLLTTLISKFDNIKEFLKI |
| | MKSSAVDVECELTAGYKLFNDSQRITNELFIVKN |
| OJRT01.1 | VLSGIFVNAFSSKHGFESGVEINTSNPTHRSGESSSVRGDMLGLKSELEKRFFGKTFDDNIHIQLIYNIL |
| SEQ ID NO: | DIEKILAVYVTNIVYALNNMLGVKGSESYDDFMGYLSAQNTYYIFTHPDKSNLSDKVKGNIKKSLSK |
| 4861 | FNDLLKTKRLGYFGLEEPKTKDKRVSEAYKKRVYHMLAIVGQIRQSVFHDKSNELDEYLYSFIDIIDS |
| | EYRDTLDYLVDERFDSINKGFVQGNKVNISLLIDMMKGYEADDIIRLYYDFIVLKSQKNLGFSIKKLR |
| | EKMLDEYGFRFKDKQYDSVRSKMYKLMDFLLFCNYYRNDVVAGEALVRKLRFSMTDDEKEGIYA |
| | DEAEKLWGKFRNDFENIADHMNGDVIKELGKADMDFDEKILDSEKKNASDLLYFSKMIYMLTYFLD |
| | GKEINDLLTTLISKFDNIKEFLKIMKSSAVDVECELTAGYKLFNDSQRITNELFIVKNIASMRKPAASA |
| | KLTMFRDALTILGIDDKITDDRISEILKLKEKGKGIHGLRNFITNNVIESSRFVYLIKYANAQKIREVAK |
| | N |
| OGOJ01.1 | VLSGIFVNAFSSKHGFESGVEINTSNPTHRSGESSSVRGDMLGLKSELEKRFFGKTFDDNIHIQLIYNIL |
| SEQ ID NO: | DIEKILAVYVTNIVYALNNMLGVKGSESYDDFMGYLSAQNTYYIFTHPDKSNLSDKVKGNIKKSLSK |
| 4862 | FNDLLKTKRLGYFGLEEPKTKDKRVSEAYKKRVYHMLAIVGQIRQSVFHDKSNELDEYLYSFIDIIDS |
| | EYRDTLDYLVDERFDSINKGFVQGNKVNISLLIDMMKGYEADDIIRLYYDFIVLKSQKNLGFSIKKLR |
| | EKMLDEYGFRFKDKQYDSVRSKMYKLMDFLLFCNYYRNDVVAGEALVRKLRFSMTDDEKEGIYA |
| | DEAEKLWGKFRNDFENIADHMNGDVIKELGKADMDFDEKILDSEKKNASDLLYFSKMIYMLTYFLD |
| | GKEINDLLTTLISKFDNIKEFLKIMKSSAVDVEC |
| OLVY01.1 | MAKKNKMKPRELREAQKKARQLKAAEINNNAVPAIAAMPAAEVIAPAAEKKKSSVKAAGMKSILV |
| SEQ ID NO: | SENKMYITSFGKGNSAVLEYEVDNNDYNQTQLSSDGSSNIELRGVNEVNITFSSKHGFESGVEINTSN |
| 4863 | PTHRSGESSPVRGDMLGLKSELEKRFFGKTFDDNIHIQLIYNILDIEKILAVYVTNIVYALNNMLGVK |
| | GSESYDDFMGYLSAQNTYYIFTHPDKSNLSDKVKGNIKKSLSKFNDLLKTKRLGYFGLEEPKTKDKR |
| | VSEAYKKRVYHMLAIVGQIRQSVFHDKSNELDEYLYSFIDIIDSEYRDTLDYLVDERFDSINKGFVQG |
| | NKVNISLLIDMMKGYEADDIIRLYYDFIVLKSQKNLGFSIKKLREKMLDEYGFRFKDKQYDSVRSKM |
| | YKLMDFLLFCNYYRNDVVAGEALVRKLRFSMTDDEKEGIYADEAEKLWGKFRNDFENIADHMNG |
| | DVIKELGKADMDFDEKILDSEKKNASDLLYFSKMIYMLTYFLDGKEINDLLTTLISKFDNIKEFLKIM |
| | KSSAVDVECELTAGYKLFNDSQRITNELFIVKNIASMRKPAASAKLTMFRDALTILGIDDKITDDRISE |
| | ILKLKEKGKGIHGLRNFITNNVIESSRFVYLIKYANAQKIREVAKNEKWMFVLGGIPDTQIERYYKS |
| | CVEFPDMNSSLEAKRSELARMIKNISFDDFKNVKQQAKGRENVAKERAKAVIGLYLTVMYLLVKNL |
| | VNVNARYVIAIHCLERDFGLYKEIIPELASKNLKNDYRILSQTLCELCDDRDELPNLFLKKNERLRKC |
| | VEVDINNADNFVSATEGNLFDFFAHFSVTY |
| ULPU01.1 | VIFMAKKNKMKPRELREAQKKARQLKAAEINNNAVPAIAAMPAAEVIAPAAEKKKSSVKAAGMKS |
| SEQ ID NO: | ILVSENKMYITSFGKGNSAVLEYEVDNNDYNQTQLSSDGSSNIELRGVNEVNITFSSKHGFESGVEIN |
| 4864 | TSNPTHRSGESSPVRGDMLGLKSELEKRFFGKTFDDNIHIQLIYNILDIEKILAVYVTNIVYALNNMLG |
| | VKGSESYDDFMGYLSAQNTYYIFTHPDKSNLSDKVKGNIKKSLSKFNDLLKTKRLGYFGLEEPKTKD |
| | KRVSEAYKKRVYHMLAIVGQIRQSVFHDKSNELDEYLYSFIDIIDSEYRDTLDYLVDERFDSINKGFV |
| | QGNKVNISLLIDMMKGYEADDIIRLYYDFIVLKSQKNLGFSIKKLREKMLDEYGFRFKDKQYDSVRS |
| | KMYKLMDFLLFCNYYRNDVVAGEALVRKLRFSMTDDEKEGIYADEAEKLWGKFRNDFENIADHM |
| | NGDVIKELGKADMDFDEKILDSEKKNASDLLYFSKMIYMLTYFLDGKEINDLLTTLISKFDNIKEFLK |
| | IM |
| UZRW01.1 | VIFMAKKNKMKPRELREAQKKARQLKAAEINNNAAPAIAAMPAVEVIAPAAEKKKSSVKAAGMKS |
| SEQ ID NO: | ILVSENKMYITSFGKGNSAVLEYEVDKVDNNDYNKTQLSSKNSSNIELRGVNEVNITFSSKHGFESGV |
| 4865 | EINTSNPTHRSGESSPVRWDMLGLKSELEKRFFGKTFDDNIHIQLIYNILDIEKILAVYVTNIVYALNN |
| | MLGIKDSESYDDFMGYLSAKNTYEVFTHPDKSDLSDKVKGNIKKSFSTFNDLLKTKRLGYFGLEEPK |
| | TKDTRVSQAYKKRVYHMLAIVGQIRQSVFHDKSSKLDEDLYSFIDIIDPEYRETLDYLVDERFDSINK |
| | GFIQGNKVNISLLIDMMKGYEADDIIRLYYDFIVLKSQKNLGFSIKKLREKMLDEYGFRFKDKQYDS |
| OZJV01.1 | VIFMAKKNKMKPRELREAQKKARQLKAAEINNNAAPAIAAMSAAEVIAPAAEKKKSSVKAAGMKS |
| SEQ ID NO: | ILVSENKMYITSFGKGNSAVLEYEVDNNDYNKTQLSSKDNSNIELGDVNEVNITFSSKHGFGSGVEIN |
| 4866 | TSNPTHRSGESSPVRWDMLGLKSELEKRFFGKTFDDNIHIQLIYNILDIEKILAVYVTNIVYALNNMLG |
| | VKGSESYDDFMGYLSAKNTYEVFTHPDKSNLSDKVKGNIKKSFSTFNDLLKTKRLGYFGLEEPKTK |
| | DTRVSQAYKKRVYHMLAIVGQIRQSVFHDKSSKLHEDLYSFIDIIDSEYRETLDYLVEERLKSINKDFI |
| | EGNKVNISLLIDMMKGYEADDIIRLYYDFIVLKSQKNLGFSIKKLREKMLDEYGFRFKDKQYDPVRS |
| | KMYKLMDFLLFCNYYRNDVVTGEALVRKLRFSMTDDEKEGIYADEASKLWGKFRNDFENIADHM |
| | NGDVIKELGKADMDFDEKILDSEKKNASDLLYFSKMIYMLTYFLDGKEINDLLTTLISKFDNIKEFLK |
| | IMKSSAVDVECELTAGYKLFNDSQRITNELFIVKNIASMRKPAASAKLTMFRDALTILGIDDNITDDRI |
| | SEILKLKEKGKGIHGLRNFITNNVIESSRFVYL |
| ULOZ01.1 | VIFMAKKNKMKPRELREAQKKARQLKAAEINNNAAPAIAAMSAAEVIAPAAEKKKSSVKAAGMKS |
| SEQ ID NO: | ILVSENKMYITSFGKGNSAVLEYEVDNNDYNKTQLSSKDNSNIELGDVNEVNITFSSKHGFGSGVEIN |
| 4867 | TSNPTHRSGESSPVRWDMLGLKSELEKRFFGKTFDDNIHIQLIYNILDIEKILAVYVTNIVYALNNMLG |
| | VKGSESYDDFMGYLSAKNTYEVFTHPDKSNLSDKVKGNIKKSFSTFNDLLKTKRLGYFGLEEPKTK |
| | DTRVSQAYKKRVYHMLAIVGQIRQSVFHDKSSKLHEDLYSFIDIIDSEYRETLDYLVEERLKSINKDFI |
| | EGNKVNISLLIDMMKGYEADDIIRLYYDFIVLKSQKNLGFSIKKLREKMLDEYGFRFKDKQYDPVRS |
| | KMYKLMDFLLFCNYYRNDVVTGEALVRKLRFSMTDDEKEGIYADEASKLWGKFRNDFENIADHM |
| | NGDVIKELGKADMDFDEKILDSEKKNASDLLYFSKMIYMLTYFLDGKEINDLLTTLISKFDNIKEFLK |
| | IMKSSAVDVE |
| ULQA01.1 | VIFMAKKNKMKPRELREAQKKARQLKAAEINNNAAPAIAAMSAAEVIAPAAEKKKSSVKAAGMKS |
| SEQ ID NO: | ILVSENKMYITSFGKGNSAVLEYEVDNNDYNKTQLSSKDNSNIELGDVNEVNITFSSKHGFGSGVEIN |
| 4868 | TSNPTHRSGESSPVRWDMLGLKSELEKRFFGKTFDDNIHIQLIYNILDIEKILAVYVTNIVYALNNMLG |
| | VKGSESYDDFMGYLSAKNTYEVFTHPDKSNLSDKVKGNIKKSFSTFNDLLKTKRLGYFGLEEPKTK |
| | DTRVSQAYKKRVYHMLAIVGQIRQSVFHDKSSKLHEDLYSFIDIIDSEYRETLDYLVEERLKSINKDFI |
| | EGNKVNISLLIDMMKGYEADDIIRLYYDFIVLKSQKNLGFSIKKLREKMLDEYGFRFKDKQYDPVRS |
| | KMYKLMDFLLFCNYYRNDVVTGEALVRKLRFSMTDDEKEGIYADEAPKLWGKFRNDFENIADHM |
| | NGDVIKELGKADMDFDEKILDSEKKNASDLLYFSKMIYMLTYFLDGKEINDLLTTLISKFDNIKEFLK |
| | IMK |
| OPMM01.1 | MAKKNKMKPRELREAQKKARQLKAAEINNNAAPAIAAMSAAEVIAPAAEKKKSSVKAAGMKSILV |
| SEQ ID NO: | SENKMYITSFGKGNSAVLEYEVDNNDYNKTQLSSKDNSNIELGDVNEVNITFSSKHGFGSGVEINTS |
| 4869 | NPTHRSGESSPVRWDMLGLKSELEKRFFGKTFDDNIHIQLIYNILDIEKILAVYVTNIVYALNNMLGV |
| | KGSESYDDFMGYLSAKNTYEVFTHPDKSNLSDKVKGNIKKSFSTFNDLLKTKRLGYFGLEEPKTKDT |
| | RVSQAYKKRVYHMLAIVGQIRQSVFHDKSSKLHEDLYSFIDIIDSEYRETLDYLVEERLKSINKDFIEG |
| | NKVNISLLIDMMKGYEADDIIRLYYDFIVLKSQKNLGFSIKKLREKMLDEYGFRFKDKQYDPVRSKM |
| | YKLMDFLLFCNYYRNDVVTGEALVRKLRFSMTDDEKEGIYADEASKLWGKFRNDFENIADHMNGD |
| | VIKELGKADMDFDEKILDSEKKNASDLLYFSKMIYMLTYFLDGKEINDLLTTLISKFDNIKEFLKIMK |
| | NASKERLMLIKLK |
| UXYB01.1 | VIFMAKKNKMKPRELREAQKKARQLKAVEINNNAVPEIAAMPAAEVIAPVAEKKKSSVKAAGMKSI |
| SEQ ID NO: | LVSENKMYITSFGKGNSAVLEYEVDNNDYNKTQLSSKNSSNIELRGVNEVNITFSSKHGFESGVEINT |
| 4870 | SNPTHRSGESSPVRWDMLGLKSELEKRFFGKTFDDNIHIQLIYNILDIEKILAVYVTNIVYALNNMLGI |
| | KGSESYDDFMGYLSARNTYEVFTHPDKSSLSDDKKANVRKSLSKFNVLLKTKRLGYFGLEEPKTKD |
| | TRVSQAYKKRVYHMLAIVGQIRQSVFHDKSSKLDEDLYSFIDIIDSEYRETLDYLVDERFDSINKGFIQ |
| | GNKVNISLLIDMMKGYEADDIIRLYYDFIVLKSQKNLGFSIKKLREKMLEEYGYRFKDKQYDSVRSK |
| | MYKLMDFLLFCNYYRNDVVAGEALVRKLRFSMTDDEKEGIYADEAEKLWGKFRNDFENIADHMN |
| | GDVIKELGKADMDFDEKILDSEKKNASDLLYFSKMIYMLTYFLDGKEINDLLTTLISKFDNIKEFLKI |
| | MKSSAVDVECELTAGYKLFNDSQRITNELFIVKNIASMRKPAASAKLTMFRDALTILGIDDKITDDRI |
| | SEILKLKEKGKGIHGLRNFITNNVIESSRFVYLIKYANAQKIREVAENEKVVMFVLGGIPDTQIERYYK |
| | SCVEFPDMNSSLEAKRSELARMIKNISFDNFKNVKQQAKGRENVAKERAKAVIGLYLTVMYLLVKN |
| | LVNVNARYVIAIHCLERDFGLYKEIIPELASKNLKNDYRILSQTLCELCDDRDES |
| OPKZ01.1 | VIFMAKKNKMKPRELREAQKKARQLKAVEINNNAVPEIAAMPAAEVIAPVAEKKKSSVKAAGMKSI |
| SEQ ID NO: | LVSENKMYITSFGKGNSAVLEYEVDNNDYNKTQLSSKNSSNIELRGVNEVNITFSSKHGFESGVEINT |
| 4871 | SNPTHRSGESSPVRWDMLGLKSELEKRFFGKTFDDNIHIQLIYNILDIEKILAVYVTNIVYALNNMLGI |
| | KGSESYDDFMGYLSARNTYEVFTHPDKSSLSDDKKANVRKSLSKFNVLLKTKRLGYFGLEEPKTKD |
| | TRVSQAYKKRVYHMLAIVGQIRQSVFHDKSSKLDEDLYSFIDIIDSEYRETLDYLVDERFDSINKGFIQ |
| | GNKVNISLLIDMMKGYEADDIIRLYYDFIVLKSQKNLGFSIKKLREKMLEEYGYRFKDKQYDSVRSK |
| | MYKLMDFLLFCNYYRNDVVAGEALVRKLRFSMTDDEKEGIYADEAEKLWGKFRNDFENIADHMN |
| | GDVIKELGKADMDFDEKILDSEKKNASDLLYFSKMIYMLTYFLDGKEINDLLTTLISKFDNIKEFLKI |
| | MKSSAVDVECELTAGYKLFNDSQRITNELFIVKNIASMRKPAASAKLTMFRDALTILGIDDKITDDRI |
| | SGILKF |
| OPXF01.1 | MAKKNKMKPRELREAQKKARQLKAVEINNNAVPEIAAMPAAEVIAPVAEKKKSSVKAAGMKSILV |
| SEQ ID NO: | SENKMYITSFGKGNSAVLEYEVDNNDYNKTQLSSKNSSNIELRGVNEVNITFSSKHGFESGVEINTSN |
| 4872 | PTHRSGESSPVRWDMLGLKSELEKRFFGKTFDDNIHIQLIYNILDIEKILAVYVTNIVYALNNMLGIKG |
| | SESYDDFMGYLSARNTYEVFTHPDKSSLSDDKKANVRKSLSKFNVLLKTKRLGYFGLEEPKTKDTR |
| | VSQAYKKRVYHMLAIVGQIRQSVFHDKSSKLHEDLYSFIDIIDSEYRETLDYLVDERFDSINKGFIQG |
| | NKVNISLLIDMMKDDYEADDIIRLYYDFIVLKSQKNLGFSIKKLREKMLDEYGFRFKDKQYDSVRSK |
| | MYKLMDFLLFCNYYRNDVIAGEALVRKLRFSMTDDEKEGIYADEAAKLWGKFRNDFENIADHMNG |
| | DVIKELGKADMDFDEKILDSEKKNASDLLYFSKMIYMLTYFLDGKEINDLLTTLISKFDNIKEFLKIM |
| | KSSAVDVECELTAGYKLFNDSQRITNELFIVKNIASMRKPAASAKLTMFRDALTILGIDDNITDDRISE |
| | ILKLKEKGKGIHGLRNFITNNVIESSRFVYLIKYANAQKIREVAKNEKVVMFVLGGIPDTQIERYYKS |
| | CVEFPDMNSSLEAKRSELARMIKNISFDDFKNVKQQAKGRENVAKERAKAVIGLYLTVMYLLVKNL |
| | VNVNARYVIAIHCLERDFGLYKEIIPELASKNLKNDYRILSQTLCELCDNGDESPNLFLKKNKLPTRSL |
| | PGY |
| OGYM01.1 | VIFMAKKNKMKPRELREAQKKARQLKAAEINNNAAPAIAAMPAAEVIAPVAGKKKSSVKAAGMKS |
| SEQ ID NO: | ILVSENKMYITSFGKGNSAVLEYEVDKVDNNDYNQTQLSSKGSSNIELCGVNEVNITFSSKHGFESGV |
| 4873 | EINTSNPTHRSGESSPVRWDMLGLKSELEKRFFGKTFDDNIHIQLIYNILDIEKILAVYVTNIVYALNN |
| | MLGIKKSESYDDFMGYLSARNTYEVFTHPDKSNLSDKAKGNIKKSFSTFNDLLKTKRLGYFGLEEPK |
| | TKDTRVSQAYKKRVYHMLAIVGQIRQSVFHDKSSKLDEDLYSFIDIIDSEYRETLDYLVEERLKSINK |
| | DFIEGNKVNISLLIDMMKGFEADDIIRLYYDFIVLKSQKNLGFSIKKLREKMLEEYGYRFKDKQYDSV |
| | CSKMYKLMDFLLFCNYYRNDVVAGEALVRKLRFSMTDDEKEGIYADEAAKLWGKFRNDFENIADH |
| | MNGDVTKELGKADMDFDEKILDSEKKNASDLLYFSKMIYMLTYFLDGKEINDLLTTLISKFDNIKEFL |
| | KIMKSSAVDVECELTAGYKLFNDSQRITNELFIVKNIASMRKPAASAKLTMFRDALTILGIDDKITDD |
| | RISEILKLKEKGKGIHGLRNFITNNVIESSRFVYLIKYANAQKIREVAKNEKVVMFVLGGIPDTQIERY |
| | YKSCVEFPDMNSSLEVKRSELARMIKNISFDDFKNVKQQAKGRENVAKERAKAVIGLYLTVMYLLV |
| | KNLVNVNARYVIAIHCLERDFGLYKEIIPELASKNLKNDYRILSQTLCELCDDRDKSSNLFLKKNKRL |
| | RKCVEVDINNADSSMTRKYRNCIAH |
| UEOI01.1 | VIFMAKKNKMKPRELREAQKKARQLKAAEINNNAVPAIAAMPAAEAAAPAAEKKKSSVKAAGMK |
| SEQ ID NO: | SILVSENKMYITSFGKGNSAVLEYEVDKVDDNDYNKTQLSSKGSSNIELHGVNEVNITFSSKHGFESG |
| 4874 | VEINTSNPTHRSGESSPVRGDMLGLKSELEKRFFGKTFDDNIHIQLIYNILDIEKILAVYVTNIVYALNN |
| | MLGIKGSESYDDFMGYLSARNTYEVFTNPNGSTLSDDKKENIRKSLSKFNALLKTKRLGYFGLEEPK |
| | TKDTRVSQAYKKRVYHMLAIVGQIRQSVFHDKSSKLDEDLYSFIDIIDSEYRETLDYLVDERFDSINK |
| | GFIQGNKVNISLLIDMMKDDYEADDIIRLYYDFIVLKSQKNLGFSIKKLREKMLDEYGFRFKDKQYD |
| | SVRSKMYKLMDFLLFCNYYRNDVVAGEALVRKLRFSMTDDEKEGTYADEAEKLWGKFRNDFENIA |
| | DHMNGDAIKELGKADMDFDEKILDSEKKNASDLLYFSKMIYMLTYFLDGKEINDLLTTLISKFDNIK |
| | EFLKIMKSSAVDVECELTAGYKLFNDSQRITNELFIVKNIASMRKPAASAKLTMFRDALTILGIDDNIT |
| | DDRISEILKLKEKGK |
| OGZV01.1 | MAKKNKMKPRELREAQKKARQLKAAEINNNAAPAIAAMPAAEVIAPAAEKKKSSVKAAGMKSILV |
| SEQ ID NO: | SENKMYITSFGKGNSAVLEYEVDNNDYNKTQLSSKDNSNIELGNVNEVNITFSSRRGFESGVEINTSN |
| 4875 | PTHRSGESSSVRGDMLGLKSELEKRFFGKTFDDNIHIQLIYNILDIEKILAVYVTNIVYALNNMLGVK |
| | GSESYDDFMGYLSAQNTYYIFTHPDKSNLSDKVKGNIKKSLSKFNDLLKTKRLGYFGLEEPKTKDTR |
| | VSQAYKKRVYHMLAIVGQIRQCVFHDKSGAKRFDIYSFINNIDPEYRETLDYLVDERFDSINKGFIQG |
| | NKVNISLLIDMMKDYEADDIIRLYYDFIVLKSQKNLGFSIKKLREKMLDEYGFRFKDKQYDSVRSKM |
| | YKLMDFLLFCNYYRNDVVAGETLVRKLRFSMTDDEKEGIYADEAAKLWGKFRNDFENIADHMNG |
| | DVIKELGKADMDFDEKILDSEKKNASDLLYFSKMIYMLTYFLDGKEINDLLTTLISKFDNIKEFLKIM |
| | KSSAVDVECELTEGYKLFNDSQRITNELFIVKNIASMRKPAASAKLTMFRDALTILGIDDKITDDRISEI |
| | LKLKEKGKGIHGLRNFITNNVIESSRFVYLIKYANAQKIREVAKNEKWMFVLGGIPDTQIERYYKSC |
| | VEFPDMNSSLEAKRSELARMIKNIRFQKCETAGKGQRKRG |
| ULPA01.1 | MAKKNKMKPRELREAQKKARQLKAAEINNNAAPAIAAMPAAEVIAPVAEKKKSSVKAAGMKSILV |
| SEQ ID NO: | SENKMYITSFGKGNSAVLEYEVDNNDYNKTQLSSKDNSNIELGDVNEVNITFSSKHGFGSGVEINTS |
| 4876 | NPTHRSGESSPVRGDMLGLKSELEKRFFGKTFDDNIHIQLIYNILDIEKILAVYVTNIVYALNNMLGIK |
| | DSESYDDFMGYLSARNTYEVFTHPDKSNLSDKVKGNIKKSLSKFNDLLKTKRLGYFGLEEPKTKDTR |
| | ASEAYKKRVYHMLAIVGQIRQCVFHDKSGAKRFDLYSFINNIDPEYRDTLDYLVEERLKSINKDFIEG |
| | NKVNISLLIDMMKGYEADDIIRLYYDFIVLKSQKNLGFSIKKLREKMLEEYGFRFKDKQYDSVRSKM |
| | YKLMDFLLFCNYYRNDVAAGEALVRKLRFSMTDDEKEGIYADEAAKLWGKFRNDFENIADHMNG |
| | DVIKELGKADMDFDEKILDSEKKNASDLLYFSKMIYMLTYFLDGKEINDLLTTLISKFDNIKEFLKIM |
| | KSSAVDVECELTAGYKLFNDSQRITNELFIVKNIASM |
| UMGR01.1 | MAKKNKMKPRELREAQKKARQLKAAEINNNAAPAIAAMPAAEVIAPVAEKKKSSVKAAGMKSILV |
| SEQ ID NO: | SENKMYITSFGKGNSAVLEYEVDNNDYNKTQLSSKDNSNIELGDVNEVNITFSSKHGFGSGVEINTS |
| 4877 | NPTHRSGESSPVRGDMLGLKSELEKRFFGKTFDDNIHIQLIYNILDIEKILAVYVTNIVYALNNMLGIK |
| | DSESYDDFMGYLSARNTYEVFTHPDKSNLSDKVKGNIKKSLSKFNDLLKTKRLGYFGLEEPKTKDTR |
| | ASEAYKKRVYHMLAIVGQIRQCVFHDKSGAKRFDLYSFINNIDPEYRDTLDYLVEERLKSINKDFIEG |
| | NKVNISLLIDMMKGYEADDIIRLYYDFIVLKSQKNLGFSIKKLREKMLEEYGFRFKDKQYDSVRSKM |
| | YKLMDFLLFCNYYRNDVAAGEALVRKLRFSMTDDEKEGIYADEAAKLWGKFRNDFENIADHMNG |
| | DVIKELGKADMDFDEKILDSEKKNASDLLYFSKMIYMLTYFLDGKEINDLLTTLISKFDNIKEFLKIM |
| | KSSAVDVECELTAGYKLFNDSQRITNELFIVKNIASMRKPAASAKLTMFRDALTILGIDDNITDDRISE |
| | ILKLKEKGKGIHGLRNFITNNVTESSRFVYLIKYANAQK |
| OMER01.1 | MAKKNKMKPRELREAQKKARQLKAAEINNNAAPAIAAMPAAEVIAPVAEKKKSSVKAAGMKSILV |
| SEQ ID NO: | SENKMYITSFGKGNSAVLEYEVDNNDYNKTQLSSKDNSNIELGDVNEVNITFSSKHGFGSGVEINTS |
| 4878 | NPTHRSGESSPVRGDMLGLKSELEKRFFGKTFDDNIHIQLIYNILDIEKILAVYVTNIVYALNNMLGIK |
| | DSESYDDFMGYLSARNTYEVFTHPDKSNLSDKVKGNIKKSLSKFNDLLKTKRLGYFGLEEPKTKDTR |
| | ASEAYKKRVYHMLAIVGQIRQCVFHDKSGAKRFDLYSFIKNIDPEYRDTLDYLVEERLKSINKDFIEG |
| | NKVNISLLIDMMKGYEADDIIRLYYDFIVLKSQKNLGFSIKKLREKMLEEYGFRFKDKQYDSVRSKM |
| | YKLMDFLLFCNYYRNDVAAGEALVRKLRFSMTDDEKEGIYADEAAKLWGKFRNDFENIADHMNG |
| | DVIKELGKADMDFDEKILDSEKKNASDLLYFSKMIYMLTYFLDGKEINDLLTTLISKFDNIKEFLKIM |
| | KSSAVDVECELTAGYKLFNDSQRITNELFIVKNIASMRKPAASAKLTMFRDALTILGIDDNIT |
| UMCG01.1 | VIFMAKKNKMKPRELREAQKKARQLKAAEIKNNAVPAIAAMPAAEAAAPAVEKKKSSVKAAGMK |
| SEQ ID NO: | SILVSENKMYITSFGKGNSAVLEYEVDKVDNNNYNKTQLSSKDNSNIELGDVNEVNITFSSKRGNES |
| 4879 | GVEINTSNPTHRSGESSPVRWDMLGLKSELEKRFFGKTFDDNIHIQLIYNILDIEKILAVYVTNIVYAL |
| | NNMLGIKGSESYDDFMGYLSARNTYEVFTHPDKSNLSDKVKGNIKKSLSKFNDLLKTKRLGYFGLE |
| | EPKTKDTRVSQAYKKRVYHMLAIVGQIRQCVFHDKSGAKRFDLYSFINNIDPEYRDTLDYLVEERLK |
| | SINKDFIEGNKVNISLLIDMMKGYEADDIIRLYYDFIVLKSQKNLGFSIKKLREKMLEEYGYRFKDKQ |
| | YDSVRSKMYKLMDFLLFCNYYRNDVVAGEALVRKLRFSMTDDEKEGIYADEASKLWGKFRNDFE |
| | NIADHMNGDVIKELGKADMDFDEKILDSEKKNASDLLYFSKMIYMLTYFLDGKEINDLLTTLISKFD |
| | NIKEFLKIMKSSAVDVECALTAGYKLFNDSQRITNELFIVKNIASMRKPAASAKLTMFRDALTILGID |
| | DKITDDRISEILKLKEKGKGIHGLRNFITNNVTESSRFVYLIKYANAQKIREVAKNEKWMFVLGGIPD |
| | TQIERYYKSCVEFPDMNSSLEAKRSELARMIKNIRFDDFKNVKQQAKGRENVAKERAKAVIGLYLT |
| | VMYLLVKNLVNVNARYVIAIHCLERDFGLYKEIIPELASKNLKNDYRILSQTLCELCDDRDESPNLFL |
| | KKNKRLRKCVEVDINNADSSMTRKYRNCIAHLTVVRELKEYIGDIRTVDSYFSIYHYVMQRCITKRE |
| | DDTKQEEKIKYE |
| UMCJ01.1 | VIFMAKKNKMKPRELREAQKKARQLKAAEIKNNAVPAIAAMPAAEAAAPAVEKKKSSVKAAGMK |
| SEQ ID NO: | SILVSENKMYITSFGKGNSAVLEYEVDKVDNNNYNKTQLSSKDNSNIELGDVNEVNITFSSKRGNES |
| 4880 | GVEINTSNPTHRSGESSPVRWDMLGLKSELEKRFFGKTFDDNIHIQLIYNILDIEKILAVYVTNIVYAL |
| | NNMLGIKGSESYDDFMGYLSARNTYEVFTHPDKSNLSDKVKGNIKKSLSKFNDLLKTKRLGYFGLE |
| | EPKTKDTRVSQAYKKRVYHMLAIVGQIRQCVFHDKSGAKRFDLYSFINNIDPEYRDTLDYLVEERLK |
| | SINKDFIEGNKVNISLLIDMMKGYEADDIIRLYYDFIVLKSQKNLGFSIKKLREKMLEEYGYRFKDKQ |
| | YDSVRSKMYKLMDFLLFCNYYRNDVVAGEALVRKLRFSMTDDEKEGIYADEASKLWGKFRNDFE |
| | NIADHMNGDVIKELGKADMDFDEKILDSEKKNASDLLYFSKMIYMLTYFLDGKEINDLLTTLISKFD |
| | NIKEFLKIMKSSAVDVECELTAGYKLFNDSQRITNELFIVKNIASMRKPAASAKLTMFRDALTILGIDD |
| | KITDDRISEILKLKEKGKGIHGLRNFITNNVTESSRFVYLIKYANAQKIREVAKNEKWMFVLGGIPDT |
| | QIERYYKSCVEFPDMNSSLEAKRSELARMIKNIRFDDFKNVKQQAKGRENVAKERAKAVIGLYLTV |
| | MYLLVKNLVNVNARYVIAIHCLERDFGLYKEIIPELASKNLKNDYRILSQTLCELCDDRDESPNLFLK |
| | KNKRLRKCVEVDINNADSSMTRKYRNCIAHLTVVRELKEYIGDIRTVDSYFSIYHYVMQRCITKRED |
| | D |
| OPXM01.1 | VIFMAKKNKMKPRELREAQKKARQLKAAEIKNNAVPAIAAMPAAEAAAPAVEKKKSSVKAAGMK |
| SEQ ID NO: | SILVSENKMYITSFGKGNSAVLEYEVDKVDNNNYNKTQLSSKDNSNIELGDVNEVNITFSSKRGNES |
| 4881 | GVEINTSNPTHRSGESSPVRWDMLGLKSELEKRFFGKTFDDNIHIQLIYNILDIEKILAVYVTNIVYAL |
| | NNMLGIKGSESYDDFMGYLSARNTYEVFTHPDKSNLSDKVKGNIKKSLSKFNDLLKTKRLGYFGLE |
| | EPKTKDTRVSQAYKKRVYHMLAIVGQIRQCVFHDKSGAKRFDLYSFINNIDPEYRDTLDYLVEERLK |
| | SINKDFIEGNKVNISLLIDMMKGYEADDIIRLYYDFIVLKSQKNLGFSIKKLREKMLEEYGYRFKDKQ |
| | YDSVRSKMYKLMDFLLFCNYYRNDVVAGEALVRKLRFSMTDDEKEGIYADEASKLWGKFRNDFE |
| | NIADHMNGDVIKELGKADMDFDEKILDSEKKNASDLLYFSKMIYMLTYFLDGKEINDLLTTLISKFD |
| | NIKEFLKIMKSSAVDVECELTAGYKLFNDSQRITNELFIVKNIASMRKPAASAKLTMFRDALTILGIDD |
| | KITDDRISEILKLKEKGKGIHGLRNFITNNVIESSRFVYLIKYANAQKIREVAKNEKVVMFVLGGIPDT |
| | QIERYYKSCVEFPDMNSSLEAKRSELARMIKNIRFDDFKNVKQQAKGRENVAKERAKAVIGLYLTV |
| | MYLLVKNLVNVNARYVIAIHCLERDFGLYKEIIPELASKNLKNDYRILSQTLCELCDDRDESPNLFLK |
| | KNKRLRKCVEVDINNADSSMTRKYRNCIAHLTVVRELKEYIGDIRTVDSYFSIYHYVMQRCITKRED |
| | DTKQEEKIKYEDDLLKNH |
| CEAG01.1 | MAKKNKMKPRELREAQKKARQLKAAEINNNAAPAIAAMPAAEAIAPAAEKKKSSVKAAGMKSIFV |
| SEQ ID NO: | SENKMYITSFGKGNSAVLEYEVDKVDNNVYNQTQLSSEDSSNIELCGVTKVNITFSSKHGLESGVEIS |
| 4882 | TSNPTHRSGESSPVRWDMLGLKSELEKRFFGKTFDDNIHIQLIYNILDIEKILAVYVTNIVYALNNMLG |
| | IKDSESYDDFMGYLSARNTYKVFTHPDKSNLSDKVKGNIKKSFSTFNDLLKTKRLGYFGLEEPKTKD |
| | TRVSEAYKKRVYHMLAIVGQIRQCVFHDLSEHSEYDLYSFIDNSKKVYRECRETLNYLVDERFDSIN |
| | KGFIQGNKVNISLLIDMMKDDYEADDIIHLYYDFIVLKSQKNLGFSIKKLREKMLDEYGFRFKDKQY |
| | DSVRSKMYKLMDFLLFCNYYRNDVVAGEALVRKLRFSMTDDEKEGIYADEAEKLWGKFRNDFENI |
| | ADHMNGDVTKELGKADMDFDEKIIDSEKKNASDLLYFSKMIYMLTYFLDGKEINDLLTTLISKFDNIK |
| | EFLKIMKSSAVDVE |
| CEAH01.1 | MAKKNKMKPRELREAQKKARQLKAAEINNNAAPAIAAMPAAEAIAPAAEKKKSSVKAAGMKSIFV |
| SEQ ID NO: | SENKMYITSFGKGNSAVLEYEVDKVDNNVYNQTQLSSEDSSNIELCGVTKVNITFSSKHGLESGVEIS |
| 4883 | TSNPTHRSGESSPVRWDMLGLKSELEKRFFGKTFDDNIHIQLIYNILDIEKILAVYVTNIVYALNNMLG |
| | IKDSESYDDFMGYLSARNTYKVFTHPDKSNLSDKVKGNIKKSFSTFNDLLKTKRLGYFGLEEPKTKD |
| | TRVSEAYKKRVYHMLAIVGQIRQCVFHDLSEHSEYDLYSFIDNSKKVYRECRETLNYLVDERFDSIN |
| | KGFIQGNKVNISLLIDMMKDDYEADDIIHLYYDFIVLKSQKNLGFSIKKLREKMLDEYGFRFKDKQY |
| | DSVRSKMYKLMDFLLFCNYYRNDVVAGEALVRKLRFSMTDDEKEGIYADEAEKLWGKFRNDFENI |
| | ADHMNGDVTKELGKADMDFDEKIIDSEKKNASDLLYFSKMIYMLTYFLDGKEINDLLTTLISKFDNIK |
| | EFLKIMKSSAVDVE |
| CEAF01.1 | MAKKNKMKPRELREAQKKARQLKAAEINNNAAPAIAAMPAAEAIAPAAEKKKSSVKAAGMKSIFV |
| SEQ ID NO: | SENKMYITSFGKGNSAVLEYEVDKVDNNVYNQTQLSSEDSSNIELCGVTKVNITFSSKHGLESGVEIS |
| 4884 | TSNPTHRSGESSPVRWDMLGLKSELEKRFFGKTFDDNIHIQLIYNILDIEKILAVYVTNIVYALNNMLG |
| | IKDSESYDDFMGYLSARNTYKVFTHPDKSNLSDKVKGNIKKSFSTFNDLLKTKRLGYFGLEEPKTKD |
| | TRVSEAYKKRVYHMLAIVGQIRQCVFHDLSEHSEYDLYSFIDNSKKVYRECRETLNYLVDERFDSIN |
| | KGFIQGNKVNISLLIDMMKDDYEADDIIHLYYDFIVLKSQKNLGFSIKKLREKMLDEYGFRFKDKQY |
| | DSVRSKMYKLMDFLLFCNYYRNDVVAGEALVRKLRFSMTDDEKEGIYADEAEKLWGKFRNDFENI |
| | ADHMNGDVIKELGKADMDFDEKIIDSEKKNASDLLYFSKMIYMLTYFLDGKEINDLLTTLISKFDNIK |
| | EFLKIMKSSAVDVE |
| UXKW01.1 | VIFMAKKNKMKPRELREAQKKARQLKAAEINNNAAPAIAAMPAAQVIAPAAEKKKSSVKAAGMKS |
| SEQ ID NO: | ILVSENKMYITSFGKGNSAVLEYEVDKVDNNNYNKTQLSSKDNSNIELGDVNEVNITFSSKHGFESG |
| 4885 | VEINTSNPTHRSGESSPVRWDMLGLKSELEKRFFGKTFDDNIHIQLIYNILDIEKILAVYVTNIVYALN |
| | NMLGIKGSESYDDFMGYLSARNTYEVFTHPDKSNLSDKVKGNIKKSFSTFNDLLKTKRLGYFGLEEP |
| | KTKDTRVSEAYKKRVYHMLAIVGQIRQCVFHDLSEHSEYDLYSFIDNSKKVYRECRETLNYLVDERF |
| | DSINKGFIQGNKVNISLLIDMMKDDYEADDIIHLYYDFIVLKSQKNLGFSIKKLREKMLDEYGFRFKD |
| | KQYDSVRSKMYKLMDFLLFCNYYRNDVVAGEALVRKLRFSMTDDEKEGIYADEAEKLWGKFRND |
| | FENIADHMNGDVIKELGKADMDFDEKILDSEKKNASDLLYFSKMIYMLTYFLDGKEINDLLTTLISKF |
| | DNIKEFLKIMKSSAVDVECELTAGYRLFND |
| UPFP01.1 | MAKKNKMKPRELREAQKKARQLKAAEINNNAVPAIAAMPAAEVIAPVAGKKKSSVKAAGMKSILV |
| SEQ ID NO: | SENKMYITSFGKGNSAVLEYEVDKVDDNDYNKTQLSSKGSSNIELHGVNEVNITFSSKHGFESGVEI |
| 4886 | NTSNPTHRSGESSPVRGDMLGLKSELEKRFFGKTFDDNIHIQLIYNILDIEKILAVYVTNIVYALNNML |
| | GIKDSESYDDFMGYLSAKNTYEVFTHPDKSNLSDKAKGNIKKSFSTFNDLLKTKRLGYFGLEEPKTK |
| | DTRVSQAYKKRVYHMLAIVGQIRQCVFHDLSEHSEYDLYSFIDNSKKVYRECRETLDYLVDERFDSI |
| | NKGFIQGNKVNISLLIDMMKGYEADDIIRLYYDFIVLKSQKNLGFSIKKLREKMLDEYGFRFKDKQY |
| | DSVRSKMYKLMDFLLFCNYYRNDVVAGEALVRKLRFSMTDDEKEGTYADEAEKLWGKFRNDFENI |
| | ADHMNGDAIKELGKADMDFDEKILDSEKKNASDLLYFSKMIYMLTYFLDGKEINDLLTTLISKFDNI |
| | KEFLKIMKSSAVDVECELTAGYKLFNDSQRITNELFIVKNIASMRKPAASAKLTMFRDALTILGIDDNI |
| | TDDRISEILKLKEKGKGIHGLRNFITNNVIESSRFVYLIKYANAQKIREVAKNEKVVMFVLGGIPDTQI |
| | ERYYKSCVEFPDMNSSLEAKRSELARMIKNISFDDFKNVKQQAKGRENVAKERAKAVIGLYLTVMY |
| | LLVKNLVNVNARYVIAIHCLERDFGLYKEIIPELASKNLKNDYRILSQTLCELCDKSPNLFLKKNERL |
| | RKCSLRAIFFSISIMQTAA |
| UPQO01.1 | MAKKNKMKPRELREAQKKARQLKAAEINNNAVPAIAAMPAAEVIAPVAGKKKSSVKAAGMKSILV |
| SEQ ID NO: | SENKMYITSFGKGNSAVLEYEVDKVDDNDYNKTQLSSKGSSNIELHGVNEVNITFSSKHGFESGVEI |
| 4887 | NTSNPTHRSGESSPVRGDMLGLKSELEKRFFGKTFDDNIHIQLIYNILDIEKILAVYVTNIVYALNNML |
| | GIKDSESYDDFMGYLSAKNTYEVFTHPDKSNLSDKAKGNIKKSFSTFNDLLKTKRLGYFGLEEPKTK |
| | DTRVSQAYKKRVYHMLAIVGQIRQCVFHDLSEHSEYDLYSFIDNSKKVYRECRETLDYLVDERFDSI |
| | NKGFIQGNKVNISLLIDMMKGYEADDIIRLYYDFIVLKSQKNLGFSIKKLREKMLDEYGFRFKDKQY |
| | DSVRSKMYKLMDFLLFCNYYRNDVVAGEALVRKLRFSMTDDEKEGIYADEAAKLWGKFRNDFENI |
| | ADHMNGDVTKELGKADMDFDEKILDSEKKNASDLLYFSKMIYMLTYFLDGKEINDLLTTLISKFDNI |
| | KEFLKIMKSSAVDVECELTAGYKLFNDSQRITNELFIVKNIASMRKPAASARLTMFRDALTI |
| OLNO01.1 | MAKKNKMKPRELREAQKKARQLKAAEINNNAAPAIAAMPAAEVIAPAAEKKKSSVKAAGMKSILV |
| SEQ ID NO: | SENKMYITSFGKGNSAVLEYEVDNNDYNKTQLSSKDNSNIELGDVDEVNITFSSKHGFGSGVEINTS |
| 4888 | NPTHRSGESSPVRWDMLGLKSELEKRFFGKTFDDNIHIQFIYNILDIEKILAVYVTNIVYALNNMLGIK |
| | DSESYDDFIGYLSARNTYKVFTHPDKSNLSDKAKGNIKKSFSTFNDLLKTKRLGYFGLEEPKTKDTR |
| | VLEAYKKRVYYMLAIVGQIRQCVFHDLSEHSEYDLYSFIDNSKKVYRECRETLDYLVDERFDSINKG |
| | FIQGNKVNISLLIDMMKGYEADDIIRLYYDFIVLKSQKNLGFSIKKLREKMLDEYGFRFKDKQYDSVR |
| | SKMYKLMDFLLFCNYYRNDVVAGEALVRKLRFSMTDDEKEGIYADEAAKLWVKF |
| OODI01.1 | MAKKNKMKPRELREAQKKARQLKAAEINNNAAPAIAAMPAAEVIAPAAEKKKSSVKAAGMKSILV |
| SEQ ID NO: | SENKMYITSFGKGNSAVLEYEVDNNDYNKTQLSSKDNSNIELGDVDEVNITFSSKHGFGSGVEINTS |
| 4889 | NPTHRSGESSPVRWDMLGLKSELEKRFFGKTFDDNIHIQFIYNILDIEKILAVYVTNIVYALNNMLGIK |
| | DSESYDDFIGYLSARNTYKVFTHPDKSNLSDKAKGNIKKSFSTFNDLLKTKRLGYFGLEEPKTKDTR |
| | VLEAYKKRVYYMLAIVGQIRQCVFHDLSEHSEYDLYSFIDNSKKVYRECRETLDYLVDERFDSINKG |
| | FIQGNKVNISLLIDMMKGYEADDIIRLYYDFIVLKSQKNLGFSIKKLREKMLDEYGFRFKDKQYDSVR |
| | SKMYKLMDFLLFCNYYRNDVVAGEALVRKLRFSMTDDEKEGIYADEAAKLWVKFRNDFENIADH |
| | MNGDVTKELGKADMDFDEKILDSEKKNASDLLYFSKMIYMLTYFLDGKEINDLLTTLISKFDNIKEFL |
| | KIMKSSAVDVECELTAGYKLFNDSQRITNELFIVKNIASMRKPAASAKLTMFRDALTILGIDDKITDD |
| | RISEILKLKEKGKGIHGLRNFITNNVTESSRFVYLIKYANAQKIREVAKNEKVVMFVLGGIPDTQIERY |
| | YKSCVEFPDMNSSLEVKRSELARMIKNISFDDFKNVKQQAKGRENVAKERAKAVIGLYLTVMYLLV |
| | KNLVNVNARYVIAIHCL |
| UZOD01.1 | VIFMAKKNKMKPRELREAQKKARQLKAAEINNNAVPAIAAMPAAEVIAPAAEKKKSSVKAAGMKS |
| SEQ ID NO: | ILVSENKMYITSFGKGNSAVLEYEVDNNDYNKTQLSSKDNSNIELGNVNEVNITFSSRRGFESGVEIN |
| 4890 | TSNPTHRSGESSSVRGDMLGLKSELEKRFFGKTFDDNIHIQLIYNILDIEKILAVYVTNIVYALNNMLG |
| | VKGSESYDDFMGYLSAQNTYYIFTHPDKSNLSDKVKGNIKKSLSKFNDLLKTKRLGYFGLEEPKTKD |
| | KRVSEAYKKRVYHMLAIVGQIRQCVFHDLSEHSEYDLYSFIDNSKKVYRECRETLDYLVDERFDSIN |
| | KGFIQGNKVNISLLIDMMKDYEADDIIRLYYDFIVLKSQKNLGFSIKKLREKMLDEYGFRFKDKQYD |
| | SVRSKMYKLMDFLLFCNYYRNDVVAGEALVRKLRFSMTDDEKEGIYADEAAKLWGKFRNDFENIA |
| | DHMNGDVTKELGKADMDFDEKILDSEKKNASDLLYFSKMIYMLTYFLDGKEINDLLTTLISKFDNIK |
| | EFLKIMKSSAVNVECELTAGYKLFNDSQRITNELFIVKNIASMRKPAASAKLTMFRDALTILGIDDKIT |
| | DDRISEILKLKEKGKGIHGLRNFITNNVIESSRFVYLIKYANAQKIREVAKNEKWMFVLGGIPDTQIE |
| | RYYKSCVEFPDMNSSLEVKRSELARMIKNISFDDFKNVKQQAKGRENVAKERAKAVIGLYLTVMYL |
| | LVKNLVNVNARYVIAIHCLERDFGLYKEIIPELASKNLKNDYRILSQTLCELCDNRDESPNLFLKKNK |
| | RLRKCVEVDINNADSSMTRKYRNCIAHLTVVRELKEYIGDIRTVDSYFSI |
| ULUI01.1 | MAKKNKMKPRELREAQKKARQLKAAEINNNAVPAIAAMPAAEAAAPAAEKKKSSVKAAGMKSIL |
| SEQ ID NO: | VSENKMYITSFGKGNSAVLEYEVDNNDYNKTQLSSKDNSNIELCDVDEVNITFSSKHGFESGVKINTS |
| 4891 | NPTHRSGESSSVRGDMLGLKSELEKRFFGKTFDDNIHIQLIYNILDIEKILAVYVTNIVYALNNMLGLE |
| | NESNNDFMGYLSAKNTYDVFTDPDESDLSKNIKGNIKKSLSKFNDLLKTKRLGYFGLEEPKTKDKRV |
| | SEAYKKRVYHMLAIVGQIRQSVFHDKSNELDEYLYSFIDIIDSEYRETLDYLIDERFDSINKGFIQGNK |
| | VNISLLIDMMKGYEADDIIRLYYDFIVLKSQKNLGFSIKKLREKMLDEYGFRFKDKQYDSVRSKMYK |
| | LMDFLLFCNYYRNDVVAGEALVRKLRFSMTDDEKEGIYADEAEKLWGKFRNDFENIADHMNGDVI |
| | KELGKADMDFDEKILDSEKKNASDLLYFSKMIYMLTYFLDGKEINDLLTTLISKFDNIKEFLKIMKSS |
| | AVDVECELTAGYKLFNDSQRITNELFIVKNIASMRKPAASAKLTMFRDALTILGIDDKITDDRISEILK |
| | LKEKGKGIHGLRNFITNNVIESSRFVYLIKYANAQKIREVAKNEKWMFVLGGIPDTQIERYYKSCVE |
| | SPDMNSSLEAKRRENVAKERAKAVIGLYLTVTYLLVKNLVNVNARYVIAIHCLERDFGLYKEIIPEL |
| | ASKNLKNDYRILSQTLCELCDDRDESPNLFLKKNKRLRKCVEVDINNADSSMTRKYRNCIAHLTVVR |
| | ELKEYIGDIRTVDSYFSIYHYVMQRCITKREDDTKQEEKIKYEDDLLKNHGYTKDFVKALNSSFGYNI |
| | PRFKNLSIEQLFDRNEYLTEK |
| UXSK01.1 | MAKKNKMKPRELREAQKKARQLKAAEINNNAVPAIAAMPAAEAAAPAAEKKKSSVKAAGMKSIL |
| SEQ ID NO: | VSENKMYITSFGKGNSAVLEYEVDNNDYNKTQLSSKDNSNIELCDVDEVNITFSSKHGFESGVKINTS |
| 4892 | NPTHRSGESSSVRGDMLGLKSELEKRFFGKTFDDNIHIQLIYNILDIEKILAVYVTNIVYALNNMLGLE |
| | NESNNDFMGYLSAKNTYDVFTDPDESDLSKNIKGNIKKSLSKFNDLLKTKRLGYFGLEEPKTKDKRV |
| | SEAYKKRVYHMLAIVGQIRQSVFHDKSNELDEYLYSFIDIIDSEYRETLDYLIDERFDSINKGFIQGNK |
| | VNISLLIDMMKGYEADDIIRLYYDFIVLKSQKNLGFSIKKLREKMLDEYGFRFKDKQYDSVRSKMYK |
| | LMDFLLFCNYYRNDVVAGEALVRKLRFSMTDDEKEGIYADEAEKLWGKFRNDFENIADHMNGDVI |
| | KELGKADMDFDEKILDSEKKNASDLLYFSKMIYMLTYFLDGKEINDLLTTLISKFDNIKEFLKIMKSS |
| | AVDVECELTAGYKLFNDSQRITNELFIVKNIASMRKPAASAKLTMFRDALTILGIDDKITDDRISEILK |
| | LKEKGKGIHGLRNFITNNVIESSRFVYLIKYANAQKIREVAKNEKWMFVLGGIPDTQIERYYKSCVE |
| | SPDMNSSLEAKRRENVAKERAKAVIGLYLTVTYLLVKNLVNVNARYVIAIHCLERDFGLYKEIIPEL |
| | ASKNLKNDYRILSQTLCELCDDRDESPNLFLKKNKRLRKCVEVDINNADSSMTRKYRNCIAHLTVVR |
| | ELKEYIGDIRTVDSYFSIYHYVMQRCITKREDDTKQEEKIKYEDDLLKNHGYTKDFVKALNSSFGYNI |
| | PRFKNLSIEQLFDRNEYLTEK |
| OYDX01.1 | MAKKNKMKPRERREAQKKARQLKAAEINNNAVPAIAAMPAAEAAAPAAEKKKSSVKAAGMKSIL |
| SEQ ID NO: | VSENKMYITSFGKGNSAVLEYEVDNNDYNKTQLSSKDNSNIELCDVDEVNITFSSKHGFESGVKINTS |
| 4893 | NPTHRSGESSSVRGDMLGLKSELEKRFFGKTFDDNIHIQLIYNILDIEKILAVYVTNIVYALNNMLGLE |
| | NESNNDFMGYLSAKNTYDVFTDPDESDLSKNIKGNIKKSLSKFNDLLKTKRLGYFGLEEPKTKDKRV |
| | SEAYKKRVYHMLAIVGQIRQSVFHDKSNELDEYLYSFIDIIDSEYRETLDYLLSLIHISEP |
| ORUY01.1 | MAKKNKMKPRELREAQKKARQLKAAEIKNNAVPAIAAMPAAEAAAPAVEKKKSSVKAAGMKSIL |
| SEQ ID NO: | VSENKMYITSFGKGNSAVLEYEVDNNDYNKTQLSSEDNSNIELCDVDEVNITFSSKHGFESGVEINTS |
| 4894 | NPTHRSGESSPVRGDMLGLKSELEKRFFGKTFDDNIHIQLIYNILDIEKILAVYVTNIVYALNNMLGEG |
| | GDESHDDFMGYLSAKNTYDVFTDPDESDLSKNIKGNIKKSLSKFNDLLKTKRLGYFGLEEPKTKDKR |
| | ASEAYKKRVYHMLAIVGQIRQSVFHDKSNELDEYLYSFIDIIDSEYRDTLDYLVDERFDSINKGFIQG |
| | NKVNISLLIDMMKGYEADDIIRLYYDFIVLKSQKNLGFSIKKLREKMLDEYGFRFKDKQYDSVRSKM |
| | YKLMDFLLFCNYYRKDVGAGEALVRKLRFSMTDEEKEGIYAYEAAKLWGKFRNDFENIADHMNG |
| | DVIKELGKADMDFDEKILDSEKKNASDLLYFSKMIYMLTYFLDGKEINDFLTTLISKFDNIKEFLKIM |
| | KSSAVDVECKLTAGYKLFNDSQRITNELFIVKNIASMRKPAASAKLTMFRDALTILGIDDKITDDRISE |
| | ILKLKEKGKGIHGLRNFITNNVIESSRFVYLIKYANAQKIREVAENEKVVMFVLGGIPDTQIERYYKSC |
| | VEFPDMNSSLEAKRSELARMIKNISFDDFKNVKQQAKGRENVAKERAKAVIGLYLTVMYLLVKNLV |
| | NVNARYVIAIHCLERDFGLYKEIIPELASKNLKNDYRILSQTLCELCDDCDESPNLFLKKNKRLRKCV |
| | EVDINNADSSMTRKYRNCIAHLTVVRELKEYIGDIRTVDSYFSIYHY |
| OGWT01.1 | VIFMAKKNKMKPRELREAQKKARQLKAAEINNNAVPAIAAMPAAEAAAPAAEKKKSSVKAAGMK |
| SEQ ID NO: | SILVSENKMYITSFGKGNSAVLEYEVDNNDYNKTQLSSKDNSNIELCDVDEVNITFSSKHGFESGVKI |
| 4895 | NTSNPTHRSGESSSVRGDMLGLKSELEKRFFGKTFDDNIHIQLIYNILDIEKILAVYVTNIVYALNNML |
| | GLENESNNDFMGYLSAKNTYDVFTDPDESDLSKNIKGNIKKSLSKFNDLLKTKRLGYFGLEEPKTKD |
| | KRVSEAYKKRVYHMLAIVGQIRQSVFHDKSNELDEYLYSFIDIIDSEYRETLDYLIDERFDSINKGFIQ |
| | GNKVNISLLIDMMKDDYEADDIIRLYYDFIVLKSQKNLGFSIKKLREKMLDEYGFRFKDKQYDSVRS |
| | KMYKLMDFLLFCNYYRNDVIAGEALVRKLRFSMTDDEKEGIYADEAAKLWGKFRNDFENIADHMN |
| | GDVIKELGKADMDFDEKILDSEKKNASDLLYFSKMIYMLTYFLDGKEINDLLTTLISKFDNIKEFLKI |
| | MKSSAVNVECELTAGYKLFNDSQRITNELFIVKNIASMRKPAASAKLTMFRDALTILGIDDKITDDRI |
| | SEILKLKEKGKGIHGLRNFITNNVIESSRFVYLIKYANAQKIREVAENEKVVMFVLGGIPDTQIERYYK |
| | SCVEFPDMNSSLEVKRSELARMIKNIRFDDFKNVKQQAKGRENVAKERAKAVIGLYLTVMYLLVKN |
| | LVNVNARYVIAIHCLERDFGLYKEIIPELASKNLKNDYRILSQTLCELCDNGDESPNLFLKKNRRLRK |
| | CVEVDINNADSSMTRKYRNCIAHLTVVRELKEYIGDIRTVDSYFSIYHYVMQRCITKREDDTK |
| OODB01.1 | MAKKNKMKPRELREAQKKARQLKAAEINNNAVPAIAAMPAAEAAAPAAEKKKSSVKAAGMKSIL |
| SEQ ID NO: | VSENKMYITSFGKGNSAVLEYEVDNNDYNKTQLSSKDNSNIELCDVDEVNITFSSKHGFESGVKINTS |
| 4896 | NPTHRSGESSSVRGDMLGLKSELEKRFFGKTFDDNIHIQLIYNILDIEKILAVYVTNIVYALNNMLGLE |
| | NESNNDFMGYLSAKNTYDLSKNIKGNIKKSLSKFNDLLKTKRLGYFGLEEPKTKDKRVSEAYKKRV |
| | YHMLAIVGQIRQSVFHDKSNELDEYLYSFIDIIDSEYRETLDYLIDERFDSINKGFIQGNKVNISLLIDM |
| | MKDDYEADDIIRLYYDFIVLKSQKNLGFSIKKLREKMLDEYGFRFKDKQYDSVRSKMYKLMDFLLF |
| | CNYYRNDVIAGEALVRKLRFSMTDDEKEGIYADEAAKLWGKFRNDFENIADHMNGDVIKELGKAD |
| | MDFDEKILDSEKKNASDLLYFSKMIYMLTYFLDGKEINDLLTTLISKFDNIKEFLKIMKSSAVNVECE |
| | LTAGYKLFNDSQRITNELFIVKNIASMRKPAASAKLTMFRDALTILGIDDKITDDRISEILKLKEKGKGI |
| | HGLRNFITNNVTESSRFVYLIKYANAQKIREVAENEKVVMFVLGGIPDTQIERYYKSCVEFPDMNSSL |
| | EVKRSELARMIKNIRFDDFKNVKQQAKGRENVAKERAKAVIGLYLTVMYLLVKNLVNVNARYVIAI |
| | HCLERDFGLYKEIIPELASKNLKNDYRILSQTLCELCDNGDESPNLFLKKNRRLRKCVEVDINNADSS |
| | MTRKYRNCIAHLTVVRELKEYIGDIRTVDSYFSIYHYAALYHEKGR |
| UPPV01.1 | MAKKNKMKPRELREAQKKARQLKVAEINNNAVPAIAAMPAAQVIAPAAEKKKSSVKAAGMKSILV |
| SEQ ID NO: | SENKMYITSFGKGNSAVLEYEVDNNDYNKTQLSSEGNSNIELGDVNEVNITFSSKRGFESGVEINTSN |
| 4897 | PTHRSGESSPVRGDMLGLKSELEKRFFGKTFDDNIHIQLIYNILDIEKILAVYVTNIVYALNNMLGEGD |
| | DESHDDFMGYLSAKNTYDVFTDPDESDLSKNIKGNIKKSFSTFNDLLKTKRLGYFGLEEPKTKDTRV |
| | SQAYKKRVYHMLAIVGQIRQSVFHDKSSKLDEDLYSFIDIIDSEYRDTLDYLVDERFDSINKGFIQGN |
| | KVNISLLIDMMKDDYEADDIIRLYYDFIVLKSQKNLGFSIKKLREKMLEEYGFRFKDKQYDSVRSKM |
| | YKIMDFLLFCNYYRNDVVAGEALVRKLRFSMTDDEKEGIYADEAAKLWGKFRNDFENIADHMNGD |
| | VIKELGKADMDFDEKILDSEKKNASDLLYFSKMIYMLTYFLDGKEINDLLTTLISKFDNIKEFLKIMK |
| | SSAVDVECELTAGYKLFNDSQRITNELFIVKNIASMRKPAASAKLTMFRDALTILGIDDGR |
| UPFB01.1 | VIFMAKKNKMKPRELREAQKKARQLKVAEINNNAVPAIAAMPAAQVIAPAAEKKKSSVKAAGMKS |
| SEQ ID NO: | ILVSENKMYITSFGKGNSAVLEYEVDNNDYNKTQLSSEGNSNIELGDVNEVNITFSSKRGFESGVEIN |
| 4898 | TSNPTHRSGESSPVRGDMLGLKSELEKRFFGKTFDDNIHIQLIYNILDIEKILAVYVTNIVYALNNMLG |
| | EGDDESHDDFMGYLSAKNTYDVFTDPDESDLSKNIKGNIKKSFSTFNDLLKTKRLGYFGLEEPKTKD |
| | TRVSQAYKKRVYHMLAIVGQIRQSVFHDKSSKLDEDLYSFIDIIDSEYRDTLDYLVDERFDSINKGFIQ |
| | GNKVNISLLIDMMKDDYEADDIIRLYYDFIVLKSQKNLGFSIKKLREKMLEEYGFRFKDKQYDSVRS |
| | KMYKIMDFLLFCNYYRNDVVAGEALVRKLRFSMTDDEKEGIYADEAAKLWGKFRNDFENIADHM |
| | NGDVIKELGKADMDFDEKILDSEKKNASDLLYFSKMIYMLTYFLDGKEINDLLTTLISKFDNIKEFLK |
| | IMKSSAVDVECELTAGYKLFNDSQRITNELFIVKNIASMRKPAASAKLTMFRDALTILGIDDNITDDRI |
| | SEILKLKEKGKGIHGLRNFITNNVIESSRFVYLIKYANAQKIREVAKNEKVVMFVLGGIPDTQIERYYK |
| | SCVEVPDMNSSLEAKRSELARMIK |
| UMEK01.1 | VIFMAKKNKMKPRELREAQKKARQLKAAEINNNAAPAIAAMPAAEVIAPAAEKKKSSVKAAGMKS |
| SEQ ID NO: | ILVSKNKMYITSFGKGNSAVLEYEVDNNDYNQTQLSSKNSSNIELHGVNEVNITFSSKHGFESGVEIN |
| 4899 | TSNPTHRSGESSPVRGDMLGLKSELEKRFFGKTFDDNIHIQLIYNILDIEKILAVYVTNIVYALNNMLG |
| | EGDDESHDDFMGYLSAKNTYDVFTDPDESDLSKNIKGNIKKSLSKFNDLLKTKRLGYFGLEEPKTKD |
| | TNALEAYKKRVYHMLAIVGQIRQSVFHDKSSKLDEDLYSFIDIIDSEYRETLDYLVDERFDSINKGFIQ |
| | GNKVNISLLIDMMKGYEADDIIRLYYDFIVLKSQKNLGFSIKKLREKMLEEYGYRFKDKQYDSVRSK |
| | MYKLMDFLLFCNYYRNDVVAGEALVRKLRFSMTDDEKEGIYADEASKLWGKFRNDFENIADHMN |
| | GDVIKELGKADMDFDEKILDSEKKNASDLLYFSKMIYMLTYFLDGKEINDLLTTLISKFDNIKEFLKI |
| | MKSSAVNVECELTTGYKLFNDSQRITNELFIVKNIASMRKPAASAKLTMFRDALTILGIDDKITDDRIS |
| | EILKLKEKGKGIHGLRNFITNNVIESSRFVYLIKYANAQKIREVAENEKWMFVLGGIPDTQIERYYKS |
| | CVEFPDMNSSLKAKRSELARMIKNIRFDDFKNVKQQAKGRENVAKERAKAVIGLYLTVMYLLVK |
| OVZR01.1 | VIFMAKKNKMKPRELREAQKKARQLKAAEINNNAVPAIAAMPAAEVIAPAAEKKKSSVKAAGMKS |
| SEQ ID NO: | ILVSENKMYITSFGKGNSAVLEYEVDKVDNDDYNKTQLSSKGSSNIELHGVNEVNITFSSKHGFESG |
| 4900 | VEISTSNPTHRSGESSPVRWDMLGLKSELEKRFFCKTFDDNIHIQLIYNILDIEKILAVYVTNIVYALNN |
| | MLGVKGSESHDDFIGYLSTNNIYDVFIDPDNSSLSDDKKANVRKSLSKFNVLLKTKRLGYFGLEEPK |
| | TKDTRASEAYKKRVYHMLAIVGQIRQCVFHDKSGAKRFDLYSFINNIDSEYRETLDYLVDERFDSIN |
| | KGFIEGNKINISLLIDMMKGYEADDIIRLYYDFIVLKSQKNLGFSIKKLRE |
| IMG_ | MAKKNKMKPRELREAQKKARQLKVAEINNNAAPAIAAMPAVEVIAPAAEKKKSSVKAAGMKSILV |
| 3300014744 | SENKMYITSFGKGNSAVLEYEVDNNDYNKTQLSSKDNSNIELGNVNEVNITFSSRRGFESGVEINTSN |
| SEQ ID NO: | PTHRSGESSSVRGDMLGLKSELEKRFFGKTFDDNIHIQLIYNILDIEKILAVYVTNIVYALNNMLGIKG |
| 4901 | SESYDDFMGYLSARNTYEVFTNPNGSTLSDDKKENIRKSLSKFNALLKTKRLGYFGLEEPKTKDTRV |
| | SQAYKKRVYHMLAIVGQIRQSVFHDKSSKLDEDLYSFIDIIDSEYRETLDYLVDERFDSINKGFVQGN |
| | KVNISLLIDMMKDDYEADDIIRLYYDFXXXXHCA |
| GCA_ | MPAAEVIAPAAEKKKSSVKAAGMKSILVSENKMYITSFGKGNSAVLEYEVDNNDYNQTQLSSEDSS |
| 003461775.1_ | NIELCGVTKVNITFSSKHGLESGVEINTSNPTHRSGESSPVRWDMLGLKSELEKRFFGKTFDDNIHIQL |
| ASM346177v1_ | IYNILDIEKILAVYVTNIVYALNNMLGIKKSESYDDFMGYLSARNTYEVFTHPDKSNLSDKAKGNIKK |
| genomic | SFSTFNDLLKTKRLGYFGLEEPKTKDTRVSQAYKKRVYHMLAIVGQIRQCVFHDKSGAKKFDLYSFI |
| SEQ ID NO: | NNIDSEYRETLDYLVDERFDSINKGFIQGNKVNISLLIDMMKGYKADDIIRLYYDFIVLKSQKNLGFSI |
| 4902 | KKLREKMLDEYGFRFKDKQYDSVRSKMYKLMDFLLFCNYYRNDVIAGEDLVRKLRFSMTDDEKEG |
| | IYADEAEKLWGKFRNDFENIADHMNGDVIKELGQADMDFDEKILDSEKKNASDLLYFSKMIYMLTY |
| | FLDGKEINDLLTTLISKFDNIKEFLKIMKSSAVDVECELTAGYKLFNDSQRITNELFIVKNIASMRKPA |
| | ASAKLTMFRDALTILGIDDKITDDRISEI |
| UZHM01.1 | MAKKNKMKPRELREAQKKARQLKAAEINNNAAPAIAAMPAAEVIAPAAEKKKSSVKAAGMKSIFV |
| SEQ ID NO: | SENKMYITSFGKGNSAVLEYEVDNNDYNQTQLSSEDSSNIELCGVTKVNITFSSKHGLESGVEINTSN |
| 4903 | PTHRSGESSPVRWDMLGLKSELEKRFFGKTFDDNIHIQLIYNILDIEKMLAVYVTNIVYALNNMLGIK |
| | KSESYDDFMGYLSARNTYEVFTHPDKSNLSDKVKGNIKKSFSTFNDLLKTKRLGYFGLEEPKTKDTR |
| | VLEAYKKRVYHMLAIVGQIRQCVFHDKSGAKRFDLYSFINNIDPEYRETLDYLVDERFDSINKDFIEG |
| | NKVNISLLIDMMKGYEADDIIRLY |
| OHYP01.1 | MAKKNKMKPRELREAQKKARQLKAAEINNNAAPAIAAMPAAEVIAPAAEKKKSSVKAAGMKSILV |
| SEQ ID NO: | SENKMYITSFGKGNSAVLEYEVDNNDYNQTQLSSKDNSNIQLGGVNEVNITFSSKHGFESGVEINTS |
| 4904 | NPTHRSGESSPVRGDMLGLKSELEKRFFGKTFDDNIHIQLIYNILDIEKILAVYVTNIVYALNNMLGV |
| | KGSESHDDFIGYLSTNNIYDVFIDPDNSSLSDDKKANVRKSLSKFNALLKTKRLGYFGLEEPKTKDNR |
| | VSQAYKKRVYHMLAIVGQIRQCVFHDKSGAKRFDLYSFINNIDPEYRDTLDYLVEERLKSINKDFIED |
| | NKVNISLLIDMMKGYEADDIIRLYYDFIVLKSQKNLGFSIKKLREKMLDEYGFKRTAWVLANTLHEL |
| | KWDGRFSYANKHWAEKIYIPTDLNHNSDFVVRSHPAVLDGFVSFYRKAVQALNLFGAEHCVGDRA |
| | EQDFTGKVLVLSPDTLKESCWSQENQLWYAHDGFGCSPHAIGRSVRCTCLGDGEMTRWNRDEFIGV |
| | LDEQFLPEWAQEKLAELTAPRQEETTTGEMKLE |
| UZMO01.1_2 | MMKKEGIYADEAAKLWGKFRNDFENIADHMNGEAIKELGKADMDFDEKILDSEKKNASDLLYFSK |
| SEQ ID NO: | MIYMLTYFLDGKEINDLLTTLISKFDNIKEFLKIMKSSAVDVECELTAGYKLFNDSQRITNELFIVKNI |
| 4905 | ASMRKPAASAKLTMFRDALTILGIDDNITDDRISEILKLKEKGKGIHGLRNFITNNVIESSRFVYLIKYA |
| | NAQKIREVAENEKVVMFVLGGIPDTQIERYYKSCVEFPDMNSSLEAKRSELARMIKNISFDDFKNVK |
| | QQAKGRENVAKERAKAVIGLYLTVMYLLVKNLVNVNARYVIAIHCLERDFGLYKEIIPELASKNLK |
| | NDYRILSQTLCELCDDRDESPNLFLKKNKRLRKCVEVDINNADSSMTRKYRNCIAHLTVVRELKEYI |
| | GDIRTVDSYFSIYHYVMQRCITKREDDTKQEDKIKYEDDLLKNHGYTKDFVKALNSPFGYNIPRFKN |
| | LSIEQLFDRNEYLTEK |
| OGZW01.1 | MMKKEGIYADEAAKLWGKFRNDFENIADHMNGEAIKELGKADMDFDEKILDSEKKNASDLLYFSK |
| SEQ ID NO: | MIYMLTYFLDGKEINDLLTTLISKFDNIKEFLKIMKSSAVDVECELTAGYKLFNDSQRITNELFIVKNI |
| 4906 | ASMRKPAASAKLTMFRDALTILGIDDNITDDRISEILKLKEKGKGIHGLRNFITNNVIESSRFVYLIKYA |
| | NAQKIREVAKNEKVVMFVLGGIPDTQIERYYKSCVEFPDMNSSLEAKRSELARMIKNIGFDDFKNVK |
| | QQAKGRENVAKERAKAVIGLYLTVMYLLVKNLVNVNARYVIAIHCLERDFGLYKEIIPELASKNLK |
| | NDYRILSQTLCELCDDRDESPNLFLKKNKRLRKCVEVDINNADSSMTRKYRNCIAHLTVVRELKEYI |
| | GDIRTVDSYFSIYHYVMQRCITKREDDTKQEDKIKYEDDLLKNHGYTKDFVKALNSPFGYNIPRFKN |
| | LSIEQLFDRNEYLTEK |
| OGEZ01.1 | VEINTSNPTHRSGESSSVRGDMLGLKSELEKRFFGKTFDDNIHIQLIYNILDIEKILAVYVTNIVYALNN |
| SEQ ID NO: | MLGIKDSESYDDFIGYLSARNTYKVFTHPDKSNLSDKVKGNIKKSFSTFNDLLKTKRLGYFGLEEPKT |
| 4907 | KDTRVSQAYKKRVYHMLAIVGQIRQSVFHDKSSKLDEDLYSFIDIIDPEYRETLDYLVDERFDSINKG |
| | FIQGNKVNISLLIDMMKGYEADDIIRLYYDFIVLKSQKNLGFSIKKLREKMLDEYGFRFKDKQYDSVR |
| | SKMYKLMDFLLFCNYYRNDVVAGEALVRKLRFSMTDDEKEGIYADEAAKLWGKFRNDFENIADH |
| | MNGEAIKELGKADMDFDEKILDSEKKNASDLLYFSKMIYMLTYFLDGKEINDLLTTLISKFDNIKEFL |
| | KIMKSSAVDVECELTAGYKLFNDSQRITNELFIVKNIASMRKPAASAKLTMFRDALTILGIDDNITDD |
| | RISEILKLKEKGKGIHGLRNFITNNVIESSRFVYLIKYANAQKIREVAKNEKVVMFVLGGIPDTQIERY |
| | YKSCVEFPDMNSSLEAKRSELARMIKNIGFDDFKNVKQQAKGRENVAKERAKAVIGLYLTVMYLLV |
| | KNLVNVNARYVIAIHCLERDFGLYKEIIPELASKNLKNDYRILSQTLCELCDDRDESPNLFLKKNKRL |
| | RKCVEVDINNADSSMTRKYRNCIAHLTVVRELKEYIGDIRTVDSYFSIYHYVMQRCITKREDDTKQE |
| | DKIKYEDDLLKNHGYTKDFVKALNSPFGYNIPRFKNLSIEQLFDRNEYLTEK |
| UPEE01.1 | MNGDVTKELGKADMDFDEKILDSEKKNASDLLYFSKMIYMLTYFLDGKEINDLLTTLISKFDNIKEFL |
| SEQ ID NO: | KIMKSSAVDVECELTAGYKLFNDSQRITNELFIVKNIASMRKPAASAKLTMFRDALTILGIDDKITDD |
| 4908 | RISEILKLKEKGKGIHGLRNFITNNVTESSRFVYLIKYANAQKIREVAENEKVVMFVLGGIPDTQIERY |
| | YKSCVEVPDMNSSLEAKRSELARMIKNISFDDFKNVKQQAKGRENVAKERAKAVIGLYLTVMYLLV |
| | KNLVNVNARYVIAIHCLERDFGLYKEIIPELASKNLKNDYRILSQTLCELCDDRDKSPNLFLKKNKRL |
| | RKCVEVDINNADSIMTRKYRNCIAHLTVVRELKEYIGDIRTVDSYFSIYHYVMQRCITKREDDTKQEE |
| | KIKYEDDLLKNHGYTKDFVKALNSPFGYNIPRFKNLSIEQLFDRNEYLTEK |
| OVTY01.1 | MNGDVTKELGKADMDFDEKILDSEKKNASDLLYFSKMIYMLTYFLDGKEINDLLTTLISKFDNIKEFL |
| SEQ ID NO: | KIMKSSAVDVECELTAGYKLFNDSQRITNELFIVKNIASMRKPAASAKLTMFRDALTILGIDDKITDD |
| 4909 | RISEILKLKEKGKGIHGLRNFITNNVTESSRFVYLIKYANAQKIREVAENEKVVMFVLGGIPDTQIERY |
| | YKSCVEVPDMNSSLEAKRSELARMIKNISFDDFKNVKQQAKGRENVAKERAKAVIGLYLTVMYLLV |
| | KNLVNVNARYVIAIHCLERDFGLYKEIIPELASKNLKNDYRILSQTLCELCDDRDKSPNLFLKKNKRL |
| | RKCVEVDINNADSIMTRKYRNCIAHLTVVRELKEYIGDIRTVDSYFSIYHYVMQRCITKREDDTKQEE |
| | KIKYEDDLLKNHGYTKDFVKALNSPFGYNIPRFKNLSIEQLFDRNEYLTEK |
| OOCM01.1 | MNGDVTKELGKADMDFDEKILDSEKKNASDLLYFSKMIYMLTYFLDGKEINDLLTTLISKFDNIKEFL |
| SEQ ID NO: | KIMKSSAVDVECELTAGYKLFNDSQRITNELFIVKNIASMRKPAASAKLTMFRDALTILGIDDKITDD |
| 4910 | RISEILKLKEKGKGIHGLRNFITNNVTESSRFVYLIKYANAQKIREVAENEKVVMFVLGGIPDTQIERY |
| | YKSCVEVPDMNSSLEAKRSELARMIKNISFDDFKNVKQQAKGRENVAKERAKAVIGLYLTVMYLLV |
| | KNLVNVNARYVIAIHCLERDFGLYKEIIPELASKNLKNDYRILSQTLCELCDDRDKSPNLFLKKNKRL |
| | RKCVEVDINNADSIMTRKYRNCIAHLTVVRELKEYIGDIRTVDSYFSIYHYVMQRCITKREDDTKQEE |
| | KIKYEDDLLKNHGYTKDFVKALNSPFGYNIPRFKNLSIEQLFDRNEYLTEK |
| OHAE01.1_2 | MNGDVTKELGKADMDFDEKILDSEKKNASDLLYFSKMIYMLTYFLDGKEINDLLTTLISKFDNIKEFL |
| SEQ ID NO: | KIMKSSAVDVECELTAGYKLFNDSQRITNELFIVKNIASMRKPAASAKLTMFRDALTILGIDDKITDD |
| 4911 | RISEILKLKEKGKGIHGLRNFITNNVTESSRFVYLIKYANAQKIREVAENEKVVMFVLGGIPDTQIERY |
| | YKSCVEVPDMNSSLEAKRSELARMIKNISFDDFKNVKQQAKGRENVAKERAKAVIGLYLTVMYLLV |
| | KNLVNVNARYVIAIHCLERDFGLYKEIIPELASKNLKNDYRILSQTLCELCDDRDKSPNLFLKKNKRL |
| | RKCVEVDINNADSIMTRKYRNCIAHLTVVRELKEYIGDIRTVDSYFSIYHYVMQRCITKREDDTKQEE |
| | KIKYEDDLLKNHGYTKDFVKALNSPFGYNIPRFKNLSIEQLFDRNEYLTEK |
| OWRW01.1 | MNGDVTKELGKADMDFDEKILDSEKKNASDLLYFSKMIYMLTYFLDGKEINDLLTTLISKFDNIKEFL |
| SEQ ID NO: | KIMKSSAVDVECELTAGYKLFNDSQRITNELFIVKNIASMRKPAASAKLTMFRDALTILGIDDKITDD |
| 4912 | RISEILKLKEKGKGIHGLRNFITNNVTESSRFVYLIKYANAQKIREVAENEKVVMFVLGGIPDTQIERY |
| | YKSCVEVPDMNSSLEAKRSELARMIKNISFDDFKNVKQQAKGRENVAKERAKAVIGLYLTVMYLLV |
| | KNLVNVNARYVIAIHCLERDFGLYKEIIPELASKNLKNDYRILSQTLCELCDDRDKSPNLFLKKNKRL |
| | RKCVEVDINNADSIMTRKYRNCIAHLTVVRELKEYIGDIRTVDSYFSIYHYVMQRCITKREDDTKQEE |
| | KIKYEDDLLKNHGYTKDFVKALNSPFGYNIPRFKNLSIEQLFDRNEYLTEK |
| OGHH01.1 | MNGDVTKELGKADMDFDEKILDSEKKNASDLLYFSKMIYMLTYFLDGKEINDLLTTLISKFDNIKEFL |
| SEQ ID NO: | KIMKSSAVDVECELTAGYKLFNDSQRITNELFIVKNIASMRKPAASAKLTMFRDALTILGIDDKITDD |
| 4913 | RISEILKLKEKGKGIHGLRNFITNNVTESSRFVYLIKYANAQKIREVAENEKVVMFVLGGIPDTQIERY |
| | YKSCVEVPDMNSSLEAKRSELARMIKNISFDDFKNVKQQAKGRENVAKERAKAVIGLYLTVMYLLV |
| | KNLVNVNARYVIAIHCLERDFGLYKEIIPELASKNLKNDYRILSQTLCELCDDRDKSPNLFLKKNKRL |
| | RKCVEVDINNADSIMTRKYRNCIAHLTVVRELKEYIGDIRTVDSYFSIYHYVMQRCITKREDDTKQEE |
| | KIKYEDDLLKNHGYTKDFVKALNSPFGYNIPRFKNLSIEQLFDRNEYLTEK |
| OGOM01.1_2 | MRLMISYAFIMISLCLNLRKISVFSIKKLREKMLDEYGFRFKDKQYDSVRSKMYKLMDFLLFCNYYR |
| SEQ ID NO: | NDVAAGEALVRKLRFSMTDDEKEGIYADEAAKLWGKFRNDFENIADHMNGDVIKELGKADMDFD |
| 4914 | EKILDSEKKNASDLLYFSKMIYMLTYFLDGKEINDLLTTLISKFDNIKEFLKIMKSSAVDVECELTAGY |
| | KLFNDSQRITNELFIVKNIASMRKPAASAKLTMFRDALTILGIDDNITDDRISEILKLKEKGKGIHGLR |
| | NFITNNVIESSRFVYLIKYANAQKIREVAKNEKVVMFVLGGIPDTQIERYYKSCVEFPDMNSSLEAKR |
| | SELARMIKNISFDDFKNVKQQAKGRENVAKERAKAVIGLYLTVMYLLVKNLVNVNARYVIAIHCLE |
| | RDFGLYKEIIPELASKNLKNDYRILSQTLCELCDERDKSPNLFLKKNERLRKCVEVDINNADSSMTRK |
| | YRNCIAHLTVVRELKEYIGDIRTVDSYFSIYHYVMQRCITKREDDKKQEEKIKYEDDLLKNHGYTKD |
| | FVKALNSPFGYNIPRFKNLSIEQLFDRNEYLTEK |
| UPFO01.1_2 | MRLMISYAFIMISLCLNLRKISVFSIKKLREKMLDEYGFRFKDKQYDSVRSKMYKLMDFLLFCNYYR |
| SEQ ID NO: | NDVAAGEALVRKLRFSMTDDEKEGIYADEAAKLWGKFRNDFENIADHMNGDVIKELGKADMDFD |
| 4915 | EKILDSEKKNASDLLYFSKMIYMLTYFLDGKEINDLLTTLISKFDNIKEFLKIMKSSAVDVECELTAGY |
| | KLFNDSQRITNELFIVKNIASMRKPAASAKLTMFRDALTILGIDDNITDDRISEILKLKEKGKGIHGLR |
| | NFITNNVIESSRFVYLIKYANAQKIREVAKNEKVVMFVLGGIPDTQIERYYKSCVEFPDMNSSLEAKR |
| | SELARMIKNISFDDFKNVKQQAKGRENVAKERAKAVIGLYLTVMYLLVKNLVNVNARYVIAIHCLE |
| | RDFGLYKEIIPELASKNLKNDYRILSQTLCELCDERDKSPNLFLKKNERLRKCVEVDINNADSSMTRK |
| | YRNCIAHLTVVRELKEYIGDIRTVDSYFSIYHYVMQRCITKREDDKKQEEKIKYEDDLLKNHGYTKD |
| | FVKALNSPFGYNIPRFKNLSIEQLFDRNEYLTEK |
| OVZV01.1_2 | MRLMISYAFIMISLCLNLRKISVFSIKKLREKMLDEYGFRFKDKQYDSVRSKMYKLMDFLLFCNYYR |
| SEQ ID NO: | NDVAAGEALVRKLRFSMTDDEKEGIYADEAAKLWGKFRNDFENIADHMNGDVIKELGKADMDFD |
| 4916 | EKILDSEKKNASDLLYFSKMIYMLTYFLDGKEINDLLTTLISKFDNIKEFLKIMKSSAVDVECELTAGY |
| | KLFNDSQRITNELFIVKNIASMRKPAASAKLTMFRDALTILGIDDNITDDRISEILKLKEKGKGIHGLR |
| | NFITNNVIESSRFVYLIKYANAQKIREVAKNEKWMFVLGGIPDTQIERYYKSCVEFPDMNSSLEAKR |
| | SELARMIKNISFDDFKNVKQQAKGRENVAKERAKAVIGLYLTVMYLLVKNLVNVNARYVIAIHCLE |
| | RDFGLYKEIIPELASKNLKNDYRILSQTLCELCDERDKSPNLFLKKNERLRKCVEVDINNADSIMTRK |
| | YRNCIAHLTVVRELKEYIGDIRTVDSYFSIYHYVMQRCITKREDDTKQEEKIKYEDDLLKNHGYTKD |
| | FVKALNSPFGYNIPRFKNLSIEQLFDRNEYLTEK |
| OGGK01.1_2 | MRLMISYAFIMISLCLNLRKISVFSIKKLREKMLDEYGFRFKDKQYDSVRSKMYKLMDFLLFCNYYR |
| SEQ ID NO: | NDVAAGEALVRKLRFSMTDDEKEGIYADEAAKLWGKFRNDFENIADHMNGDVIKELGKADMDFD |
| 4917 | EKILDSEKKNASDLLYFSKMIYMLTYFLDGKEINDLLTTLISKFDNIKEFLKIMKSSAVDVECELTAGY |
| | KLFNDSQRITNELFIVKNIASMRKPAASAKLTMFRDALTILGIDDNITDDRISEILKLKEKGKGIHGLR |
| | NFITNNVIESSRFVYLIKYANAQKIREVAKNEKWMFVLGGIPDTQIERYYKSCVEFPDMNSSLEAKR |
| | SELARMIKNISFDDFKNVKQQAKGRENVAKERAKAVIGLYLTVMYLLVKNLVNVNARYVIAIHCLE |
| | RDFGLYKEIIPELASKNLKNDYRILSQTLCELCDERDKSPNLFLKKNERLRKCVEVDINNADSIMTRK |
| | YRNCIAHLTVVRELKEYIGDIRTVDSYFSIYHYVMQRCITKREDDTKQEEKIKYEDDLLKNHGYTKD |
| | FVKALNSPFGYNIPRFKNLSIEQLFDRNEYLTEK |
| OZEI01.12 | MFRDALTILGIDDKITDDRISEILKLKEKGKGIHGLRNFITNNVIESSRFVYLIKYANAQKIREVAENEK |
| SEQ ID NO: | VVMFVLGGIPDTQIERYYKSCVEFPDMNSSLEAKRSELARMIKNISFDDFKNVKQQAKGRENVAKER |
| 4918 | AKAVIGLYLTVMYLLVKNLVNVNARYVIAIHCLERDFGLYKEIIPELASKNLKNDYRILSQTLCELCD |
| | DRDESPNLFLKKNKRLRKCVEVDINNADSSMTRKYRNCIAHLTVVRELKEYIGDIRTVDSYFSIYHY |
| | VMQRCITKREDDTKQEEKTKYEDDLLKNHGYTKDFVKALNSPFGYNIPRFKNLSIEQLFDRNEYLTE |
| | K |
| UAJR01.1 | MFRDALTILGIDDKITDDRISEILKLKEKGKGIHGLRNFITNNVIESSRFVYLIKYANAQKIREVAENEK |
| SEQ ID NO: | VVMFVLGGIPDTQIERYYKSCVEFPDMNSSLEAKRSELARMIKNISFDDFKNVKQQAKGRENVAKER |
| 4919 | AKAVIGLYLTVMYLLVKNLVNVNARYVIAIHCLERDFGLYKEIIPELASKNLKNDYRILSQTLCELCD |
| | DRDESPNLFLKKNKRLRKCVEVDINNADSSMTRKYRNCIAHLTVVRELKEYIGDIRTVDSYFSIYHY |
| | VMQRCITKREDDTKQEEKTKYEDDLLKNHGYTKDFVKALNSPFGYNIPRFKNLSIEQLFDRNEYLTE |
| | K |
| OYBT01.1 | VEINTSNPTHRSGESSPVRGDMLGLKSELEKRFFGKNFDDNIHIQLIYNILDIEKILAVYVTNIVYALN |
| SEQ ID NO: | NMLGEGDESNYDFMGYLSTFNTYKVFTNPNGSTLSDDKKENIRKSLSKFNALLKTKRLGYFGLEEPK |
| 4920 | TKDKRVSEAYKKRVYHMLAIVGQIRQSVFHDKSNELDEYLYSFIDIIDSEYRDTLDYLVDERFDSINK |
| | GFVQGNKVNISLLIDMMKGYEADDIIRLYYDFIVLKSQKNLGFSIKKLREKMLDEYGFRFKDKQYDS |
| | VRSKMYKLMDFLLFCNYYRNDIAAGEALVRKLRFSMTDDEKEGIYADEAEKLWGKFRNDFENIAD |
| | HMNGDVTKELGKADMDFDEKILDSEKKNASDLLYFSKMIYMLTYFLDGKEINDLLTTLISKFDNIKEF |
| | LKIMKSSAVDVECELTAGYKLFNDSQRITNELFIVKNIASMRKPAASAKLTMFRDALTILGIDDKITD |
| | DRISEILKLKEKGKGIHGLRNFITNNVIESSRFVYLIKYANAQKIREVAENEKWMFVLGGIPDTQIER |
| | YYKSCVEFPDMNSSLEAKRSELARMIKNISFDDFKNVKQQAKGRENVAKERAKAVIGLYLTVMYLL |
| | VKNLVNVNARYVIAIHCLERDFGLYKEIIPELASKNLKNDYRILSQTLCELCDDRDESPNLFLKKNRR |
| | LRKCVEVDINNADSSMTRKYRNCIAHLTVVRELKEYIGDIRTVDSYFSIYHYVMQRCITKREDDTKQ |
| | EDKIKYEDDLLKNHGYTKDFVKALNSPFGYNIPRFKNLSIEQLFDRNEYLTEK |
| OGTB01.12 | MFRDALTILGIDDKITDDRISEILKLKEKGKGIHGLRNFITNNVIESSRFVYLIKYANAQKIREVAKNEK |
| SEQ ID NO: | VVMFVLGGIPDTQIERYYKSCVEFPDMNSSLEVKRSELARMIKNIRFDDFKNVKQQAKGRENVAKE |
| 4921 | RAKAVIGLYLTVMYLLVKNLVNVNARYVIAIHCLERDFGLYKEIIPELASKNLKNDYRILSQTLCELC |
| | DDRDESPNLFLKKNKRLRKCVEVDINNADSSMTRKYRNCIAHLTVVRELKKYIGDIRTVDSYFSIYH |
| | YVMQRCITKREDDTKQEEKIKYEDDLLKNHGYTKDFVKALNSPFGYNIPRFKNLSIEQLFDRNEYLT |
| | EK |
| OOSV01.1 | MKSILVSENKMYITSFGKGNSAVLEYEVDKVDNNNYNKTQLSSKDNSNIELGDVNEVNITFSSKRGN |
| SEQ ID NO: | ESGVEINTSNPTHRSGESSPVRWDMLGLKSELEKRFFGKTFDDNIHIQLIYNILDIEKILAVYVTNIVYA |
| 4922 | LNNMLGIKGSESYDDFMGYLSARNTYEVFTHPDKSNLSDKVKGNIKKSLSKFNDLLKTKRLGYFGL |
| | EEPKTKDTRVSQAYKKRVYHMLAIVGQIRQCVFHDKSGAKRFDLYSFINNIDPEYRDTLDYLVEERL |
| | KSINKDFIEGNKVNISLLIDMMKGYEADDIIRLYYDFIVLKSQKNLGFSIKKLREKMLEEYGYRFKDK |
| | QYDSVRSKMYKLMDFLLFCNYYRNDVVAGEALVRKLRFSMTDDEKEGIYADEASKLWGKFRNDF |
| | ENIADHMNGDVIKELGKADMDFDEKILDSEKKNASDLLYFSKMIYMLTYFLDGKEINDLLTTLISKF |
| | DNIKEFLKIMKSSAVDVECELTAGYKLFNDSQRITNELFIVKNIASMRKPAASAKLTMFRDALTILGID |
| | DKITDDRISEILKLKEKGKGIHGLRNFITNNVTESSRFVYLIKYANAQKIREVAKNEKWMFVLGGIPD |
| | TQIERYYKSCVEFPDMNSSLEAKRSELARMIKNIRFDDFKNVKQQAKGRENVAKERAKAVIGLYLT |
| | VMYLLVKNLVNVNARYVIAIHCLERDFGLYKEIIPELASKNLKNDYRILSQTLCELCDDRDESPNLFL |
| | KKNKRLRKCVEVDINNADSSMTRKYRNCIAHLTVVRELKEYIGDIRTVDSYFSIYHYVMQRCITKRE |
| | DDTKQEEKIKYEDDLLKNHGYTKDFVKALNSPFGYNIPRFKNLSIEQLFDRNEYLTEK |
| UBVQ01.1 | VEINTSNPTHRSGESSSVRGDMLGLKSELEKRFFGKTFDDNIHIQLIYNILDIEKILAVYVTNIVYALNN |
| SEQ ID NO: | MLGVKGSESYDDFMGYLSAQNTYYIFTHPDKSNLSDKVKGNIKKSLSKFNDLLKTKRLGYFGLEEP |
| 4923 | KTKDTRVSQAYKKRVYHMLAIVGQIRQCVFHDKSGAKRFDIYSFINNIDPEYRETLDYLVDERFDSIN |
| | KGFIQGNKVNISLLIDMMKDYEADDIIRLYYDFIVLKSQKNLGFSIKKLREKMLDEYGFRFKDKQYD |
| | SVRSKMYKLMDFLLFCNYYRNDVVAGETLVRKLRFSMTDDEKEGIYADEAAKLWGKFRNDFENIA |
| | DHMNGDVTKELGKADMDFDEKILDSEKKNASDLLYFSKMIYMLTYFLDGKEINDLLTTLISKFDNIK |
| | EFLKIMKSSAVDVECELTEGYKLFNDSQRITNELFIVKNIASMRKPAASAKLTMFRDALTILGIDDKIT |
| | DDRISEILKLKEKGKGIHGLRNFITNNVIESSRFVYLIKYANAQKIREVAENEKVVMFVLGGIPDTQIE |
| | RYYKSCVEFPDMNSSLEAKRSELARMIKNIRFDDFKNVKQQAKGRENVAKERAKAVIGLYLTVMYL |
| | LVKNLVNVNARYVIAIHCLERDFGLYKEIIPELASKNLKNDYRILSQTLCELCDDRDESPNLFLKKNK |
| | RLRKCVEVDINNADSNMTRKYRNCIAHLTVVRELKEYIGDIRTVDSYFSIYHYVMQRCITKREDDTK |
| | QEEKIKYEDDLLKNHGYTKDFVKALNSPFGYNIPRFKNLSIEQLFDRNEYLTEK |
| UZPY01.1 | MMKDYEADDIIRLYYDFIVLKSQKNLGFSIKKLREKMLDEYGFRFKDKQYDSVRSKMYKLMDFLLF |
| SEQ ID NO: | CNYYRNDVVAGETLVRKLRFSMTDDEKEGIYADEAAKLWGKFRNDFENIADHMNGDVIKELGKAD |
| 4924 | MDFDEKILDSEKKNASDLLYFSKMIYMLTYFLDGKEINDLLTTLISKFDNIKEFLKIMKSSAVDVECE |
| | LTEGYKLFNDSQRITNELFIVKNIASMRKPAASAKLTMFRDALTILGIDDKITDDRISEILKLKEKGKGI |
| | HGLRNFITNNVTESSRFVYLIKYANAQKIREVAKNEKVVMFVLGGIPDTQIERYYKSCVEFPDMNSSL |
| | EAKRSELARMIKNIRFDDFKNVKQQAKGRENVAKERAKAVIGLYLTVMYLLVKNLVNVNARYVIAI |
| | HCLERDFGLYKEIIPELASKNLKNDYRILSQTLCELCDDRDESPNLFLKKNKRLRKCVEVDINNADSS |
| | MTRKYRNCIAHLTVVRELKEYIGDIRTVDSYFSIYHYVMQRCITKREDDTKQEEKIKYEDVLLKNHG |
| | YTKDFVKALNSPFGYNIPRFKNLSIEQLFDRNEYLTEK |
| ULVV01.1 | VEINTSNPTHRSGESSPVRGDMLGLKSELEKRFFGKTFDDNIHIQLIYNILDIEKILAVYVTNIVYALNN |
| SEQ ID NO: | MLGEGDESNYDFMGYLSTFNTYKVFTNPNGSTLSDDKKENIRKSLSKFNALLKTKRLGYFGLEEPKT |
| 4925 | KDNRVSEAYKKRVYHMLAIVGQIRQCVFHDKSGAKRFDLYSFINNIDPEYRETLDYLVDERFDSINK |
| | GFIQGNKVNISLLIDMMKDDYEADDIIRLYYDFIVLKSQKNLGFSIKKLREKMLEEYGFRFKDKQYDS |
| | VRSKMYKLMDFLLFCNYYRNDVVAGEALVRKLRFSMTDDEKEGIYADEAAKLWGKFRNDFENIAD |
| | HMNGDVTKELGQADMDFDEKILDSEKKNASDLLYFSKMIYMLTYFLDDKEINDLLTTLISKFDNIKEF |
| | LKIMKSSAVDVECELTAGYKLFNDSQRITNELFIVKNIASMRKPAASAKLTMFRDALTILGIDDKITD |
| | DRISEILKLKEKGKGIHGLRNFITNNVIESSRFVYLIKYANAQKIREVAENEKWMFVLGGIPDTQIER |
| | YYKSCVEFPDMNSSLEAKRSELARMIKNIRFDDFKNVKQQAKGRENVAKERAKAVIGLYLTVMYLL |
| | VKNLVNVNARYVIAIHCLERDFGLYKEIIPELASKNLKNDYRILSQTLCELCDDRDESPNLFLKKNKR |
| | LRKCVEVDINNADSNMTRKYRNCIAHLTVVRELKEYIGDIRTVDSYFSIYHYVMQRCITKRENDTKQ |
| | EEKIKYEDDLLKNHGYTKDFVKALNSPFGYNIPRFKNLSIEQLFDRNEYLTEK |
| UXRQ01.1 | VEINTSNPTHRSGESSPVRGDMLGLKSELEKRFFGKTFDDNIHIQLIYNILDIEKILAVYVTNIVYALNN |
| SEQ ID NO: | MLGEGDESNYDFMGYLSTFNTYKVFTNPNGSTLSDDKKENIRKSLSKFNALLKTKRLGYFGLEEPKT |
| 4926 | KDNRVSEAYKKRVYHMLAIVGQIRQCVFHDKSGAKRFDLYSFINNIDPEYRETLDYLVDERFDSINK |
| | GFIQGNKVNISLLIDMMKDDYEADDIIRLYYDFIVLKSQKNLGFSIKKLREKMLEEYGFRFKDKQYDS |
| | VRSKMYKLMDFLLFCNYYRNDVVAGEALVRKLRFSMTDDEKEGIYADEAAKLWGKFRNDFENIAD |
| | HMNGDVTKELGQADMDFDEKILDSEKKNASDLLYFSKMIYMLTYFLDDKEINDLLTTLISKFDNIKEF |
| | LKIMKSSAVDVECELTAGYKLFNDSQRITNELFIVKNIASMRKPAASAKLTMFRDALTILGIDDKITD |
| | DRISEILKLKEKGKGIHGLRNFITNNVIESSRFVYLIKYANAQKIREVAENEKVVMFVLGGIPDTQIER |
| | YYKSCVEFPDMNSSLEAKRSELARMIKNIRFDDFKNVKQQAKGRENVAKERAKAVIGLYLTVMYLL |
| | VKNLVNVNARYVIAIHCLERDFGLYKEIIPELASKNLKNDYRILSQTLCELCDDRDESPNLFLKKNKR |
| | LRKCVEVDINNADSNMTRKYRNCIAHLTVVRELKEYIGDIRTVDSYFSIYHYVMQRCITKRENDTKQ |
| | EEKIKYEDDLLKNHGYTKDFVKALNSPFGYNIPRFKNLSIEQLFDRNEYLTEK |
| UZLX01.1 | VEINTSNPTHRSGESSPVRGDMLGLKSELEKRFFGKTFDDNIHIQLIYNILDIEKILAVYVTNIVYALNN |
| SEQ ID NO: | MLGEGDESNYDFMGYLSTFNTYKVFTNPNGSTLSDDKKENIRKSLSKFNALLKTKRLGYFGLEEPKT |
| 4927 | KDNRVSEAYKKRVYHMLAIVGQIRQCVFHDKSGAKRFDLYSFINNIDPEYRETLDYLVDERFDSINK |
| | GFIQGNKVNISLLIDMMKDDYEADDIIRLYYDFIVLKSQKNLGFSIKKLREKMLEEYGFRFKDKQYDS |
| | VRSKMYKLMDFLLFCNYYRNDVVAGEALVRKLRFSMTDDEKEGIYADEAAKLWGKFRNDFENIAD |
| | HMNGDVTKELGQADMDFDEKILDSEKKNASDLLYFSKMIYMLTYFLDDKEINDLLTTLISKFDNIKEF |
| | LKIMKSSAVDVECELTAGYKLFNDSQRITNELFIVKNIASMRKPAASAKLTMFRDALTILGIDDKITD |
| | DRISEILKLKEKGKGIHGLRNFITNNVIESSRFVYLIKYANAQKIREVAENEKVVMFVLGGIPDTQIER |
| | YYKSCVEFPDMNSSLEAKRSELARMIKNIRFDDFKNVKQQAKGRENVAKERAKAVIGLYLTVMYLL |
| | VKNLVNVNARYVIAIHCLERDFGLYKEIIPELASKNLKNDYRILSQTLCELCDDRDESPNLFLKKNKR |
| | LRKCVEVDINNADSNMTRKYRNCIAHLTVVRELKEYIGDIRTVDSYFSIYHYVMQRCITKRENDTKQ |
| | EEKIKYEDDLLKNHGYTKDFVKALNSPFGYNIPRFKNLSIEQLFDRNEYLTEK |
| OWBH01.1 | VEINTSNPTHRSGESSPVRGDMLGLKSELEKRFFGKTFDDNIHIQLIYNILDIEKILAVYVTNIVYALNN |
| SEQ ID NO: | MLGEGDESNYDFMGYLSTFNTYKVFTNPNGSTLSDDKKENIRKSLSKFNALLKTKRLGYFGLEEPKT |
| 4928 | KDNRVSEAYKKRVYHMLAIVGQIRQCVFHDKSGAKRFDLYSFINNIDPEYRETLDYLVDERFDSINK |
| | GFIQGNKVNISLLIDMMKDDYEADDIIRLYYDFIVLKSQKNLGFSIKKLREKMLEEYGFRFKDKQYDS |
| | VRSKMYKLMDFLLFCNYYRNDVVAGEALVRKLRFSMTDDEKEGIYADEAAKLWGKFRNDFENIAD |
| | HMNGDVTKELGQADMDFDEKILDSEKKNASDLLYFSKMIYMLTYFLDDKEINDLLTTLISKFDNIKEF |
| | LKIMKSSAVDVECELTAGYKLFNDSQRITNELFIVKNIASMRKPAASAKLTMFRDALTILGIDDKITD |
| | DRISEILKLKEKGKGIHGLRNFITNNVIESSRFVYLIKYANAQKIREVAENEKVVMFVLGGIPDTQIER |
| | YYKSCVEFPDMNSSLEAKRSELARMIKNIRFDDFKNVKQQAKGRENVAKERAKAVIGLYLTVMYLL |
| | VKNLVNVNARYVIAIHCLERDFGLYKEIIPELASKNLKNDYRILSQTLCELCDDRDESPNLFLKKNKR |
| | LRKCVEVDINNADSNMTRKYRNCIAHLTVVRELKEYIGDIRTVDSYFSIYHYVMQRCITKRENDTKQ |
| | EEKIKYEDDLLKNHGYTKDFVKALNSPFGYNIPRFKNLSIEQLFDRNEYLTEK |
| UPPO01.1 | VEINTSNPTHRSGESSPVRGDMLGLKSELEKRFFGKTFDDNIHIQLIYNILDIEKILAVYVTNIVYALNN |
| SEQ ID NO: | MLGEGDESNYDFMGYLSTFNTYKVFTNPNGSTLSDDKKENIRKSLSKFNALLKTKRLGYFGLEEPKT |
| 4929 | KDNRVSEAYKKRVYHMLAIVGQIRQCVFHDKSGAKRFDLYSFINNIDPEYRETLDYLVDERFDSINK |
| | GFIQGNKVNISLLIDMMKDDYEADDIIRLYYDFIVLKSQKNLGFSIKKLREKMLEEYGFRFKDKQYDS |
| | VRSKMYKLMDFLLFCNYYRNDVVAGEALVRKLRFSMTDDEKEGIYADEAAKLWGKFRNDFENIAD |
| | HMNGDVTKELGQADMDFDEKILDSEKKNASDLLYFSKMIYMLTYFLDDKEINDLLTTLISKFDNIKEF |
| | LKIMKSSAVDVECELTAGYKLFNDSQRITNELFIVKNIASMRKPAASAKLTMFRDALTILGIDDKITD |
| | DRISEILKLKEKGKGIHGLRNFITNNVIESSRFVYLIKYANAQKIREVAENEKWMFVLGGIPDTQIER |
| | YYKSCVEFPDMNSSLEAKRSELARMIKNIRFDDFKNVKQQAKGRENVAKERAKAVIGLYLTVMYLL |
| | VKNLVNVNARYVIAIHCLERDFGLYKEIIPELASKNLKNDYRILSQTLCELCDDRDESPNLFLKKNKR |
| | LRKCVEVDINNADSSMTRKYRNCIAHITVVRELKEYIGDIRTVDSYFSIYHYVMQRCITKREDDTKQE |
| | EKIKYEDDLLKNHGYTKDFVKALNSPFGYNIPRFKNLSIEQLFDRNEYLTEK |
| UPPX01.1 | MLAIVGQIRQCVFHDKSGAKRFDLYSFINNIDPEYRETLDYLVDERFDSINKGFIQGNKVNISLLIDM |
| SEQ ID NO: | MKDDYEADDIIRLYYDFIVLKSQKNLGFSIKKLREKMLEEYGFRFKDKQYDSVRSKMYKLMDFLLF |
| 4930 | CNYYRNDVVAGEALVRKLRFSMTDDEKEGIYADEAAKLWGKFRNDFENIADHMNGDVIKELGQA |
| | DMDFDEKILDSEKKNASDLLYFSKMIYMLTYFLDDKEINDLLTTLISKFDNIKEFLKIMKSSAVDVEC |
| | ELTAGYKLFNDSQRITNELFIVKNIASMRKPAASAKLTMFRDALTILGIDDKITDDRISEILKLKEKGK |
| | GIHGLRNFITNNVIESSRFVYLIKYANAQKIREVAENEKVVMFVLGGIPDTQIERYYKSCVEFPDMNS |
| | SLEAKRSELARMIKNIRFDDFKNVKQQAKGRENVAKERAKAVIGLYLTVMYLLVKNLVNVNARYV |
| | IAIHCLERDFGLYKEIIPELASKNLKNDYRILSQTLCELCDDRDESPNLFLKKNKRLRKCVEVDINNAD |
| | SNMTRKYRNCIAHLTVVRELKEYIGDIRTVDSYFSIYHYVMQRCITKRENDTKQEEKIKYEDDLLKN |
| | HGYTKDFVKALNSPFGYNIPRFKNLSIEQLFDRNEYLTEK |
| UPLT01.1 | VEINTSNPTHRSGESSPVRGDMLGLKSELEKRFFGKTFDDNIHIQLIYNILDIEKILAVYVTNIVYALNN |
| SEQ ID NO: | MLGVKGSESHDDFIGYLSTNNTYDVFIDPDNSSLSDDKKANVRKSLSKFNVLLKTKRLGYFGLEEPK |
| 4931 | TKDNRVSEAYKKRVYHMLAIVGQIRQCVFHDKSGAKRFDLYSFINNIDPEYRDTLDYLVEERLKSIN |
| | KDFIQGNKVNISLLIDMMKGYEADDIIRLYYDFIVLKSQKNLGFSIKKLREKMLEEYGFRFKDKQYDS |
| | VRSKMYKLMDFLLFCNYYRNDIAAGEALVRKLRFSMTDDEKEGLYADEAAKLWGKFRNDFENIAD |
| | HMNGDVTKELGKADMDFDEKILDSEKKNASDLLYFSKMIYMLTYFLDGKEINDLLTTLISKFDNIKEF |
| | LKIMKSSAVNVECELTAGYKLFNDSQRITNELFIVKNIASMRKPAASAKLTMFRDALTILGIDDKITD |
| | DRISEILKLKEKGKGIHGLRNFITNNVIESSRFVYLIKYANAQKIREVAENEKVVMFVLGGIPDTQIER |
| | YYKSCVEFPDMNSSLEAKRSELARMIKNIRFDDFKNVKQQAKGRENVAKERAKAVIGLYLTVMYLL |
| | VKNLVNVNARYVIAIHCLERDFGLYKEIIPELASKNLKNDYRILSQTLCELCDDRDESPNLFLKKNKR |
| | LRKCVEVDINNADSNMTRKYRNCIAHLTVVRELKEYIGDIRTVDSYFSIYHYVMQRCITKREDDTKQ |
| | EEKIKYEDDLLKNHGYTKDFVKALNSPFGYNIPRFKNLSIEQLFDRNEYLTEK |
| OLRI01.1 | VEINTSNPTHRSGESSPVRGDMLGLKSELEKRFFGKTFDDNIHIQLIYNILDIEKILAVYVTNIVYALNN |
| SEQ ID NO: | MLGVKGSESHDDFIGYLSTNNTYDVFIDPDNSSLSDDKKANVRKSLSKFNVLLKTKRLGYFGLEEPK |
| 4932 | TKDNRVSEAYKKRVYHMLAIVGQIRQCVFHDKSGAKRFDLYSFINNIDPEYRDTLDYLVEERLKSIN |
| | KDFIQGNKVNISLLIDMMKGYEADDIIRLYYDFIVLKSQKNLGFSIKKLREKMLEEYGFRFKDKQYDS |
| | VRSKMYKLMDFLLFCNYYRNDIAAGEALVRKLRFSMTDDEKEGLYADEAAKLWGKFRNDFENIAD |
| | HMNGDVTKELGKADMDFDEKILDSEKKNASDLLYFSKMIYMLTYFLDGKEINDLLTTLISKFDNIKEF |
| | LKIMKSSAVNVECELTAGYKLFNDSQRITNELFIVKNIASMRKPAASAKLTMFRDALTILGIDDKITD |
| | DRISEILKLKEKGKGIHGLRNFITNNVIESSRFVYLIKYANAQKIREVAENEKVVMFVLGGIPDTQIER |
| | YYKSCVEFPDMNSSLEAKRSELARMIKNIRFDDFKNVKQQAKGRENVAKERAKAVIGLYLTVMYLL |
| | VKNLVNVNARYVIAIHCLERDFGLYKEIIPELASKNLKNDYRILSQTLCELCDDRDESPNLFLKKNKR |
| | LRKCVEVDINNADSNMTRKYRNCIAHLTVVRELKEYIGDIRTVDSYFSIYHYVMQRCITKREDDTKQ |
| | EEKIKYEDDLLKNHGYTKDFVKALNSPFGYNIPRFKNLSIEQLFDRNEYLTEK |
| OOZT01.1 | VEINTSNPTHRSGESSPVRGDMLGLKSELEKRFFGKTFDDNIHIQLIYNILDIEKILAVYVTNIVYALNN |
| SEQ ID NO: | MLGVKGSESHDDFIGYLSTNNTYDVFIDPDNSSLSDDKKANVRKSLSKFNVLLKTKRLGYFGLEEPK |
| 4933 | TKDNRVSEAYKKRVYHMLAIVGQIRQCVFHDKSGAKRFDLYSFINNIDPEYRDTLDYLVEERLKSIN |
| | KDFIQGNKVNISLLIDMMKGYEADDIIRLYYDFIVLKSQKNLGFSIKKLREKMLEEYGFRFKDKQYDS |
| | VRSKMYKLMDFLLFCNYYRNDIAAGEALVRKLRFSMTDDEKEGLYADEAAKLWGKFRNDFENIAD |
| | HMNGDVTKELGKADMDFDEKILDSEKKNASDLLYFSKMIYMLTYFLDGKEINDLLTTLISKFDNIKEF |
| | LKIMKSSAVNVECELTAGYKLFNDSQRITNELFIVKNIASMRKPAASAKLTMFRDALTILGIDDKITD |
| | DRISEILKLKEKGKGIHGLRNFITNNVIESSRFVYLIKYANAQKIREVAENEKVVMFVLGGIPDTQIER |
| | YYKSCVEFPDMNSSLEAKRSELARMIKNIRFDDFKNVKQQAKGRENVAKERAKAVIGLYLTVMYLL |
| | VKNLVNVNARYVIAIHCLERDFGLYKEIIPELASKNLKNDYRILSQTLCELCDDRDESPNLFLKKNKR |
| | LRKCVEVDINNADSNMTRKYRNCIAHLTVVRELKEYIGDIRTVDSYFSIYHYVMQRCITKREDDTKQ |
| | EEKIKYEDDLLKNHGYTKDFVKALNSPFGYNIPRFKNLSIEQLFDRNEYLTEK |
| UYFS01.1 | VEINTSNPTHRSGESSPVRGDMLGLKSELEKRFFGKTFDDNIHIQLIYNILDIEKILAVYVTNIVYALNN |
| SEQ ID NO: | MLGVKGSESHDDFIGYLSTNNTYDVFIDPDNSSLSDDKKANVRKSLSKFNVLLKTKRLGYFGLEEPK |
| 4934 | TKDNRVSEAYKKRVYHMLAIVGQIRQCVFHDKSGAKRFDLYSFINNIDPEYRDTLDYLVEERLKSIN |
| | KDFIQGNKVNISLLIDMMKGYEADDIIRLYYDFIVLKSQKNLGFSIKKLREKMLEEYGFRFKDKQYDS |
| | VRSKMYKLMDFLLFCNYYRNDIAAGEALVRKLRFSMTDDEKEGLYADEAAKLWGKFRNDFENIAD |
| | HMNGDVTKELGKADMDFDEKILDSEKKNASDLLYFSKMIYMLTYFLDGKEINDLLTTLISKFDNIKEF |
| | LKIMKSSAVNVECELTAGYKLFNDSQRITNELFIVKNIASMRKPAASAKLTMFRDALTILGIDDKITD |
| | DRISEILKLKEKGKGIHGLRNFITNNVIESSRFVYLIKYANAQKIREVAENEKVVMFVLGGIPDTQIER |
| | YYKSCVEFPDMNSSLEAKRSELARMIKNIRFDDFKNVKQQAKGRENVAKERAKAVIGLYLTVMYLL |
| | VKNLVNVNARYVIAIHCLERDFGLYKEIIPELASKNLKNDYRILSQTLCELCDDRDESPNLFLKKNKR |
| | LRKCVEVDINNADSNMTRKYRNCIAHLTVVRELKEYIGDIRTVDSYFSIYHYVMQRCITKREDDTKQ |
| | EEKIKYEDDLLKNHGYTKDFVKALNSPFGYNIPRFKNLSIEQLFDRNEYLTEK |
| OROU01.1 | VEINTSNPTHRSGESSPVRGDMLGLKSELEKRFFGKTFDDNIHIQLIYNILDIEKILAVYVTNIVYALNN |
| SEQ ID NO: | MLGVKGSESHDDFIGYLSTNNTYDVFIDPDNSSLSDDKKANVRKSLSKFNVLLKTKRLGYFGLEEPK |
| 4935 | TKDNRVSEAYKKRVYHMLAIVGQIRQCVFHDKSGAKRFDLYSFINNIDPEYRDTLDYLVEERLKSIN |
| | KDFIQGNKVNISLLIDMMKGYEADDIIRLYYDFIVLKSQKNLGFSIKKLREKMLEEYGFRFKDKQYDS |
| | VRSKMYKLMDFLLFCNYYRNDIAAGEALVRKLRFSMTDDEKEGLYADEAAKLWGKFRNDFENIAD |
| | HMNGDVTKELGKADMDFDEKILDSEKKNASDLLYFSKMIYMLTYFLDGKEINDLLTTLISKFDNIKEF |
| | LKIMKSSAVNVECELTAGYKLFNDSQRITNELFIVKNIASMRKPAASAKLTMFRDALTILGIDDKITD |
| | DRISEILKLKEKGKGIHGLRNFITNNVTESSRFVYLIKYANAQKIREVAENEKWMFVLGGIPDTQIER |
| | YYKSCVEFPDMNSSLEAKRSELARMIKNIRFDDFKNVKQQAKGRENVAKERAKAVIGLYLTVMYLL |
| | VKNLVNVNARYVIAIHCLERDFGLYKEIIPELASKNLKNDYRILSQTLCELCDDRDESPNLFLKKNKR |
| | LRKCVEVDINNADSNMTRKYRNCIAHLTVVRELKEYIGDIRTVDSYFSIYHYVMQRCITKREDDTKQ |
| | EEKIKYEDDLLKNHGYTKDFVKALNSPFGYNIPRFKNLSIEQLFDRNEYLTEK |
| OWSK01.1 | VEINTSNPTHRSGESSPVRGDMLGLKSELEKRFFGKTFDDNIHIQLIYNILDIEKILAVYVTNIVYALNN |
| SEQ ID NO: | MLGVKGSESHDDFIGYLSTNNTYDVFIDPDNSSLSDDKKANVRKSLSKFNVLLKTKRLGYFGLEEPK |
| 4936 | TKDNRVSEAYKKRVYHMLAIVGQIRQCVFHDKSGAKRFDLYSFINNIDPEYRDTLDYLVEERLKSIN |
| | KDFIQGNKVNISLLIDMMKGYEADDIIRLYYDFIVLKSQKNLGFSIKKLREKMLEEYGFRFKDKQYDS |
| | VRSKMYKLMDFLLFCNYYRNDIAAGEALVRKLRFSMTDDEKEGLYADEAAKLWGKFRNDFENIAD |
| | HMNGDVTKELGKADMDFDEKILDSEKKNASDLLYFSKMIYMLTYFLDGKEINDLLTTLISKFDNIKEF |
| | LKIMKSSAVNVECELTAGYKLFNDSQRITNELFIVKNIASMRKPAASAKLTMFRDALTILGIDDKITD |
| | DRISEILKLKEKGKGIHGLRNFITNNVIESSRFVYLIKYANAQKIREVAENEKVVMFVLGGIPDTQIER |
| | YYKSCVEFPDMNSSLEAKRSELARMIKNIRFDDFKNVKQQAKGRENVAKERAKAVIGLYLTVMYLL |
| | VKNLVNVNARYVIAIHCLERDFGLYKEIIPELASKNLKNDYRILSQTLCELCDDRDESPNLFLKKNKR |
| | LRKCVEVDINNADSNMTRKYRNCIAHLTVVRELKEYIGDIRTVDSYFSIYHYVMQRCITKREDDTKQ |
| | EEKIKYEDDLLKNHGYTKDFVKALNSPFGYNIPRFKNLSIEQLFDRNEYLTEK |
| GCA_ | VEINTSNPTHRSGESSPVRGDMLGLKSELEKRFFGKTFDDNIHIQLIYNILDIEKILAVYVTNIVYALNN |
| 003462325.1_ | MLGVKGSESHDDFIGYLSTNNTYDVFIDPDNSSLSDDKKANVRKSLSKFNVLLKTKRLGYFGLEEPK |
| ASM346232v1_ | TKDNRVSEAYKKRVYHMLAIVGQIRQCVFHDKSGAKRFDLYSFINNIDPEYRDTLDYLVEERLKSIN |
| genomic | KDFIQGNKVNISLLIDMMKGYEADDIIRLYYDFIVLKSQKNLGFSIKKLREKMLEEYGFRFKDKQYDS |
| SEQ ID NO: | VRSKMYKLMDFLLFCNYYRNDIAAGEALVRKLRFSMTDDEKEGLYADEAAKLWGKFRNDFENIAD |
| 4937 | HMNGDVTKELGKADMDFDEKILDSEKKNASDLLYFSKMIYMLTYFLDGKEINDLLTTLISKFDNIKEF |
| | LKIMKSSAVNVECELTAGYKLFNDSQRITNELFIVKNIASMRKPAASAKLTMFRDALTILGIDDKITD |
| | DRISEILKLKEKGKGIHGLRNFITNNVIESSRFVYLIKYANAQKIREVAENEKVVMFVLGGIPDTQIER |
| | YYKSCVEFPDMNSSLEAKRSELARMIKNIRFDDFKNVKQQAKGRENVAKERAKAVIGLYLTVMYLL |
| | VKNLVNVNARYVIAIHCLERDFGLYKEIIPELASKNLKNDYRILSQTLCELCDDRDESPNLFLKKNKR |
| | LRKCVEVDINNADSNMTRKYRNCIAHLTVVRELKEYIGDIRTVDSYFSIYHYVMQRCITKREDDTKQ |
| | EEKIKYEDDLLKNHGYTKDFVKALNSPFGYNIPRFKNLSIEQLFDRNEYLTEK |
| UZTE01.1 | VEINTSNPTHRSGESSPVRGDMLGLKSELEKRFFGKTFDDNIHIQLIYNILDIEKILAVYVTNIVYALNN |
| SEQ ID NO: | MLGVKGSESHDDFIGYLSTNNTYDVFIDPDNSSLSDDKKANVRKSLSKFNVLLKTKRLGYFGLEEPK |
| 4938 | TKDNRVSEAYKKRVYHMLAIVGQIRQCVFHDKSGAKRFDLYSFINNIDPEYRDTLDYLVEERLKSIN |
| | KDFIQGNKVNISLLIDMMKGYEADDIIRLYYDFIVLKSQKNLGFSIKKLREKMLEEYGFRFKDKQYDS |
| | VRSKMYKLMDFLLFCNYYRNDIAAGEALVRKLRFSMTDDEKEGLYADEAAKLWGKFRNDFENIAD |
| | HMNGDVTKELGKADMDFDEKILDSEKKNASDLLYFSKMIYMLTYFLDGKEINDLLTTLISKFDNIKEF |
| | LKIMKSSAVNVECELTAGYKLFNDSQRITNELFIVKNIASMRKPAASAKLTMFRDALTILGIDDKITD |
| | DRISEILKLKEKGKGIHGLRNFITNNVIESSRFVYLIKYANAQKIREVAENEKVVMFVLGGIPDTQIER |
| | YYKSCVEFPDMNSSLEAKRSELARMIKNIRFDDFKNVKQQAKGRENVAKERAKAVIGLYLTVMYLL |
| | VKNLVNVNARYVIAIHCLERDFGLYKEIIPELASKNLKNDYRILSQTLCELCDDRDESPNLFLKKNKR |
| | LRKCVEVDINNADSNMTRKYRNCIAHLTVVRELKEYIGDIRTVDSYFSIYHYVMQRCITKREDDTKQ |
| | EEKIKYEDDLLKNHGYTKDFVKALNSPFGYNIPRFKNLSIEQLFDRNEYLTEK |
| OPQO01.1 | VEINTSNPTHRSGESSPVRGDMLGLKSELEKRFFGKTFDDNIHIQLIYNILDIEKILAVYVTNIVYALNN |
| SEQ ID NO: | MLGVKGSESHDDFIGYLSTNNTYDVFIDPDNSSLSDDKKANVRKSLSKFNVLLKTKRLGYFGLEEPK |
| 4939 | TKDNRVSEAYKKRVYHMLAIVGQIRQCVFHDKSGAKRFDLYSFINNIDPEYRDTLDYLVEERLKSIN |
| | KDFIQGNKVNISLLIDMMKGYEADDIIRLYYDFIVLKSQKNLGFSIKKLREKMLEEYGFRFKDKQYDS |
| | VRSKMYKLMDFLLFCNYYRNDIAAGEALVRKLRFSMTDDEKEGLYADEAAKLWGKFRNDFENIAD |
| | HMNGDVTKELGKADMDFDEKILDSEKKNASDLLYFSKMIYMLTYFLDGKEINDLLTTLISKFDNIKEF |
| | LKIMKSSAVNVECELTAGYKLFNDSQRITNELFIVKNIASMRKPAASAKLTMFRDALTILGIDDKITD |
| | DRISEILKLKEKGKGIHGLRNFITNNVIESSRFVYLIKYANAQKIREVAENEKVVMFVLGGIPDTQIER |
| | YYKSCVEFPDMNSSLEAKRSELARMIKNIRFDDFKNVKQQAKGRENVAKERAKAVIGLYLTVMYLL |
| | VKNLVNVNARYVIAIHCLERDFGLYKEIIPELASKNLKNDYRILSQTLCELCDDRDESPNLFLKKNKR |
| | LRKCVEVDINNADSNMTRKYRNCIAHLTVVRELKEYIGDIRTVDSYFSIYHYVMQRCITKREDDTKQ |
| | EEKIKYEDDLLKNHGYTKDFVKALNSPFGYNIPRFKNLSIEQLFDRNEYLTEK |
| IMG_ | VEINTSNPTHRSGESSPVRGDMLGLKSELEKRFFGKTFDDNIHIQLIYNILDIEKILAVYVTNIVYALNN |
| 3300007801 | MLGVKGSESHDDFIGYLSTNNTYDVFIDPDNSSLSDDKKANVRKSLSKFNVLLKTKRLGYFGLEEPK |
| SEQ ID NO: | TKDNRVSEAYKKRVYHMLAIVGQIRQCVFHDKSGAKRFDLYSFINNIDPEYRDTLDYLVEERLKSIN |
| 4940 | KDFIQGNKVNISLLIDMMKGYEADDIIRLYYDFIVLKSQKNLGFSIKKLREKMLEEYGFRFKDKQYDS |
| | VRSKMYKLMDFLLFCNYYRNDIAAGEALVRKLRFSMTDDEKEGLYADEAAKLWGKFRNDFENIAD |
| | HMNGDVTKELGKADMDFDEKILDSEKKNASDLLYFSKMIYMLTYFLDGKEINDLLTTLISKFDNIKEF |
| | LKIMKSSAVNVECELTAGYKLFNDSQRITNELFIVKNIASMRKPAASAKLTMFRDALTILGIDDKITD |
| | DRISEILKLKEKGKGIHGLRNFITNNVIESSRFVYLIKYANAQKIREVAENEKVVMFVLGGIPDTQIER |
| | YYKSCVEFPDMNSSLEAKRSELARMIKNIRFDDFKNVKQQAKGRENVAKERAKAVIGLYLTVMYLL |
| | VKNLVNVNARYVIAIHCLERDFGLYKEIIPELASKNLKNDYRILSQTLCELCDDRDESPNLFLKKNKR |
| | LRKCVEVDINNADSNMTRKYRNCIAHLTVVRELKEYIGDIRTVDSYFSIYHYVMQRCITKREDDTKQ |
| | EEKIKYEDDLLKNHGYTKDFVKALNSPFGYNIPRFKNLSIEQLFDRNEYLTEK |
| OIZQ01.1 | VEINTSNPTHRSGESSPVRGDMLGLKSELEKRFFGKTFDDNIHIQLIYNILDIEKILAVYVTNIVYALNN |
| SEQ ID NO: | MLGVKGSESHDDFIGYLSTNNTYDVFIDPDNSSLSDDKKANVRKSLSKFNVLLKTKRLGYFGLEEPK |
| 4941 | TKDNRVSEAYKKRVYHMLAIVGQIRQCVFHDKSGAKRFDLYSFINNIDPEYRDTLDYLVEERLKSIN |
| | KDFIQGNKVNISLLIDMMKGYEADDIIRLYYDFIVLKSQKNLGFSIKKLREKMLEEYGFRFKDKQYDS |
| | VRSKMYKLMDFLLFCNYYRNDIAAGEALVRKLRFSMTDDEKEGLYADEAAKLWGKFRNDFENIAD |
| | HMNGDVTKELGKADMDFDEKILDSEKKNASDLLYFSKMIYMLTYFLDGKEINDLLTTLISKFDNIKEF |
| | LKIMKSSAVNVECELTAGYKLFNDSQRITNELFIVKNIASMRKPAASAKLTMFRDALTILGIDDKITD |
| | DRISEILKLKEKGKGIHGLRNFITNNVIESSRFVYLIKYANAQKIREVAENEKWMFVLGGIPDTQIER |
| | YYKSCVEFPDMNSSLEAKRSELARMIKNIRFDDFKNVKQQAKGRENVAKERAKAVIGLYLTVMYLL |
| | VKNLVNVNARYVIAIHCLERDFGLYKEIIPELASKNLKNDYRILSQTLCELCDDRDESPNLFLKKNKR |
| | LRKCVEVDINNADSNMTRKYRNCIAHLTVVRELKEYIGDIRTVDSYFSIYHYVMQRCITKREDDTKQ |
| | EEKIKYEDDLLKNHGYTKDFVKALNSPFGYNIPRFKNLSIEQLFDRNEYLTEK |
| UMIT01.1 | VEINTSNPTHRSGESSPVRGDMLGLKSELEKRFFGKTFDDNIHIQLIYNILDIEKILAVYVTNIVYALNN |
| SEQ ID NO: | MLGVKGSESHDDFIGYLSTNNTYDVFIDPDNSSLSDDKKANVRKSLSKFNVLLKTKRLGYFGLEEPK |
| 4942 | TKDNRVSEAYKKRVYHMLAIVGQIRQCVFHDKSGAKRFDLYSFINNIDPEYRDTLDYLVEERLKSIN |
| | KDFIQGNKVNISLLIDMMKGYEADDIIRLYYDFIVLKSQKNLGFSIKKLREKMLEEYGFRFKDKQYDS |
| | VRSKMYKLMDFLLFCNYYRNDIAAGEALVRKLRFSMTDDEKEGLYADEAAKLWGKFRNDFENIAD |
| | HMNGDVTKELGKADMDFDEKILDSEKKNASDLLYFSKMIYMLTYFLDGKEINDLLTTLISKFDNIKEF |
| | LKIMKSSAVNVECELTAGYKLFNDSQRITNELFIVKNIASMRKPAASAKLTMFRDALTILGIDDKITD |
| | DRISEILKLKEKGKGIHGLRNFITNNVIESSRFVYLIKYANAQKIREVAENEKVVMFVLGGIPDTQIER |
| | YYKSCVEFPDMNSSLEAKRSELARMIKNIRFDDFKNVKQQAKGRENVAKERAKAVIGLYLTVMYLL |
| | VKNLVNVNARYVIAIHCLERDFGLYKEIIPELASKNLKNDYRILSQTLCELCDDRDESPNLFLKKNKR |
| | LRKCVEVDINNADSNMTRKYRNCIAHLTVVRELKEYIGDIRTVDSYFSIYHYVMQRCITKREDDTKQ |
| | EEKIKYEDDLLKNHGYTKDFVKALNSPFGYNIPRFKNLSIEQLFDRNEYLTEK |
| UZTP01.1 | VEINTSNPTHRSGESSPVRGDMLGLKSELEKRFFGKTFDDNIHIQLIYNILDIEKILAVYVTNIVYALNN |
| SEQ ID NO: | MLGVKGSESHDDFIGYLSTNNTYDVFIDPDNSSLSDDKKANVRKSLSKFNVLLKTKRLGYFGLEEPK |
| 4943 | TKDNRVSEAYKKRVYHMLAIVGQIRQCVFHDKSGAKRFDLYSFINNIDPEYRDTLDYLVEERLKSIN |
| | KDFIQGNKVNISLLIDMMKGYEADDIIRLYYDFIVLKSQKNLGFSIKKLREKMLEEYGFRFKDKQYDS |
| | VRSKMYKLMDFLLFCNYYRNDIAAGEALVRKLRFSMTDDEKEGLYADEAAKLWGKFRNDFENIAD |
| | HMNGDVTKELGKADMDFDEKILDSEKKNASDLLYFSKMIYMLTYFLDGKEINDLLTTLISKFDNIKEF |
| | LKIMKSSAVNVECELTAGYKLFNDSQRITNELFIVKNIASMRKPAASAKLTMFRDALTILGIDDKITD |
| | DRISEILKLKEKGKGIHGLRNFITNNVIESSRFVYLIKYANAQKIREVAENEKVVMFVLGGIPDTQIER |
| | YYKSCVEFPDMNSSLEAKRSELARMIKNIRFDDFKNVKQQAKGRENVAKERAKAVIGLYLTVMYLL |
| | VKNLVNVNARYVIAIHCLERDFGLYKEIIPELASKNLKNDYRILSQTLCELCDDRDESPNLFLKKNKR |
| | LRKCVEVDINNADSNMTRKYRNCIAHLTVVRELKEYIGDIRTVDSYFSIYHYVMQRCITKREDDTKQ |
| | EEKIKYEDDLLKNHGYTKDFVKALNSPFGYNIPRFKNLSIEQLFDRNEYLTEK |
| OWDU01.1 | VEINTSNPTHRSGESSPVRGDMLGLKSELEKRFFGKTFDDNIHIQLIYNILDIEKILAVYVTNIVYALNN |
| SEQ ID NO: | MLGVKGSESHDDFIGYLSTNNTYDVFIDPDNSSLSDDKKANVRKSLSKFNVLLKTKRLGYFGLEEPK |
| 4944 | TKDNRVSEAYKKRVYHMLAIVGQIRQCVFHDKSGAKRFDLYSFINNIDPEYRDTLDYLVEERLKSIN |
| | KDFIQGNKVNISLLIDMMKGYEADDIIRLYYDFIVLKSQKNLGFSIKKLREKMLEEYGFRFKDKQYDS |
| | VRSKMYKLMDFLLFCNYYRNDIAAGEALVRKLRFSMTDDEKEGLYADEAAKLWGKFRNDFENIAD |
| | HMNGDVTKELGKADMDFDEKILDSEKKNASDLLYFSKMIYMLTYFLDGKEINDLLTTLISKFDNIKEF |
| | LKIMKSSAVNVECELTAGYKLFNDSQRITNELFIVKNIASMRKPAASAKLTMFRDALTILGIDDKITD |
| | DRISEILKLKEKGKGIHGLRNFITNNVIESSRFVYLIKYANAQKIREVAENEKVVMFVLGGIPDTQIER |
| | YYKSCVEFPDMNSSLEAKRSELARMIKNIRFDDFKNVKQQAKGRENVAKERAKAVIGLYLTVMYLL |
| | VKNLVNVNARYVIAIHCLERDFGLYKEIIPELASKNLKNDYRILSQTLCELCDDRDESPNLFLKKNKR |
| | LRKCVEVDINNADSNMTRKYRNCIAHLTVVRELKEYIGDIRTVDSYFSIYHYVMQRCITKREDDTKQ |
| | EEKIKYEDDLLKNHGYTKDFVKALNSPFGYNIPRFKNLSIEQLFDRNEYLTEK |
| OWTO01.1 | VEINTSNPTHRSGESSPVRGDMLGLKSELEKRFFGKTFDDNIHIQLIYNILDIEKILAVYVTNIVYALNN |
| SEQ ID NO: | MLGVKGSESHDDFIGYLSTNNTYDVFIDPDNSSLSDDKKANVRKSLSKFNVLLKTKRLGYFGLEEPK |
| 4945 | TKDNRVSEAYKKRVYHMLAIVGQIRQCVFHDKSGAKRFDLYSFINNIDPEYRDTLDYLVEERLKSIN |
| | KDFIQGNKVNISLLIDMMKGYEADDIIRLYYDFIVLKSQKNLGFSIKKLREKMLEEYGFRFKDKQYDS |
| | VRSKMYKLMDFLLFCNYYRNDIAAGEALVRKLRFSMTDDEKEGLYADEAAKLWGKFRNDFENIAD |
| | HMNGDVTKELGKADMDFDEKILDSEKKNASDLLYFSKMIYMLTYFLDGKEINDLLTTLISKFDNIKEF |
| | LKIMKSSAVNVECELTAGYKLFNDSQRITNELFIVKNIASMRKPAASAKLTMFRDALTILGIDDKITD |
| | DRISEILKLKEKGKGIHGLRNFITNNVIESSRFVYLIKYANAQKIREVAENEKVVMFVLGGIPDTQIER |
| | YYKSCVEFPDMNSSLEAKRSELARMIKNIRFDDFKNVKQQAKGRENVAKERAKAVIGLYLTVMYLL |
| | VKNLVNVNARYVIAIHCLERDFGLYKEIIPELASKNLKNDYRILSQTLCELCDDRDESPNLFLKKNKR |
| | LRKCVEVDINNADSNMTRKYRNCIAHLTVVRELKEYIGDIRTVDSYFSIYHYVMQRCITKREDDTKQ |
| | EEKIKYEDDLLKNHGYTKDFVKALNSPFGYNIPRFKNLSIEQLFDRNEYLTEK |
| UXSM01.1 | VEINTSNPTHRSGESSPVRGDMLGLKSELEKRFFGKTFDDNIHIQLIYNILDIEKILAVYVTNIVYALNN |
| SEQ ID NO: | MLGVKGSESHDDFIGYLSTNNTYDVFIDPDNSSLSDDKKANVRKSLSKFNVLLKTKRLGYFGLEEPK |
| 4946 | TKDNRVSEAYKKRVYHMLAIVGQIRQCVFHDKSGAKRFDLYSFINNIDPEYRDTLDYLVEERLKSIN |
| | KDFIQGNKVNISLLIDMMKGYEADDIIRLYYDFIVLKSQKNLGFSIKKLREKMLEEYGFRFKDKQYDS |
| | VRSKMYKLMDFLLFCNYYRNDIAAGEALVRKLRFSMTDDEKEGLYADEAAKLWGKFRNDFENIAD |
| | HMNGDVTKELGKADMDFDEKILDSEKKNASDLLYFSKMIYMLTYFLDGKEINDLLTTLISKFDNIKEF |
| | LKIMKSSAVNVECELTAGYKLFNDSQRITNELFIVKNIASMRKPAASAKLTMFRDALTILGIDDKITD |
| | DRISEILKLKEKGKGIHGLRNFITNNVIESSRFVYLIKYANAQKIREVAENEKWMFVLGGIPDTQIER |
| | YYKSCVEFPDMNSSLEAKRSELARMIKNIRFDDFKNVKQQAKGRENVAKERAKAVIGLYLTVMYLL |
| | VKNLVNVNARYVIAIHCLERDFGLYKEIIPELASKNLKNDYRILSQTLCELCDDRDESPNLFLKKNKR |
| | LRKCVEVDINNADSNMTRKYRNCIAHLTVVRELKEYIGDIRTVDSYFSIYHYVMQRCITKREDDTKQ |
| | EEKIKYEDDLLKNHGYTKDFVKALNSPFGYNIPRFKNLSIEQLFDRNEYLTEK |
| OFPS01.1 | VEINTSNPTHRSGESSPVRGDMLGLKSELEKRFFGKTFDDNIHIQLIYNILDIEKILAVYVTNIVYALNN |
| SEQ ID NO: | MLGVKGSESHDDFIGYLSTNNTYDVFIDPDNSSLSDDKKANVRKSLSKFNVLLKTKRLGYFGLEEPK |
| 4947 | TKDNRVSEAYKKRVYHMLAIVGQIRQCVFHDKSGAKRFDLYSFINNIDPEYRDTLDYLVEERLKSIN |
| | KDFIQGNKVNISLLIDMMKGYEADDIIRLYYDFIVLKSQKNLGFSIKKLREKMLEEYGFRFKDKQYDS |
| | VRSKMYKLMDFLLFCNYYRNDIAAGEALVRKLRFSMTDDEKEGLYADEAAKLWGKFRNDFENIAD |
| | HMNGDVTKELGKADMDFDEKILDSEKKNASDLLYFSKMIYMLTYFLDGKEINDLLTTLISKFDNIKEF |
| | LKIMKSSAVNVECELTAGYKLFNDSQRITNELFIVKNIASMRKPAASAKLTMFRDALTILGIDDKITD |
| | DRISEILKLKEKGKGIHGLRNFITNNVIESSRFVYLIKYANAQKIREVAENEKVVMFVLGGIPDTQIER |
| | YYKSCVEFPDMNSSLEAKRSELARMIKNIRFDDFKNVKQQAKGRENVAKERAKAVIGLYLTVMYLL |
| | VKNLVNVNARYVIAIHCLERDFGLYKEIIPELASKNLKNDYRILSQTLCELCDDRDESPNLFLKKNKR |
| | LRKCVEVDINNADSNMTRKYRNCIAHLTVVRELKEYIGDIRTVDSYFSIYHYVMQRCITKREDDTKQ |
| | EEKIKYEDDLLKNHGYTKDFVKALNSPFGYNIPRFKNLSIEQLFDRNEYLTEK |
| OWFE01.1 | VEINTSNPTHRSGESSPVRGDMLGLKSELEKRFFGKTFDDNIHIQLIYNILDIEKILAVYVTNIVYALNN |
| SEQ ID NO: | MLGVKGSESHDDFIGYLSTNNTYDVFIDPDNSSLSDDKKANVRKSLSKFNVLLKTKRLGYFGLEEPK |
| 4948 | TKDNRVSEAYKKRVYHMLAIVGQIRQCVFHDKSGAKRFDLYSFINNIDPEYRDTLDYLVEERLKSIN |
| | KDFIQGNKVNISLLIDMMKGYEADDIIRLYYDFIVLKSQKNLGFSIKKLREKMLEEYGFRFKDKQYDS |
| | VRSKMYKLMDFLLFCNYYRNDIAAGEALVRKLRFSMTDDEKEGLYADEAAKLWGKFRNDFENIAD |
| | HMNGDVTKELGKADMDFDEKILDSEKKNASDLLYFSKMIYMLTYFLDGKEINDLLTTLISKFDNIKEF |
| | LKIMKSSAVNVECELTAGYKLFNDSQRITNELFIVKNIASMRKPAASAKLTMFRDALTILGIDDKITD |
| | DRISEILKLKEKGKGIHGLRNFITNNVIESSRFVYLIKYANAQKIREVAENEKVVMFVLGGIPDTQIER |
| | YYKSCVEFPDMNSSLEAKRSELARMIKNIRFDDFKNVKQQAKGRENVAKERAKAVIGLYLTVMYLL |
| | VKNLVNVNARYVIAIHCLERDFGLYKEIIPELASKNLKNDYRILSQTLCELCDDRDESPNLFLKKNKR |
| | LRKCVEVDINNADSNMTRKYRNCIAHLTVVRELKEYIGDIRTVDSYFSIYHYVMQRCITKREDDTKQ |
| | EEKIKYEDDLLKNHGYTKDFVKALNSPFGYNIPRFKNLSIEQLFDRNEYLTEK |
| ULVY01.1 | VEINTSNPTHRSGESSPVRGDMLGLKSELEKRFFGKTFDDNIHIQLIYNILDIEKILAVYVTNIVYALNN |
| SEQ ID NO: | MLGVKGSESHDDFIGYLSTNNTYDVFIDPDNSSLSDDKKANVRKSLSKFNVLLKTKRLGYFGLEEPK |
| 4949 | TKDNRVSEAYKKRVYHMLAIVGQIRQCVFHDKSGAKRFDLYSFINNIDPEYRDTLDYLVEERLKSIN |
| | KDFIQGNKVNISLLIDMMKGYEADDIIRLYYDFIVLKSQKNLGFSIKKLREKMLEEYGFRFKDKQYDS |
| | VRSKMYKLMDFLLFCNYYRNDIAAGEALVRKLRFSMTDDEKEGLYADEAAKLWGKFRNDFENIAD |
| | HMNGDVTKELGKADMDFDEKILDSEKKNASDLLYFSKMIYMLTYFLDGKEINDLLTTLISKFDNIKEF |
| | LKIMKSSAVNVECELTAGYKLFNDSQRITNELFIVKNIASMRKPAASAKLTMFRDALTILGIDDKITD |
| | DRISEILKLKEKGKGIHGLRNFITNNVIESSRFVYLIKYANAQKIREVAENEKVVMFVLGGIPDTQIER |
| | YYKSCVEFPDMNSSLEAKRSELARMIKNIRFDDFKNVKQQAKGRENVAKERAKAVIGLYLTVMYLL |
| | VKNLVNVNARYVIAIHCLERDFGLYKEIIPELASKNLKNDYRILSQTLCELCDDRDESPNLFLKKNKR |
| | LRKCVEVDINNADSNMTRKYRNCIAHLTVVRELKEYIGDIRTVDSYFSIYHYVMQRCITKREDDTKQ |
| | EEKIKYEDDLLKNHGYTKDFVKALNSPFGYNIPRFKNLSIEQLFDRNEYLTEK |
| UZPU01.1 | VEINTSNPTHRSGESSPVRGDMLGLKSELEKRFFGKTFDDNIHIQLIYNILDIEKILAVYVTNIVYALNN |
| SEQ ID NO: | MLGVKGSESHDDFIGYLSTNNTYDVFIDPDNSSLSDDKKANVRKSLSKFNVLLKTKRLGYFGLEEPK |
| 4950 | TKDNRVSEAYKKRVYHMLAIVGQIRQCVFHDKSGAKRFDLYSFINNIDPEYRDTLDYLVEERLKSIN |
| | KDFIQGNKVNISLLIDMMKGYEADDIIRLYYDFIVLKSQKNLGFSIKKLREKMLEEYGFRFKDKQYDS |
| | VRSKMYKLMDFLLFCNYYRNDIAAGEALVRKLRFSMTDDEKEGLYADEAAKLWGKFRNDFENIAD |
| | HMNGDVTKELGKADMDFDEKILDSEKKNASDLLYFSKMIYMLTYFLDGKEINDLLTTLISKFDNIKEF |
| | LKIMKSSAVNVECELTAGYKLFNDSQRITNELFIVKNIASMRKPAASAKLTMFRDALTILGIDDKITD |
| | DRISEILKLKEKGKGIHGLRNFITNNVIESSRFVYLIKYANAQKIREVAENEKVVMFVLGGIPDTQIER |
| | YYKSCVEFPDMNSSLEAKRSELARMIKNIRFDDFKNVKQQAKGRENVAKERAKAVIGLYLTVMYLL |
| | VKNLVNVNARYVIAIHCLERDFGLYKEIIPELASKNLKNDYRILSQTLCELCDDRDESPNLFLKKNKR |
| | LRKCVEVDINNADSNMTRKYRNCIAHLTVVRELKEYIGDIRTVDSYFSIYHYVMQRCITKREDDTKQ |
| | EEKIKYEDDLLKNHGYTKDFVKALNSPFGYNIPRFKNLSIEQLFDRNEYLTEK |
| UZUM01.1 | VEINTSNPTHRSGESSPVRGDMLGLKSELEKRFFGKTFDDNIHIQLIYNILDIEKILAVYVTNIVYALNN |
| SEQ ID NO: | MLGVKGSESHDDFIGYLSTNNTYDVFIDPDNSSLSDDKKANVRKSLSKFNVLLKTKRLGYFGLEEPK |
| 4951 | TKDNRVSEAYKKRVYHMLAIVGQIRQCVFHDKSGAKRFDLYSFINNIDPEYRDTLDYLVEERLKSIN |
| | KDFIQGNKVNISLLIDMMKGYEADDIIRLYYDFIVLKSQKNLGFSIKKLREKMLEEYGFRFKDKQYDS |
| | VRSKMYKLMDFLLFCNYYRNDIAAGEALVRKLRFSMTDDEKEGLYADEAAKLWGKFRNDFENIAD |
| | HMNGDVTKELGKADMDFDEKILDSEKKNASDLLYFSKMIYMLTYFLDGKEINDLLTTLISKFDNIKEF |
| | LKIMKSSAVNVECELTAGYKLFNDSQRITNELFIVKNIASMRKPAASAKLTMFRDALTILGIDDKITD |
| | DRISEILKLKEKGKGIHGLRNFITNNVIESSRFVYLIKYANAQKIREVAENEKVVMFVLGGIPDTQIER |
| | YYKSCVEFPDMNSSLEAKRSELARMIKNIRFDDFKNVKQQAKGRENVAKERAKAVIGLYLTVMYLL |
| | VKNLVNVNARYVIAIHCLERDFGLYKEIIPELASKNLKNDYRILSQTLCELCDDRDESPNLFLKKNKR |
| | LRKCVEVDINNADSNMTRKYRNCIAHLTVVRELKEYIGDIRTVDSYFSIYHYVMQRCITKREDDTKQ |
| | EEKIKYEDDLLKNHGYTKDFVKALNSPFGYNIPRFKNLSIEQLFDRNEYLTEK |
| OVTQ01.1 | VEINTSNPTHRSGESSPVRGDMLGLKSELEKRFFGKTFDDNIHIQLIYNILDIEKILAVYVTNIVYALNN |
| SEQ ID NO: | MLGVKGSESHDDFIGYLSTNNTYDVFIDPDNSSLSDDKKANVRKSLSKFNVLLKTKRLGYFGLEEPK |
| 4952 | TKDNRVSEAYKKRVYHMLAIVGQIRQCVFHDKSGAKRFDLYSFINNIDPEYRDTLDYLVEERLKSIN |
| | KDFIQGNKVNISLLIDMMKGYEADDIIRLYYDFIVLKSQKNLGFSIKKLREKMLEEYGFRFKDKQYDS |
| | VRSKMYKLMDFLLFCNYYRNDIAAGEALVRKLRFSMTDDEKEGLYADEAAKLWGKFRNDFENIAD |
| | HMNGDVTKELGKADMDFDEKILDSEKKNASDLLYFSKMIYMLTYFLDGKEINDLLTTLISKFDNIKEF |
| | LKIMKSSAVNVECELTAGYKLFNDSQRITNELFIVKNIASMRKPAASAKLTMFRDALTILGIDDKITD |
| | DRISEILKLKEKGKGIHGLRNFITNNVTESSRFVYLIKYANAQKIREVAENEKWMFVLGGIPDTQIER |
| | YYKSCVEFPDMNSSLEAKRSELARMIKNIRFDDFKNVKQQAKGRENVAKERAKAVIGLYLTVMYLL |
| | VKNLVNVNARYVIAIHCLERDFGLYKEIIPELASKNLKNDYRILSQTLCELCDDRDESPNLFLKKNKR |
| | LRKCVEVDINNADSNMTRKYRNCIAHLTVVRELKEYIGDIRTVDSYFSIYHYVMQRCITKREDDTKQ |
| | EEKIKYEDDLLKNHGYTKDFVKALNSPFGYNIPRFKNLSIEQLFDRNEYLTEK |
| OWCH01.1 | VEINTSNPTHRSGESSPVRGDMLGLKSELEKRFFGKTFDDNIHIQLIYNILDIEKILAVYVTNIVYALNN |
| SEQ ID NO: | MLGVKGSESHDDFIGYLSTNNTYDVFIDPDNSSLSDDKKANVRKSLSKFNVLLKTKRLGYFGLEEPK |
| 4953 | TKDNRVSEAYKKRVYHMLAIVGQIRQCVFHDKSGAKRFDLYSFINNIDPEYRDTLDYLVEERLKSIN |
| | KDFIQGNKVNISLLIDMMKGYEADDIIRLYYDFIVLKSQKNLGFSIKKLREKMLEEYGFRFKDKQYDS |
| | VRSKMYKLMDFLLFCNYYRNDIAAGEALVRKLRFSMTDDEKEGLYADEAAKLWGKFRNDFENIAD |
| | HMNGDVTKELGKADMDFDEKILDSEKKNASDLLYFSKMIYMLTYFLDGKEINDLLTTLISKFDNIKEF |
| | LKIMKSSAVNVECELTAGYKLFNDSQRITNELFIVKNIASMRKPAASAKLTMFRDALTILGIDDKITD |
| | DRISEILKLKEKGKGIHGLRNFITNNVIESSRFVYLIKYANAQKIREVAENEKVVMFVLGGIPDTQIER |
| | YYKSCVEFPDMNSSLEAKRSELARMIKNIRFDDFKNVKQQAKGRENVAKERAKAVIGLYLTVMYLL |
| | VKNLVNVNARYVIAIHCLERDFGLYKEIIPELASKNLKNDYRILSQTLCELCDDRDESPNLFLKKNKR |
| | LRKCVEVDINNADSNMTRKYRNCIAHLTVVRELKEYIGDIRTVDSYFSIYHYVMQRCITKREDDTKQ |
| | EEKIKYEDDLLKNHGYTKDFVKALNSPFGYNIPRFKNLSIEQLFDRNEYLTEK |
| OOCX01.1 | VEINTSNPTHRSGESSPVRGDMLGLKSELEKRFFGKTFDDNIHIQLIYNILDIEKILAVYVTNIVYALNN |
| SEQ ID NO: | MLGVKGSESHDDFIGYLSTNNTYDVFIDPDNSSLSDDKKANVRKSLSKFNVLLKTKRLGYFGLEEPK |
| 4954 | TKDNRVSEAYKKRVYHMLAIVGQIRQCVFHDKSGAKRFDLYSFINNIDPEYRDTLDYLVEERLKSIN |
| | KDFIQGNKVNISLLIDMMKGYEADDIIRLYYDFIVLKSQKNLGFSIKKLREKMLEEYGFRFKDKQYDS |
| | VRSKMYKLMDFLLFCNYYRNDIAAGEALVRKLRFSMTDDEKEGLYADEAAKLWGKFRNDFENIAD |
| | HMNGDVTKELGKADMDFDEKILDSEKKNASDLLYFSKMIYMLTYFLDGKEINDLLTTLISKFDNIKEF |
| | LKIMKSSAVNVECELTAGYKLFNDSQRITNELFIVKNIASMRKPAASAKLTMFRDALTILGIDDKITD |
| | DRISEILKLKEKGKGIHGLRNFITNNVIESSRFVYLIKYANAQKIREVAENEKVVMFVLGGIPDTQIER |
| | YYKSCVEFPDMNSSLEAKRSELARMIKNIRFDDFKNVKQQAKGRENVAKERAKAVIGLYLTVMYLL |
| | VKNLVNVNARYVIAIHCLERDFGLYKEIIPELASKNLKNDYRILSQTLCELCDDRDESPNLFLKKNKR |
| | LRKCVEVDINNADSNMTRKYRNCIAHLTVVRELKEYIGDIRTVDSYFSIYHYVMQRCITKREDDTKQ |
| | EEKIKYEDDLLKNHGYTKDFVKALNSPFGYNIPRFKNLSIEQLFDRNEYLTEK |
| OGFJ01.1 | VEINTSNPTHRSGESSPVRGDMLGLKSELEKRFFGKTFDDNIHIQLIYNILDIEKILAVYVTNIVYALNN |
| SEQ ID NO: | MLGVKGSESHDDFIGYLSTNNTYDVFIDPDNSSLSDDKKANVRKSLSKFNVLLKTKRLGYFGLEEPK |
| 4955 | TKDNRVSEAYKKRVYHMLAIVGQIRQCVFHDKSGAKRFDLYSFINNIDPEYRDTLDYLVEERLKSIN |
| | KDFIQGNKVNISLLIDMMKGYEADDIIRLYYDFIVLKSQKNLGFSIKKLREKMLEEYGFRFKDKQYDS |
| | VRSKMYKLMDFLLFCNYYRNDIAAGEALVRKLRFSMTDDEKEGLYADEAAKLWGKFRNDFENIAD |
| | HMNGDVTKELGKADMDFDEKILDSEKKNASDLLYFSKMIYMLTYFLDGKEINDLLTTLISKFDNIKEF |
| | LKIMKSSAVNVECELTAGYKLFNDSQRITNELFIVKNIASMRKPAASAKLTMFRDALTILGIDDKITD |
| | DRISEILKLKEKGKGIHGLRNFITNNVIESSRFVYLIKYANAQKIREVAENEKVVMFVLGGIPDTQIER |
| | YYKSCVEFPDMNSSLEAKRSELARMIKNIRFDDFKNVKQQAKGRENVAKERAKAVIGLYLTVMYLL |
| | VKNLVNVNARYVIAIHCLERDFGLYKEIIPELASKNLKNDYRILSQTLCELCDDRDESPNLFLKKNKR |
| | LRKCVEVDINNADSNMTRKYRNCIAHLTVVRELKEYIGDIRTVDSYFSIYHYVMQRCITKREDDTKQ |
| | EEKIKYEDDLLKNHGYTKDFVKALNSPFGYNIPRFKNLSIEQLFDRNEYLTEK |
| USWB01.1 | VEINTSNPTHRSGESSPVRGDMLGLKSELEKRFFGKTFDDNIHIQLIYNILDIEKILAVYVTNIVYALNN |
| SEQ ID NO: | MLGVKGSESHDDFIGYLSTNNTYDVFIDPDNSSLSDDKKANVRKSLSKFNVLLKTKRLGYFGLEEPK |
| 4956 | TKDNRVSEAYKKRVYHMLAIVGQIRQCVFHDKSGAKRFDLYSFINNIDPEYRDTLDYLVEERLKSIN |
| | KDFIQGNKVNISLLIDMMKGYEADDIIRLYYDFIVLKSQKNLGFSIKKLREKMLEEYGFRFKDKQYDS |
| | VRSKMYKLMDFLLFCNYYRNDIAAGEALVRKLRFSMTDDEKEGLYADEAAKLWGKFRNDFENIAD |
| | HMNGDVTKELGKADMDFDEKILDSEKKNASDLLYFSKMIYMLTYFLDGKEINDLLTTLISKFDNIKEF |
| | LKIMKSSAVNVECELTAGYKLFNDSQRITNELFIVKNIASMRKPAASAKLTMFRDALTILGIDDKITD |
| | DRISEILKLKEKGKGIHGLRNFITNNVIESSRFVYLIKYANAQKIREVAENEKVVMFVLGGIPDTQIER |
| | YYKSCVEFPDMNSSLEAKRSELARMIKNIRFDDFKNVKQQAKGRENVAKERAKAVIGLYLTVMYLL |
| | VKNLVNVNARYVIAIHCLERDFGLYKEIIPELASKNLKNDYRILSQTLCELCDDRDESPNLFLKKNKR |
| | LRKCVEVDINNADSNMTRKYRNCIAHLTVVRELKEYIGDIRTVDSYFSIYHYVMQRCITKREDDTKQ |
| | EEKIKYEDDLLKNHGYTKDFVKALNSPFGYNIPRFKNLSIEQLFDRNEYLTEK |
| GCA_ | VEINTSNPTHRSGESSPVRGDMLGLKSELEKRFFGKTFDDNIHIQLIYNILDIEKILAVYVTNIVYALNN |
| 003462525.1_ | MLGVKGSESHDDFIGYLSTNNTYDVFIDPDNSSLSDDKKANVRKSLSKFNVLLKTKRLGYFGLEEPK |
| ASM346252v1_ | TKDNRVSEAYKKRVYHMLAIVGQIRQCVFHDKSGAKRFDLYSFINNIDPEYRDTLDYLVEERLKSIN |
| genomic | KDFIQGNKVNISLLIDMMKGYEADDIIRLYYDFIVLKSQKNLGFSIKKLREKMLEEYGFRFKDKQYDS |
| SEQ ID NO: | VRSKMYKLMDFLLFCNYYRNDIAAGEALVRKLRFSMTDDEKEGLYADEAAKLWGKFRNDFENIAD |
| 4957 | HMNGDVTKELGKADMDFDEKILDSEKKNASDLLYFSKMIYMLTYFLDGKEINDLLTTLISKFDNIKEF |
| | LKIMKSSAVNVECELTAGYKLFNDSQRITNELFIVKNIASMRKPAASAKLTMFRDALTILGIDDKITD |
| | DRISEILKLKEKGKGIHGLRNFITNNVIESSRFVYLIKYANAQKIREVAENEKWMFVLGGIPDTQIER |
| | YYKSCVEFPDMNSSLEAKRSELARMIKNIRFDDFKNVKQQAKGRENVAKERAKAVIGLYLTVMYLL |
| | VKNLVNVNARYVIAIHCLERDFGLYKEIIPELASKNLKNDYRILSQTLCELCDDRDESPNLFLKKNKR |
| | LRKCVEVDINNADSNMTRKYRNCIAHLTVVRELKEYIGDIRTVDSYFSIYHYVMQRCITKREDDTKQ |
| | EEKIKYEDDLLKNHGYTKDFVKALNSPFGYNIPRFKNLSIEQLFDRNEYLTEK |
| OZGW01.1 | VEINTSNPTHRSGESSPVRGDMLGLKSELEKRFFGKTFDDNIHIQLIYNILDIEKILAVYVTNIVYALNN |
| SEQ ID NO: | MLGVKGSESHDDFIGYLSTNNTYDVFIDPDNSSLSDDKKANVRKSLSKFNVLLKTKRLGYFGLEEPK |
| 4958 | TKDNRVSEAYKKRVYHMLAIVGQIRQCVFHDKSGAKRFDLYSFINNIDPEYRDTLDYLVEERLKSIN |
| | KDFIQGNKVNISLLIDMMKGYEADDIIRLYYDFIVLKSQKNLGFSIKKLREKMLEEYGFRFKDKQYDS |
| | VRSKMYKLMDFLLFCNYYRNDIAAGEALVRKLRFSMTDDEKEGLYADEAAKLWGKFRNDFENIAD |
| | HMNGDVTKELGKADMDFDEKILDSEKKNASDLLYFSKMIYMLTYFLDGKEINDLLTTLISKFDNIKEF |
| | LKIMKSSAVNVECELTAGYKLFNDSQRITNELFIVKNIASMRKPAASAKLTMFRDALTILGIDDKITD |
| | DRISEILKLKEKGKGIHGLRNFITNNVTESSRFVYLIKYANAQKIREVAENEKWMFVLGGIPDTQIER |
| | YYKSCVEFPDMNSSLEAKRSELARMIKNIRFDDFKNVKQQAKGRENVAKERAKAVIGLYLTVMYLL |
| | VKNLVNVNARYVIAIHCLERDFGLYKEIIPELASKNLKNDYRILSQTLCELCDDRDESPNLFLKKNKR |
| | LRKCVEVDINNADSNMTRKYRNCIAHLTVVRELKEYIGDIRTVDSYFSIYHYVMQRCITKREDDTKQ |
| | EEKIKYEDDLLKNHGYTKDFVKALNSPFGYNIPRFKNLSIEQLFDRNEYLTEK |
| OZHL01.1 | VEINTSNPTHRSGESSPVRGDMLGLKSELEKRFFGKTFDDNIHIQLIYNILDIEKILAVYVTNIVYALNN |
| SEQ ID NO: | MLGVKGSESHDDFIGYLSTNNTYDVFIDPDNSSLSDDKKANVRKSLSKFNVLLKTKRLGYFGLEEPK |
| 4959 | TKDNRVSEAYKKRVYHMLAIVGQIRQCVFHDKSGAKRFDLYSFINNIDPEYRDTLDYLVEERLKSIN |
| | KDFIQGNKVNISLLIDMMKGYEADDIIRLYYDFIVLKSQKNLGFSIKKLREKMLEEYGFRFKDKQYDS |
| | VRSKMYKLMDFLLFCNYYRNDIAAGEALVRKLRFSMTDDEKEGLYADEAAKLWGKFRNDFENIAD |
| | HMNGDVTKELGKADMDFDEKILDSEKKNASDLLYFSKMIYMLTYFLDGKEINDLLTTLISKFDNIKEF |
| | LKIMKSSAVNVECELTAGYKLFNDSQRITNELFIVKNIASMRKPAASAKLTMFRDALTILGIDDKITD |
| | DRISEILKLKEKGKGIHGLRNFITNNVIESSRFVYLIKYANAQKIREVAENEKVVMFVLGGIPDTQIER |
| | YYKSCVEFPDMNSSLEAKRSELARMIKNIRFDDFKNVKQQAKGRENVAKERAKAVIGLYLTVMYLL |
| | VKNLVNVNARYVIAIHCLERDFGLYKEIIPELASKNLKNDYRILSQTLCELCDDRDESPNLFLKKNKR |
| | LRKCVEVDINNADSNMTRKYRNCIAHLTVVRELKEYIGDIRTVDSYFSIYHYVMQRCITKREDDTKQ |
| | EEKIKYEDDLLKNHGYTKDFVKALNSPFGYNIPRFKNLSIEQLFDRNEYLTEK |
| OYWH01.1 | VEINTSNPTHRSGESSPVRGDMLGLKSELEKRFFGKTFDDNIHIQLIYNILDIEKILAVYVTNIVYALNN |
| SEQ ID NO: | MLGVKGSESHDDFIGYLSTNNTYDVFIDPDNSSLSDDKKANVRKSLSKFNVLLKTKRLGYFGLEEPK |
| 4960 | TKDNRVSEAYKKRVYHMLAIVGQIRQCVFHDKSGAKRFDLYSFINNIDPEYRDTLDYLVEERLKSIN |
| | KDFIQGNKVNISLLIDMMKGYEADDIIRLYYDFIVLKSQKNLGFSIKKLREKMLEEYGFRFKDKQYDS |
| | VRSKMYKLMDFLLFCNYYRNDIAAGEALVRKLRFSMTDDEKEGLYADEAAKLWGKFRNDFENIAD |
| | HMNGDVTKELGKADMDFDEKILDSEKKNASDLLYFSKMIYMLTYFLDGKEINDLLTTLISKFDNIKEF |
| | LKIMKSSAVNVECELTAGYKLFNDSQRITNELFIVKNIASMRKPAASAKLTMFRDALTILGIDDKITD |
| | DRISEILKLKEKGKGIHGLRNFITNNVIESSRFVYLIKYANAQKIREVAENEKVVMFVLGGIPDTQIER |
| | YYKSCVEFPDMNSSLEAKRSELARMIKNIRFDDFKNVKQQAKGRENVAKERAKAVIGLYLTVMYLL |
| | VKNLVNVNARYVIAIHCLERDFGLYKEIIPELASKNLKNDYRILSQTLCELCDDRDESPNLFLKKNKR |
| | LRKCVEVDINNADSNMTRKYRNCIAHLTVVRELKEYIGDIRTVDSYFSIYHYVMQRCITKREDDTKQ |
| | EEKIKYEDDLLKNHGYTKDFVKALNSPFGYNIPRFKNLSIEQLFDRNEYLTEK |
| UAAZ01.1 | VEINTSNPTHRSGESSPVRGDMLGLKSELEKRFFGKTFDDNIHIQLIYNILDIEKILAVYVTNIVYALNN |
| SEQ ID NO: | MLGVKGSESHDDFIGYLSTNNTYDVFIDPDNSSLSDDKKANVRKSLSKFNVLLKTKRLGYFGLEEPK |
| 4961 | TKDNRVSEAYKKRVYHMLAIVGQIRQCVFHDKSGAKRFDLYSFINNIDPEYRDTLDYLVEERLKSIN |
| | KDFIQGNKVNISLLIDMMKGYEADDIIRLYYDFIVLKSQKNLGFSIKKLREKMLEEYGFRFKDKQYDS |
| | VRSKMYKLMDFLLFCNYYRNDIAAGEALVRKLRFSMTDDEKEGLYADEAAKLWGKFRNDFENIAD |
| | HMNGDVTKELGKADMDFDEKILDSEKKNASDLLYFSKMIYMLTYFLDGKEINDLLTTLISKFDNIKEF |
| | LKIMKSSAVNVECELTAGYKLFNDSQRITNELFIVKNIASMRKPAASAKLTMFRDALTILGIDDKITD |
| | DRISEILKLKEKGKGIHGLRNFITNNVIESSRFVYLIKYANAQKIREVAENEKVVMFVLGGIPDTQIER |
| | YYKSCVEFPDMNSSLEAKRSELARMIKNIRFDDFKNVKQQAKGRENVAKERAKAVIGLYLTVMYLL |
| | VKNLVNVNARYVIAIHCLERDFGLYKEIIPELASKNLKNDYRILSQTLCELCDDRDESPNLFLKKNKR |
| | LRKCVEVDINNADSNMTRKYRNCIAHLTVVRELKEYIGDIRTVDSYFSIYHYVMQRCITKREDDTKQ |
| | EEKIKYEDDLLKNHGYTKDFVKALNSPFGYNIPRFKNLSIEQLFDRNEYLTEK |
| OVGV01.1 | VEINTSNPTHRSGESSPVRGDMLGLKSELEKRFFGKTFDDNIHIQLIYNILDIEKILAVYVTNIVYALNN |
| SEQ ID NO: | MLGVKGSESHDDFIGYLSTNNTYDVFIDPDNSSLSDDKKANVRKSLSKFNVLLKTKRLGYFGLEEPK |
| 4962 | TKDNRVSEAYKKRVYHMLAIVGQIRQCVFHDKSGAKRFDLYSFINNIDPEYRDTLDYLVEERLKSIN |
| | KDFIQGNKVNISLLIDMMKGYEADDIIRLYYDFIVLKSQKNLGFSIKKLREKMLEEYGFRFKDKQYDS |
| | VRSKMYKLMDFLLFCNYYRNDIAAGEALVRKLRFSMTDDEKEGLYADEAAKLWGKFRNDFENIAD |
| | HMNGDVTKELGKADMDFDEKILDSEKKNASDLLYFSKMIYMLTYFLDGKEINDLLTTLISKFDNIKEF |
| | LKIMKSSAVNVECELTAGYKLFNDSQRITNELFIVKNIASMRKPAASAKLTMFRDALTILGIDDKITD |
| | DRISEILKLKEKGKGIHGLRNFITNNVIESSRFVYLIKYANAQKIREVAENEKVVMFVLGGIPDTQIER |
| | YYKSCVEFPDMNSSLEAKRSELARMIKNIRFDDFKNVKQQAKGRENVAKERAKAVIGLYLTVMYLL |
| | VKNLVNVNARYVIAIHCLERDFGLYKEIIPELASKNLKNDYRILSQTLCELCDDRDESPNLFLKKNKR |
| | LRKCVEVDINNADSNMTRKYRNCIAHLTVVRELKEYIGDIRTVDSYFSIYHYVMQRCITKREDDTKQ |
| | EEKIKYEDDLLKNHGYTKDFVKALNSPFGYNIPRFKNLSIEQLFDRNEYLTEK |
| OWSJ01.1 | VEINTSNPTHRSGESSPVRGDMLGLKSELEKRFFGKTFDDNIHIQLIYNILDIEKILAVYVTNIVYALNN |
| SEQ ID NO: | MLGVKGSESHDDFIGYLSTNNTYDVFIDPDNSSLSDDKKANVRKSLSKFNVLLKTKRLGYFGLEEPK |
| 4963 | TKDNRVSEAYKKRVYHMLAIVGQIRQCVFHDKSGAKRFDLYSFINNIDPEYRDTLDYLVEERLKSIN |
| | KDFIQGNKVNISLLIDMMKGYEADDIIRLYYDFIVLKSQKNLGFSIKKLREKMLEEYGFRFKDKQYDS |
| | VRSKMYKLMDFLLFCNYYRNDIAAGEALVRKLRFSMTDDEKEGLYADEAAKLWGKFRNDFENIAD |
| | HMNGDVTKELGKADMDFDEKILDSEKKNASDLLYFSKMIYMLTYFLDGKEINDLLTTLISKFDNIKEF |
| | LKIMKSSAVNVECELTAGYKLFNDSQRITNELFIVKNIASMRKPAASAKLTMFRDALTILGIDDKITD |
| | DRISEILKLKEKGKGIHGLRNFITNNVIESSRFVYLIKYANAQKIREVAENEKWMFVLGGIPDTQIER |
| | YYKSCVEFPDMNSSLEAKRSELARMIKNIRFDDFKNVKQQAKGRENVAKERAKAVIGLYLTVMYLL |
| | VKNLVNVNARYVIAIHCLERDFGLYKEIIPELASKNLKNDYRILSQTLCELCDDRDESPNLFLKKNKR |
| | LRKCVEVDINNADSNMTRKYRNCIAHLTVVRELKEYIGDIRTVDSYFSIYHYVMQRCITKREDDTKQ |
| | EEKIKYEDDLLKNHGYTKDFVKALNSPFGYNIPRFKNLSIEQLFDRNEYLTEK |
| OWGA01.1 | VEINTSNPTHRSGESSPVRGDMLGLKSELEKRFFGKTFDDNIHIQLIYNILDIEKILAVYVTNIVYALNN |
| SEQ ID NO: | MLGVKGSESHDDFIGYLSTNNTYDVFIDPDNSSLSDDKKANVRKSLSKFNVLLKTKRLGYFGLEEPK |
| 4964 | TKDNRVSEAYKKRVYHMLAIVGQIRQCVFHDKSGAKRFDLYSFINNIDPEYRDTLDYLVEERLKSIN |
| | KDFIQGNKVNISLLIDMMKGYEADDIIRLYYDFIVLKSQKNLGFSIKKLREKMLEEYGFRFKDKQYDS |
| | VRSKMYKLMDFLLFCNYYRNDIAAGEALVRKLRFSMTDDEKEGLYADEAAKLWGKFRNDFENIAD |
| | HMNGDVTKELGKADMDFDEKILDSEKKNASDLLYFSKMIYMLTYFLDGKEINDLLTTLISKFDNIKEF |
| | LKIMKSSAVNVECELTAGYKLFNDSQRITNELFIVKNIASMRKPAASAKLTMFRDALTILGIDDKITD |
| | DRISEILKLKEKGKGIHGLRNFITNNVIESSRFVYLIKYANAQKIREVAENEKVVMFVLGGIPDTQIER |
| | YYKSCVEFPDMNSSLEAKRSELARMIKNIRFDDFKNVKQQAKGRENVAKERAKAVIGLYLTVMYLL |
| | VKNLVNVNARYVIAIHCLERDFGLYKEIIPELASKNLKNDYRILSQTLCELCDDRDESPNLFLKKNKR |
| | LRKCVEVDINNADSNMTRKYRNCIAHLTVVRELKEYIGDIRTVDSYFSIYHYVMQRCITKREDDTKQ |
| | EEKIKYEDDLLKNHGYTKDFVKALNSPFGYNIPRFKNLSIEQLFDRNEYLTEK |
| OVXU01.1 | VEINTSNPTHRSGESSPVRGDMLGLKSELEKRFFGKTFDDNIHIQLIYNILDIEKILAVYVTNIVYALNN |
| SEQ ID NO: | MLGVKGSESHDDFIGYLSTNNTYDVFIDPDNSSLSDDKKANVRKSLSKFNVLLKTKRLGYFGLEEPK |
| 4965 | TKDNRVSEAYKKRVYHMLAIVGQIRQCVFHDKSGAKRFDLYSFINNIDPEYRDTLDYLVEERLKSIN |
| | KDFIQGNKVNISLLIDMMKGYEADDIIRLYYDFIVLKSQKNLGFSIKKLREKMLEEYGFRFKDKQYDS |
| | VRSKMYKLMDFLLFCNYYRNDIAAGEALVRKLRFSMTDDEKEGLYADEAAKLWGKFRNDFENIAD |
| | HMNGDVTKELGKADMDFDEKILDSEKKNASDLLYFSKMIYMLTYFLDGKEINDLLTTLISKFDNIKEF |
| | LKIMKSSAVNVECELTAGYKLFNDSQRITNELFIVKNIASMRKPAASAKLTMFRDALTILGIDDKITD |
| | DRISEILKLKEKGKGIHGLRNFITNNVIESSRFVYLIKYANAQKIREVAENEKVVMFVLGGIPDTQIER |
| | YYKSCVEFPDMNSSLEAKRSELARMIKNIRFDDFKNVKQQAKGRENVAKERAKAVIGLYLTVMYLL |
| | VKNLVNVNARYVIAIHCLERDFGLYKEIIPELASKNLKNDYRILSQTLCELCDDRDESPNLFLKKNKR |
| | LRKCVEVDINNADSNMTRKYRNCIAHLTVVRELKEYIGDIRTVDSYFSIYHYVMQRCITKREDDTKQ |
| | EEKIKYEDDLLKNHGYTKDFVKALNSPFGYNIPRFKNLSIEQLFDRNEYLTEK |
| OYFN01.1 | VEINTSNPTHRSGESSPVRGDMLGLKSELEKRFFGKTFDDNIHIQLIYNILDIEKILAVYVTNIVYALNN |
| SEQ ID NO: | MLGVKGSESHDDFIGYLSTNNTYDVFIDPDNSSLSDDKKANVRKSLSKFNVLLKTKRLGYFGLEEPK |
| 4966 | TKDNRVSEAYKKRVYHMLAIVGQIRQCVFHDKSGAKRFDLYSFINNIDPEYRDTLDYLVEERLKSIN |
| | KDFIQGNKVNISLLIDMMKGYEADDIIRLYYDFIVLKSQKNLGFSIKKLREKMLEEYGFRFKDKQYDS |
| | VRSKMYKLMDFLLFCNYYRNDIAAGEALVRKLRFSMTDDEKEGLYADEAAKLWGKFRNDFENIAD |
| | HMNGDVTKELGKADMDFDEKILDSEKKNASDLLYFSKMIYMLTYFLDGKEINDLLTTLISKFDNIKEF |
| | LKIMKSSAVNVECELTAGYKLFNDSQRITNELFIVKNIASMRKPAASAKLTMFRDALTILGIDDKITD |
| | DRISEILKLKEKGKGIHGLRNFITNNVIESSRFVYLIKYANAQKIREVAENEKVVMFVLGGIPDTQIER |
| | YYKSCVEFPDMNSSLEAKRSELARMIKNIRFDDFKNVKQQAKGRENVAKERAKAVIGLYLTVMYLL |
| | VKNLVNVNARYVIAIHCLERDFGLYKEIIPELASKNLKNDYRILSQTLCELCDDRDESPNLFLKKNKR |
| | LRKCVEVDINNADSNMTRKYRNCIAHLTVVRELKEYIGDIRTVDSYFSIYHYVMQRCITKREDDTKQ |
| | EEKIKYEDDLLKNHGYTKDFVKALNSPFGYNIPRFKNLSIEQLFDRNEYLTEK |
| UPPI01.1 | VEINTSNPTHRSGESSPVRGDMLGLKSELEKRFFGKTFDDNIHIQLIYNILDIEKILAVYVTNIVYALNN |
| SEQ ID NO: | MLGVKGSESHDDFIGYLSTNNTYDVFIDPDNSSLSDDKKANVRKSLSKFNVLLKTKRLGYFGLEEPK |
| 4967 | TKDNRVSEAYKKRVYHMLAIVGQIRQCVFHDKSGAKRFDLYSFINNIDPEYRDTLDYLVEERLKSIN |
| | KDFIQGNKVNISLLIDMMKGYEADDIIRLYYDFIVLKSQKNLGFSIKKLREKMLEEYGFRFKDKQYDS |
| | VRSKMYKLMDFLLFCNYYRNDIAAGEALVRKLRFSMTDDEKEGLYADEAAKLWGKFRNDFENIAD |
| | HMNGDVTKELGKADMDFDEKILDSEKKNASDLLYFSKMIYMLTYFLDGKEINDLLTTLISKFDNIKEF |
| | LKIMKSSAVNVECELTAGYKLFNDSQRITNELFIVKNIASMRKPAASAKLTMFRDALTILGIDDKITD |
| | DRISEILKLKEKGKGIHGLRNFITNNVIESSRFVYLIKYANAQKIREVAENEKVVMFVLGGIPDTQIER |
| | YYKSCVEFPDMNSSLEAKRSELARMIKNIRFDDFKNVKQQAKGRENVAKERAKAVIGLYLTVMYLL |
| | VKNLVNVNARYVIAIHCLERDFGLYKEIIPELASKNLKNDYRILSQTLCELCDDRDESPNLFLKKNKR |
| | LRKCVEVDINNADSNMTRKYRNCIAHLTVVRELKEYIGDIRTVDSYFSIYHYVMQRCITKREDDTKQ |
| | EEKIKYEDDLLKNHGYTKDFVKALNSPFGYNIPRFKNLSIEQLFDRNEYLTEK |
| ODUP01.1 | VEINTSNPTHRSGESSPVRGDMLGLKSELEKRFFGKTFDDNIHIQLIYNILDIEKILAVYVTNIVYALNN |
| SEQ ID NO: | MLGVKGSESHDDFIGYLSTNNTYDVFIDPDNSSLSDDKKANVRKSLSKFNVLLKTKRLGYFGLEEPK |
| 4968 | TKDNRVSEAYKKRVYHMLAIVGQIRQCVFHDKSGAKRFDLYSFINNIDPEYRDTLDYLVEERLKSIN |
| | KDFIQGNKVNISLLIDMMKGYEADDIIRLYYDFIVLKSQKNLGFSIKKLREKMLEEYGFRFKDKQYDS |
| | VRSKMYKLMDFLLFCNYYRNDIAAGEALVRKLRFSMTDDEKEGLYADEAAKLWGKFRNDFENIAD |
| | HMNGDVTKELGKADMDFDEKILDSEKKNASDLLYFSKMIYMLTYFLDGKEINDLLTTLISKFDNIKEF |
| | LKIMKSSAVNVECELTAGYKLFNDSQRITNELFIVKNIASMRKPAASAKLTMFRDALTILGIDDKITD |
| | DRISEILKLKEKGKGIHGLRNFITNNVIESSRFVYLIKYANAQKIREVAENEKVVMFVLGGIPDTQIER |
| | YYKSCVEFPDMNSSLEAKRSELARMIKNIRFDDFKNVKQQAKGRENVAKERAKAVIGLYLTVMYLL |
| | VKNLVNVNARYVIAIHCLERDFGLYKEIIPELASKNLKNDYRILSQTLCELCDDRDESPNLFLKKNKR |
| | LRKCVEVDINNADSNMTRKYRNCIAHLTVVRELKEYIGDIRTVDSYFSIYHYVMQRCITKREDDTKQ |
| | EEKIKYEDDLLKNHGYTKDFVKALNSPFGYNIPRFKNLSIEQLFDRNEYLTEK |
| ODLK01.1 | VEINTSNPTHRSGESSPVRGDMLGLKSELEKRFFGKTFDDNIHIQLIYNILDIEKILAVYVTNIVYALNN |
| SEQ ID NO: | MLGVKGSESHDDFIGYLSTNNTYDVFIDPDNSSLSDDKKANVRKSLSKFNVLLKTKRLGYFGLEEPK |
| 4969 | TKDNRVSEAYKKRVYHMLAIVGQIRQCVFHDKSGAKRFDLYSFINNIDPEYRDTLDYLVEERLKSIN |
| | KDFIQGNKVNISLLIDMMKGYEADDIIRLYYDFIVLKSQKNLGFSIKKLREKMLEEYGFRFKDKQYDS |
| | VRSKMYKLMDFLLFCNYYRNDIAAGEALVRKLRFSMTDDEKEGLYADEAAKLWGKFRNDFENIAD |
| | HMNGDVTKELGKADMDFDEKILDSEKKNASDLLYFSKMIYMLTYFLDGKEINDLLTTLISKFDNIKEF |
| | LKIMKSSAVNVECELTAGYKLFNDSQRITNELFIVKNIASMRKPAASAKLTMFRDALTILGIDDKITD |
| | DRISEILKLKEKGKGIHGLRNFITNNVIESSRFVYLIKYANAQKIREVAENEKWMFVLGGIPDTQIER |
| | YYKSCVEFPDMNSSLEAKRSELARMIKNIRFDDFKNVKQQAKGRENVAKERAKAVIGLYLTVMYLL |
| | VKNLVNVNARYVIAIHCLERDFGLYKEIIPELASKNLKNDYRILSQTLCELCDDRDESPNLFLKKNKR |
| | LRKCVEVDINNADSNMTRKYRNCIAHLTVVRELKEYIGDIRTVDSYFSIYHYVMQRCITKREDDTKQ |
| | EEKIKYEDDLLKNHGYTKDFVKALNSPFGYNIPRFKNLSIEQLFDRNEYLTEK |
| OOBP01.1 | VEINTSNPTHRSGESSPVRGDMLGLKSELEKRFFGKTFDDNIHIQLIYNILDIEKILAVYVTNIVYALNN |
| SEQ ID NO: | MLGVKGSESHDDFIGYLSTNNTYDVFIDPDNSSLSDDKKANVRKSLSKFNVLLKTKRLGYFGLEEPK |
| 4970 | TKDNRVSEAYKKRVYHMLAIVGQIRQCVFHDKSGAKRFDLYSFINNIDPEYRDTLDYLVEERLKSIN |
| | KDFIQGNKVNISLLIDMMKGYEADDIIRLYYDFIVLKSQKNLGFSIKKLREKMLEEYGFRFKDKQYDS |
| | VRSKMYKLMDFLLFCNYYRNDIAAGEALVRKLRFSMTDDEKEGLYADEAAKLWGKFRNDFENIAD |
| | HMNGDVTKELGKADMDFDEKILDSEKKNASDLLYFSKMIYMLTYFLDGKEINDLLTTLISKFDNIKEF |
| | LKIMKSSAVNVECELTAGYKLFNDSQRITNELFIVKNIASMRKPAASAKLTMFRDALTILGIDDKITD |
| | DRISEILKLKEKGKGIHGLRNFITNNVIESSRFVYLIKYANAQKIREVAENEKVVMFVLGGIPDTQIER |
| | YYKSCVEFPDMNSSLEAKRSELARMIKNIRFDDFKNVKQQAKGRENVAKERAKAVIGLYLTVMYLL |
| | VKNLVNVNARYVIAIHCLERDFGLYKEIIPELASKNLKNDYRILSQTLCELCDDRDESPNLFLKKNKR |
| | LRKCVEVDINNADSNMTRKYRNCIAHLTVVRELKEYIGDIRTVDSYFSIYHYVMQRCITKREDDTKQ |
| | EEKIKYEDDLLKNHGYTKDFVKALNSPFGYNIPRFKNLSIEQLFDRNEYLTEK |
| OZSD01.1 | VEINTSNPTHRSGESSPVRGDMLGLKSELEKRFFGKTFDDNIHIQLIYNILDIEKILAVYVTNIVYALNN |
| SEQ ID NO: | MLGVKGSESHDDFIGYLSTNNTYDVFIDPDNSSLSDDKKANVRKSLSKFNVLLKTKRLGYFGLEEPK |
| 4971 | TKDNRVSEAYKKRVYHMLAIVGQIRQCVFHDKSGAKRFDLYSFINNIDPEYRDTLDYLVEERLKSIN |
| | KDFIQGNKVNISLLIDMMKGYEADDIIRLYYDFIVLKSQKNLGFSIKKLREKMLEEYGFRFKDKQYDS |
| | VRSKMYKLMDFLLFCNYYRNDIAAGEALVRKLRFSMTDDEKEGLYADEAAKLWGKFRNDFENIAD |
| | HMNGDVTKELGKADMDFDEKILDSEKKNASDLLYFSKMIYMLTYFLDGKEINDLLTTLISKFDNIKEF |
| | LKIMKSSAVNVECELTAGYKLFNDSQRITNELFIVKNIASMRKPAASAKLTMFRDALTILGIDDKITD |
| | DRISEILKLKEKGKGIHGLRNFITNNVIESSRFVYLIKYANAQKIREVAENEKVVMFVLGGIPDTQIER |
| | YYKSCVEFPDMNSSLEAKRSELARMIKNIRFDDFKNVKQQAKGRENVAKERAKAVIGLYLTVMYLL |
| | VKNLVNVNARYVIAIHCLERDFGLYKEIIPELASKNLKNDYRILSQTLCELCDDRDESPNLFLKKNKR |
| | LRKCVEVDINNADSNMTRKYRNCIAHLTVVRELKEYIGDIRTVDSYFSIYHYVMQRCITKREDDTKQ |
| | EEKIKYEDDLLKNHGYTKDFVKALNSPFGYNIPRFKNLSIEQLFDRNEYLTEK |
| IMG_ | VEINTSNPTHRSGESSPVRGDMLGLKSELEKRFFGKTFDDNIHIQLIYNILDIEKILAVYVTNIVYALNN |
| 3300009343 | MLGVKGSESHDDFIGYLSTNNTYDVFIDPDNSSLSDDKKANVRKSLSKFNVLLKTKRLGYFGLEEPK |
| SEQ ID NO: | TKDNRVSEAYKKRVYHMLAIVGQIRQCVFHDKSGAKRFDLYSFINNIDPEYRDTLDYLVEERLKSIN |
| 4972 | KDFIQGNKVNISLLIDMMKGYEADDIIRLYYDFIVLKSQKNLGFSIKKLREKMLEEYGFRFKDKQYDS |
| | VRSKMYKLMDFLLFCNYYRNDIAAGEALVRKLRFSMTDDEKEGLYADEAAKLWGKFRNDFENIAD |
| | HMNGDVTKELGKADMDFDEKILDSEKKNASDLLYFSKMIYMLTYFLDGKEINDLLTTLISKFDNIKEF |
| | LKIMKSSAVNVECELTAGYKLFNDSQRITNELFIVKNIASMRKPAASAKLTMFRDALTILGIDDKITD |
| | DRISEILKLKEKGKGIHGLRNFITNNVIESSRFVYLIKYANAQKIREVAENEKVVMFVLGGIPDTQIER |
| | YYKSCVEFPDMNSSLEAKRSELARMIKNIRFDDFKNVKQQAKGRENVAKERAKAVIGLYLTVMYLL |
| | VKNLVNVNARYVIAIHCLERDFGLYKEIIPELASKNLKNDYRILSQTLCELCDDRDESPNLFLKKNKR |
| | LRKCVEVDINNADSNMTRKYRNCIAHLTVVRELKEYIGDIRTVDSYFSIYHYVMQRCITKREDDTKQ |
| | EEKIKYEDDLLKNHGYTKDFVKALNSPFGYNIPRFKNLSIEQLFDRNEYLTEK |
| IMG_ | VEINTSNPTHRSGESSPVRGDMLGLKSELEKRFFGKTFDDNIHIQLIYNILDIEKILAVYVTNIVYALNN |
| 3300014803 | MLGVKGSESHDDFIGYLSTNNTYDVFIDPDNSSLSDDKKANVRKSLSKFNVLLKTKRLGYFGLEEPK |
| SEQ ID NO: | TKDNRVSEAYKKRVYHMLAIVGQIRQCVFHDKSGAKRFDLYSFINNIDPEYRDTLDYLVEERLKSIN |
| 4973 | KDFIQGNKVNISLLIDMMKGYEADDIIRLYYDFIVLKSQKNLGFSIKKLREKMLEEYGFRFKDKQYDS |
| | VRSKMYKLMDFLLFCNYYRNDIAAGEALVRKLRFSMTDDEKEGLYADEAAKLWGKFRNDFENIAD |
| | HMNGDVTKELGKADMDFDEKILDSEKKNASDLLYFSKMIYMLTYFLDGKEINDLLTTLISKFDNIKEF |
| | LKIMKSSAVNVECELTAGYKLFNDSQRITNELFIVKNIASMRKPAASAKLTMFRDALTILGIDDKITD |
| | DRISEILKLKEKGKGIHGLRNFITNNVIESSRFVYLIKYANAQKIREVAENEKVVMFVLGGIPDTQIER |
| | YYKSCVEFPDMNSSLEAKRSELARMIKNIRFDDFKNVKQQAKGRENVAKERAKAVIGLYLTVMYLL |
| | VKNLVNVNARYVIAIHCLERDFGLYKEIIPELASKNLKNDYRILSQTLCELCDDRDESPNLFLKKNKR |
| | LRKCVEVDINNADSNMTRKYRNCIAHLTVVRELKEYIGDIRTVDSYFSIYHYVMQRCITKREDDTKQ |
| | EEKIKYEDDLLKNHGYTKDFVKALNSPFGYNIPRFKNLSIEQLFDRNEYLTEK |
| UADO01.1 | VEINTSNPTHRSGESSPVRGDMLGLKSELEKRFFGKTFDDNIHIQLIYNILDIEKILAVYVTNIVYALNN |
| SEQ ID NO: | MLGVKGSESHDDFIGYLSTNNTYDVFIDPDNSSLSDDKKANVRKSLSKFNVLLKTKRLGYFGLEEPK |
| 4974 | TKDNRVSEAYKKRVYHMLAIVGQIRQCVFHDKSGAKRFDLYSFINNIDPEYRDTLDYLVEERLKSIN |
| | KDFIQGNKVNISLLIDMMKGYEADDIIRLYYDFIVLKSQKNLGFSIKKLREKMLEEYGFRFKDKQYDS |
| | VRSKMYKLMDFLLFCNYYRNDIAAGEALVRKLRFSMTDDEKEGLYADEAAKLWGKFRNDFENIAD |
| | HMNGDVTKELGKADMDFDEKILDSEKKNASDLLYFSKMIYMLTYFLDGKEINDLLTTLISKFDNIKEF |
| | LKIMKSSAVNVECELTAGYKLFNDSQRITNELFIVKNIASMRKPAASAKLTMFRDALTILGIDDKITD |
| | DRISEILKLKEKGKGIHGLRNFITNNVIESSRFVYLIKYANAQKIREVAENEKWMFVLGGIPDTQIER |
| | YYKSCVEFPDMNSSLEAKRSELARMIKNIRFDDFKNVKQQAKGRENVAKERAKAVIGLYLTVMYLL |
| | VKNLVNVNARYVIAIHCLERDFGLYKEIIPELASKNLKNDYRILSQTLCELCDDRDESPNLFLKKNKR |
| | LRKCVEVDINNADSNMTRKYRNCIAHLTVVRELKEYIGDIRTVDSYFSIYHYVMQRCITKREDDTKQ |
| | EEKIKYEDDLLKNHGYTKDFVKALNSPFGYNIPRFKNLSIEQLFDRNEYLTEK |
| OJQV01.1 | VEINTSNPTHRSGESSPVRGDMLGLKSELEKRFFGKTFDDNIHIQLIYNILDIEKILAVYVTNIVYALNN |
| SEQ ID NO: | MLGVKGSESHDDFIGYLSTNNTYDVFIDPDNSSLSDDKKANVRKSLSKFNVLLKTKRLGYFGLEEPK |
| 4975 | TKDNRVSEAYKKRVYHMLAIVGQIRQCVFHDKSGAKRFDLYSFINNIDPEYRDTLDYLVEERLKSIN |
| | KDFIQGNKVNISLLIDMMKGYEADDIIRLYYDFIVLKSQKNLGFSIKKLREKMLEEYGFRFKDKQYDS |
| | VRSKMYKLMDFLLFCNYYRNDIAAGEALVRKLRFSMTDDEKEGLYADEAAKLWGKFRNDFENIAD |
| | HMNGDVTKELGKADMDFDEKILDSEKKNASDLLYFSKMIYMLTYFLDGKEINDLLTTLISKFDNIKEF |
| | LKIMKSSAVNVECELTAGYKLFNDSQRITNELFIVKNIASMRKPAASAKLTMFRDALTILGIDDKITD |
| | DRISEILKLKEKGKGIHGLRNFITNNVIESSRFVYLIKYANAQKIREVAENEKVVMFVLGGIPDTQIER |
| | YYKSCVEFPDMNSSLEAKRSELARMIKNIRFDDFKNVKQQAKGRENVAKERAKAVIGLYLTVMYLL |
| | VKNLVNVNARYVIAIHCLERDFGLYKEIIPELASKNLKNDYRILSQTLCELCDDRDESPNLFLKKNKR |
| | LRKCVEVDINNADSNMTRKYRNCIAHLTVVRELKEYIGDIRTVDSYFSIYHYVMQRCITKREDDTKQ |
| | EEKIKYEDDLLKNHGYTKDFVKALNSPFGYNIPRFKNLSIEQLFDRNEYLTEK |
| UANS01.1 | VEINTSNPTHRSGESSPVRGDMLGLKSELEKRFFGKTFDDNIHIQLIYNILDIEKILAVYVTNIVYALNN |
| SEQ ID NO: | MLGVKGSESHDDFIGYLSTNNTYDVFIDPDNSSLSDDKKANVRKSLSKFNVLLKTKRLGYFGLEEPK |
| 4976 | TKDNRVSEAYKKRVYHMLAIVGQIRQCVFHDKSGAKRFDLYSFINNIDPEYRDTLDYLVEERLKSIN |
| | KDFIQGNKVNISLLIDMMKGYEADDIIRLYYDFIVLKSQKNLGFSIKKLREKMLEEYGFRFKDKQYDS |
| | VRSKMYKLMDFLLFCNYYRNDIAAGEALVRKLRFSMTDDEKEGLYADEAAKLWGKFRNDFENIAD |
| | HMNGDVTKELGKADMDFDEKILDSEKKNASDLLYFSKMIYMLTYFLDGKEINDLLTTLISKFDNIKEF |
| | LKIMKSSAVNVECELTAGYKLFNDSQRITNELFIVKNIASMRKPAASAKLTMFRDALTILGIDDKITD |
| | DRISEILKLKEKGKGIHGLRNFITNNVIESSRFVYLIKYANAQKIREVAENEKVVMFVLGGIPDTQIER |
| | YYKSCVEFPDMNSSLEAKRSELARMIKNIRFDDFKNVKQQAKGRENVAKERAKAVIGLYLTVMYLL |
| | VKNLVNVNARYVIAIHCLERDFGLYKEIIPELASKNLKNDYRILSQTLCELCDDRDESPNLFLKKNKR |
| | LRKCVEVDINNADSNMTRKYRNCIAHLTVVRELKEYIGDIRTVDSYFSIYHYVMQRCITKREDDTKQ |
| | EEKIKYEDDLLKNHGYTKDFVKALNSPFGYNIPRFKNLSIEQLFDRNEYLTEK |
| ORRF01.1 | VEINTSNPTHRSGESSPVRGDMLGLKSELEKRFFGKTFDDNIHIQLIYNILDIEKILAVYVTNIVYALNN |
| SEQ ID NO: | MLGVKGSESHDDFIGYLSTNNTYDVFIDPDNSSLSDDKKANVRKSLSKFNVLLKTKRLGYFGLEEPK |
| 4977 | TKDNRVSEAYKKRVYHMLAIVGQIRQCVFHDKSGAKRFDLYSFINNIDPEYRDTLDYLVEERLKSIN |
| | KDFIQGNKVNISLLIDMMKGYEADDIIRLYYDFIVLKSQKNLGFSIKKLREKMLEEYGFRFKDKQYDS |
| | VRSKMYKLMDFLLFCNYYRNDIAAGEALVRKLRFSMTDDEKEGLYADEAAKLWGKFRNDFENIAD |
| | HMNGDVTKELGKADMDFDEKILDSEKKNASDLLYFSKMIYMLTYFLDGKEINDLLTTLISKFDNIKEF |
| | LKIMKSSAVNVECELTAGYKLFNDSQRITNELFIVKNIASMRKPAASAKLTMFRDALTILGIDDKITD |
| | DRISEILKLKEKGKGIHGLRNFITNNVIESSRFVYLIKYANAQKIREVAENEKVVMFVLGGIPDTQIER |
| | YYKSCVEFPDMNSSLEAKRSELARMIKNIRFDDFKNVKQQAKGRENVAKERAKAVIGLYLTVMYLL |
| | VKNLVNVNARYVIAIHCLERDFGLYKEIIPELASKNLKNDYRILSQTLCELCDDRDESPNLFLKKNKR |
| | LRKCVEVDINNADSNMTRKYRNCIAHLTVVRELKEYIGDIRTVDSYFSIYHYVMQRCITKREDDTKQ |
| | EEKIKYEDDLLKNHGYTKDFVKALNSPFGYNIPRFKNLSIEQLFDRNEYLTEK |
| UAOB01.1 | VEINTSNPTHRSGESSPVRGDMLGLKSELEKRFFGKTFDDNIHIQLIYNILDIEKILAVYVTNIVYALNN |
| SEQ ID NO: | MLGVKGSESHDDFIGYLSTNNTYDVFIDPDNSSLSDDKKANVRKSLSKFNVLLKTKRLGYFGLEEPK |
| 4978 | TKDNRVSEAYKKRVYHMLAIVGQIRQCVFHDKSGAKRFDLYSFINNIDPEYRDTLDYLVEERLKSIN |
| | KDFIQGNKVNISLLIDMMKGYEADDIIRLYYDFIVLKSQKNLGFSIKKLREKMLEEYGFRFKDKQYDS |
| | VRSKMYKLMDFLLFCNYYRNDIAAGEALVRKLRFSMTDDEKEGLYADEAAKLWGKFRNDFENIAD |
| | HMNGDVTKELGKADMDFDEKILDSEKKNASDLLYFSKMIYMLTYFLDGKEINDLLTTLISKFDNIKEF |
| | LKIMKSSAVNVECELTAGYKLFNDSQRITNELFIVKNIASMRKPAASAKLTMFRDALTILGIDDKITD |
| | DRISEILKLKEKGKGIHGLRNFITNNVIESSRFVYLIKYANAQKIREVAENEKVVMFVLGGIPDTQIER |
| | YYKSCVEFPDMNSSLEAKRSELARMIKNIRFDDFKNVKQQAKGRENVAKERAKAVIGLYLTVMYLL |
| | VKNLVNVNARYVIAIHCLERDFGLYKEIIPELASKNLKNDYRILSQTLCELCDDRDESPNLFLKKNKR |
| | LRKCVEVDINNADSNMTRKYRNCIAHLTVVRELKEYIGDIRTVDSYFSIYHYVMQRCITKREDDTKQ |
| | EEKIKYEDDLLKNHGYTKDFVKALNSPFGYNIPRFKNLSIEQLFDRNEYLTEK |
| UADD01.1 | VEINTSNPTHRSGESSPVRGDMLGLKSELEKRFFGKTFDDNIHIQLIYNILDIEKILAVYVTNIVYALNN |
| SEQ ID NO: | MLGVKGSESHDDFIGYLSTNNTYDVFIDPDNSSLSDDKKANVRKSLSKFNVLLKTKRLGYFGLEEPK |
| 4979 | TKDNRVSEAYKKRVYHMLAIVGQIRQCVFHDKSGAKRFDLYSFINNIDPEYRDTLDYLVEERLKSIN |
| | KDFIQGNKVNISLLIDMMKGYEADDIIRLYYDFIVLKSQKNLGFSIKKLREKMLEEYGFRFKDKQYDS |
| | VRSKMYKLMDFLLFCNYYRNDIAAGEALVRKLRFSMTDDEKEGLYADEAAKLWGKFRNDFENIAD |
| | HMNGDVTKELGKADMDFDEKILDSEKKNASDLLYFSKMIYMLTYFLDGKEINDLLTTLISKFDNIKEF |
| | LKIMKSSAVNVECELTAGYKLFNDSQRITNELFIVKNIASMRKPAASAKLTMFRDALTILGIDDKITD |
| | DRISEILKLKEKGKGIHGLRNFITNNVIESSRFVYLIKYANAQKIREVAENEKVVMFVLGGIPDTQIER |
| | YYKSCVEFPDMNSSLEAKRSELARMIKNIRFDDFKNVKQQAKGRENVAKERAKAVIGLYLTVMYLL |
| | VKNLVNVNARYVIAIHCLERDFGLYKEIIPELASKNLKNDYRILSQTLCELCDDRDESPNLFLKKNKR |
| | LRKCVEVDINNADSNMTRKYRNCIAHLTVVRELKEYIGDIRTVDSYFSIYHYVMQRCITKREDDTKQ |
| | EEKIKYEDDLLKNHGYTKDFVKALNSPFGYNIPRFKNLSIEQLFDRNEYLTEK |
| OZOE01.1 | VEINTSNPTHRSGESSPVRGDMLGLKSELEKRFFGKTFDDNIHIQLIYNILDIEKILAVYVTNIVYALNN |
| SEQ ID NO: | MLGVKGSESHDDFIGYLSTNNTYDVFIDPDNSSLSDDKKANVRKSLSKFNVLLKTKRLGYFGLEEPK |
| 4980 | TKDNRVSEAYKKRVYHMLAIVGQIRQCVFHDKSGAKRFDLYSFINNIDPEYRDTLDYLVEERLKSIN |
| | KDFIQGNKVNISLLIDMMKGYEADDIIRLYYDFIVLKSQKNLGFSIKKLREKMLEEYGFRFKDKQYDS |
| | VRSKMYKLMDFLLFCNYYRNDIAAGEALVRKLRFSMTDDEKEGLYADEAAKLWGKFRNDFENIAD |
| | HMNGDVTKELGKADMDFDEKILDSEKKNASDLLYFSKMIYMLTYFLDGKEINDLLTTLISKFDNIKEF |
| | LKIMKSSAVNVECELTAGYKLFNDSQRITNELFIVKNIASMRKPAASAKLTMFRDALTILGIDDKITD |
| | DRISEILKLKEKGKGIHGLRNFITNNVTESSRFVYLIKYANAQKIREVAENEKWMFVLGGIPDTQIER |
| | YYKSCVEFPDMNSSLEAKRSELARMIKNIRFDDFKNVKQQAKGRENVAKERAKAVIGLYLTVMYLL |
| | VKNLVNVNARYVIAIHCLERDFGLYKEIIPELASKNLKNDYRILSQTLCELCDDRDESPNLFLKKNKR |
| | LRKCVEVDINNADSNMTRKYRNCIAHLTVVRELKEYIGDIRTVDSYFSIYHYVMQRCITKREDDTKQ |
| | EEKIKYEDDLLKNHGYTKDFVKALNSPFGYNIPRFKNLSIEQLFDRNEYLTEK |
| UYAJ01.1 | VEINTSNPTHRSGESSPVRGDMLGLKSELEKRFFGKTFDDNIHIQLIYNILDIEKILAVYVTNIVYALNN |
| SEQ ID NO: | MLGVKGSESHDDFIGYLSTNNTYDVFIDPDNSSLSDDKKANVRKSLSKFNVLLKTKRLGYFGLEEPK |
| 4981 | TKDNRVSEAYKKRVYHMLAIVGQIRQCVFHDKSGAKRFDLYSFINNIDPEYRDTLDYLVEERLKSIN |
| | KDFIQGNKVNISLLIDMMKGYEADDIIRLYYDFIVLKSQKNLGFSIKKLREKMLEEYGFRFKDKQYDS |
| | VRSKMYKLMDFLLFCNYYRNDIAAGEALVRKLRFSMTDDEKEGLYADEAAKLWGKFRNDFENIAD |
| | HMNGDVTKELGKADMDFDEKILDSEKKNASDLLYFSKMIYMLTYFLDGKEINDLLTTLISKFDNIKEF |
| | LKIMKSSAVNVECELTAGYKLFNDSQRITNELFIVKNIASMRKPAASAKLTMFRDALTILGIDDKITD |
| | DRISEILKLKEKGKGIHGLRNFITNNVIESSRFVYLIKYANAQKIREVAENEKVVMFVLGGIPDTQIER |
| | YYKSCVEFPDMNSSLEAKRSELARMIKNIRFDDFKNVKQQAKGRENVAKERAKAVIGLYLTVMYLL |
| | VKNLVNVNARYVIAIHCLERDFGLYKEIIPELASKNLKNDYRILSQTLCELCDDRDESPNLFLKKNKR |
| | LRKCVEVDINNADSNMTRKYRNCIAHLTVVRELKEYIGDIRTVDSYFSIYHYVMQRCITKREDDTKQ |
| | EEKIKYEDDLLKNHGYTKDFVKALNSPFGYNIPRFKNLSIEQLFDRNEYLTEK |
| OYBP01.1 | VEINTSNPTHRSGESSPVRGDMLGLKSELEKRFFGKTFDDNIHIQLIYNILDIEKILAVYVTNIVYALNN |
| SEQ ID NO: | MLGVKGSESHDDFIGYLSTNNTYDVFIDPDNSSLSDDKKANVRKSLSKFNVLLKTKRLGYFGLEEPK |
| 4982 | TKDNRVSEAYKKRVYHMLAIVGQIRQCVFHDKSGAKRFDLYSFINNIDPEYRDTLDYLVEERLKSIN |
| | KDFIQGNKVNISLLIDMMKGYEADDIIRLYYDFIVLKSQKNLGFSIKKLREKMLEEYGFRFKDKQYDS |
| | VRSKMYKLMDFLLFCNYYRNDIAAGEALVRKLRFSMTDDEKEGLYADEAAKLWGKFRNDFENIAD |
| | HMNGDVTKELGKADMDFDEKILDSEKKNASDLLYFSKMIYMLTYFLDGKEINDLLTTLISKFDNIKEF |
| | LKIMKSSAVNVECELTAGYKLFNDSQRITNELFIVKNIASMRKPAASAKLTMFRDALTILGIDDKITD |
| | DRISEILKLKEKGKGIHGLRNFITNNVIESSRFVYLIKYANAQKIREVAENEKVVMFVLGGIPDTQIER |
| | YYKSCVEFPDMNSSLEAKRSELARMIKNIRFDDFKNVKQQAKGRENVAKERAKAVIGLYLTVMYLL |
| | VKNLVNVNARYVIAIHCLERDFGLYKEIIPELASKNLKNDYRILSQTLCELCDDRDESPNLFLKKNKR |
| | LRKCVEVDINNADSNMTRKYRNCIAHLTVVRELKEYIGDIRTVDSYFSIYHYVMQRCITKREDDTKQ |
| | EEKIKYEDDLLKNHGYTKDFVKALNSPFGYNIPRFKNLSIEQLFDRNEYLTEK |
| OGKO01.1 | VEINTSNPTHRSGESSPVRGDMLGLKSELEKRFFGKTFDDNIHIQLIYNILDIEKILAVYVTNIVYALNN |
| SEQ ID NO: | MLGVKGSESHDDFIGYLSTNNTYDVFIDPDNSSLSDDKKANVRKSLSKFNVLLKTKRLGYFGLEEPK |
| 4983 | TKDNRVSEAYKKRVYHMLAIVGQIRQCVFHDKSGAKRFDLYSFINNIDPEYRDTLDYLVEERLKSIN |
| | KDFIQGNKVNISLLIDMMKGYEADDIIRLYYDFIVLKSQKNLGFSIKKLREKMLEEYGFRFKDKQYDS |
| | VRSKMYKLMDFLLFCNYYRNDIAAGEALVRKLRFSMTDDEKEGLYADEAAKLWGKFRNDFENIAD |
| | HMNGDVTKELGKADMDFDEKILDSEKKNASDLLYFSKMIYMLTYFLDGKEINDLLTTLISKFDNIKEF |
| | LKIMKSSAVNVECELTAGYKLFNDSQRITNELFIVKNIASMRKPAASAKLTMFRDALTILGIDDKITD |
| | DRISEILKLKEKGKGIHGLRNFITNNVIESSRFVYLIKYANAQKIREVAENEKVVMFVLGGIPDTQIER |
| | YYKSCVEFPDMNSSLEAKRSELARMIKNIRFDDFKNVKQQAKGRENVAKERAKAVIGLYLTVMYLL |
| | VKNLVNVNARYVIAIHCLERDFGLYKEIIPELASKNLKNDYRILSQTLCELCDDRDESPNLFLKKNKR |
| | LRKCVEVDINNADSNMTRKYRNCIAHLTVVRELKEYIGDIRTVDSYFSIYHYVMQRCITKREDDTKQ |
| | EEKIKYEDDLLKNHGYTKDFVKALNSPFGYNIPRFKNLSIEQLFDRNEYLTEK |
| OHAT01.1 | VEINTSNPTHRSGESSPVRGDMLGLKSELEKRFFGKTFDDNIHIQLIYNILDIEKILAVYVTNIVYALNN |
| SEQ ID NO: | MLGVKGSESHDDFIGYLSTNNTYDVFIDPDNSSLSDDKKANVRKSLSKFNVLLKTKRLGYFGLEEPK |
| 4984 | TKDNRVSEAYKKRVYHMLAIVGQIRQCVFHDKSGAKRFDLYSFINNIDPEYRDTLDYLVEERLKSIN |
| | KDFIQGNKVNISLLIDMMKGYEADDIIRLYYDFIVLKSQKNLGFSIKKLREKMLEEYGFRFKDKQYDS |
| | VRSKMYKLMDFLLFCNYYRNDIAAGEALVRKLRFSMTDDEKEGLYADEAAKLWGKFRNDFENIAD |
| | HMNGDVTKELGKADMDFDEKILDSEKKNASDLLYFSKMIYMLTYFLDGKEINDLLTTLISKFDNIKEF |
| | LKIMKSSAVNVECELTAGYKLFNDSQRITNELFIVKNIASMRKPAASAKLTMFRDALTILGIDDKITD |
| | DRISEILKLKEKGKGIHGLRNFITNNVIESSRFVYLIKYANAQKIREVAENEKVVMFVLGGIPDTQIER |
| | YYKSCVEFPDMNSSLEAKRSELARMIKNIRFDDFKNVKQQAKGRENVAKERAKAVIGLYLTVMYLL |
| | VKNLVNVNARYVIAIHCLERDFGLYKEIIPELASKNLKNDYRILSQTLCELCDDRDESPNLFLKKNKR |
| | LRKCVEVDINNADSNMTRKYRNCIAHLTVVRELKEYIGDIRTVDSYFSIYHYVMQRCITKREDDTKQ |
| | EEKIKYEDDLLKNHGYTKDFVKALNSPFGYNIPRFKNLSIEQLFDRNEYLTEK |
| OWQZ01.1 | VEINTSNPTHRSGESSPVRGDMLGLKSELEKRFFGKTFDDNIHIQLIYNILDIEKILAVYVTNIVYALNN |
| SEQ ID NO: | MLGVKGSESHDDFIGYLSTNNTYDVFIDPDNSSLSDDKKANVRKSLSKFNVLLKTKRLGYFGLEEPK |
| 4985 | TKDNRVSEAYKKRVYHMLAIVGQIRQCVFHDKSGAKRFDLYSFINNIDPEYRDTLDYLVEERLKSIN |
| | KDFIQGNKVNISLLIDMMKGYEADDIIRLYYDFIVLKSQKNLGFSIKKLREKMLEEYGFRFKDKQYDS |
| | VRSKMYKLMDFLLFCNYYRNDIAAGEALVRKLRFSMTDDEKEGLYADEAAKLWGKFRNDFENIAD |
| | HMNGDVTKELGKADMDFDEKILDSEKKNASDLLYFSKMIYMLTYFLDGKEINDLLTTLISKFDNIKEF |
| | LKIMKSSAVNVECELTAGYKLFNDSQRITNELFIVKNIASMRKPAASAKLTMFRDALTILGIDDKITD |
| | DRISEILKLKEKGKGIHGLRNFITNNVIESSRFVYLIKYANAQKIREVAENEKWMFVLGGIPDTQIER |
| | YYKSCVEFPDMNSSLEAKRSELARMIKNIRFDDFKNVKQQAKGRENVAKERAKAVIGLYLTVMYLL |
| | VKNLVNVNARYVIAIHCLERDFGLYKEIIPELASKNLKNDYRILSQTLCELCDDRDESPNLFLKKNKR |
| | LRKCVEVDINNADSNMTRKYRNCIAHLTVVRELKEYIGDIRTVDSYFSIYHYVMQRCITKREDDTKQ |
| | EEKIKYEDDLLKNHGYTKDFVKALNSPFGYNIPRFKNLSIEQLFDRNEYLTEK |
| OXXL01.1 | VEINTSNPTHRSGESSPVRGDMLGLKSELEKRFFGKTFDDNIHIQLIYNILDIEKILAVYVTNIVYALNN |
| SEQ ID NO: | MLGVKGSESHDDFIGYLSTNNTYDVFIDPDNSSLSDDKKANVRKSLSKFNVLLKTKRLGYFGLEEPK |
| 4986 | TKDNRVSEAYKKRVYHMLAIVGQIRQCVFHDKSGAKRFDLYSFINNIDPEYRDTLDYLVEERLKSIN |
| | KDFIQGNKVNISLLIDMMKGYEADDIIRLYYDFIVLKSQKNLGFSIKKLREKMLEEYGFRFKDKQYDS |
| | VRSKMYKLMDFLLFCNYYRNDIAAGEALVRKLRFSMTDDEKEGLYADEAAKLWGKFRNDFENIAD |
| | HMNGDVTKELGKADMDFDEKILDSEKKNASDLLYFSKMIYMLTYFLDGKEINDLLTTLISKFDNIKEF |
| | LKIMKSSAVNVECELTAGYKLFNDSQRITNELFIVKNIASMRKPAASAKLTMFRDALTILGIDDKITD |
| | DRISEILKLKEKGKGIHGLRNFITNNVIESSRFVYLIKYANAQKIREVAENEKVVMFVLGGIPDTQIER |
| | YYKSCVEFPDMNSSLEAKRSELARMIKNIRFDDFKNVKQQAKGRENVAKERAKAVIGLYLTVMYLL |
| | VKNLVNVNARYVIAIHCLERDFGLYKEIIPELASKNLKNDYRILSQTLCELCDDRDESPNLFLKKNKR |
| | LRKCVEVDINNADSNMTRKYRNCIAHLTVVRELKEYIGDIRTVDSYFSIYHYVMQRCITKREDDTKQ |
| | EEKIKYEDDLLKNHGYTKDFVKALNSPFGYNIPRFKNLSIEQLFDRNEYLTEK |
| UZSO01.1 | VEINTSNPTHRSGESSPVRGDMLGLKSELEKRFFGKTFDDNIHIQLIYNILDIEKILAVYVTNIVYALNN |
| SEQ ID NO: | MLGVKGSESHDDFIGYLSTNNTYDVFIDPDNSSLSDDKKANVRKSLSKFNVLLKTKRLGYFGLEEPK |
| 4987 | TKDNRVSEAYKKRVYHMLAIVGQIRQCVFHDKSGAKRFDLYSFINNIDPEYRDTLDYLVEERLKSIN |
| | KDFIQGNKVNISLLIDMMKGYEADDIIRLYYDFIVLKSQKNLGFSIKKLREKMLEEYGFRFKDKQYDS |
| | VRSKMYKLMDFLLFCNYYRNDIAAGEALVRKLRFSMTDDEKEGLYADEAAKLWGKFRNDFENIAD |
| | HMNGDVTKELGKADMDFDEKILDSEKKNASDLLYFSKMIYMLTYFLDGKEINDLLTTLISKFDNIKEF |
| | LKIMKSSAVNVECELTAGYKLFNDSQRITNELFIVKNIASMRKPAASAKLTMFRDALTILGIDDKITD |
| | DRISEILKLKEKGKGIHGLRNFITNNVIESSRFVYLIKYANAQKIREVAENEKVVMFVLGGIPDTQIER |
| | YYKSCVEFPDMNSSLEAKRSELARMIKNIRFDDFKNVKQQAKGRENVAKERAKAVIGLYLTVMYLL |
| | VKNLVNVNARYVIAIHCLERDFGLYKEIIPELASKNLKNDYRILSQTLCELCDDRDESPNLFLKKNKR |
| | LRKCVEVDINNADSNMTRKYRNCIAHLTVVRELKEYIGDIRTVDSYFSIYHYVMQRCITKREDDTKQ |
| | EEKIKYEDDLLKNHGYTKDFVKALNSPFGYNIPRFKNLSIEQLFDRNEYLTEK |
| UAMJ01.1 | VEINTSNPTHRSGESSPVRGDMLGLKSELEKRFFGKTFDDNIHIQLIYNILDIEKILAVYVTNIVYALNN |
| SEQ ID NO: | MLGVKGSESHDDFIGYLSTNNTYDVFIDPDNSSLSDDKKANVRKSLSKFNVLLKTKRLGYFGLEEPK |
| 4988 | TKDNRVSEAYKKRVYHMLAIVGQIRQCVFHDKSGAKRFDLYSFINNIDPEYRDTLDYLVEERLKSIN |
| | KDFIQGNKVNISLLIDMMKGYEADDIIRLYYDFIVLKSQKNLGFSIKKLREKMLEEYGFRFKDKQYDS |
| | VRSKMYKLMDFLLFCNYYRNDIAAGEALVRKLRFSMTDDEKEGLYADEAAKLWGKFRNDFENIAD |
| | HMNGDVTKELGKADMDFDEKILDSEKKNASDLLYFSKMIYMLTYFLDGKEINDLLTTLISKFDNIKEF |
| | LKIMKSSAVNVECELTAGYKLFNDSQRITNELFIVKNIASMRKPAASAKLTMFRDALTILGIDDKITD |
| | DRISEILKLKEKGKGIHGLRNFITNNVIESSRFVYLIKYANAQKIREVAENEKVVMFVLGGIPDTQIER |
| | YYKSCVEFPDMNSSLEAKRSELARMIKNIRFDDFKNVKQQAKGRENVAKERAKAVIGLYLTVMYLL |
| | VKNLVNVNARYVIAIHCLERDFGLYKEIIPELASKNLKNDYRILSQTLCELCDDRDESPNLFLKKNKR |
| | LRKCVEVDINNADSNMTRKYRNCIAHLTVVRELKEYIGDIRTVDSYFSIYHYVMQRCITKREDDTKQ |
| | EEKIKYEDDLLKNHGYTKDFVKALNSPFGYNIPRFKNLSIEQLFDRNEYLTEK |
| UEOP01.1 | VEINTSNPTHRSGESSPVRGDMLGLKSELEKRFFGKTFDDNIHIQLIYNILDIEKILAVYVTNIVYALNN |
| SEQ ID NO: | MLGVKGSESHDDFIGYLSTNNTYDVFIDPDNSSLSDDKKANVRKSLSKFNVLLKTKRLGYFGLEEPK |
| 4989 | TKDNRVSEAYKKRVYHMLAIVGQIRQCVFHDKSGAKRFDLYSFINNIDPEYRDTLDYLVEERLKSIN |
| | KDFIQGNKVNISLLIDMMKGYEADDIIRLYYDFIVLKSQKNLGFSIKKLREKMLEEYGFRFKDKQYDS |
| | VRSKMYKLMDFLLFCNYYRNDIAAGEALVRKLRFSMTDDEKEGLYADEAAKLWGKFRNDFENIAD |
| | HMNGDVTKELGKADMDFDEKILDSEKKNASDLLYFSKMIYMLTYFLDGKEINDLLTTLISKFDNIKEF |
| | LKIMKSSAVNVECELTAGYKLFNDSQRITNELFIVKNIASMRKPAASAKLTMFRDALTILGIDDKITD |
| | DRISEILKLKEKGKGIHGLRNFITNNVIESSRFVYLIKYANAQKIREVAENEKVVMFVLGGIPDTQIER |
| | YYKSCVEFPDMNSSLEAKRSELARMIKNIRFDDFKNVKQQAKGRENVAKERAKVVIGLYLTVMYLL |
| | VKNLVNVNARYVIAIHCLERDFGLYKEIIPELASKNLKNDYRILSQTLCELCDDRDESPNLFLKKNKR |
| | LRKCVEVDINNADSNMTRKYRNCIAHLTVVRELKEYIGDIRTVDSYFSIYHYVMQRCITKREDDTKQ |
| | EEKIKYEDDLLKNHGYTKDFVKALNSPFGYNIPRFKNLSIEQLFDRNEYLTEK |
| OGZO01.1 | VEINTSNPTHRSGESSPVRGDMLGLKSELEKRFFGKTFDDNIHIQLIYNILDIEKILAVYVTNIVYALNN |
| SEQ ID NO: | MLGVKGSESHDDFIGYLSTNNTYDVFIDPDNSSLSDDKKANVRKSLSKFNVLLKTKRLGYFGLEEPK |
| 4990 | TKDNRVSEAYKKRVYHMLAIVGQIRQCVFHDKSGAKRFDLYSFINNIDPEYRDTLDYLVEERLKSIN |
| | KDFIQGNKVNISLLIDMMKGYEADDIIRLYYDFIVLKSQKNLGFSIKKLREKMLEEYGFRFKDKQYDS |
| | VRSKMYKLMDFLLFCNYYRNDIAAGEALVRKLRFSMTDDEKEGLYADEAAKLWGKFRNDFENIAD |
| | HMNGDVTKELGKADMDFDEKILDSEKKNASDLLYFSKMIYMLTYFLDGKEINDLLTTLISKFDNIKEF |
| | LKIMKSSAVNVECELTAGYKLFNDSQRITNELFIVKNIASMRKPAASAKLTMFRDALTILGIDDKITD |
| | DRISEILKLKEKGKGIHGLRNFITNNVIESSRFVYLIKYANAQKIREVAENEKVVMFVLGGIPDTQIER |
| | YYKSCVEFPDMNSSLEAKRSELARMIKNIRFDDFKNVKQQAKGRENVAKERAKVVIGLYLTVMYLL |
| | VKNLVNVNARYVIAIHCLERDFGLYKEIIPELASKNLKNDYRILSQTLCELCDDRDESPNLFLKKNKR |
| | LRKCVEVDINNADSNMTRKYRNCIAHLTVVRELKEYIGDIRTVDSYFSIYHYVMQRCITKREDDTKQ |
| | EEKIKYEDDLLKNHGYTKDFVKALNSPFGYNIPRFKNLSIEQLFDRNEYLTEK |
| OXOQ01.1 | VEINTSNPTHRSGESSPVRGDMLGLKSELEKRFFGKTFDDNIHIQLIYNILDIEKILAVYVTNIVYALNN |
| SEQ ID NO: | MLGVKGSESHDDFIGYLSTNNTYDVFIDPDNSSLSDDKKANVRKSLSKFNVLLKTKRLGYFGLEEPK |
| 4991 | TKDNRVSEAYKKRVYHMLAIVGQIRQCVFHDKSGAKRFDLYSFINNIDPEYRDTLDYLVEERLKSIN |
| | KDFIQGNKVNISLLIDMMKGYEADDIIRLYYDFIVLKSQKNLGFSIKKLREKMLEEYGFRFKDKQYDS |
| | VRSKMYKLMDFLLFCNYYRNDIAAGEALVRKLRFSMTDDEKEGLYADEAAKLWGKFRNDFENIAD |
| | HMNGDVTKELGKADMDFDEKILDSEKKNASDLLYFSKMIYMLTYFLDGKEINDLLTTLISKFDNIKEF |
| | LKIMKSSAVNVECELTAGYKLFNDSQRITNELFIVKNIASMRKPAASAKLTMFRDALTILGIDDKITD |
| | DRISEILKLKEKGKGIHGLRNFITNNVIESSRFVYLIKYANAQKIREVAENEKWMFVLGGIPDTQIER |
| | YYKSCVEFPDMNSSLEAKRSELARMIKNIRFDDFKNVKQQAKGRENVAKERAKAVIGLYLTVMYLL |
| | VKNLVNVNARYVIAIHCLERDFGLYKEIIPELASKNLKNDYRILSQTLCELCDDRDESPNLFLKKNKR |
| | LRKCVEVDINNADSNMTRKYRNCIAHLTVVRELKEYIGDIRTVDSYFSIYHYVMQRCITKREDDTKQ |
| | EEKIKYEDDLLKNHGYTKDFVKALNSPFGYNIPRFKNLAIEQLFDRNEYLTEK |
| OPCE01.1 | VEINTSNPTHRSGESSPVRGDMLGLKSELEKRFFGKTFDDNIHIQLIYNILDIEKILAVYVTNIVYALNN |
| SEQ ID NO: | MLGVKGSESHDDFIGYLSTNNTYDVFIDPDNSSLSDDKKANVRKSLSKFNVLLKTKRLGYFGLEEPK |
| 4992 | TKDNRVSEAYKKRVYHMLAIVGQIRQCVFHDKSGAKRFDLYSFINNIDPEYRDTLDYLVEERLKSIN |
| | KDFIQGNKVNISLLIDMMKGYEADDIIRLYYDFIVLKSQKNLGFSIKKLREKMLEEYGFRFKDKQYDS |
| | VRSKMYKLMDFLLFCNYYRNDIAAGEALVRKLRFSMTDDEKEGLYADEAAKLWGKFRNDFENIAD |
| | HMNGDVTKELGKADMDFDEKILDSEKKNASDLLYFSKMIYMLTYFLDGKEINDLLTTLISKFDNIKEF |
| | LKIMKSSAVNVECELTAGYKLFNDSQRITNELFIVKNIASMRKPAASAKLTMFRDALTILGIDDKITD |
| | DRISEILKLKEKGKGIHGLRNFITNNVIESSRFVYLIKYANAQKIREVAENEKVVMFVLGGIPDTQIER |
| | YYKSCVEFPDMNSSLEAKRSELARMIKNIRFDDFKNVKQQAKGRENVAKERAKAVIGLYLTVMYLL |
| | VKNLVNVNARYVIAIHCLERDFGLYKEIIPELASKNLKNDYRILSQTLCELCDDRDESPNLFLKKNKR |
| | LRKCVEVDINNADSNMTRKYRNCIAHLTVVRELKEYIGDIRTVDSYFSIYHYVMQRCITKRENDTKQ |
| | EEKIKYEDDLLKNHGYTKDFVKALNSPFGYNIPRFKNLSIEQLFDRNEYLTEK |
| OPCP01.1 | VEINTSNPTHRSGESSPVRGDMLGLKSELEKRFFGKTFDDNIHIQLIYNILDIEKILAVYVTNIVYALNN |
| SEQ ID NO: | MLGVKGSESHDDFIGYLSTNNTYDVFIDPDNSSLSDDKKANVRKSLSKFNVLLKTKRLGYFGLEEPK |
| 4993 | TKDNRVSEAYKKRVYHMLAIVGQIRQCVFHDKSGAKRFDLYSFINNIDPEYRDTLDYLVEERLKSIN |
| | KDFIQGNKVNISLLIDMMKGYEADDIIRLYYDFIVLKSQKNLGFSIKKLREKMLEEYGFRFKDKQYDS |
| | VRSKMYKLMDFLLFCNYYRNDIAAGEALVRKLRFSMTDDEKEGLYADEAAKLWGKFRNDFENIAD |
| | HMNGDVTKELGKADMDFDEKILDSEKKNASDLLYFSKMIYMLTYFLDGKEINDLLTTLISKFDNIKEF |
| | LKIMKSSAVNVECELTAGYKLFNDSQRITNELFIVKNIASMRKPAASAKLTMFRDALTILGIDDKITD |
| | DRISEILKLKEKGKGIHGLRNFITNNVIESSRFVYLIKYANAQKIREVAENEKVVMFVLGGIPDTQIER |
| | YYKSCVEFPDMNSSLEAKRSELARMIKNIRFDDFKNVKQQAKGRENVAKERAKAVIGLYLTVMYLL |
| | VKNLVNVNARYVIAIHCLERDFGLYKEIIPELASKNLKNDYRILSQTLCELCDDRDESPNLFLKKNKR |
| | LRKCVEVDINNADSNMTRKYRNCIAHLTVVRELKEYIGDIRTVDSYFSIYHYVMQRCITKRENDTKQ |
| | EEKIKYEDDLLKNHGYTKDFVKALNSPFGYNIPRFKNLSIEQLFDRNEYLTEK |
| UMJY01.1 | VEINTSNPTHRSGESSPVRGDMLGLKSELEKRFFGKTFDDNIHIQLIYNILDIEKILAVYVTNIVYALNN |
| SEQ ID NO: | MLGVKGSESHDDFIGYLSTNNTYDVFIDPDNSSLSDDKKANVRKSLSKFNVLLKTKRLGYFGLEEPK |
| 4994 | TKDNRVSEAYKKRVYHMLAIVGQIRQCVFHDKSGAKRFDLYSFINNIDPEYRDTLDYLVEERLKSIN |
| | KDFIQGNKVNISLLIDMMKGYEADDIIRLYYDFIVLKSQKNLGFSIKKLREKMLEEYGFRFKDKQYDS |
| | VRSKMYKLMDFLLFCNYYRNDIAAGEALVRKLRFSMTDDEKEGLYADEAAKLWGKFRNDFENIAD |
| | HMNGDVTKELGKADMDFDEKILDSEKKNASDLLYFSKMIYMLTYFLDGKEINDLLTTLISKFDNIKEF |
| | LKIMKSSAVNVECELTAGYKLFNDSQRITNELFIVKNIASMRKPAASAKLTMFRDALTILGIDDKITD |
| | DRISEILKLKEKGKGIHGLRNFITNNVIESSRFVYLIKYANAQKIREVAENEKVVMFVLGGIPDTQIER |
| | YYKSCVEFPDMNSSLEAKRSELARMIKNIRFDDFKNVKQQAKGRENVAKERAKAVIGLYLTVMYLL |
| | VKNLVNVNARYVIAIHCLERDFGLYKEIIPELASKNLKNDYRILSQTLCELCDDRDESPNLFLKKNKR |
| | LRKCVEVDINNADSNMTRKYRNCIAHLTVVRELKEYIGDIRTVDSYFSIYHYVMQRCITKRENDTKQ |
| | EEKIKYEDDLLKNHGYTKDFVKALNSPFGYNIPRFKNLSIEQLFDRNEYLTEK |
| OGZX01.1 | VEINTSNPTHRSGESSPVRGDMLGLKSELEKRFFGKTFDDNIHIQLIYNILDIEKILAVYVTNIVYALNN |
| SEQ ID NO: | MLGVKGSESHDDFIGYLSTNNTYDVFIDPDNSSLSDDKKANVRKSLSKFNVLLKTKRLGYFGLEEPK |
| 4995 | TKDNRVSEAYKKRVYHMLAIVGQIRQCVFHDKSGAKRFDLYSFINNIDPEYRDTLDYLVEERLKSIN |
| | KDFIQGNKVNISLLIDMMKGYEADDIIRLYYDFIVLKSQKNLGFYIKKLREKMLEEYGFRFKDKQYD |
| | SVRSKMYKLMDFLLFCNYYRNDIAAGEALVRKLRFSMTDDEKEGLYADEAAKLWGKFRNDFENIA |
| | DHMNGDVTKELGKADMDFDEKILDSEKKNASDLLYFSKMIYMLTYFLDGKEINDLLTTLISKFDNIK |
| | EFLKIMKSSAVNVECELTAGYKLFNDSQRITNELFIVKNIASMRKPAASAKLTMFRDALTILGIDDKIT |
| | DDRISEILKLKEKGKGIHGLRNFITNNVIESSRFVYLIKYANAQKIREVAENEKVVMFVLGGIPDTQIE |
| | RYYKSCVEFPDMNSSLEAKRSELARMIKNIRFDDFKNVKQQAKGRENVAKERAKAVIGLYLTVMYL |
| | LVKNLVNVNARYVIAIHCLERDFGLYKEIIPELASKNLKNDYRILSQTLCELCDDRDESPNLFLKKNK |
| | RLRKCVEVDINNADSNMTRKYRNCIAHLTVVRELKEYIGDIRTVDSYFSIYHYVMQRCITKREDDTK |
| | QEEKIKYEDDLLKNHGYTKDFVKALNSPFGYNIPRFKNLSIEQLFDRNEYLTEK |
| ULZM01.1 | VLSGIFVNAFSSKHGFESGVEINTSNPTHRSGESSPVRGDMLGLKSELEKRFFGKTFDDNIHIQLIYNIL |
| SEQ ID NO: | DIEKILAVYVTNIVYALNNMLGVKGSESHDDFIGYLSTNNTYDVFIDPDNSSLSDDKKANVRKSLSKF |
| 4996 | NVLLKTKRLGYFGLEEPKTKDNRVSEAYKKRVYHMLAIVGQIRQCVFHDKSGAKRFDLYSFINNIDP |
| | EYRDTLDYLVEERLKSINKDFIQGNKVNISLLIDMMKGYEADDIIRLYYDFIVLKSQKNLGFSIKKLRE |
| | KMLEEYGFRFKDKQYDSVRSKMYKLMDFLLFCNYYRNDIAAGEALVRKLRFSMTDDEKEGLYADE |
| | AAKLWGKFRNDFENIADHMNGDVIKELGKADMDFDEKILDSEKKNASDLLYFSKMIYMLTYFLDG |
| | KEINDLLTTLISKFDNIKEFLKIMKSSAVNVECELTAGYKLFNDSQRITNELFIVKNIASMRKPAASAK |
| | LTMFRDALTILGIDDKITDDRISEILKLKEKGKGIHGLRNFITNNVIESSRFVYLIKYANAQKIREVAEN |
| | EKVVMFVLGGIPDTQIERYYKSCVEFPDMNSSLEAKRSELARMIKNIRFDDFKNVKQQAKGRENVA |
| | KERAKAVIGLYLTVMYLLVKNLVNVNARYVIAIHCLERDFGLYKEIIPELASKNLKNDYRILSQTLCE |
| | LCDDRDESPNLFLKKNKRLRKCVEVDINNADSNMTRKYRNCIAHLTVVRELKEYIGDIRTVDSYFSI |
| | YHYVMQRCITKREDDTKQEEKIKYEDDLLKNHGYTKDFVKALNSPFGYNIPRFKNLSIEQLFDRNEY |
| | LTEK |
| GCA_ | MLGLKSELEKRFFGKTFDDNIHIQLIYNILDIEKILAVYVTNIVYALNNMLGVKGSESHDDFIGYLSTN |
| 003460925.1_ | NTYDVFIDPDNSSLSDDKKANVRKSLSKFNVLLKTKRLGYFGLEEPKTKDNRVSEAYKKRVYHMLA |
| ASM346092v1_ | IVGQIRQCVFHDKSGAKRFDLYSFINNIDPEYRDTLDYLVEERLKSINKDFIQGNKVNISLLIDMMKG |
| genomic | YEADDIIRLYYDFIVLKSQKNLGFSIKKLREKMLEEYGFRFKDKQYDSVRSKMYKLMDFLLFCNYYR |
| SEQ ID NO: | NDIAAGEALVRKLRFSMTDDEKEGLYADEAAKLWGKFRNDFENIADHMNGDVIKELGKADMDFDE |
| 4997 | KILDSEKKNASDLLYFSKMIYMLTYFLDGKEINDLLTTLISKFDNIKEFLKIMKSSAVNVECELTAGY |
| | KLFNDSQRITNELFIVKNIASMRKPAASAKLTMFRDALTILGIDDKITDDRISEILKLKEKGKGIHGLR |
| | NFITNNVIESSRFVYLIKYANAQKIREVAENEKWMFVLGGIPDTQIERYYKSCVEFPDMNSSLEAKR |
| | SELARMIKNIRFDDFKNVKQQAKGRENVAKERAKAVIGLYLTVMYLLVKNLVNVNARYVIAIHCLE |
| | RDFGLYKEIIPELASKNLKNDYRILSQTLCELCDDRDESPNLFLKKNKRLRKCVEVDINNADSNMTR |
| | KYRNCIAHLTVVRELKEYIGDIRTVDSYFSIYHYVMQRCITKREDDTKQEEKIKYEDDLLKNHGYTK |
| | DFVKALNSPFGYNIPRFKNLSIEQLFDRNEYLTEK |
| OHAF01.1 | VEINTSNPTHRSGESSPVRGDMLGLKSELEKRFFGKTFDDNIHIQLIYNILDIEKILAVYVTNIVYALNN |
| SEQ ID NO: | MLGVKGSESHDDFIGYLSTNNTYDVFIDPDNSSLSDDKKANVRKSLSKFNVLLKTKRLGYFGLEEPK |
| 4998 | TKDNRVSEAYKKRVYHMLAIVGQIRQCVFHDKSGAKRFDLYSFINNIDPEYRDTLDYLVEERLKSIN |
| | KDFIQGNKVNISLLIDMMKGYEADDIIRLYYDFIVLKSQKNLGFSIKKLREKMLEEYGFRFKDKQYDS |
| | VRSKMYKLMDFLLFCNYYRNDIAAGEALVRKLRFSMTDDEKEGIYADEAAKLWGKFRNDFENIAD |
| | HMNGDAIKELGKADMDFDEKILDSEKKNASDLLYFSKMIYMLTYFLDGKEINDLLTTLISKFDNIKEF |
| | LKIMKSSAVDVECELTAGYKLFNDSQRITNELFIVKNIASMRKPAASAKLTMFRDALTILGIDDNITD |
| | DRISEILKLKEKGKGIHGLRNFITNNVTESSRFVYLIKYANAQKIREVAKNEKWMFVLGGIPDTQIER |
| | YYKSCVEFPDMNSSLEAKRSELARMIKNIRFDDFKNVKQQAKGRENVAKERAKAVIGLYLTVMYLL |
| | VKNLVNVNARYVIAIHCLERDFGLYKEIIPELASKNLKNDYRILSQTLCELCDDRDKSPNLFLKKNKR |
| | LRKCVEVDINNADSNMTRKYRNCIAHLTVVRELKEYIGDIRTVDSYFSIYHYVMQRCITKREDDTKQ |
| | EEKIKYEDDLLKNHGYTKDFVKALNSPFGYNIPRFKNLSIEQLFDRNEYLTEK |
| OKSA01.1 | VEINTSNPTHRSGESSPVRGDMLGLKSELEKRFFGKTFDDNIHIQLIYNILDIEKILAVYVTNIVYALNN |
| SEQ ID NO: | MLGVKGSESHDDFIGYLSTNNTYDVFIDPDNSSLSDDKKANVRKSLSKFNVLLKTKRLGYFGLEEPK |
| 4999 | TKDNRVSEAYKKRVYHMLAIVGQIRQCVFHDKSGAKRFDLYSFINNIDPEYRDTLDYLVEERLKSIN |
| | KDFIQGNKVNISLLIDMMKGYEADDIIRLYYDFIVLKSQKNLGFSIKKLREKMLEEYGFRFKDKQYDS |
| | VRSKMYKLMDFLLFCNYYRNDIAAGEALVRKLRFSMTDDEKEGIYADEAAKLWGKFRNDFENIAD |
| | HMNGDAIKELGKADMDFDEKILDSEKKNASDLLYFSKMIYMLTYFLDGKEINDLLTTLISKFDNIKEF |
| | LKIMKSSAVDVECELTAGYKLFNDSQRITNELFIVKNIASMRKPAASAKLTMFRDALTILGIDDNITD |
| | DRISEILKLKEKGKGIHGLRNFITNNVIESSRFVYLIKYANAQKIREVAKNEKVVMFVLGGIPDTQIER |
| | YYKSCVEFPDMNSSLEAKRSELARMIKNIRFDDFKNVKQQAKGRENVAKERAKAVIGLYLTVMYLL |
| | VKNLVNVNARYVIAIHCLERDFGLYKEIIPELASKNLKNDYRILSQTLCELCDDRDKSPNLFLKKNKR |
| | LRKCVEVDINNADSNMTRKYRNCIAHLTVVRELKEYIGDIRTVDSYFSIYHYVMQRCITKREDDTKQ |
| | EEKIKYEDDLLKNHGYTKDFVKALNSPFGYNIPRFKNLSIEQLFDRNEYLTEK |
| OLVV01.1 | VEINTSNPTHRSGESSPVRGDMLGLKSELEKRFFGKTFDDNIHIQLIYNILDIEKILAVYVTNIVYALNN |
| SEQ ID NO: | MLGVKGSESHDDFIGYLSTNNIYDVFIDPDNSSLSDDKKANVRKSLSKFNVLLKTKRLGYFGLEEPK |
| 5000 | TKDNRVSEAYKKRVYHMLAIVGQIRQCVFHDKSGAKRFDLYSFINNIDPEYRDTLDYLVEERLKSIN |
| | KDFIQGNKVNISLLIDMMKGYEADDIIRLYYDFIVLKSQKNLGFSIKKLREKMLEEYGFRFKDKQYDS |
| | VRSKMYKLMDFLLFCNYYRNDVVAGEALVRKLRFSMTDDEKEGIYADEAAKLWGKFRNDFENIAD |
| | HMNGDVTKELGKADMDFDEKILDSEKKNASDLLYFSKMIYMLTYFLDGKEINDLLTTLISKFDNIKEF |
| | LKIMKSSAVDVECELTAGYKLFNDSQRITNELFIVKNIASMRKPAASAKLTMFRDALTILGIDDNITD |
| | DRISEILKLKEKGKGIHGLRNFITNNVIESSRFVYLIKYANAQKIREVAKNEKVVMFVLGGIPDTQIER |
| | YYKSCVEFPDMNSSLEAKRSELARMIKNISFDDFKNVKQQAKGRENVAKERAKAVIGLYLTVMYLL |
| | VKNLVNVNARYVIAIHCLERDFGLYKEIIPELASKNLKNDYRILSQTLCELCDDRDESPNLFLKKNKR |
| | LRKCVEVDINNADSSMTRKYRNCIAHLTVVRELKEYIGDIRTVDSYFSIYHYVMQRCITKRENDTKQ |
| | EEKIKYEDDLLKNHGYTKDFVKALNSPFGYNIPRFKNLSIEQLFDRNEYLTEK |
| OWZP01.1 | VEINTSNPTHRSGESSPVRGDMLGLKSELEKRFFGKTFDDNIHIQLIYNILDIEKILAVYVTNIVYALNN |
| SEQ ID NO: | MLGVKGSESHDDFIGYLSTNNTYDVFIDPDNSSLSDDKKENIRKSLSKFNALLKTKRLGYFGLEEPKT |
| 5001 | KDTRASEAYKKRVYHMLAIVGQIRQCVFHDKSGAKRFDLYSFINNIDPEYRDTLDYLVEERLKSINK |
| | DFIQGNKVNISLLIDMMKGYEADDIIRLYYDFIVLKSQKNLGFSIKKLREKMLEEYGFRFKDKQYDSV |
| | RSKMYKLMDFLLFCNYYRNDVVAGEALVRKLRFSMTDDEKEGIYADEAAKLWGKFRNDFENIADH |
| | MNGDVTKELGKADMDFDEKILDSEKKNASDLLYFSKMIYMLTYFLDGKEINDLLTTLISKFDNIKEFL |
| | KIMKSSAVNVECELTAGYKLFNDSQRITNELFIVKNIASMRKPAASAKLTMFRDALTILGIDDKITDD |
| | RISEILKLKEKGKGIHGLRNFITNNVTESSRFVYLIKYANAQKIREVAKNEKWMFVLGGIPDTQIERY |
| | YKSCVEFPDMNSSLEAKRSELARMIKNIRFDDFKNVKQQAKGRENVAKERAKAVIGLYLTVMYLLV |
| | KNLVNVNARYVIAIHCLERDFGLYKEIIPELASKNLKNDYRILSQTLCELCDDRDESPNLFLKKNRRL |
| | RKCVEVDINNADSSMTRKYRNCIAHITVVRELKEYIGDIRTVDSYFSIYHYVMQRCITKREDDTKQEE |
| | KIKYEDDLLKNHGYTKDFVKALNSPFGYNIPRFKNLSIEQLFDRNEYLTEK |
| USYS01.1 | VEINTSNPTHRSGESSPVRGDMLGLKSELEKRFFGKTFDDNIHIQLIYNILDIEKILAVYVTNIVYALNN |
| SEQ ID NO: | MLGVKGSESHDDFIGYLSTNNTYDVFIDPDNSSLSDDKKANVRKSLSKFNVLLKTKRLGYFGLEEPK |
| 5002 | TKDNRVSEAYKKRVYHMLAIVGQIRQCVFHDKSGAKRFDLYSFINNIDPEYRDTLDYLVEERLKSIN |
| | KDFIQGNKVNISLLIDMMKGYEADDIIRLYYDFIVLKSQKNLGFSIKKLREKMLEEYGFRFKDKQYDS |
| | VRSKMYKLMDFLLFCNYYRNDIAAGEALVRKLRFSMTDDEKEGLYADEAAKLWGKFRNDFENIAD |
| | HMNGDVTKELGKADMDFDEKILDSEKKNASDLLYFSKMIYMLTYFLDGKEINDLLTTLISKFDNIKEF |
| | LKIMKSSAVNVECELTAGYKLFNDSQRITNELFIVKNIASMRKPAASAKLTMFRDALTILGIDDNITD |
| | DRISEILKLKEKGKGIHGLRNFITNNVIESSRFVYLIKYANAQKIREVAENEKWMFVLGGIPDTQIER |
| | YYKSCVEVPDMNSSLEAKRSELARMIKNISFDDFKNVKQQAKGRENVAKERAKAVIGLYLTVMYLL |
| | VKNLVNVNARYVIAIHCLERDFGLYKEIIPELASKNLKNDYRILSQTLCELCDERDKSPNLFLKKNER |
| | LRKCVEVGINNADSIMTRKYRNCIAHLTVVRELKEYIGDIRTVDSYFSIYHYVMQRCITKREDDTKQE |
| | EKIKYEDDLLKNHGYTKDFVKALNSPFGYNIPRFKNLSIEQLFDRNEYLTEK |
| OVZZ01.1 | VEINTSNPTHRSGESSPVRGDMLGLKSELEKRFFGKTFDDNIHIQLIYNILDIEKILAVYVTNIVYALNN |
| SEQ ID NO: | MLGVKGSESHDDFIGYLSTNNTYDVFIDPDNSSLSDDKKANVRKSLSKFNVLLKTKRLGYFGLEEPK |
| 5003 | TKDNRVSEAYKKRVYHMLAIVGQIRQCVFHDKSGAKRFDLYSFINNIDPEYRDTLDYLVEERLKSIN |
| | KDFIQGNKVNISLLIDMMKGYEADDIIRLYYDFIVLKSQKNLGFSIKKLREKMLEEYGFRFKDKQYDS |
| | VRSKMYKLMDFLLFCNYYRNDIAAGEALVRKLRFSMTDDEKEGLYADEAAKLWGKFRNDFENIAD |
| | HMNGDVTKELGKADMDFDEKILDSEKKNASDLLYFSKMIYMLTYFLDGKEINDLLTTLISKFDNIKEF |
| | LKIMKSSAVNVECELTAGYKLFNDSQRITNELFIVKNIASMRKPAASAKLTMFRDALTILGIDDNITD |
| | DRISEILKLKEKGKGIHGLRNFITNNVIESSRFVYLIKYANAQKIREVAENEKVVMFVLGGIPDTQIER |
| | YYKSCVEVPDMNSSLEAKRSELARMIKNISFDDFKNVKQQAKGRENVAKERAKAVIGLYLTVMYLL |
| | VKNLVNVNARYVIAIHCLERDFGLYKEIIPELASKNLKNDYRILSQTLCELCDERDKSPNLFLKKNER |
| | LRKCVEVGINNADSIMTRKYRNCIAHLTVVRELKEYIGDIRTVDSYFSIYHYVMQRCITKREDDTKQE |
| | EKIKYEDDLLKNHGYTKDFVKALNSPFGYNIPRFKNLSIEQLFDRNEYLTEK |
| OLIW01.1 | VEINTSNPTHRSGESSPVRGDMLGLKSELEKRFFGKTFDDNIHIQLIYNILDIEKILAVYVTNIVYALNN |
| SEQ ID NO: | MLGVKGSESHDDFIGYLSTNNTYDVFIDPDNSSLSDDKKANVRKSLSKFNVLLKTKRLGYFGLEEPK |
| 5004 | TKDNRVSEAYKKRVYHMLAIVGQIRQCVFHDKSGAKRFDLYSFINNIDPEYRDTLDYLVEERLKSIN |
| | KDFIQGNKVNISLLIDMMKGYEADDIIRLYYDFIVLKSQKNLGFSIKKLREKMLEEYGFRFKDKQYDS |
| | VRSKMYKLMDFLLFCNYYRNDIAAGEALVRKLRFSMTDDEKEGLYADEAAKLWGKFRNDFENIAD |
| | HMNGDVTKELGKADMDFDEKILDSEKKNASDLLYFSKMIYMLTYFLDGKEINDLLTTLISKFDNIKEF |
| | LKIMKSSAVNVECELTAGYKLFNDSQRITNELFIVKNIASMRKPAASAKLTMFRDALTILGIDDNITD |
| | DRISEILKLKEKGKGIHGLRNFITNNVIESSRFVYLIKYANAQKIREVAENEKVVMFVLGGIPDTQIER |
| | YYKSCVEVPDMNSSLEAKRSELARMIKNISFDDFKNVKQQAKGRENVAKERAKAVIGLYLTVMYLL |
| | VKNLVNVNARYVIAIHCLERDFGLYKEIIPELASKNLKNDYRILSQTLCELCDERDKSPNLFLKKNER |
| | LRKCVEVGINNADSIMTRKYRNCIAHLTVVRELKEYIGDIRTVDSYFSIYHYVMQRCITKREDDTKQE |
| | EKIKYEDDLLKNHGYTKDFVKALNSPFGYNIPRFKNLSIEQLFDRNEYLTEK |
| OJMH01.1 | VEINTSNPTHRSGESSPVRGDMLGLKSELEKRFFGKTFDDNIHIQLIYNILDIEKILAVYVTNIVYALNN |
| SEQ ID NO: | MLGVKGSESHDDFIGYLSTNNTYDVFIDPDNSSLSDDKKANVRKSLSKFNVLLKTKRLGYFGLEEPK |
| 5005 | TKDNRVSEAYKKRVYHMLAIVGQIRQCVFHDKSGAKRFDLYSFINNIDPEYRDTLDYLVEERLKSIN |
| | KDFIQGNKVNISLLIDMMKGYEADDIIRLYYDFIVLKSQKNLGFSIKKLREKMLEEYGFRFKDKQYDS |
| | VRSKMYKLMDFLLFCNYYRNDIAAGEALVRKLRFSMTDDEKEGLYADEAAKLWGKFRNDFENIAD |
| | HMNGDVTKELGKADMDFDEKILDSEKKNASDLLYFSKMIYMLTYFLDGKEINDLLTTLISKFDNIKEF |
| | LKIMKSSAVNVECELTAGYKLFNDSQRITNELFIVKNIASMRKPAASAKLTMFRDALTILGIDDNITD |
| | DRISEILKLKEKGKGIHGLRNFITNNVIESSRFVYLIKYANAQKIREVAENEKVVMFVLGGIPDTQIER |
| | YYKSCVEVPDMNSSLEAKRSELARMIKNISFDDFKNVKQQAKGRENVAKERAKAVIGLYLTVMYLL |
| | VKNLVNVNARYVIAIHCLERDFGLYKEIIPELASKNLKNDYRILSQTLCELCDERDKSPNLFLKKNER |
| | LRKCVEVGINNADSIMTRKYRNCIAHLTVVRELKEYIGDIRTVDSYFSIYHYVMQRCITKREDDTKQE |
| | EKIKYEDDLLKNHGYTKDFVKALNSPFGYNIPRFKNLSIEQLFDRNEYLTEK |
| OVFR01.1 | VEINTSNPTHRSGESSPVRGDMLGLKSELEKRFFGKTFDDNIHIQLIYNILDIEKILAVYVTNIVYALNN |
| SEQ ID NO: | MLGVKGSESHDDFIGYLSTNNTYDVFIDPDNSSLSDDKKANVRKSLSKFNVLLKTKRLGYFGLEEPK |
| 5006 | TKDNRVSEAYKKRVYHMLAIVGQIRQCVFHDKSGAKRFDLYSFINNIDPEYRDTLDYLVEERLKSIN |
| | KDFIQGNKVNISLLIDMMKGYEADDIIRLYYDFIVLKSQKNLGFSIKKLREKMLEEYGFRFKDKQYDS |
| | VRSKMYKLMDFLLFCNYYRNDIAAGEALVRKLRFSMTDDEKEGLYADEAAKLWGKFRNDFENIAD |
| | HMNGDVTKELGKADMDFDEKILDSEKKNASDLLYFSKMIYMLTYFLDGKEINDLLTTLISKFDNIKEF |
| | LKIMKSSAVNVECELTAGYKLFNDSQRITNELFIVKNIASMRKPAASAKLTMFRDALTILGIDDNITD |
| | DRISEILKLKEKGKGIHGLRNFITNNVIESSRFVYLIKYANAQKIREVAENEKVVMFVLGGIPDTQIER |
| | YYKSCVEVPDMNSSLEAKRSELARMIKNISFDDFKNVKQQAKGRENVAKERAKAVIGLYLTVMYLL |
| | VKNLVNVNARYVIAIHCLERDFGLYKEIIPELASKNLKNDYRILSQTLCELCDERDKSPNLFLKKNER |
| | LRKCVEVGINNADSIMTRKYRNCIAHLTVVRELKEYIGDIRTVDSYFSIYHYVMQRCITKREDDTKQE |
| | EKIKYEDDLLKNHGYTKDFVKALNSPFGYNIPRFKNLSIEQLFDRNEYLTEK |
| OOBT01.1 | VEINTSNPTHRSGESSPVRGDMLGLKSELEKRFFGKTFDDNIHIQLIYNILDIEKILAVYVTNIVYALNN |
| SEQ ID NO: | MLGVKGSESHDDFIGYLSTNNTYDVFIDPDNSSLSDDKKANVRKSLSKFNVLLKTKRLGYFGLEEPK |
| 5007 | TKDNRVSEAYKKRVYHMLAIVGQIRQCVFHDKSGAKRFDLYSFINNIDPEYRDTLDYLVEERLKSIN |
| | KDFIQGNKVNISLLIDMMKGYEADDIIRLYYDFIVLKSQKNLGFSIKKLREKMLEEYGFRFKDKQYDS |
| | VRSKMYKLMDFLLFCNYYRNDIAAGEALVRKLRFSMTDDEKEGLYADEAAKLWGKFRNDFENIAD |
| | HMNGDVTKELGKADMDFDEKILDSEKKNASDLLYFSKMIYMLTYFLDGKEINDLLTTLISKFDNIKEF |
| | LKIMKSSAVNVECELTAGYKLFNDSQRITNELFIVKNIASMRKPAASAKLTMFRDALTILGIDDNITD |
| | DRISEILKLKEKGKGIHGLRNFITNNVIESSRFVYLIKYANAQKIREVAENEKWMFVLGGIPDTQIER |
| | YYKSCVEVPDMNSSLEAKRSELARMIKNISFDDFKNVKQQAKGRENVAKERAKAVIGLYLTVMYLL |
| | VKNLVNVNARYVIAIHCLERDFGLYKEIIPELASKNLKNDYRILSQTLCELCDERDKSPNLFLKKNER |
| | LRKCVEVGINNADSIMTRKYRNCIAHLTVVRELKEYIGDIRTVDSYFSIYHYVMQRCITKREDDTKQE |
| | EKIKYEDDLLKNHGYTKDFVKALNSPFGYNIPRFKNLSIEQLFDRNEYLTEK |
| OZPH01.1 | VEINTSNPTHRSGESSPVRGDMLGLKSELEKRFFGKTFDDNIHIQLIYNILDIEKILAVYVTNIVYALNN |
| SEQ ID NO: | MLGVKGSESHDDFIGYLSTNNTYDVFIDPDNSSLSDDKKANVRKSLSKFNVLLKTKRLGYFGLEEPK |
| 5008 | TKDNRVSEAYKKRVYHMLAIVGQIRQCVFHDKSGAKRFDLYSFINNIDPEYRDTLDYLVEERLKSIN |
| | KDFIQGNKVNISLLIDMMKGYEADDIIRLYYDFIVLKSQKNLGFSIKKLREKMLEEYGFRFKDKQYDS |
| | VRSKMYKLMDFLLFCNYYRNDIAAGEALVRKLRFSMTDDEKEGLYADEAAKLWGKFRNDFENIAD |
| | HMNGDVTKELGKADMDFDEKILDSEKKNASDLLYFSKMIYMLTYFLDGKEINDLLTTLISKFDNIKEF |
| | LKIMKSSAVNVECELTAGYKLFNDSQRITNELFIVKNIASMRKPAASAKLTMFRDALTILGIDDKITD |
| | DRISEILKLKEKGKGIHGLRNFITNNVTESSRFVYLIKYANAQKIRKVAENEKWMFVLGGIPDTQIER |
| | YYKSCVEFPDMNSSLEVKRSELARMIKNISFDDFKNVKQQAKGRENVAKERAKAVIGLYLTVMYLL |
| | VKNLVNVNARYVIAIHCLERDFGLYKEIIPELASKNLKNDYRILSQTLCELCDKSPNLFLKKNERLRK |
| | CVEVDINNADSSMTRKYRNCIAHLTVVRELKEYIGDIRTVDSYFSIYHYVMQRCITKREDDKKQEEKI |
| | KFEDDLLKNHGYTKDFVKALNSPFGYNIPRFKNLSIEQLFDRNEYLTEK |
| OGPN01.1 | VEINTSNPTHRSGESSPVRGDMLGLKSELEKRFFGKTFDDNIHIQLIYNILDIEKILAVYVTNIVYALNN |
| SEQ ID NO: | MLGVKGSESHDDFIGYLSTNNTYDVFIDPDNSSLSDDKKANVRKSLSKFNVLLKTKRLGYFGLEEPK |
| 5009 | TKDNRVSEAYKKRVYHMLAIVGQIRQCVFHDKSGAKRFDLYSFINNIDPEYRDTLDYLVEERLKSIN |
| | KDFIQGNKVNISLLIDMMKGYEADDIIRLYYDFIVLKSQKNLGFSIKKLREKMLEEYGFRFKDKQYDS |
| | VRSKMYKLMDFLLFCNYYRNDIAAGEALVRKLRFSMTDDEKEGLYADEAAKLWGKFRNDFENIAD |
| | HMNGDVTKELGKADMDFDEKILDSEKKNASDLLYFSKMIYMLTYFLDGKEINDLLTTLISKFDNIKEF |
| | LKIMKSSAVNVECELTAGYKLFNDSQRITNELFIVKNIASMRKPAASAKLTMFRDALTILGIDDKITD |
| | DRISEILKLKEKGKGIHGLRNFITNNVIESSRFVYLIKYANAQKIRKVAENEKVVMFVLGGIPDTQIER |
| | YYKSCVEFPDMNSSLEVKRSELARMIKNISFDDFKNVKQQAKGRENVAKERAKAVIGLYLTVMYLL |
| | VKNLVNVNARYVIAIHCLERDFGLYKEIIPELASKNLKNDYRILSQTLCELCDKSPNLFLKKNERLRK |
| | CVEVDINNADSSMTRKYRNCIAHLTVVRELKEYIGDIRTVDSYFSIYHYVMQRCITKREDDKKQEEKI |
| | KFEDDLLKNHGYTKDFVKALNSPFGYNIPRFKNLSIEQLFDRNEYLTEK |
| OLXN01.1 | VEINTSNPTHRSGESSPVRGDMLGLKSELEKRFFGKTFDDNIHIQLIYNILDIEKILAVYVTNIVYALNN |
| SEQ ID NO: | MLGVKGSESHDDFIGYLSTNNTYDVFIDPDNSSLSDDKKANVRKSLSKFNVLLKTKRLGYFGLEEPK |
| 5010 | TKDNRVSEAYKKRVYHMLAIVGQIRQCVFHDKSGAKRFDLYSFINNIDPEYRDTLDYLVEERLKSIN |
| | KDFIQGNKVNISLLIDMMKGYEADDIIRLYYDFIVLKSQKNLGFSIKKLREKMLEEYGFRFKDKQYDS |
| | VRSKMYKLMDFLLFCNYYRNDIAAGEALVRKLRFSMTDDEKEGLYADEAAKLWGKFRNDFENIAD |
| | HMNGDVTKELGKADMDFDEKILDSEKKNASDLLYFSKMIYMLTYFLDGKEINDLLTTLISKFDNIKEF |
| | LKIMKSSAVNVECELTAGYKLFNDSQRITNELFIVKNIASMRKPAASAKLTMFRDALTILGIDDKITD |
| | DRISEILKLKEKGKGIHGLRNFITNNVIESSRFVYLIKYANAQKIRKVAENEKVVMFVLGGIPDTQIER |
| | YYKSCVEFPDMNSSLEVKRSELARMIKNISFDDFKNVKQQAKGRENVAKERAKAVIGLYLTVMYLL |
| | VKNLVNVNARYVIAIHCLERDFGLYKEIIPELASKNLKNDYRILSQTLCELCDKSPNLFLKKNERLRK |
| | CVEVDINNADSSMTRKYRNCIAHLTVVRELKEYIGDIRTVDSYFSIYHYVMQRCITKREDDKKQEEKI |
| | KFEDDLLKNHGYTKDFVKALNSPFGYNIPRFKNLSIEQLFDRNEYLTEK |
| OLWT01.1 | VEINTSNPTHRSGESSPVRGDMLGLKSELEKRFFGKTFDDNIHIQLIYNILDIEKILAVYVTNIVYALNN |
| SEQ ID NO: | MLGVKGSESHDDFIGYLSTNNTYDVFIDPDNSSLSDDKKANVRKSLSKFNVLLKTKRLGYFGLEEPK |
| 5011 | TKDNRVSEAYKKRVYHMLAIVGQIRQCVFHDKSGAKRFDLYSFINNIDPEYRDTLDYLVEERLKSIN |
| | KDFIQGNKVNISLLIDMMKGYEADDIIRLYYDFIVLKSQKNLGFSIKKLREKMLEEYGFRFKDKQYDS |
| | VRSKMYKLMDFLLFCNYYRNDIAAGEALVRKLRFSMTDDEKEGLYADEAAKLWGKFRNDFENIAD |
| | HMNGDVTKELGKADMDFDEKILDSEKKNASDLLYFSKMIYMLTYFLDGKEINDLLTTLISKFDNIKEF |
| | LKIMKSSAVNVECELTAGYKLFNDSQRITNELFIVKNIASMRKPAASAKLTMFRDALTILGIDDKITD |
| | DRISEILKLKEKGKGIHGLRNFITNNVIESSRFVYLIKYANAQKIRKVAENEKVVMFVLGGIPDTQIER |
| | YYKSCVEFPDMNSSLEVKRSELARMIKNISFDDFKNVKQQAKGRENVAKERAKAVIGLYLTVMYLL |
| | VKNLVNVNARYVIAIHCLERDFGLYKEIIPELASKNLKNDYRILSQTLCELCDKSPNLFLKKNERLRK |
| | CVEVDINNADSSMTRKYRNCIAHLTVVRELKEYIGDIRTVDSYFSIYHYVMQRCITKREDDKKQEEKI |
| | KFEDDLLKNHGYTKDFVKALNSPFGYNIPRFKNLSIEQLFDRNEYLTEK |
| IMG_ | VEINTSNPTHRSGESSPVRGDMLGLKSELEKRFFGKTFDDNIHIQLIYNILDIEKILAVYVTNIVYALNN |
| 3300007501 | MLGVKGSESHDDFIGYLSTNNTYDVFIDPDNSSLSDDKKANVRKSLSKFNVLLKTKRLGYFGLEEPK |
| SEQ ID NO: | TKDNRVSEAYKKRVYHMLAIVGQIRQCVFHDKSGAKRFDLYSFINNIDPEYRDTLDYLVEERLKSIN |
| 5012 | KDFIQGNKVNISLLIDMMKGYEADDIIRLYYDFIVLKSQKNLGFSIKKLREKMLEEYGFRFKDKQYDS |
| | VRSKMYKLMDFLLFCNYYRNDIAAGEALVRKLRFSMTDDEKEGLYADEAAKLWGKFRNDFENIAD |
| | HMNGDVTKELGKADMDFDEKILDSEKKNASDLLYFSKMIYMLTYFLDGKEINDLLTTLISKFDNIKEF |
| | LKIMKSSAVNVECELTAGYKLFNDSQRITNELFIVKNIASMRKPAASAKLTMFRDALTILGIDDKITD |
| | DRISEILKLKEKGKGIHGLRNFITNNVIESSRFVYLIKYANAQKIRKVAENEKVVMFVLGGIPDTQIER |
| | YYKSCVEFPDMNSSLEVKRSELARMIKNISFDDFKNVKQQAKGRENVAKERAKAVIGLYLTVMYLL |
| | VKNLVNVNARYVIAIHCLERDFGLYKEIIPELASKNLKNDYRILSQTLCELCDKSPNLFLKKNERLRK |
| | CVEVDINNADSSMTRKYRNCIAHLTVVRELKEYIGDIRTVDSYFSIYHYVMQRCITKREDDKKQEEKI |
| | KFEDDLLKNHGYTKDFVKALNSPFGYNIPRFKNLSIEQLFDRNEYLTEK |
| OWFT01.1 | VEINTSNPTHRSGESSPVRGDMLGLKSELEKRFFGKTFDDNIHIQLIYNILDIEKILAVYVTNIVYALNN |
| SEQ ID NO: | MLGVKGSESHDDFIGYLSTNNTYDVFIDPDNSSLSDDKKANVRKSLSKFNVLLKTKRLGYFGLEEPK |
| 5013 | TKDNRVSEAYKKRVYHMLAIVGQIRQCVFHDKSGAKRFDLYSFINNIDPEYRDTLDYLVEERLKSIN |
| | KDFIQGNKVNISLLIDMMKGYEADDIIRLYYDFIVLKSQKNLGFSIKKLREKMLEEYGFRFKDKQYDS |
| | VRSKMYKLMDFLLFCNYYRNDIAAGEALVRKLRFSMTDDEKEGLYADEAAKLWGKFRNDFENIAD |
| | HMNGDVTKELGKADMDFDEKILDSEKKNASDLLYFSKMIYMLTYFLDGKEINDLLTTLISKFDNIKEF |
| | LKIMKSSAVNVECELTAGYKLFNDSQRITNELFIVKNIASMRKPAASAKLTMFRDALTILGIDDKITD |
| | DRISEILKLKEKGKGIHGLRNFITNNVIESSRFVYLIKYANAQKIRKVAENEKWMFVLGGIPDTQIER |
| | YYKSCVEFPDMNSSLEVKRSELARMIKNISFDDFKNVKQQAKGRENVAKERAKAVIGLYLTVMYLL |
| | VKNLVNVNARYVIAIHCLERDFGLYKEIIPELASKNLKNDYRILSQTLCELCDKSPNLFLKKNERLRK |
| | CVEVDINNADSSMTRKYRNCIAHLTVVRELKEYIGDIRTVDSYFSIYHYVMQRCITKREDDKKQEEKI |
| | KFEDDLLKNHGYTKDFVKALNSPFGYNIPRFKNLSIEQLFDRNEYLTEK |
| IMG_ | VEINTSNPTHRSGESSPVRGDMLGLKSELEKRFFGKTFDDNIHIQLIYNILDIEKILAVYVTNIVYALNN |
| 3300008260 | MLGVKGSESHDDFIGYLSTNNTYDVFIDPDNSSLSDDKKANVRKSLSKFNVLLKTKRLGYFGLEEPK |
| SEQ ID NO: | TKDNRVSEAYKKRVYHMLAIVGQIRQCVFHDKSGAKRFDLYSFINNIDPEYRDTLDYLVEERLKSIN |
| 5014 | KDFIQGNKVNISLLIDMMKGYEADDIIRLYYDFIVLKSQKNLGFSIKKLREKMLEEYGFRFKDKQYDS |
| | VRSKMYKLMDFLLFCNYYRNDIAAGEALVRKLRFSMTDDEKEGLYADEAAKLWGKFRNDFENIAD |
| | HMNGDVTKELGKADMDFDEKILDSEKKNASDLLYFSKMIYMLTYFLDGKEINDLLTTLISKFDNIKEF |
| | LKIMKSSAVNVECELTAGYKLFNDSQRITNELFIVKNIASMRKPAASAKLTMFRDALTILGIDDKITD |
| | DRISEILKLKEKGKGIHGLRNFITNNVIESSRFVYLIKYANAQKIRKVAENEKVVMFVLGGIPDTQIER |
| | YYKSCVEFPDMNSSLEVKRSELARMIKNISFDDFKNVKQQAKGRENVAKERAKAVIGLYLTVMYLL |
| | VKNLVNVNARYVIAIHCLERDFGLYKEIIPELASKNLKNDYRILSQTLCELCDKSPNLFLKKNERLRK |
| | CVEVDINNADSSMTRKYRNCIAHLTVVRELKEYIGDIRTVDSYFSIYHYVMQRCITKREDDKKQEEKI |
| | KFEDDLLKNHGYTKDFVKALNSPFGYNIPRFKNLSIEQLFDRNEYLTEK |
| IMG_ | VEINTSNPTHRSGESSPVRGDMLGLKSELEKRFFGKTFDDNIHIQLIYNILDIEKILAVYVTNIVYALNN |
| 3300007717 | MLGVKGSESHDDFIGYLSTNNTYDVFIDPDNSSLSDDKKANVRKSLSKFNVLLKTKRLGYFGLEEPK |
| SEQ ID NO: | TKDNRVSEAYKKRVYHMLAIVGQIRQCVFHDKSGAKRFDLYSFINNIDPEYRDTLDYLVEERLKSIN |
| 5015 | KDFIQGNKVNISLLIDMMKGYEADDIIRLYYDFIVLKSQKNLGFSIKKLREKMLEEYGFRFKDKQYDS |
| | VRSKMYKLMDFLLFCNYYRNDIAAGEALVRKLRFSMTDDEKEGLYADEAAKLWGKFRNDFENIAD |
| | HMNGDVTKELGKADMDFDEKILDSEKKNASDLLYFSKMIYMLTYFLDGKEINDLLTTLISKFDNIKEF |
| | LKIMKSSAVNVECELTAGYKLFNDSQRITNELFIVKNIASMRKPAASAKLTMFRDALTILGIDDKITD |
| | DRISEILKLKEKGKGIHGLRNFITNNVIESSRFVYLIKYANAQKIRKVAENEKVVMFVLGGIPDTQIER |
| | YYKSCVEFPDMNSSLEVKRSELARMIKNISFDDFKNVKQQAKGRENVAKERAKAVIGLYLTVMYLL |
| | VKNLVNVNARYVIAIHCLERDFGLYKEIIPELASKNLKNDYRILSQTLCELCDKSPNLFLKKNERLRK |
| | CVEVDINNADSSMTRKYRNCIAHLTVVRELKEYIGDIRTVDSYFSIYHYVMQRCITKREDDKKQEEKI |
| | KFEDDLLKNHGYTKDFVKALNSPFGYNIPRFKNLSIEQLFDRNEYLTEK |
| OYAL01.1 | VEINTSNPTHRSGESSPVRGDMLGLKSELEKRFFGKTFDDNIHIQLIYNILDIEKILAVYVTNIVYALNN |
| SEQ ID NO: | MLGVKGSESHDDFIGYLSTNNTYDVFIDPDNSSLSDDKKANVRKSLSKFNVLLKTKRLGYFGLEEPK |
| 5016 | TKDNRVSEAYKKRVYHMLAIVGQIRQCVFHDKSGAKRFDLYSFINNIDPEYRDTLDYLVEERLKSIN |
| | KDFIQGNKVNISLLIDMMKGYEADDIIRLYYDFIVLKSQKNLGFSIKKLREKMLEEYGFRFKDKQYDS |
| | VRSKMYKLMDFLLFCNYYRNDIAAGEALVRKLRFSMTDDEKEGLYADEAAKLWGKFRNDFENIAD |
| | HMNGDVTKELGKADMDFDEKILDSEKKNASDLLYFSKMIYMLTYFLDGKEINDLLTTLISKFDNIKEF |
| | LKIMKSSAVNVECELTAGYKLFNDSQRITNELFIVKNIASMRKPAASAKLTMFRDALTILGIDDKITD |
| | DRISEILKLKEKGKGIHGLRNFITNNVIESSRFVYLIKYANAQKIRKVAENEKVVMFVLGGIPDTQIER |
| | YYKSCVEFPDMNSSLEVKRSELARMIKNISFDDFKNVKQQAKGRENVAKERAKAVIGLYLTVMYLL |
| | VKNLVNVNARYVIAIHCLERDFGLYKEIIPELASKNLKNDYRILSQTLCELCDKSPNLFLKKNERLRK |
| | CVEVDINNADSSMTRKYRNCIAHLTVVRELKEYIGDIRTVDSYFSIYHYVMQRCITKREDDKKQEEKI |
| | KFEDDLLKNHGYTKDFVKALNSPFGYNIPRFKNLSIEQLFDRNEYLTEK |
| UBIW01.1 | VEINTSNPTHRSGESSPVRGDMLGLKSELEKRFFGKTFDDNIHIQLIYNILDIEKILAVYVTNIVYALNN |
| SEQ ID NO: | MLGVKGSESHDDFIGYLSTNNTYDVFIDPDNSSLSDDKKANVRKSLSKFNVLLKTKRLGYFGLEEPK |
| 5017 | TKDNRVSEAYKKRVYHMLAIVGQIRQCVFHDKSGAKRFDLYSFINNIDPEYRDTLDYLVEERLKSIN |
| | KDFIQGNKVNISLLIDMMKGYEADDIIRLYYDFIVLKSQKNLGFSIKKLREKMLEEYGFRFKDKQYDS |
| | VRSKMYKLMDFLLFCNYYRNDIAAGEALVRKLRFSMTDDEKEGLYADEAAKLWGKFRNDFENIAD |
| | HMNGDVTKELGKADMDFDEKILDSEKKNASDLLYFSKMIYMLTYFLDGKEINDLLTTLISKFDNIKEF |
| | LKIMKSSAVNVECELTAGYKLFNDSQRITNELFIVKNIASMRKPAASAKLTMFRDALTILGIDDKITD |
| | DRISEILKLKEKGKGIHGLRNFITNNVIESSRFVYLIKYANAQKIRKVAENEKVVMFVLGGIPDTQIER |
| | YYKSCVEFPDMNSSLEVKRSELARMIKNISFDDFKNVKQQAKGRENVAKERAKAVIGLYLTVMYLL |
| | VKNLVNVNARYVIAIHCLERDFGLYKEIIPELASKNLKNDYRILSQTLCELCDKSPNLFLKKNERLRK |
| | CVEVDINNADSSMTRKYRNCIAHLTVVRELKEYIGDIRTVDSYFSIYHYVMQRCITKREDDKKQEEKI |
| | KFEDDLLKNHGYTKDFVKALNSPFGYNIPRFKNLSIEQLFDRNEYLTEK |
| OYBU01.1 | VEINTSNPTHRSGESSPVRGDMLGLKSELEKRFFGKTFDDNIHIQLIYNILDIEKILAVYVTNIVYALNN |
| SEQ ID NO: | MLGVKGSESHDDFIGYLSTNNTYDVFIDPDNSSLSDDKKANVRKSLSKFNVLLKTKRLGYFGLEEPK |
| 5018 | TKDNRVSEAYKKRVYHMLAIVGQIRQCVFHDKSGAKRFDLYSFINNIDPEYRDTLDYLVEERLKSIN |
| | KDFIQGNKVNISLLIDMMKGYEADDIIRLYYDFIVLKSQKNLGFSIKKLREKMLEEYGFRFKDKQYDS |
| | VRSKMYKLMDFLLFCNYYRNDIAAGEALVRKLRFSMTDDEKEGLYADEAAKLWGKFRNDFENIAD |
| | HMNGDVTKELGKADMDFDEKILDSEKKNASDLLYFSKMIYMLTYFLDGKEINDLLTTLISKFDNIKEF |
| | LKIMKSSAVNVECELTAGYKLFNDSQRITNELFIVKNIASMRKPAASAKLTMFRDALTILGIDDKITD |
| | DRISEILKLKEKGKGIHGLRNFITNNVIESSRFVYLIKYANAQKIRKVAENEKVVMFVLGGIPDTQIER |
| | YYKSCVEFPDMNSSLEVKRSELARMIKNISFDDFKNVKQQAKGRENVAKERAKAVIGLYLTVMYLL |
| | VKNLVNVNARYVIAIHCLERDFGLYKEIIPELASKNLKNDYRILSQTLCELCDKSPNLFLKKNERLRK |
| | CVEVDINNADSSMTRKYRNCIAHLTVVRELKEYIGDIRTVDSYFSIYHYVMQRCITKREDDKKQEEKI |
| | KFEDDLLKNHGYTKDFVKALNSPFGYNIPRFKNLSIEQLFDRNEYLTEK |
| OZLE01.1 | VEINTSNPTHRSGESSPVRGDMLGLKSELEKRFFGKTFDDNIHIQLIYNILDIEKILAVYVTNIVYALNN |
| SEQ ID NO: | MLGVKGSESHDDFIGYLSTNNTYDVFIDPDNSSLSDDKKANVRKSLSKFNVLLKTKRLGYFGLEEPK |
| 5019 | TKDNRVSEAYKKRVYHMLAIVGQIRQCVFHDKSGAKRFDLYSFINNIDPEYRDTLDYLVEERLKSIN |
| | KDFIQGNKVNISLLIDMMKGYEADDIIRLYYDFIVLKSQKNLGFSIKKLREKMLEEYGFRFKDKQYDS |
| | VRSKMYKLMDFLLFCNYYRNDIAAGEALVRKLRFSMTDDEKEGLYADEAAKLWGKFRNDFENIAD |
| | HMNGDVTKELGKADMDFDEKILDSEKKNASDLLYFSKMIYMLTYFLDGKEINDLLTTLISKFDNIKEF |
| | LKIMKSSAVNVECELTAGYKLFNDSQRITNELFIVKNIASMRKPAASAKLTMFRDALTILGIDDKITD |
| | DRISEILKLKEKGKGIHGLRNFITNNVTESSRFVYLIKYANAQKIRKVAENEKWMFVLGGIPDTQIER |
| | YYKSCVEFPDMNSSLEVKRSELARMIKNISFDDFKNVKQQAKGRENVAKERAKAVIGLYLTVMYLL |
| | VKNLVNVNARYVIAIHCLERDFGLYKEIIPELASKNLKNDYRILSQTLCELCDKSPNLFLKKNERLRK |
| | CVEVDINNADSSMTRKYRNCIAHLTVVRELKEYIGDIRTVDSYFSIYHYVMQRCITKREDDKKQEEKI |
| | KFEDDLLKNHGYTKDFVKALNSPFGYNIPRFKNLSIEQLFDRNEYLTEK |
| OYDM01.1 | VEINTSNPTHRSGESSPVRGDMLGLKSELEKRFFGKTFDDNIHIQLIYNILDIEKILAVYVTNIVYALNN |
| SEQ ID NO: | MLGVKGSESHDDFIGYLSTNNTYDVFIDPDNSSLSDDKKANVRKSLSKFNVLLKTKRLGYFGLEEPK |
| 5020 | TKDNRVSEAYKKRVYHMLAIVGQIRQCVFHDKSGAKRFDLYSFINNIDPEYRDTLDYLVEERLKSIN |
| | KDFIQGNKVNISLLIDMMKGYEADDIIRLYYDFIVLKSQKNLGFSIKKLREKMLEEYGFRFKDKQYDS |
| | VRSKMYKLMDFLLFCNYYRNDIAAGEALVRKLRFSMTDDEKEGLYADEAAKLWGKFRNDFENIAD |
| | HMNGDVTKELGKADMDFDEKILDSEKKNASDLLYFSKMIYMLTYFLDGKEINDLLTTLISKFDNIKEF |
| | LKIMKSSAVNVECELTAGYKLFNDSQRITNELFIVKNIASMRKPAASAKLTMFRDALTILGIDDKITD |
| | DRISEILKLKEKGKGIHGLRNFITNNVIESSRFVYLIKYANAQKIRKVAENEKVVMFVLGGIPDTQIER |
| | YYKSCVEFPDMNSSLEVKRSELARMIKNISFDDFKNVKQQAKGRENVAKERAKAVIGLYLTVMYLL |
| | VKNLVNVNARYVIAIHCLERDFGLYKEIIPELASKNLKNDYRILSQTLCELCDKSPNLFLKKNERLRK |
| | CVEVDINNADSSMTRKYRNCIAHLTVVRELKEYIGDIRTVDSYFSIYHYVMQRCITKREDDKKQEEKI |
| | KFEDDLLKNHGYTKDFVKALNSPFGYNIPRFKNLSIEQLFDRNEYLTEK |
| UAYF01.1 | VEINTSNPTHRSGESSPVRGDMLGLKSELEKRFFGKTFDDNIHIQLIYNILDIEKILAVYVTNIVYALNN |
| SEQ ID NO: | MLGVKGSESHDDFIGYLSTNNTYDVFIDPDNSSLSDDKKANVRKSLSKFNVLLKTKRLGYFGLEEPK |
| 5021 | TKDNRVSEAYKKRVYHMLAIVGQIRQCVFHDKSGAKRFDLYSFINNIDPEYRDTLDYLVEERLKSIN |
| | KDFIQGNKVNISLLIDMMKGYEADDIIRLYYDFIVLKSQKNLGFSIKKLREKMLEEYGFRFKDKQYDS |
| | VRSKMYKLMDFLLFCNYYRNDIAAGEALVRKLRFSMTDDEKEGLYADEAAKLWGKFRNDFENIAD |
| | HMNGDVTKELGKADMDFDEKILDSEKKNASDLLYFSKMIYMLTYFLDGKEINDLLTTLISKFDNIKEF |
| | LKIMKSSAVNVECELTAGYKLFNDSQRITNELFIVKNIASMRKPAASAKLTMFRDALTILGIDDKITD |
| | DRISEILKLKEKGKGIHGLRNFITNNVIESSRFVYLIKYANAQKIRKVAENEKVVMFVLGGIPDTQIER |
| | YYKSCVEFPDMNSSLEVKRSELARMIKNISFDDFKNVKQQAKGRENVAKERAKAVIGLYLTVMYLL |
| | VKNLVNVNARYVIAIHCLERDFGLYKEIIPELASKNLKNDYRILSQTLCELCDKSPNLFLKKNERLRK |
| | CVEVDINNADSSMTRKYRNCIAHLTVVRELKEYIGDIRTVDSYFSIYHYVMQRCITKREDDKKQEEKI |
| | KFEDDLLKNHGYTKDFVKALNSPFGYNIPRFKNLSIEQLFDRNEYLTEK |
| UXNO01.1 | VEINTSNPTHRSGESSPVRGDMLGLKSELEKRFFGKTFDDNIHIQLIYNILDIEKILAVYVTNIVYALNN |
| SEQ ID NO: | MLGVKGSESHDDFIGYLSTNNTYDVFIDPDNSSLSDDKKANVRKSLSKFNVLLKTKRLGYFGLEEPK |
| 5022 | TKDNRVSEAYKKRVYHMLAIVGQIRQCVFHDKSGAKRFDLYSFINNIDPEYRDTLDYLVEERLKSIN |
| | KDFIQGNKVNISLLIDMMKGYEADDIIRLYYDFIVLKSQKNLGFSIKKLREKMLEEYGFRFKDKQYDS |
| | VRSKMYKLMDFLLFCNYYRNDIAAGEALVRKLRFSMTDDEKEGLYADEAAKLWGKFRNDFENIAD |
| | HMNGDVTKELGKADMDFDEKILDSEKKNASDLLYFSKMIYMLTYFLDGKEINDLLTTLISKFDNIKEF |
| | LKIMKSSAVNVECELTAGYKLFNDSQRITNELFIVKNIASMRKPAASAKLTMFRDALTILGIDDKITD |
| | DRISEILKLKEKGKGIHGLRNFITNNVIESSRFVYLIKYANAQKIRKVAENEKVVMFVLGGIPDTQIER |
| | YYKSCVEFPDMNSSLEVKRSELARMIKNISFDDFKNVKQQAKGRENVAKERAKAVIGLYLTVMYLL |
| | VKNLVNVNARYVIAIHCLERDFGLYKEIIPELASKNLKNDYRILSQTLCELCDKSPNLFLKKNERLRK |
| | CVEVDINNADSSMTRKYRNCIAHLTVVRELKEYIGDIRTVDSYFSIYHYVMQRCITKREDDKKQEEKI |
| | KFEDDLLKNHGYTKDFVKALNSPFGYNIPRFKNLSIEQLFDRNEYLTEK |
| OPFT01.1 | VEINTSNPTHRSGESSPVRGDMLGLKSELEKRFFGKTFDDNIHIQLIYNILDIEKILAVYVTNIVYALNN |
| SEQ ID NO: | MLGVKGSESHDDFIGYLSTNNTYDVFIDPDNSSLSDDKKANVRKSLSKFNVLLKTKRLGYFGLEEPK |
| 5023 | TKDNRVSEAYKKRVYHMLAIVGQIRQCVFHDKSGAKRFDLYSFINNIDPEYRDTLDYLVEERLKSIN |
| | KDFIQGNKVNISLLIDMMKGYEADDIIRLYYDFIVLKSQKNLGFSIKKLREKMLEEYGFRFKDKQYDS |
| | VRSKMYKLMDFLLFCNYYRNDIAAGEALVRKLRFSMTDDEKEGLYADEAAKLWGKFRNDFENIAD |
| | HMNGDVTKELGKADMDFDEKILDSEKKNASDLLYFSKMIYMLTYFLDGKEINDLLTTLISKFDNIKEF |
| | LKIMKSSAVNVECELTAGYKLFNDSQRITNELFIVKNIASMRKPAASAKLTMFRDALTILGIDDKITD |
| | DRISEILKLKEKGKGIHGLRNFITNNVIESSRFVYLIKYANAQKIRKVAENEKVVMFVLGGIPDTQIER |
| | YYKSCVEFPDMNSSLEVKRSELARMIKNISFDDFKNVKQQAKGRENVAKERAKAVIGLYLTVMYLL |
| | VKNLVNVNARYVIAIHCLERDFGLYKEIIPELASKNLKNDYRILSQTLCELCDKSPNLFLKKNERLRK |
| | CVEVDINNADSSMTRKYRNCIAHLTVVRELKEYIGDIRTVDSYFSIYHYVMQRCITKREDDKKQEEKI |
| | KFEDDLLKNHGYTKDFVKALNSPFGYNIPRFKNLSIEQLFDRNEYLTEK |
| UAIT01.1 | VEINTSNPTHRSGESSPVRGDMLGLKSELEKRFFGKTFDDNIHIQLIYNILDIEKILAVYVTNIVYALNN |
| SEQ ID NO: | MLGVKGSESHDDFIGYLSTNNTYDVFIDPDNSSLSDDKKANVRKSLSKFNVLLKTKRLGYFGLEEPK |
| 5024 | TKDNRVSEAYKKRVYHMLAIVGQIRQCVFHDKSGAKRFDLYSFINNIDPEYRDTLDYLVEERLKSIN |
| | KDFIQGNKVNISLLIDMMKGYEADDIIRLYYDFIVLKSQKNLGFSIKKLREKMLEEYGFRFKDKQYDS |
| | VRSKMYKLMDFLLFCNYYRNDIAAGEALVRKLRFSMTDDEKEGLYADEAAKLWGKFRNDFENIAD |
| | HMNGDVTKELGKADMDFDEKILDSEKKNASDLLYFSKMIYMLTYFLDGKEINDLLTTLISKFDNIKEF |
| | LKIMKSSAVNVECELTAGYKLFNDSQRITNELFIVKNIASMRKPAASAKLTMFRDALTILGIDDKITD |
| | DRISEILKLKEKGKGIHGLRNFITNNVIESSRFVYLIKYANAQKIRKVAENEKWMFVLAGIPDTQIER |
| | YYKSCVEFPDMNSSLEVKRSELARMIKNISFDDDFKNVKQQAKGRENVAKERAKAVIGLYLTVMYLL |
| | VKNLVNVNARYVIAIHCLERDFGLYKEIIPELASKNLKNDYRILSQTLCELCDKSPNLFLKKNERLRK |
| | CVEVDINNADSSMTRKYRNCIAHLTVVRELKEYIGDIRTVDSYFSIYHYVMQRCITKREDDKKQEEKI |
| | KFEDDLLKNHGYTKDFVKALNSPFGYNIPRFKNLSIEQLFDRNEYLTEK |
| OZBH01.1 | VEINTSNPTHRSGESSPVRGDMLGLKSELEKRFFGKTFDDNIHIQLIYNILDIEKILAVYVTNIVYALNN |
| SEQ ID NO: | MLGVKGSESHDDFIGYLSTNNTYDVFIDPDNSSLSDDKKANVRKSLSKFNVLLKTKRLGYFGLEEPK |
| 5025 | TKDNRVSEAYKKRVYHMLAIVGQIRQCVFHDKSGAKRFDLYSFINNIDPEYRDTLDYLVEERLKSIN |
| | KDFIQGNKVNISLLIDMMKGYEADDIIRLYYDFIVLKSQKNLGFSIKKLREKMLEEYGFRFKDKQYDS |
| | VRSKMYKLMDFLLFCNYYRNDIAAGEALVRKLRFSMTDDEKEGLYADEAAKLWGKFRNDFENIAD |
| | HMNGDVTKELGKADMDFDEKILDSEKKNASDLLYFSKMIYMLTYFLDGKEINDLLTTLISKFDNIKEF |
| | LKIMKSSAVNVECELTAGYKLFNDSQRITNELFIVKNIASMRKPAASAKLTMFRDALTILGIDDKITD |
| | DRISEILKLKEKGKGIHGLRNFITNNVIESSRFVYLIKYANAQKIRKVAENEKVVMFVLAGIPDTQIER |
| | YYKSCVEFPDMNSSLEVKRSELARMIKNISFDDFKNVKQQAKGRENVAKERAKAVIGLYLTVMYLL |
| | VKNLVNVNARYVIAIHCLERDFGLYKEIIPELASKNLKNDYRILSQTLCELCDKSPNLFLKKNERLRK |
| | CVEVDINNADSSMTRKYRNCIAHLTVVRELKEYIGDIRTVDSYFSIYHYVMQRCITKREDDKKQEEKI |
| | KFEDDLLKNHGYTKDFVKALNSPFGYNIPRFKNLSIEQLFDRNEYLTEK |
| UMGG01.1 | MMKGYEADDIIRLYYDFIVLKSQKNLGFSIKKLREKMLEEYGFRFKDKQYDSVRSKMYKLMDFLLF |
| SEQ ID NO: | CNYYRNDIAAGEALVRKLRFSMTDDEKEGLYADEAAKLWGKFRNDFENIADHMNGDVTKELGKAD |
| 5026 | MDFDEKILDSEKKNASDLLYFSKMIYMLTYFLDGKEINDLLTTLISKFDNIKEFLKIMKSSAVNVECE |
| | LTAGYKLFNDSQRITNELFIVKNIASMRKPAASAKLTMFRDALTILGIDDKITDDRISEILKLKEKGKGI |
| | HGLRNFITNNVTESSRFVYLIKYANAQKIRKVAENEKWMFVLGGIPDTQIERYYKSCVEFPDMNSSL |
| | EVKRSELARMIKNISFDDFKNVKQQAKGRENVAKERAKAVIGLYLTVMYLLVKNLVNVNARYVIAI |
| | HCLERDFGLYKEIIPELASKNLKNDYRILSQTLCELCDKSPNLFLKKNERLRKCVEVDINNADSSMTR |
| | KYRNCIAHLTVVRELKEYIGDIRTVDSYFSIYHYVMQRCITKREDDKKQEEKIKFEDDLLKNHGYTK |
| | DFVKALNSPFGYNIPRFKNLSIEQLFDRNEYLTEK |
| OZVN01.1 | MMKGYEADDIIRLYYDFIVLKSQKNLGFSIKKLREKMLEEYGFRFKDKQYDSVRSKMYKLMDFLLF |
| SEQ ID NO: | CNYYRNDIAAGEALVRKLRFSMTDDEKEGLYADEAAKLWGKFRNDFENIADHMNGDVTKELGKAD |
| 5027 | MDFDEKILDSEKKNASDLLYFSKMIYMLTYFLDGKEINDLLTTLISKFDNIKEFLKIMKSSAVNVECE |
| | LTAGYKLFNDSQRITNELFIVKNIASMRKPAASAKLTMFRDALTILGIDDKITDDRISEILKLKEKGKGI |
| | HGLRNFITNNVTESSRFVYLIKYANAQKIRKVAENEKWMFVLGGIPDTQIERYYKSCVEFPDMNSSL |
| | EVKRSELARMIKNISFDDFKNVKQQAKGRENVAKERAKAVIGLYLTVMYLLVKNLVNVNARYVIAI |
| | HCLERDFGLYKEIIPELASKNLKNDYRILSQTLCELCDKSPNLFLKKNERLRKCVEVDINNADSSMTR |
| | KYRNCIAHLTVVRELKEYIGDIRTVDSYFSIYHYVMQRCITKREDDKKQEEKIKFEDDLLKNHGYTK |
| | DFVKALNSPFGYNIPRFKNLSIEQLFDRNEYLTEK |
| ORTF01.1 | MMKGYEADDIIRLYYDFIVLKSQKNLGFSIKKLREKMLEEYGFRFKDKQYDSVRSKMYKLMDFLLF |
| SEQ ID NO: | CNYYRNDIAAGEALVRKLRFSMTDDEKEGLYADEAAKLWGKFRNDFENIADHMNGDVIKELGKAD |
| 5028 | MDFDEKILDSEKKNASDLLYFSKMIYMLTYFLDGKEINDLLTTLISKFDNIKEFLKIMKSSAVNVECE |
| | LTAGYKLFNDSQRITNELFIVKNIASMRKPAASAKLTMFRDALTILGIDDKITDDRISEILKLKEKGKGI |
| | HGLRNFITNNVTESSRFVYLIKYANAQKIRKVAENEKWMFVLGGIPDTQIERYYKSCVEFPDMNSSL |
| | EVKRSELARMIKNISFDDFKNVKQQAKGRENVAKERAKAVIGLYLTVMYLLVKNLVNVNARYVIAI |
| | HCLERDFGLYKEIIPELASKNLKNDYRILSQTLCELCDKSPNLFLKKNERLRKCVEVDINNADSSMTR |
| | KYRNCIAHLTVVRELKEYIGDIRTVDSYFSIYHYVMQRCITKREDDKKQEEKIKFEDDLLKNHGYTK |
| | DFVKALNSPFGYNIPRFKNLSIEQLFDRNEYLTEK |
| UAOK01.1 | MMKGYEADDIIRLYYDFIVLKSQKNLGFSIKKLREKMLEEYGFRFKDKQYDSVRSKMYKLMDFLLF |
| SEQ ID NO: | CNYYRNDIAAGEALVRKLRFSMTDDEKEGLYADEAAKLWGKFRNDFENIADHMNGDVTKELGKAD |
| 5029 | MDFDEKILDSEKKNASDLLYFSKMIYMLTYFLDGKEINDLLTTLISKFDNIKEFLKIMKSSAVNVECE |
| | LTAGYKLFNDSQRITNELFIVKNIASMRKPAASAKLTMFRDALTILGIDDKITDDRISEILKLKEKGKGI |
| | HGLRNFITNNVTESSRFVYLIKYANAQKIRKVAENEKWMFVLGGIPDTQIERYYKSCVEFPDMNSSL |
| | EVKRSELARMIKNISFDDFKNVKQQAKGRENVAKERAKAVIGLYLTVMYLLVKNLVNVNARYVIAI |
| | HCLERDFGLYKEIIPELASKNLKNDYRILSQTLCELCDKSPNLFLKKNERLRKCVEVDINNADSSMTR |
| | KYRNCIAHLTVVRELKEYIGDIRTVDSYFSIYHYVMQRCITKREDDKKQEEKIKFEDDLLKNHGYTK |
| | DFVKALNSPFGYNIPRFKNLSIEQLFDRNEYLTEK |
| UAOC01.1 | MMKGYEADDIIRLYYDFIVLKSQKNLGFSIKKLREKMLEEYGFRFKDKQYDSVRSKMYKLMDFLLF |
| SEQ ID NO: | CNYYRNDIAAGEALVRKLRFSMTDDEKEGLYADEAAKLWGKFRNDFENIADHMNGDVTKELGKAD |
| 5030 | MDFDEKILDSEKKNASDLLYFSKMIYMLTYFLDGKEINDLLTTLISKFDNIKEFLKIMKSSAVNVECE |
| | LTAGYKLFNDSQRITNELFIVKNIASMRKPAASAKLTMFRDALTILGIDDKITDDRISEILKLKEKGKGI |
| | HGLRNFITNNVTESSRFVYLIKYANAQKIRKVAENEKWMFVLGGIPDTQIERYYKSCVEFPDMNSSL |
| | EVKRSELARMIKNISFDDFKNVKQQAKGRENVAKERAKAVIGLYLTVMYLLVKNLVNVNARYVIAI |
| | HCLERDFGLYKEIIPELASKNLKNDYRILSQTLCELCDKSPNLFLKKNERLRKCVEVDINNADSSMTR |
| | KYRNCIAHLTVVRELKEYIGDIRTVDSYFSIYHYVMQRCITKREDDKKQEEKIKFEDDLLKNHGYTK |
| | DFVKALNSPFGYNIPRFKNLSIEQLFDRNEYLTEK |
| OZVA01.1 | MMKGYEADDIIRLYYDFIVLKSQKNLGFSIKKLREKMLEEYGFRFKDKQYDSVRSKMYKLMDFLLF |
| SEQ ID NO: | CNYYRNDIAAGEALVRKLRFSMTDDEKEGLYADEAAKLWGKFRNDFENIADHMNGDVTKELGKAD |
| 5031 | MDFDEKILDSEKKNASDLLYFSKMIYMLTYFLDGKEINDLLTTLISKFDNIKEFLKIMKSSAVNVECE |
| | LTAGYKLFNDSQRITNELFIVKNIASMRKPAASAKLTMFRDALTILGIDDKITDDRISEILKLKEKGKGI |
| | HGLRNFITNNVTESSRFVYLIKYANAQKIRKVAENEKVVMFVLGGIPDTQIERYYKSCVEFPDMNSSL |
| | EVKRSELARMIKNISFDDFKNVKQQAKGRENVAKERAKAVIGLYLTVMYLLVKNLVNVNARYVIAI |
| | HCLERDFGLYKEIIPELASKNLKNDYRILSQTLCELCDKSPNLFLKKNERLRKCVEVDINNADSSMTR |
| | KYRNCIAHLTVVRELKEYIGDIRTVDSYFSIYHYVMQRCITKREDDKKQEEKIKFEDDLLKNHGYTK |
| | DFVKALNSPFGYNIPRFKNLSIEQLFDRNEYLTEK |
| OZEB01.1_2 | MNGDVTKELGKADMDFDEKILDSEKKNASDLLYFSKMIYMLTYFLDGKEINDLLTTLISKFDNIKEFL |
| SEQ ID NO: | KIMKSSAVNVECELTAGYKLFNDSQRITNELFIVKNIASMRKPAASAKLTMFRDALTILGIDDKITDD |
| 5032 | RISEILKLKEKGKGIHGLRNFITNNVIESSRFVYLIKYANAQKIRKVAENEKVVMFVLGGIPDTQIERY |
| | YKSCVEFPDMNSSLEVKRSELARMIKNISFDDFKNVKQQAKGRENVAKERAKAVIGLYLTVMYLLV |
| | KNLVNVNARYVIAIHCLERDFGLYKEIIPELASKNLKNDYRILSQTLCELCDKSPNLFLKKNERLRKC |
| | VEVDINNADSSMTRKYRNCIAHLTVVRELKEYIGDIRTVDSYFSIYHYVMQRCITKREDDKKQEEKI |
| | KFEDDLLKNHGYTKDFVKALNSPFGYNIPRFKNLSIEQLFDRNEYLTEK |
| UPFF01.1 | MDFLLFCNYYRNDVIAGEALVRKLRFSMTDDEKEGIYADEAAKLWGKFRNDFENIADHMNGDVIK |
| SEQ ID NO: | ELGKADMDFDEKILDSEKKNASDLLYFSKMIYMLTYFLDGKEINDLLTTLISKFDNIKEFLKIMKSSA |
| 5033 | VNVECELTAGYKLFNDSQRITNELFIVKNIASMRKPAASAKLTMFRDALTILGIDDNITDDRISEILKL |
| | KEKGKGIHGLRNFITNNVIESSRFVYLIKYANAQKIRKVAENEKVVMFVLGGIPDTQIERYYKSCVEF |
| | PDMNSSLEAKRSELARMIKNIRFDDFKNVKQQAKGRENVAKERAKAVIGLYLTVMYLLVKNLVNV |
| | NARYVIAIHCLERDFGLYKEIIPELASKNLKNDYRILSQTLCELCDDRDESPNLFLKKNKRLRKCVEV |
| | DINNADSSMTRKYRNCIAHLTVVRELKEYIGDIRTVDSYFSIYHYVMQRCITKREDDKKQEEKIKYE |
| | DDLLKNHGYTKDFVKALNSPFGYNIPRFKNLSIEQLFDRNEYLTEK |
| OZAU01.1 | VLHFGVGIYADEAAKLWGKFRNDFENIADHMNGDVIKELGKADMDFDEKILDSEKKNASDLLYFSK |
| SEQ ID NO: | MIYMLTYFLDGKEINDLLTTLISKFDNIKEFLKIMKSSAVDVECELTAGYKLFNDSQRITNELFIVKNI |
| 5034 | ASMRKPAASAKLTMFRDALTILGIDDNITDDRISEILKLKEKGKGIHGLRNFITNNVIESSRFVYLIKYA |
| | NAQKIREVAKNEKVVMFVLGGIPDTQIERYYKSCVEFPDMNSSLEAKRSELARMIKNISFDDFKNVK |
| | QQAKGRENVAKERAKAVIGLYLTVMYLLVKNLVNVNARYVIAIHCLERDFGLYKEIIPELASKNLK |
| | NDYRILSQTLCELCDDRDESPNLFLKKNKRLRKCVEVDINNADSSMTRKYRNCIAHLTVVRELKEYI |
| | GDIRTVDSYFSIYHYVMQRCITKRENDTKQEEKIKYEDDLLKNHGYTKDFVKALNSPFGYNIPRFKN |
| | LSIEQLFDRNEYLTEK |
| UPRH01.1 | VEINTSNPTHRSGESSPVRGDMLGLKSELEKRFFGKTFDDNIHIQLIYNILDIEKILAVYVTNIVYALNN |
| SEQ ID NO: | MLGVKGSESHDDFIGYLSTNNTYDVFIDPDNSSLSDDKKANVRKSLSKFNVLLKTKRLGYFGLEEPK |
| 5035 | TKDTRVSQAYKKRVYHMLAIVGQIRQSVFHDKSSKLHEDLYSFIDIIDSEYRETLDYLVEERLKSINK |
| | DFIEGNKVNISLLIDMMKGYEADDIIRLYYDFIVLKSQKNLGFSIKKLREKMLDEYGFRFKDKQYDSV |
| | RSKMYKLMDFLLFCNYYRNDVVAGEALVRKLRFSMTDDEKEGIYADEAAKLWGKFRNDFENIADH |
| | MNGDVTKELGKADMDFDEKILDSEKKNASDLLYFSKMIYMLTYFLDGKEINDLLTTLISKFDNIKEFL |
| | KIMKSSAVDVECELTAGYKLFNDSQRITNELFIVKNIASMRKPAASAKLTMFRDALTILGIDDNITDD |
| | RISEILKLKEKGKGIHGLRNFITNNVIESSRFVYLIKYANAQKIREVAKNEKVVMFVLGGIPDTQIERY |
| | YKSCVEFPDMNSSLEAKRSELARMIKNISFDDFKNVKQQAKGRENVAKERAKAVIGLYLTVMYLLV |
| | KNLVNVNARYVIAIHCLERDFGLYKEIIPELASKNLKNDYRILSQTLCELCDDRDESPNLFLKKNKRL |
| | RKCVEVDINNADSSMTRKYRNCIAHLTVVRELKEYIGDIRTVDSYFSIYHYVMQRCITKRENDTKQE |
| | EKIKYEDDLLKNHGYTKDFVKALNSPFGYNIPRFKNLSIEQLFDRNEYLTEK |
| UPRY01.1 | VEINTSNPTHRSGESSPVRGDMLGLKSELEKRFFGKTFDDNIHIQLIYNILDIEKILAVYVTNIVYALNN |
| SEQ ID NO: | MLGVKGSESHDDFIGYLSTNNTYDVFIDPDNSSLSDDKKANVRKSLSKFNVLLKTKRLGYFGLEEPK |
| 5036 | TKDTRVSQAYKKRVYHMLAIVGQIRQSVFHDKSSKLHEDLYSFIDIIDSEYRETLDYLVEERLKSINK |
| | DFIEGNKVNISLLIDMMKGYEADDIIRLYYDFIVLKSQKNLGFSIKKLREKMLDEYGFRFKDKQYDSV |
| | RSKMYKLMDFLLFCNYYRNDVVAGEALVRKLRFSMTDDEKEGIYADEAAKLWGKFRNDFENIADH |
| | MNGDVTKELGKADMDFDEKILDSEKKNASDLLYFSKMIYMLTYFLDGKEINDLLTTLISKFDNIKEFL |
| | KIMKSSAVDVECELTAGYKLFNDSQRITNELFIVKNIASMRKPAASAKLTMFRDALTILGIDDNITDD |
| | RISEILKLKEKGKGIHGLRNFITNNVIESSRFVYLIKYANAQKIREVAKNEKVVMFVLGGIPDTQIERY |
| | YKSCVEFPDMNSSLEAKRSELARMIKNISFDDFKNVKQQAKGRENVAKERAKAVIGLYLTVMYLLV |
| | KNLVNVNARYVIAIHCLERDFGLYKEIIPELASKNLKNDYRILSQTLCELCDDRDESPNLFLKKNKRL |
| | RKCVEVDINNADSSMTRKYRNCIAHLTVVRELKEYIGDIRTVDSYFSIYHYVMQRCITKRENDTKQE |
| | EKIKYEDDLLKNHGYTKDFVKALNSPFGYNIPRFKNLSIEQLFDRNEYLTEK |
| UPDQ01.1 | VEINTSNPTHRSGESSPVRGDMLGLKSELEKRFFGKTFDDNIHIQLIYNILDIEKILAVYVTNIVYALNN |
| SEQ ID NO: | MLGVKGSESHDDFIGYLSTNNTYDVFIDPDNSSLSDDKKANVRKSLSKFNVLLKTKRLGYFGLEEPK |
| 5037 | TKDTRVSQAYKKRVYHMLAIVGQIRQSVFHDKSSKLHEDLYSFIDIIDSEYRETLDYLVEERLKSINK |
| | DFIEGNKVNISLLIDMMKGYEADDIIRLYYDFIVLKSQKNLGFSIKKLREKMLDEYGFRFKDKQYDSV |
| | RSKMYKLMDFLLFCNYYRNDVVAGEALVRKLRFSMTDDEKEGIYADEAAKLWGKFRNDFENIADH |
| | MNGDVTKELGKADMDFDEKILDSEKKNASDLLYFSKMIYMLTYFLDGKEINDLLTTLISKFDNIKEFL |
| | KIMKSSAVDVECELTAGYKLFNDSQRITNELFIVKNIASMRKPAASAKLTMFRDALTILGIDDNITDD |
| | RISEILKLKEKGKGIHGLRNFITNNVIESSRFVYLIKYANAQKIREVAKNEKVVMFVLGGIPDTQIERY |
| | YKSCVEFPDMNSSLEAKRSELARMIKNISFDDFKNVKQQAKGRENVAKERAKAVIGLYLTVMYLLV |
| | KNLVNVNARYVIAIHCLERDFGLYKEIIPELASKNLKNDYRILSQTLCELCDDRDESPNLFLKKNKRL |
| | RKCVEVDINNADSSMTRKYRNCIAHLTVVRELKEYIGDIRTVDSYFSIYHYVMQRCITKRENDTKQE |
| | EKIKYEDDLLKNHGYTKDFVKALNSPFGYNIPRFKNLSIEQLFDRNEYLTEK |
| OWKP01.1 | MLGLKSELEKRFFGKTFDDNIHIQLIYNILDIEKILAVYITNIVYALNNMLGVKGSESHDDFIGYLSAR |
| SEQ ID NO: | NTYEVFTHPDKSNLSDKVKGNINKVKGNIKKSLSKFNDLLKTKRLGYFGLEEPKTKDKRVSEAYKK |
| 5038 | RVYHMLAIVGQIRQSVFHDKSNELDEYLYSFIDIIDSEYRDTLDYLVDERFDSINKGFVQGNKVNISLL |
| | IDMMKGYEADDIIRLYYDFIVLKSQKNLGFSIKKLREKMLDEYGFRFKDKQYDSVRSKMYKLMDFL |
| | LFCNYYRNDVVAGEVLVRKLRFSMTDDEKEGIYADEAAKLWGKFRNDFENIADHMNGDVIKELGK |
| | ADMDFDEKIIDSEKKNASDLLYFSKMIYMLTYFLDGKEINDLLTTLISKFDNIKEFLKIMKSSAVDVE |
| | CELTAGYKLFNDRQRITNELFIVKNIASMRKPAASAKLTMFRDALTILGIDDNITDDRISEILKLKEKG |
| | KGIHGLRNFITNNVIESSRFVYLIKYANAQKIREVAKNEKWMFVLGGIPDTQIERYYKSCVEFPDMN |
| | SSLEAKRSELARMIKNIRFDDFKNVKQQAKGRENVAKERAKAVIGLYLTVMYLLVKNLVNVNARY |
| | VIAIHCLERDFGLYKEIIPELASKNLKNDYRILSQTLCELCDNGDESPNLFLKKNKRLRKCVEVDINNA |
| | DSNMTRKYRNCIAHLTVVRELKEYIGDIRTVDSYFSIYHYVMQRCITKRENDTKQEEKIKYEDDLLK |
| | NHGYTKDFVKALNSPFGYNIPRFKNLSIEQLFDRNEYLTEK |
| UACT01.1 | VEINTSNPTHRSGESSPVRGDMLGLKSELEKRFFGKTFDDNIHIQLIYNILDIEKILAVYVTNIVYALNN |
| SEQ ID NO: | MLGIKDSESYDDFMGYLSARNTYEVFTHPDKSNLSDKVKGNINKVKGNIKKSLSKFNDLLKTKRLG |
| 5039 | YFGLEEPKTKDKRVSEAYKKRVYHMLAIVGQIRQSVFHDKSNELDEYLYSFIDIIDSEYRDTLDYLVD |
| | ERFDSINKGFVQGNKVNISLLIDMMKGYEADDIIRLYYDFIVLKSQKNLGFSIKKLREKMLDEYGFRF |
| | KDKQYDSVRSKMYKLMDFLLFCNYYRNDVVAGEVLVRKLRFSMTDDEKEGIYADEAAKLWGKFR |
| | NDFENIADHMNGDVIKELGKADMDFDEKIIDSEKKNASDLLYFSKMIYMLTYFLDGKEINDLLTTLIS |
| | KFDNIKEFLKIMKSSAVDVECELTAGYKLFNDSQRITNELFIVKNIASMRKPAASAKLTMFRDALTIL |
| | GIDDNITDDRISEILKLKEKGKGIHGLRNFITNNVIESSRFVYLIKYANAQKIREVAKNEKVVMFVLGG |
| | IPDTQIERYYKSCVEFPDMNSSLEAKRSELARMIKNIRFDDFKNVKQQAKGRENVAKERAKAVIGLY |
| | LTVMYLLVKNLVNVNARYVIAIHCLERDFGLYKEIIPELASKNLKNDYRILSQTLCELCDNGDESPNL |
| | FLKKNKRLRKCVEVDINNADSNMTRKYRNCIAHLTVVRELKEYIGDIRTVDSYFSIYHYVMQRCITK |
| | RENDTKQEEKIKYEDDLLKNHGYTKDFVKALNSPFGYNIPRFKNLSIEQLFDRNEYLTEK |
| OYVL01.1 | VLKSQKNLGFSIKKLREKILDEYGFRFKDKQYDSVRSKMYKLMDFLLFCNYYRNDIAAGESLVRKL |
| SEQ ID NO: | RFSMTDDEKEGIYADEAAKLWGKFRNDFENIADHMNGDVIKELGKADMDFDEKILDSEKKNASDL |
| 5040 | LYFSKMIYMLTYFLDGKEINDLLTTLISKFDNIKEFLKIMKSSAIDVECELTAGYKLFNDSQRITNELFI |
| | VKNIASMRKPAASAKLTMFRDALTILGIDDKITDDRISEILKLKEKGKGIHGLRNFITNNVIESSRFVYL |
| | IKYANAQKIREVAKNEKVVMFVLGGIPDTQIERYYKSCVEFPDMNSSLEAKRSELARMIKNIRFDDF |
| | KNVKQQAKGRENVAKERAKAVIGLYLTVMYLLVKNLVNVNARYVIAIHCLERDFGLYKEIIPELAS |
| | KNLKNDYRILSQTLCELCDNGDESPNLFLKKNKRLRKCVEVDINNADSSMTRKYRNCIAHLTVVREL |
| | KEYIGDIRTVDSYFSIYHYVMQRCITKREDDTKQEEKIKYEDDLLKNHGYTKDFVKALNSPFGYNIPR |
| | FKNLSIEQLFDRNEYLTEK |
| OWXF01.1 | MLTYFLDGKEINDLLTTLISKFDNUCEFLKIMKSSAVDVECELTAGYKLFNDSQRITNELFIVKNIASM |
| SEQ ID NO: | RKPAASAKLTMFRDALTILGIDDKITDDRISEILKLKEKGKGIHGLRNFITNNVIESSRFVYLIKYANAQ |
| 5041 | KIREVAKNEKVVMFVLGGIPDTQIERYYKSCVEFPDMNSSLEAKRSELARMIKNIRFDDFKNVKQQA |
| | KGRENVAKERAKAVIGLYLTVMYLLVKNLVNVNARYVIAIHCLERDFGLYKEIIPELASKNLKNDY |
| | RILSQTLCELCDNGDESPNLFLKKNKRLRKCVEVDINNADSNMTRKYRNCIAHLTVVRELKEYIGDI |
| | RTVDSYFSIYHYVMQRCITKREDDTKQEEKIKYEDDLLKNHGYTKDFVKALNSPFGYNIPRFKNLSIE |
| | QLFDRNEYLTEK |
| OWEF01.1 | MLAIVGQIRQCVFHDKSGAKRFDLYSFINNIYPEYRETLDYLVDERFDSINKGFIQGNKVNISLLIDM |
| SEQ ID NO: | MKGYEADDIIRLYYDFIVLKSQKNLGFSIKKLREKMLDEYGFRFKDKQYDSVRSKMYKLMDFLLFC |
| 5042 | NYYRNDVAAGEALVRKLRFSMTDDEKEGIYAGEAAKLWGKFRNDFENIADHMNGDVIKELGKAD |
| | MDFDEKILDSEKKNASDLLYFSKMrYMLTYFLDGKEINDLLTTLISKFDNIKEFLKIMKSSAVDVECE |
| | LTAGYKLFNDSQRITNELFIVKNIASMRKPAASAKLTMFRDALTILGIDDNITDDRISEILKLKEKGKGI |
| | HGLRNFITNNVTESSRFVYLIKYANAQKIREVAKNEKVVMFVLGGIPDTQIERYYKSCVEVPDMNSSL |
| | EAKRSELARMIKNIRFDDFKNVKQQAKGRENVAKERAKAVIGLYLTVMYLLVKNLVNVNARYVIAI |
| | HCLERDFGLYKEIIPELASKNLKNDYRILSQTLCELCDDRDKSPNLFLKKNKRLRKCVEVDINNADSS |
| | MTRKYRNCIAHLTVVRELKEYIGDIRTVDSYFSIYHYVMQRCITKRENDTKQEDKIKYEDDLLKNHG |
| | YTKDFVKALNSPFGYNIPRFKNLSIEQLFDRNEYLTEK |
| OAUV01.1 | MLAIVGQIRQCVFHDKSGAKRFDLYSFINNIDPEYRETLDYLVDERFDSINKGFIEGNKINISLLIDMM |
| SEQ ID NO: | KGYEADDIIRLYYDFIVLKSQKNLGFSIKKLREKMLDEYGFRFKDKQYDPVRSKMYKLMDFLLFCN |
| 5043 | HYRNDVAAGEALVRKLRFSMTDDEKEGIYADEAAKLWGKFRNDFENIADHMNGDVIKELGKADM |
| | DFDEKILDSEKKNASDLLYFSKMIYMLTYFLDGKEINDLLTTLISKFDNIKEFLKIMKSSAVDVECELT |
| | AGYKLFNDSQRITNELFIVKNIASMRKPAASAKLTMFRDALTILGIDDNITDDRISEILKLKEKGKGIH |
| | GLRNFITNNVIESSRFVYLIKYANAQKIREVAKNEKWMFVLGGIPDTQIERYYKSCVEFPDMNSSLE |
| | AKRSELARMIKNISFDDFKNVKQQAKGRENVAKERAKAVIGLYLTVMYLLVKNLVNVNARYVIAIH |
| | CLERDFGLYKEIIPELASKNLKNDYRILSQTLCELCDDRDESPNLFLKKNKRLRKCVEVDINNADSSM |
| | TRKYRNCIAHLTVVRELKEYIGDIRTVDSYFSIYHYVMQRCITKRENDTKQEEKIKYEDDLLKNHGY |
| | TKDFVKALNSPFGYNIPRFKNLSIEQLFDRNEYLTEK |
| OXCB01.1 | VEINTSNPTHRSGESSPVRWDMLGLKSELEKRFFGKTFDDNIHIQLIYNILDIEKILAVYVTNIVYALN |
| SEQ ID NO: | NMLGEGDDESHDDFMGYLSAQNTYYIFTHPDKSNLSDKVKGNIKKSLSKFNDLLKTKRLGYFGLEE |
| 5044 | PKTKDKRVSEAYKKRVYHMLAIVGQIRQSVFHDKSNELDEYLYSFIDIIDSEYRDTLDYLVDERFDSI |
| | NKGFVQGNKVNISLLIDMMKGYEADDIIRLYYDFIVLKSQKNLGFSIKKLREKMLDEYGFRFKDKQY |
| | DSVRSKMYKLMDFLLFCNYYRNDVVAGEVLVRKLRFSMTDDEKEWIYADEAEKLWGKFRNDFENI |
| | ADHMNGDVTKELGKADMDFDEKILDSEKKNASDLLYFSKMIYMLTYFLDGKEINDLLTTLISKFDNI |
| | KEFLKIMKSSAVDVECELTAGYKLFNDSQRITNELFIVKNIASMRKPAASAKLTMFRDALTILGIDDKI |
| | TDDRISEILKLKEKGKGIHGLRNFITNNVIESSRFVYLIKYANAQKIREVAENEKWMFVLGGIPDTQI |
| | ERYYKSCVEFPDMNSSLEVKRSELARMIKNISFDDFKNVKQQAKGRENVAKERAKAVIGLYLTVMY |
| | LLVKNLVNVNARYVIAIHCLERDFGLYKEIIPELASKNLKNDYRILSQTLCELCDDRDESPNLFLKKN |
| | KRLRKCVEVDINNADSSMTRKYRNCIAHLTVVRELKEYIGDIRTVDSYFSIYHYVMQRCITKREDDK |
| | KQEEKIKYEDDLLKNHGYTKDFVKALNSPFGYNIPRFKNLSIEQLFDRNEYLTEK |
| ORRC01.1 | VEINTSNPTHRSGESSSVRGDMLGLKSELEKRFFGKTFDDNIHIQLIYNILDIEKILAVYVTNIVYALNN |
| SEQ ID NO: | MLGVKGSESYDDFMGYLSAQNTYYIFTHPDKSNLSDKVKGNIKKSLSKFNDLLKTKRLGYFGLEEP |
| 5045 | KTKDKRVSEAYKKRVYHMLAIVGQIRQSVFHDKSNELDEYLYSFIDIIDSEYRDTLDYLVDERFDSIN |
| | KGFVQGNKVNISLLIDMMKGYEADDIIRLYYDFIVLKSQKNLGFSIKKLREKMLDEYGFRFKDKQYD |
| | SVRSKMYKLMDFLLFCNYYRNDVVAGEALVRKLRFSMTDDEKEGIYADEAEKLWGKFRNDFENIA |
| | DHMNGDVTKELGKADMDFDEKILDSEKKNASDLLYFSKMIYMLTYFLDGKEINDLLTTLISKFDNIK |
| | EFLKIMKSSAVDVECELTAGYKLFNDSQRITNELFIVKNIASMRKPASSAKLTMFRDALTILGIDDNIT |
| | DDRISEILKLKEKGKGIHGLRNFITNNVIESSRFVYLIKYANAQKIREVAKNEKWMFVLGGIPDTQIE |
| | RYYKSCVEFPDMNSSMGAKRRELAKMIKSISFEDFKDVKQQAKGRENVAKERAKAVIGLYLTVMY |
| | LLVKNLVNVNARYVIAIHCLERDFGLYKEIIPELASKNLKNDYRILSQTLCELCDNGDESPNLFLKKN |
| | KRLRKCVEVDINNADSNMTRKYRNCIAHLTVVRELNKYIKDIRTVDSYFSIYHYVMQRCITKRENDT |
| | KQEEKINYEDDLLKNHGYTKDFVKALNSPFGYNIPRFKNLSIEQLFDRNEYLTEK |
| GCA_ | VEINTSNPTHRSGESSSVRGDMLGLKSELEKRFFGKTFDDNIHIQLIYNILDIEKILAVYVTNIVYALNN |
| 900066635. | MLGVKGSESYDDFMGYLSAQNTYYIFTHPDKSNLSDKVKGNIKKSLSKFNDLLKTKRLGYFGLEEP |
| 1_14207_7_17_ | KTKDKRVSEAYKKRVYHMLAIVGQIRQSVFHDKSNELDEYLYSFIDIIDSEYRDTLDYLVDERFDSIN |
| genomic | KGFVQGNKVNISLLIDMMKGYEADDIIRLYYDFIVLKSQKNLGFSIKKLREKMLDEYGFRFKDKQYD |
| SEQ ID NO: | SVRSKMYKLMDFLLFCNYYRNDVVAGEALVRKLRFSMTDDEKEGIYADEAEKLWGKFRNDFENIA |
| 5046 | DHMNGDVTKELGKADMDFDEKILDSEKKNASDLLYFSKMIYMLTYFLDGKEINDLLTTLISKFDNIK |
| | EFLKIMKSSAVDVECELTAGYKLFNDSQRITNELFIVKNIASMRKPAASAKLTMFRDALTILGIDDKIT |
| | DDRISEILKLKEKGKGIHGLRNFITNNVIESSRFVYLIKYANAQKIREVAKNEKWMFVLGGIPDTQIE |
| | RYYKSCVEFPDMNSSLEAKCSELARMIKNISFDDFKNVKQQAKGRENVAKERAKAVIGLYLTVMYL |
| | LVKNLVNVNARYVIAIHCLERDFGLYKEIIPELASKNLKNDYRILSQTLCELCDDRDESPNLFLKKNK |
| | RLRKCVEVDINNADSSMTRKYRNCIAHLTVVRELKEYIGDIRTVDSYFSIYHYVMQRCITKREDDTK |
| | QEEKIKYEDDLLKNHGYTKDFVKALNSPFGYNIPRFKNLSIEQLFDRNEYLTEK |
| IMG_ | VEINTSNPTHRSGESSSVRGDMLGLKSELEKRFFGKTFDDNIHIQLIYNILDIEKILAVYVTNIVYALNN |
| 3300014787 | MLGVKGSESYDDFMGYLSAQNTYYIFTHPDKSNLSDKVKGNIKKSLSKFNDLLKTKRLGYFGLEEP |
| SEQ ID NO: | KTKDKRVSEAYKKRVYHMLAIVGQIRQSVFHDKSNELDEYLYSFIDIIDSEYRDTLDYLVDERFDSIN |
| 5047 | KGFVQGNKVNISLLIDMMKGYEADDIIRLYYDFIVLKSQKNLGFSIKKLREKMLDEYGFRFKDKQYD |
| | SVRSKMYKLMDFLLFCNYYRNDVVAGEALVRKLRFSMTDDEKEGIYADEAEKLWGKFRNDFENIA |
| | DHMNGDVTKELGKADMDFDEKILDSEKKNASDLLYFSKMIYMLTYFLDGKEINDLLTTLISKFDNIK |
| | EFLKIMKSSAVDVECELTAGYKLFNDSQRITNELFIVKNIASMRKPAASAKLTMFRDALTILGIDDKIT |
| | DDRISEILKLKEKGKGIHGLRNFITNNVIESSRFVYLIKYANAQKIREVAKNEKVVMFVLGGIPDTQIE |
| | RYYKSCVEFPDMNSSLEAKCSELARMIKNISFD |
| OJNJ01.1 | VEINTSNPTHRSGESSPVRWDMLGLKSELEKRFFGKTFDDNIHIQLIYNILDIEKILAVYVTNIVYALN |
| SEQ ID NO: | NMLGIKDSESYDDFMGYLSARNTYEVFTHPDKSNLSDKVKGNIKKSLSKFNVLLKTKRLGYFGLEEP |
| 5048 | KTKDTNALEAYKKRVYHMLAIVGQIRQSVFHDKSSKLDEDLYSFIDIIDSEYRETLDYLVDERFDSIN |
| | KGFIQGNKVNISLLIDMMKDDYEADDIIRLYYDFIVLKSQKNLGFSIKKLREKMLDEYGFRFKDKQY |
| | DSVRSKMYKLMDFLLFCNYYRNDVVAGEALVRKLRFSMTDDEKEGIYADEAEKLWGKFRNDFENI |
| | ADHMNGDVTKELGKADMDFDEKILDSEKKNASDLLYFSKMIYMLTYFLDGKEINDLLTTLISKFDNI |
| | KEFLKIMKSSAVDVECELTAGYKLFNDSQRITNELFIVKNIASMRKPAASAKLTMFRDALTILGIDDNI |
| | TDDRISEILKLKEKGKGIHGLRNFITNNVIESSRFVYLIKYANAQKIREVAENEKVVMFVLGGIPDTQI |
| | ERYYKSCVEFPDMNSSLEAKRSELARMIKNISFDDFKNVKQQAKGRENVAKERAKAVIGLYLTVMY |
| | LLVKNLVNVNARYVIAIHCLERDFGLYKEIIPELASKNLKNDYRILSQTLCELCDDRDESPNLFLKKN |
| | KRLRKCVEVDINNADSSMTRKYRNCIAHLTVVRELKEYIGDIRTVDSYFSIYHYVMQRCITKRGDDT |
| | KQEEKIKYEDDLLKNHGYTKDFVKALNSPFGYNIPRFKNLSIEQLFDRNE |
| UXQD01.1 | MPAAEAAAPAAEKKKSSVKAAGMKSILVSKNKMYITSFGKGNSAVLEYEVDKVDNDNYNKTQLSS |
| SEQ ID NO: | KDNSNIELGDVDEVNITFSSKHGFESGVEINTSNPTHRSGESSPVRWDMLGLKSELEKRFFGKTFDDN |
| 5049 | IHIQLIYNILDIEKILAVYVTNIVYALNNMLGIKKSESYDDFMGYLSARNTYEVFTHPDKSNLSDKVK |
| | GNIKKSLSKFNVLLKTKRLGYFGLEEPKTKDTNALEAYKKRVYHMLAIVGQIRQSVFHDKSSKLHED |
| | LYSFIDIIDSEYRETLDYLVDERFDSINKGFIQGNKVNISLLIDMMKDDYEADDIIRLYYDFIVLKSQKN |
| | LGFSIKKLREKMLDEYGFRFKDKQYDSVRSKMYKLMDFLLFCNYYRNDVVAGEALVRKLRFSMTD |
| | DEKEGIYADEAEKLWGKFRNDFENIADHMNGDVIKELGKADMDFDEKILDSEKKNASDLLYFSKMI |
| | YMLTYFLDGKEINDLLTTLISKFDNIKEFLKIMKSSAVNVECELTAGYKLFNDSQRITNELFIVKNIAS |
| | MRKPAASAKLTMFRDALTILGIDDKITDDRISEILKLKEKGKGIHGLRNFITNNVIESSRFVYLIKYAN |
| | AQKIREVAKNEKVVMFVLGGIPDTQIERYYKSCVEFPDMNSSLEAKRSELARMIKNISFDDFKNVKQ |
| | QAKGRENVAKERAKAVIGLYLTVMYLLVKNLVNVNARYVIAIHCLERDFGLYKEIIPELASKNLKN |
| | DYRILSQTLCELCDDRDESPNLFLKKNRRLRKCVEVDINNADSSMTRKYRNCIAHLTVVRELKEYIG |
| | DIRTVDSYFSIYHYVMQRCITKREDDTKQEDKIKYEDDLLKNHGYTKDFVKALNSPFGYNIPRFKNL |
| | SIEQLFDRNEYLTEK |
| OPGR01.1 | MPAAEAAAPAAEKKKSSVKAAGMKSILVSKNKMYITSFGKGNSAVLEYEVDKVDNDNYNKTQLSS |
| SEQ ID NO: | KDNSNIELGDVDEVNITFSSKHGFESGVEINTSNPTHRSGESSPVRWDMLGLKSELEKRFFGKTFDDN |
| 5050 | IHIQLIYNILDIEKILAVYVTNIVYALNNMLGIKKSESYDDFMGYLSARNTYEVFTHPDKSNLSDKVK |
| | GNIKKSLSKFNVLLKTKRLGYFGLEEPKTKDTNALEAYKKRVYHMLAIVGQIRQSVFHDKSSKLHED |
| | LYSFIDIIDSEYRETLDYLVDERFDSINKGFIQGNKVNISLLIDMMKDDYEADDIIRLYYDFIVLKSQKN |
| | LGFSIKKLREKMLDEYGFRFKDKQYDSVRSKMYKLMDFLLFCNYYRNDVVAGEALVRECLRFSMTD |
| | DEKEGIYADEAEKLWGKFRNDFENIADHMNGDVIKELGKADMDFDEKILDSEKKNASDLLYFSKMI |
| | YMLTYFLDGKEINDLLTTLISKFDNIKEFLKIMKSSAVNVECELTAGYKLFNDSQRITNELFIVKNIAS |
| | MRKPAASAKLTMFRDALTILGIDDKITDDRISEILKLKEKGKGIHGLRNFITNNVIESSRFVYLIKYAN |
| | AQKIREVAKNEKVVMFVLGGIPDTQIERYYKSCVEFPDMNSSLEAKRSELARMIKNISFDDFKNVKQ |
| | QAKGRENVAKERAKAVIGLYLTVMYLLVKNLVNVNARYVIAIHCLERDFGLYKEIIPELASKNLKN |
| | DYRILSQTLCELCDDRDESPNLFLKKNRRLRKCVEVDINNADSSMTRKYRNCIAHLTVVRELKEYIG |
| | DIRTVDSYFSIYHYVMQRCITKREDDTKQEDKIKYEDDLLKNHGYTKDFVKALNSPFGYNIPRFKNL |
| | SIEQLFDRNEYLTEK |
| UXVN01.1 | MPAAEAAAPAAEKKKSSVKAAGMKSILVSKNKMYITSFGKGNSAVLEYEVDKVDNDNYNKTQLSS |
| SEQ ID NO: | KDNSNIELGDVDEVNITFSSKHGFESGVEINTSNPTHRSGESSPVRWDMLGLKSELEKRFFGKTFDDN |
| 5051 | IHIQLIYNILDIEKILAVYVTNIVYALNNMLGIKKSESYDDFMGYLSARNTYEVFTHPDKSNLSDKVK |
| | GNIKKSLSKFNVLLKTKRLGYFGLEEPKTKDTNALEAYKKRVYHMLAIVGQIRQSVFHDKSSKLHED |
| | LYSFIDIIDSEYRETLDYLVDERFDSINKGFIQGNKVNISLLIDMMKDDYEADDIIRLYYDFIVLKSQKN |
| | LGFSIKKLREKMLDEYGFRFKDKQYDSVRSKMYKLMDFLLFCNYYRNDVVAGEALVRKLRFSMTD |
| | DEKEGIYADEAEKLWGKFRNDFENIADHMNGDVIKELGKADMDFDEKILDSEKKNASDLLYFSKMI |
| | YMLTYFLDGKEINDLLTTLISKFDNIKEFLKIMKSSAVNVECELTAGYKLFNDSQRITNELFIVKNIAS |
| | MRKPAASAKLTMFRDALTILGIDDKITDDRISEILKLKEKGKGIHGLRNFITNNVIESSRFVYLIKYAN |
| | AQKIREVAKNEKVVMFVLGGIPDTQIERYYKSCVEFPDMNSSLEAKRSELARMIKNISFDDFKNVKQ |
| | QAKGRENVAKERAKAVIGLYLTVMYLLVKNLVNVNARYVIAIHCLERDFGLYKEIIPELASKNLKN |
| | DYRILSQTLCELCDDRDESPNLFLKKNRRLRKCVEVDINNADSSMTRKYRNCIAHLTVVRELKEYIG |
| | DIRTVDSYFSIYHYVMQRCITKREDDTKQEDKIKYEDDLLKNHGYTKDFVKALNSPFGYNIPRFKNL |
| | SIEQLFDRNEYLTEK |
| ULMK01.1 | MPAAEAAAPAAEKKKSSVKAAGMKSILVSKNKMYITSFGKGNSAVLEYEVDKVDNDNYNKTQLSS |
| SEQ ID NO: | KDNSNIELGDVDEVNITFSSKHGFESGVEINTSNPTHRSGESSPVRWDMLGLKSELEKRFFGKTFDDN |
| 5052 | IHIQLIYNILDIEKILAVYVTNIVYALNNMLGIKKSESYDDFMGYLSARNTYEVFTHPDKSNLSDKVK |
| | GNIKKSLSKFNVLLKTKRLGYFGLEEPKTKDTNALEAYKKRVYHMLAIVGQIRQSVFHDKSSKLHED |
| | LYSFIDIIDSEYRETLDYLVDERFDSINKGFIQGNKVNISLLIDMMKDDYEADDIIRLYYDFIVLKSQKN |
| | LGFSIKKLREKMLDEYGFRFKDKQYDSVRSKMYKLMDFLLFCNYYRNDVVAGEALVRKLRFSMTD |
| | DEKEGIYADEAEKLWGKFRNDFENIADHMNGDVIKELGKADMDFDEKILDSEKKNASDLLYFSKMI |
| | YMLTYFLDGKEINDLLTTLISKFDNIKEFLKIMKSSAVNVECELTAGYKLFNDSQRITNELFIVKNIAS |
| | MRKPAASAKLTMFRDALTILGIDDKITDDRISEILKLKEKGKGIHGLRNFITNNVIESSRFVYLIKYAN |
| | AQKIREVAKNEKVVMFVLGGIPDTQIERYYKSCVEFPDMNSSLEAKRSELARMIKNISFDDFKNVKQ |
| | QAKGRENVAKERAKAVIGLYLTVMYLLVKNLVNVNARYVIAIHCLERDFGLYKEIIPELASKNLKN |
| | DYRILSQTLCELCDDRDESPNLFLKKNRRLRKCVEVDINNADSSMTRKYRNCIAHLTVVRELKEYIG |
| | DIRTVDSYFSIYHYVMQRCITKREDDTKQEDKIKYEDDLLKNHGYTKDFVKALNSPFGYNIPRFKNL |
| | SIEQLFDRNEYLTEK |
| UXSY01.1 | MPAAEAAAPAAEKKKSSVKAAGMKSILVSKNKMYITSFGKGNSAVLEYEVDKVDNDNYNKTQLSS |
| SEQ ID NO: | KDNSNIELGDVDEVNITFSSKHGFESGVEINTSNPTHRSGESSPVRWDMLGLKSELEKRFFGKTFDDN |
| 5053 | IHIQLIYNILDIEKILAVYVTNIVYALNNMLGIKKSESYDDFMGYLSARNTYEVFTHPDKSNLSDKVK |
| | GNIKKSLSKFNVLLKTKRLGYFGLEEPKTKDTNALEAYKKRVYHMLAIVGQIRQSVFHDKSSKLHED |
| | LYSFIDIIDSEYRETLDYLVDERFDSINKGFIQGNKVNISLLIDMMKDDYEADDIIRLYYDFIVLKSQKN |
| | LGFSIKKLREKMLDEYGFRFKDKQYDSVRSKMYKLMDFLLFCNYYRNDVVAGEALVRKLRFSMTD |
| | DEKEGIYADEAEKLWGKFRNDFENIADHMNGDVIKELGKADMDFDEKILDSEKKNASDLLYFSKMI |
| | YMLTYFLDGKEINDLLTTLISKFDNIKEFLKIMKSSAVNVECELTAGYKLFNDSQRITNELFIVKNIAS |
| | MRKPAASAKLTMFRDALTILGIDDKITDDRISEILKLKEKGKGIHGLRNFITNNVIESSRFVYLIKYAN |
| | AQKIREVAKNEKVVMFVLGGIPDTQIERYYKSCVEFPDMNSSLEAKRSELARMIKNISFDDFKNVKQ |
| | QAKGRENVAKERAKAVIGLYLTVMYLLVKNLVNVNARYVIAIHCLERDFGLYKEIIPELASKNLKN |
| | DYRILSQTLCELCDDRDESPNLFLKKNRRLRKCVEVDINNADSSMTRKYRNCIAHLTVVRELKEYIG |
| | DIRTVDSYFSIYHYVMQRCITKREDDTKQEDKIKYEDDLLKNHGYTKDFVKALNSPFGYNIPRFKNL |
| | SIEQLFDRNEYLTEK |
| OPHJ01.1 | MPAAEAAAPAAEKKKSSVKAAGMKSILVSKNKMYITSFGKGNSAVLEYEVDKVDNDNYNKTQLSS |
| SEQ ID NO: | KDNSNIELGDVDEVNITFSSKHGFESGVEINTSNPTHRSGESSPVRWDMLGLKSELEKRFFGKTFDDN |
| 5054 | IHIQLIYNILDIEKILAVYVTNIVYALNNMLGIKKSESYDDFMGYLSARNTYEVFTHPDKSNLSDKVK |
| | GNIKKSLSKFNVLLKTKRLGYFGLEEPKTKDTNALEAYKKRVYHMLAIVGQIRQSVFHDKSSKLHED |
| | LYSFIDIIDSEYRETLDYLVDERFDSINKGFIQGNKVNISLLIDMMKDDYEADDIIRLYYDFIVLKSQKN |
| | LGFSIKKLREKMLDEYGFRFKDKQYDSVRSKMYKLMDFLLFCNYYRNDVVAGEALVRKLRFSMTD |
| | DEKEGIYADEAEKLWGKFRNDFENIADHMNGDVIKELGKADMDFDEKILDSEKKNASDLLYFSKMI |
| | YMLTYFLDGKEINDLLTTLISKFDNIKEFLKIMKSSAVNVECELTAGYKLFNDSQRITNELFIVKNIAS |
| | MRKPAASAKLTMFRDALTILGIDDKITDDRISEILKLKEKGKGIHGLRNFITNNVIESSRFVYLIKYAN |
| | AQKIREVAKNEKVVMFVLGGIPDTQIERYYKSCVEFPDMNSSLEAKRSELARMIKNISFDDFKNVKQ |
| | QAKGRENVAKERAKAVIGLYLTVMYLLVKNLVNVNARYVIAIHCLERDFGLYKEIIPELASKNLKN |
| | DYRILSQTLCELCDDRDESPNLFLKKNRRLRKCVEVDINNADSSMTRKYRNCIAHLTVVRELKEYIG |
| | DIRTVDSYFSIYHYVMQRCITKREDDTKQEDKIKYEDDLLKNHGYTKDFVKALNSPFGYNIPRFKNL |
| | SIEQLFDRNEYLTEK |
| UPPC01.1 | MKSSAVNVECELTAGYKLFNDSQRITNELFIVKNIASMRKPAASAKLTMFRDALTILGIDDNITDDRI |
| SEQ ID NO: | SEILKLKEKGKGIHGLRNFITNNVIESSRFVYLIKYANAQKIREVAKNEKVVMFVLGGIPDTQIERYYK |
| 5055 | SCVEFPDMNSSLEAKRSELARMIKNISFDDFKNVKQQAKGRENVAKERAKAVIGLYLTVMYLLVKN |
| | LVNVNARYVIAIHCLERDFGLYKEIIPELASKNLKNDYRTLSQTLCGLCDKSPNLFLKKNERLRKCVE |
| | VDINNADSSMTRKYRNCIAHLTVVRELKEYIGDIRTVDSYFSIYHYVMQRCITKRENDTKQEDKIKY |
| | EDDLLKNHGYTKDFVKALNSPFGYNIPRFKNLSIEQLFDRNEYLTEK |
| OWCF01.1_2 | MKSSAVNVECELTAGYKLFNDSQRITNELFIVKNIASMRKPAASAKLTMFRDALTILGIDDNITDDRI |
| SEQ ID NO: | SEILKLKEKGKGIHGLRNFITNNVIESSRFVYLIKYANAQKIREVAKNEKVVMFVLGGIPDTQIERYYK |
| 5056 | SCVEFPDMNSSLEAKRSELARMIKNISFDDFKNVKQQAKGRENVAKERAKAVIGLYLTVMYLLVKN |
| | LVNVNARYVIAIHCLERDFGLYKEIIPELASKNLKNDYRTLSQTLCGLCDKSPNLFLKKNERLRKCVE |
| | VDINNADSSMTRKYRNCIAHLTVVRELKEYIGDIRTVDSYFSIYHYVMQRCITKRENDTKQEDKIKY |
| | EDDLLKNHGYTKDFVKALNSPFGYNIPRFKNLSIEQLFDRNEYLTEK |
| OGLN01.1_2 | MKSSAVNVECELTAGYKLFNDSQRITNELFIVKNIASMRKPAASAKLTMFRDALTILGIDDNITDDRI |
| SEQ ID NO: | SEILKLKEKGKGIHGLRNFITNNVIESSRFVYLIKYANAQKIREVAKNEKVVMFVLGGIPDTQIERYYK |
| 5057 | SCVEFPDMNSSLEAKRSELARMIKNISFDDFKNVKQQAKGRENVAKERAKAVIGLYLTVMYLLVKN |
| | LVNVNARYVIAIHCLERDFGLYKEIIPELASKNLKNDYRTLSQTLCGLCDKSPNLFLKKNERLRKCVE |
| | VDINNADSSMTRKYRNCIAHLTVVRELKEYIGDIRTVDSYFSIYHYVMQRCITKRENDTKQEDKIKY |
| | EDDLLKNHGYTKDFVKALNSPFGYNIPRFKNLSIEQLFDRNEYLTEK |
| OGWR01.1 | MKSSAVNVECELTAGYKLFNDSQRITNELFIVKNIASMRKPAASAKLTMFRDALTILGIDDNITDDRI |
| SEQ ID NO: | SEILKLKEKGKGIHGLRNFITNNVIESSRFVYLIKYANAQKIREVAKNEKVVMFVLGGIPDTQIERYYK |
| 5058 | SCVEFPDMNSSLEAKRSELARMIKNISFDDFKNVKQQAKGRENVAKERAKAVIGLYLTVMYLLVKN |
| | LVNVNARYVIAIHCLERDFGLYKEIIPELASKNLKNDYRTLSQTLCGLCDKSPNLFLKKNERLRKCVE |
| | VDINNADSSMTRKYRNCIAHLTVVRELKEYIGDIRTVDSYFSIYHYVMQRCITKRENDTKQEDKIKY |
| | EDDLLKNHGYTKDFVKALNSPFGYNIPRFKNLSIEQLFDRNEYLTEK |
| OHAD01.1_2 | MKSSAVNVECELTAGYKLFNDSQRITNELFIVKNIASMRKPAASAKLTMFRDALTILGIDDNITDDRI |
| SEQ ID NO: | SEILKLKEKGKGIHGLRNFITNNVTESSRFVYLIKYANAQKIREVAKNEKWMFVLGGIPDTQIERYYK |
| 5059 | SCVEFPDMNSSLEAKRSELARMIKNISFDDFKNVKQQAKGRENVAKERAKAVIGLYLTVMYLLVKN |
| | LVNVNARYVIAIHCLERDFGLYKEIIPELASKNLKNDYRTLSQTLCGLCDKSPNLFLKKNERLRKCVE |
| | VDINNADSSMTRKYRNCIAHLTVVRELKEYIGDIRTVDSYFSIYHYVMQRCITKRENDTKQEDKIKY |
| | EDDLLKNHGYTKDFVKALNSPFGYNIPRFKNLSIEQLFDRNEYLTEK |
| USXY01.1 | MKSSAVNVECELTAGYKLFNDSQRITNELFIVKNIASMRKPAASAKLTMFRDALTILGIDDNITDDRI |
| SEQ ID NO: | SEILKLKEKGKGIHGLRNFITNNVIESSRFVYLIKYANAQKIREVAKNEKVVMFVLGGIPDTQIERYYK |
| 5060 | SCVEFPDMNSSLEAKRSELARMIKNISFDDFKNVKQQAKGRENVAKERAKAVIGLYLTVMYLLVKN |
| | LVNVNARYVIAIHCLERDFGLYREIIPELASKNLKNDYRTLSQTLCGLCDKSPNLFLKKNERLRKCVE |
| | VDINNADSSMTRKYRNCIAHLTVVRELKEYIGDIRTVDSYFSIYHYVMQRCITKRENDTKQEDKIKY |
| | EDDLLKNHGYTKDFVKALNSPFGYNIPRFKNLSIEQLFDRNEYLTEK |
| UZLM01.1_2 | MKSSAVNVECELTAGYKLFNDSQRITNELFIVKNIASMRKPAASAKLTMFRDALTILGIDDNITDDRI |
| SEQ ID NO: | SEILKLKEKGKGIHGLRNFITNNVIESSRFVYLIKYANAQKIREVAKNEKVVMFVLWGIPDTQIERYY |
| 5061 | KSCVEFPDMNSSLEAKRSELARMIKNISFDDFKNVKQQAKGRENVAKERAKAVIGLYLTVMYLLVK |
| | NLVNVNARYVIAIHCLERDFGLYKEIIPELASKNLKNDYRTLSQTLCGLCDKSPNLFLKKNERLRKCV |
| | EVDINNADSSMTRKYRNCIAHLTVVRELKEYIGDIRTVDSYFSIYHYVMQRCITKRENDTKQEDKIK |
| | YEDDLLKNHGYTKDFVKALNSPFGYNIPRFKNLSIEQLFDRNEYLTEK |
| OWCZ01.1 | MRLQVQPLCEEPKTKDNRVSEAYKKRVYHMLAIVGQIRQSVFHDKSSKLHEDLYSFIDIIDSEYRETL |
| SEQ ID NO: | DYLVDERFDSINKGFIQGNKVNISLLIDMMKGYEADDIIRLYYDFIVTKSQKNLGFSIKKLREKMLDE |
| 5062 | YGFRFKDKQYDSVRSKMYKLMDFLLFCNYYRNDVVAGEALVRKLRFSMTDDEKEGIYADEAEKL |
| | WGKFRNDFENIADHMNGDVTKELGKADMDFDEKILDSEKKNASDLLYFSKMIYMLTYFLDGKEIND |
| | LLTTLISKFDNIKEFLKIMKSSAVNVECELTAGYKLFNDSQRITNELFIVKNIASMRKPAASAKLTMFR |
| | DALTILGIDDKITDDRISEILKLKEKGKGIHGLRNFITNNVIESSRFVYLIKYANAQKIREVAKNEKVV |
| | MFVLGGIPDTQIERYYKSCVEFPDMNSSLEAKRSELARMIKNISFDDFKNVKQQAKGRENVAKERAK |
| | AVIGLYLTVMYLLVKNLVNVNARYVIAIHCLERDFGLYKEIIPELASKNLKNDYRILSQTLCELCDKS |
| | PNLFLKKNKRLRKCVEVDINNADSSMTRKYRNCIAHLTVVRELKEYIGDIRTVDSYFSIYHYVMQRC |
| | ITKRENDTKQEDKIKYEDDLLKNHGYTKDFVKALNSPFGYNIPRFKNLSIEQLFDRNEYLTEK |
| OJME01.1 | VEINTSNPTHRSGESSPVRWDMLGLKSELEKRFFGKTFDDNIHIQLIYNILDIEKILAVYVTNIVYALN |
| SEQ ID NO: | NMLGIKDSESYDDFMGYLSAKNTYEVFTHPDKSDLSDKVKGNIKKSFSTFNDLLKTKRLGYFGLEEP |
| 5063 | KTKDTRVSQAYKKRVYHMLAIVGQIRQCVFHDKSGAKRFDLYSFINNIDPEYRDTLDYLVDERFDSI |
| | NKGFIQGNKVNISLLIDMMKGYEADDIIRFYYDFIVLKSQKNLGFSIKKLREKMLDEYGFRFKDKQY |
| | DSVRSKMYKLMDFLLFCNYYRNDVAAGEALVRKLRFSMTDDEKEGIYADEAAKLWGKFRNDFENI |
| | AGHMNGDVTKELGKADMDFDEKTLDSEKKNASDLLYFSKMIYMLTYFLDGKEINDLLTTLISKFDNI |
| | KEFLKIMKSSAVDVECELTAGYKLFNDSQRITNELFIVKNIASMRKPAASAKLTMFRDALTILGIDDNI |
| | TDDRISEILKLKEKGKGIHGLRNFITNNVIESSRFVYLIKYANAQKIREVAKNEKVVMFVLGGIPDTQI |
| | ERYYKSCVEFPDMNSSLEAKRSELARMIKNISFDDFKNVKQQAKGRENVAKERAKAVIGLYLTVMY |
| | LLVKNLVNVNARYVIAIHCLERDFGLYKEIIPELASKNLKNDYRILSQTLCELCDKSPNLFLKKNERL |
| | RKCVEVDINNADSIMTRKYRNCIAHLTVVRELKEYIGDIRTVDSYFSIYHYVMQRCITKRENDTKQE |
| | DKIKYEDDLLKNHGYTKDFVKALNSPFGYNIPRFKNLSIEQLFDRNEYLTEK |
| UPFI01.1 | VEINTSNPTHRSGESSPVRWDMLGLKSELEKRFFGKTFDDNIHIQLIYNILDIEKILAVYVTNIVYALN |
| SEQ ID NO: | NMLGIKDSESYDDFMGYLSAKNTYEVFTHPDKSDLSDKVKGNIKKSFSTFNDLLKTKRLGYFGLEEP |
| 5064 | KTKDTRVSQAYKKRVYHMLAIVGQIRQCVFHDKSGAKRFDLYSFINNIDPEYRDTLDYLVDERFDSI |
| | NKGFIQGNKVNISLLIDMMKGYEADDIIRFYYDFIVLKSQKNLGFSIKKLREKMLDEYGFRFKDKQSV |
| | RSKMYKLMDFLLFCNYYRNDVAAGEALVRKLRFSMTDDEKEGIYADEAAKLWGKFRNDFENIAGH |
| | MNGDVTKELGKADMDFDEKTLDSEKKNASDLLYFSKMIYMLTYFLDGKEINDLLTTLISKFDNIKEF |
| | LKIMKSSAVDVECELTAGYKLFNDSQRITNELFIVKNIASMRKPAASAKLTMFRDALTILGIDDNITD |
| | DRISEILKLKEKGKGIHGLRNFITNNVIESSRFVYLIKYANAQKIREVAKNEKWMFVLGGIPDTQIER |
| | YYKSCVEFPDMNSSLEAKRSELARMIKNISFDDFKNVKQQAKGRENVAKERAKAVIGLYLTVMYLL |
| | VKNLVNVNARYVIAIHCLERDFGLYKEIIPELASKNLKNDYRILSQTLCELCDKSPNLFLKKNERLRK |
| | CVEVDINNADSIMTRKYRNCIAHLTVVRELKEYIGDIRTVDSYFSIYHYVMQRCITKRENDTKQEDKI |
| | KYEDDLLKNHGYTKDFVKALNSPFGYNIPRFKNLSIEQLFDRNEYLIEK |
| OJAG01.1 | MTDDEKEGIYADEAAKLWGKFRNDFENIADHMNGDVIKELGKADMDFDEKILDSEKKNASDLLYF |
| SEQ ID NO: | SKMIYMLTYFLDGKEINDLLTTLISKFDNIKEFLKIMKSSAVDVECELTAGYKLFNDSQRITNELFIVK |
| 5065 | NIASMRKPAASAKLTMFRDALTILGIDDKITDDRISEILKLKEKGKGIHGLRNFITNNVIESSRFVYLIK |
| | YANAQKIREVAKNEKVVMFVLGGIPDTQIERYYKSCVEFPDMNSSLGVKRSELARMIKNISFDDFKN |
| | VKQQSKGRENVAKERAKAVIGLYLTVMYLLVKNLVNVNARYVIAIHCLERDFGLYKEIIPELASKNL |
| | KNDYRILSQTLCELCDKSPNLFLKKNERLRKCVEVDINNADSSMTRKYRNCIAHLTVVRELKEYIGDI |
| | CTVDSYFSIYHYVMQRCITKRENDTKQEEKIKYEDDLLKNHGYTKDFVKALNSPFGYNIPRFKNLSIE |
| | QLFDRNEYLTEK |
| UBIF01.1 | MPAAEAAAPAAEKKKSSVKAAGMKSILVSENKMYITSFGKGNSAVLEYEVDNNDYNKTQLSSKDN |
| SEQ ID NO: | SNIELCDVGKVNITFSSRRGFESGVEINTSNPTHRSGESSSVRGDMLGLKSELEKRFFGKNFDDNIHIQ |
| 5066 | LIYNILDIEKILAVYVTNIVYALNNMLGEGDESNYDFMGYLSTFNTYKVFTNPNGSTLSDDKKENIRK |
| | SLSKFNALLKTKRLGYFGLEEPKTKDTRASEAYKKRVYHMLAIVGQIRQCVFHDKSGAKRFDLYSFI |
| | NNIDPEYRETLDYLVDERFDSINKGFIQGNKVNISLLIDMMKGYEADDIIRLYYDFIVLKSQKNLGFSI |
| | KKLREKMLDEYGFRFKDKQYDSVRSKMYKLMDFLLFCNYYRNDIAAGESLVRKLRFSMTDDEKEG |
| | lYADEAAKLWGKFRNDFENIADHMNGDVIKELGKADMDFDEKILDSEKKNASDLLYFSKMIYMLTY |
| | FLDGKEINDLLTTLISKFDNIKEFLKIMKSSAVDVECELTAGYKLFNDSQRITNELFIVKNIASMRKPA |
| | ASAKLTMFRDALTILGIDDKITDDRISEILKLKEKGKGIHGLRNFITNNVIESSRFVYLIKYANAQKIRE |
| | VAKNEKVVMFVLGGIPDTQIERYYKSCVEFPDMNSSLGVKRSELARMIKNISFDDFKNVKQQSKGRE |
| | NVAKERAKAVIGLYLTVMYLLVKNLVNVNARYVIAIHCLERDFGLYKEIIPELASKNLKNDYRILSQ |
| | TLCELCDKSPNLFLKKNERLRKCVEVDINNADSSMTRKYRNCIAHLTVVRELKEYIGDICTVDSYFSI |
| | YHYVMQRCITKRENDTKQEEKIKYEDDLLKNHGYTKDFVKALNSPFGYNIPRFKNLSIEQLFDRNEY |
| | LTEK |
| CEAG01.1_2 | MRKPAASAKLTMFRDALTILGIDDNITDDRISEILKLKEKGKGIHGLRNFITNNVIESSRFVYLIKYAN |
| SEQ ID NO: | AQKIREVAKNEKVVMFVLGGIPDTQIERYYKSCVEFPDMNSSLGVKRSELARMIKNISFDDFKNVKQ |
| 5067 | QAKGRENVAKERAKAVIGLYLTVMYLLVKNLVNVNARYVIAIHCLERDFGLYKEIIPELASKNLKN |
| | DYRILSQTLCELCDKSPNLFLKKNERLRKCVEVDINNADSSMTRKYRNCIAHLTVVRELKEYIGDICT |
| | VDSYFSIYHYVMQRCITKRENDTKQEEKIKYEDDLLKNHGYTKDFVKALNSPFGYNIPRFKNLSIEQL |
| | FDRNEYLTEK |
| CEAH01.1_2 | MRKPAASAKLTMFRDALTILGIDDNITDDRISEILKLKEKGKGIHGLRNFITNNVIESSRFVYLIKYAN |
| SEQ ID NO: | AQKIREVAKNEKVVMFVLGGIPDTQIERYYKSCVEFPDMNSSLGVKRSELARMIKNISFDDFKNVKQ |
| 5068 | QAKGRENVAKERAKAVIGLYLTVMYLLVKNLVNVNARYVIAIHCLERDFGLYKEIIPELASKNLKN |
| | DYRILSQTLCELCDKSPNLFLKKNERLRKCVEVDINNADSSMTRKYRNCIAHLTVVRELKEYIGDICT |
| | VDSYFSIYHYVMQRCITKRENDTKQEEKIKYEDDLLKNHGYTKDFVKALNSPFGYNIPRFKNLSIEQL |
| | FDRNEYLTEK |
| CEAF01.1_2 | MRKPAASAKLTMFRDALTILGIDDNITDDRISEILKLKEKGKGIHGLRNFITNNVIESSRFVYLIKYAN |
| SEQ ID NO: | AQKIREVAKNEKVVMFVLGGIPDTQIERYYKSCVEFPDMNSSLGVKRSELARMIKNISFDDFKNVKQ |
| 5069 | QAKGRENVAKERAKAVIGLYLTVMYLLVKNLVNVNARYVIAIHCLERDFGLYKEIIPELASKNLKN |
| | DYRILSQTLCELCDKSPNLFLKKNERLRKCVEVDINNADSSMTRKYRNCIAHLTVVRELKEYIGDICT |
| | VDSYFSIYHYVMQRCITKRENDTKQEEKIKYEDDLLKNHGYTKDFVKALNSPFGYNIPRFKNLSIEQL |
| | FDRNEYLTEK |
| GCA_ | MPAVEVIAPAAEKKKSSVKAAGMKSILVSENKMYITSFGKGNSAVLEYEVDNNDYNKTQLSSKDNS |
| 003460765.1_ | NIELGNVNEVNITFSSRRGFESGVEINTSNPTHRSGESSSVRGDMLGLKSELEKRFFGKTFDDNIHIQLI |
| ASM346076v1_ | YNILDIEKILAVYVTNIVYALNNMLGEGGDESHDDFMGYLSAKNTYDVFTNPNGSTLSDDKKENIRK |
| genomic | SLRKFNDLLKTKRLGYFGLEEPKTKDTRVSQAYKKRVYHMLAIVGQIRQCVFHDLSEHSEYDLYSFI |
| SEQ ID NO: | DNSKKVYRECRETLDYLVDERFDSINKGFIQGNKVNISLLIDMMKGYEADDIIRLYYDFIVLKSQKNL |
| 5070 | GFSIKKLREKMLDEYGFRFKDKQYDSVRSKMYKLMDFLLFCNYYRNDVVAGEALVRKLRFSMTDD |
| | EKEGIYADEAAKLWGKFRNDFENIADHMNGDVIKELGKADMDFDEKILDSEKKNASDLLYFSKMIY |
| | MLTYFLDGKEINDLLTTLISKFDNIKEFLKIMKSSAVDVECELTAGYKLFNDSQRITNELFIVKNIASM |
| | RKPAASARLTMFRDALTILGIDDKITDDRISEILKLKEKGKGIHGLRNFITNNVIESSRFVYLIKYANAQ |
| | KIREVAKNEKVVMFVLGGIPDTQIERYYKSCVEFPDMNSSLEAKRSELARMIKNISFDDFKNVKQQA |
| | KGRENVAKERAKAVIGLYLTVMYLLVKNLVNVNARYVIAIHCLERDFGLYKEIIPELASKNLKNDY |
| | RILSQTLCELCDKSPNLFLKKNERLRKCVEVDINNADSSMTRKYRNCIAHLTVVRELKEYIGDIRTVD |
| | SYFSIYHYVMQRCITKRENDTKQEDKIKYEDDLLKNHGYTKDFVKALNSPFGYNIPRFKNLSIEQLFD |
| | RNEYLTEK |
| OQMA01.1 | MLGVKGSESYDDFMGYLSAQNTYYIFTHPDKSNLSDKVKGNIKKSLSKFNDLLKTKRLGYFGLEEP |
| SEQ ID NO: | KTKDKRVSEAYKKRVYHMLAIVGQIRQSVFHDKSNELDEYLYSFIDIIDSEYRDTLDYLVDERFDSIN |
| 5071 | KGFVQGNKVNISLLIDMMKGYEADDIIRLYYDFIVLKSQKNLGFSIKKLREKMLDEYGFRFKDKQYD |
| | SVRSKMYKLMDFLLFCNYYRNDVVAGEALVRKLRFSMTDDEKEGIYADEAAKLWGKFRNDFENIA |
| | DHMNGDVTKELGKADMDFDEKILDSEKKNASDLLYFSKMIYMLTYFLDGKEINDLLTTLISKFDNIK |
| | EFLKIMESSAVDVECELTAGYKLFNDSQRITNELFIVKNIASMRKPAASAKLTMFRDALTILGIDDKIT |
| | DDRISEILKLKEKGKGIHGLRNFITNNVIESSRFVYLIKYANAQKIREVAKNEKWMFVLGGIPDTQIE |
| | RYYKSCVEFPDMNSSLEAKRSELARMIKNISFDDFKNVKQQAKGRENVAKERAKAVIGLYLTVMYL |
| | LVKNLVNVNARYVIAIHCLERDFGLYKEIIPELASKNLKNDYRILSQTLCELCDKSPNLFLKKNERLR |
| | KCVEVDINNADSSMTRKYRNCIAHLTVVRELKEYIGDIRTVDSYFSIYHYVMQRCITKRENDTKQED |
| | KIKYEDDLLKNHGYTKDFVKALNSPFGYNIPRFKNLSIEQLFDRNEYLTEK |
| OLQX01.1 | MTCQNTQSMTFTALLTIAKKCTESAENLVDERFDSINKGFIQGNKVNISLLIDMMKGYEADDIIRLYY |
| SEQ ID NO: | DFIVLKSQKNLGFSIKKLREKMLDEYGFRFKDKQYDSVRSKMYKLMDFLLFCNYYRNDVVAGEAL |
| 5072 | VRKLRFSMTDDEKEGIYADEAAKLWVKFRNDFENIADHMNGDVIKELGKADMDFDEKILDSEKKN |
| | ASDLLYFSKMIYMLTYFLDGKEINDLLTTLISKFDNIKEFLKIMKSSAVDVECELTAGYKLFNDSQRIT |
| | NELFIVKNIASMRKPAASAKLTMFRDALTILGIDDNITDDRISEILKLKEKGKGIHGLRNFITNNVIESS |
| | RFVYLIKYANAQKIREVAENEKVVMFVLGGIPDTQIERYYKSCVEFPDMNSSLEVKRSELARMIKNIS |
| | FDDFKNVKQQAKGRENVAKERAKAVIGLYLTVMYLLVKNLVNVNARYVIAIHCLERDFGLYKEIIP |
| | ELASKNLKNDYRILSQTLCELCDKSPNLFLKKNERLRKCVEVDINNADSSMTRKYRNCIAHLTVVRE |
| | LKEYIGDIRTVDSYFSIYHYVMQRCITKREDDTKQEEKIKYEDDLLKNHGYTKDFVKALNSPFGYNIP |
| | RFKNLSIEQLFDRNEYLTEK |
| mgm4491403.3_ | LRNFXXXXXXXXXXXXXXXXXXXXXXXXXXXXXXXXXIESSRFVYLIKYANAQKIREVAKNEKV |
| 2 | VMFVLGGIPDTQIERYYKSCVEFPDMNSSLEAKCSELARMIKNISFDDFKNVKQQAKGRENVAKERA |
| SEQ ID NO: | KAVIGLYLTVMYLLVKNLVNVNARYVIAIHCLERDFGLYKEIIPELASKNLKNDYRILSQTLCELCDD |
| 5073 | RDESPNLFLKKNKRLRKCVEVDINNADSSMTRKYRNCIAHLTVVRELKEYIGDIRTVDSYFSIYHYV |
| | MQRCITKREDDTKQEEKIKYEDDLLKNHGYTKDFVKALNSPFGYNIPRFKNLSIEQLFDRNEYLTEK |
| GCA_ | VEINTSNPTHRSGESSPVRWDMLGLKSELEKRFFGKTFDDNIHIQLIYNILDIEKILAVYVTNIVYALN |
| 003460465.1_ | NMLGVKGSESHDDFIGYLSAKNTYEVFTHPDKSNLSDKVKGNIKKSFSTFNDLLKTKRLGYFGLEEP |
| ASM346046v1_ | KTKDNRVSEAYKKRVYHMLAIVGQIRQCVFHDLSEHLEYDLYSFIDNSKKVYRECRETLDYLVDER |
| genomic | FDSINKGFIQGNKVNISLLIDMMKGYEADDIIRLYYDFIVLKSQKNLGFSIKKLREKMLDEYGFRFKD |
| SEQ ID NO: | KQYDSVRSKMYKLMDFLLFCNYYRNDVIAGEALVRKLRFSMTDDEKEGIYADEAAKLWGKFKNDF |
| 5074 | ENIADHMNGDVIKELGKADMDFDEKILDSEKKNASDLLYFSKMIYMLTYFLDGKEINDLLTTLISKF |
| | DNIKEFLKIMKSSAVDVECELTAGYKLFNDSQRITNELFIVKNIASMRKPAASAKLTMFRDALTILGID |
| | DNITDDRISEILKLKEKGKGIHGLRNFITNNVIESSRFVYLIKYANAQKIREVAKNEKVVMFVLGGIPD |
| | TQIERYYKSCVEFPDMNSSLEAKRSELARMIKNIRFDDFKNVKQQAKGRENVAKERAKAVIGLYLT |
| | VMYLLVKNLVNVNARYVIAIHCLERDFGLYKEIIPELASKNLKNDYRILSQTLCELCDYRDKSPNLFL |
| | KKNKRLRKCVEVDINNADSSMTRKYRNCIAHLTVVRELKEYIGDIRTVDSYFSIYHYVMQRCITKRE |
| | DDTKQEDKIKYEDNLLKNHGYTKDFVKALNSPFGYNIPRFKNLSIEQLFDRNEYLTEK |
| OVYG01.1 | VEINTSNPTHRSGESSPVRGDMLGLKSELEKRFFGKTFDDNIHIQLIYNILDIEKILAVYVTNIVYALNN |
| SEQ ID NO: | MLGEGDESNYDFMGYLSTFNTYKVFTNPNGSTLSDDKKENIRKSLSKFNALLKTKRLGYFGLEEPKT |
| 5075 | KDKRVSEAYKKRVYHMLAIVGQIRQSVFHDKSNELDEYLYSFIDIIDSEYRDTLDYLVDERFDSINKG |
| | FVQGNKVNISLLIDMMKGYEADDIIRLYYDFIVLKSQKNLGFSIKKLREKMLDEYGFRFKDKQYDSV |
| | RSKMYKLMDFLLFCNYYRNDVAAGEALVRKLRFSMTDGEKEGIYADEAEKLWGKFRNDFENIADH |
| | MNGDVTKELGKADMDFDEKILDSEKKNASDLLYFSKMIYMLTYFLDGKEINDLLTTLISKFDNIKEFL |
| | KIMKSSAVDVECELTAGYKLFNDSQRITNELFIVKNIASMRKPAASAKLTMFRDALTILGIDDNITDD |
| | RISEILKLKEKGKGIHGLRNFITNNVTESSRFVYLIKYANAQKIREVAKNEKWMFVLGGIPDTQIERY |
| | YKSCVEFPDMNSSLEVKRSELARMIKNISFDDFKNVKQQAKGRENVAKERAKAVIGLYLTVMYLLV |
| | KNLVNVNARYVIAIHCLERDFGLYKEIIPELASKNLKNDYRILSQTLCELCDKSPNLFLKKNRRLRKC |
| | VEVDINNADSSMTRKYRNCIAHLTVVRELKEYIGDIRTVDSYFSIYHYVMQRCITKRGDDTKQEEKI |
| | KYEDDLLKNHGYTKDFVKALNSPFGYNIPRFKNLSIEQLFDRNEYLTEK |
| UPUD01.1 | VEINTSNPTHRSGESSPVRGDMLGLKSELEKRFFGKTFDDNIHIQLIYNILDIEKILAVYVTNIVYALNN |
| SEQ ID NO: | MLGEGDESNYDFMGYLSTFNTYKVFTNPNGSTLSDDKKENIRKSLSKFNALLKTKRLGYFGLEEPKT |
| 5076 | KDKRVSEAYKKRVYHMLAIVGQIRQSVFHDKSNELDEYLYSFIDIIDSEYRDTLDYLVDERFDSINKG |
| | FVQGNKVNISLLIDMMKGYEADDIIRLYYDFIVLKSQKNLGFSIKKLREKMLDEYGFRFKDKQYDSV |
| | RSKMYKLMDFLLFCNYYRNDVAAGEALVRKLRFSMTDGEKEGIYADEAEKLWGKFRNDFENIADH |
| | MNGDVTKELGKADMDFDEKILDSEKKNASDLLYFSKMIYMLTYFLDGKEINDLLTTLISKFDNIKEFL |
| | KIMKSSAVDVECELTAGYKLFNDSQRITNELFIVKNIASMRKPAASAKLTMFRDALTILGIDDNITDD |
| | RISEILKLKEKGKGIHGLRNFITNNVTESSRFVYLIKYANAQKIREVAKNEKWMFVLGGIPDTQIERY |
| | YKSCVEFPDMNSSLEVKRSELARMIKNISFDDFKNVKQQAKGRENVAKERAKAVIGLYLTVMYLLV |
| | KNLVNVNARYVIAIHCLERDFGLYKEIIPELASKNLKNDYRILSQTLCELCDKSPNLFLKKNRRLRKC |
| | VEVDINNADSSMTRKYRNCIAHLTVVRELKEYIGDIRTVDSYFSIYHYVMQRCITKRGDDTKQEEKI |
| | KYEDDLLKNHGYTKDFVKALNSPFGYNIPRFKNLSIEQLFDRNEYLTEK |
| IMG_ | MISYAFITISXXXXIVLKSQKNLGFSIKKLREKMLDEYGFRFKDKQYDSVRSKMYKLMDFLLFCNYY |
| 3300014744_2 | RNDVVAGEALVRKLRFSMTDDEKEGIYADEAAKLWGKFRNDFENIADHMNGDVIKELGKADMDF |
| SEQ ID NO: | DEKILDSEKKNASDLLYFSKMIYMLTYFLDGKEINDLLTTLISKFDNIKEFLKIMKSSAVDVECELTAG |
| 5077 | YKLFNDSQRITNELFIVKNIASMRKPAASAKLTMFRDALTILGIDDNITDDRISEILKLKEKGKGIHGL |
| | RNFITNNVIESSRFVYLIKYANAQKIREVAKNEKVVMFVLGGIPDTQIERYYKSCVEFPDMNSSLEVK |
| | RSELARMIKNICFDDFKNVKQQAKGRENVAKERAKAVIGLYLTVMYLLVKNLVNVNARYVIAIHCL |
| | ERDFGLYKEIVSELASKNLKNDYRILSQTLCELCDKSPNLFLKKNERLRKCVEVDINNADSSMTRKY |
| | RNCIAHLTVVRELKEYIGDIRAVDSYFSIYHYVMQRCITKRGNDTKQEDKIKYEDDLLKNHGYTKDF |
| | VKALNSPFGYNIPRFKNLSIEQLFDRNEYLTEK |
| OBII01.1 | MKSILVSKNKMYITSFGKGNSAVLEYEVDNNDYNKTQLSSKDNSNIELRGVTKVNITFSSKHGLESG |
| SEQ ID NO: | VEINTSNPTHRSGESSPVRWDMLGLKSELEKRFFGKTFDDNIHIQLIYNILDIEKILAVYVTNIVYALN |
| 5078 | NMLGVKGSESHDDFIGYLSTNNTYDVFIDPDNSSLSDDKKANVRKSLSKFNALLKTKRLGYFGLEEP |
| | KTKDNRVSEAYKKRVYHMLAIVGQIRQCVFHDKSGAKRFDLYSFINNIDPEYRETLDYLVDERFDSI |
| | NKDFIQGNKVNISLLIDMMKGYEADDIIRLYYDFIVLKSQKNLGFSIKKLREKMLDEYGFRFKDKQY |
| | DSVRSKMYKLMDFLLFCNYYRNDVVAGEALVRKLRFSMTDDEKEGIYADEAAKLWGKFRNDFENI |
| | ADHMNGDVTKELGKADMDFDEKILDSEKKNASDILYFSKMIYMLTYFLDGKEINDLLTTLISKFDNIK |
| | EFLKIMKSSAVDVECELTAGYKLFNDSQRITNELFIVKNIASMRKPAASAKLTMFRDALTILGIDDNIT |
| | DDRISEILKLKEKGKGIHGLRNFITNNVIESSRFVYLIKYANAQKIREVAKNEKWMFVLGGIPDTQIE |
| | RYYKSCVEFPDMNSSLEVKRSELARMIKNISFDDFKNVKQQAKGRENVAKERAKAVIGLYLTVMYL |
| | LVKNLVNVNARYVIAIHCLERDFGLYKEIIPELASKNLKNDYRILSQTLCDDRDESPNLFLKKNKRLR |
| | KCVEVDINNADSSMTRKYRNCIAHLTVVRELKEYIGDIRTVDTYFSIYHYVMQRCITKREDDTKQEE |
| | KIKYEDDLLKNHGYTKDFVKALNSPFGYNIPRFKNLSIEQLFDRNEYLTEK |
| OWFW01.1 | VEINTSNPTHRSGESSPVRGDMLGLKSELEKRFFGKTFDDNIHIQLIYNILDIEKILAVYVTNIVYALNN |
| SEQ ID NO: | MLGVKGSESHDDFIGYLSTNNTYDVFIDPDNSSLSDDKKANVRKSLSKFNVLLKTKRLGYFGLEEPK |
| 5079 | TKDNRVSEAYKKRVYHMLAIVGQIRQCVFHDKSGAKRFDLYSFINNIDPEYRDTLDYLVEERLKSIN |
| | KDFIQGNKVNISLLIDMMKGYEADDIIRLYYDFIVLKSQKNLGFSIKKLREKMLDEYGFRFKDKQYD |
| | SVRSKMYKLMDFLLFCNYYRNDVVAGEALVRKLRFSMTDDEKEGIYADEAAKLWGKFRNDFENIA |
| | DHMNGEAIKELGKADMDFDEKILDSEKKNASDLLYFSKMIYMLTYFLDGKEINDLLTTLISKFDNIK |
| | EFLKIMKSSAVDVECELTAGYKLFNDSQRITNELFIVKNIASMRKPAASAKLTMFRDALTILGIDDNIT |
| | DDRISEILKLKEKGKGIHGLRNFITNNVIESSRFVYLIKYANAQKIREVAKNEKVVMFVLGGIPDTQIE |
| | RYYKSCVEFPDMNSSLEAKRSELARMIKNIGFDDFKNVKQQAKGRENVAKERAKAVIGLYLTVMY |
| | LLVKNLVNVNARYVIAIHCLERDFGLYKEIIPELASKNLKNDYRILSQTLCELCDDRDESPNLFLKKN |
| | KRLRKCVEVDINNADSSMTRKYRNCIAHLTVVRELKEYIGENASALKKADTWSSDVYSATNETGFCI |
| | QPAGLLLERENKTALVNANSSTAYWLYDGTQKQLDKVVMFANSNNDIALKNAVKPEGKDYYNAF |
| | SIRCIKE |
| UXUP01.1 | VEINTSNPTHRSGESSPVRGDMLGLKSELEKRFFGKTFDDNIHIQLIYNILDIEKILAVYVTNIVYALNN |
| SEQ ID NO: | MLGVKGSESHDDFIGYLSTNNTYDVFIDPDNSSLSDDKKANVRKSLSKFNVLLKTKRLGYFGLEEPK |
| 5080 | TKDNRVSEAYKKRVYHMLAIVGQIRQCVFHDKSGAKRFDLYSFINNIDPEYRDTLDYLVEERLKSIN |
| | KDFIQGNKVNISLLIDMMKGYEADDIIRLYYDFIVLKSQKNLGFSIKKLREKMLEEYGFRFKDKQYDS |
| | VRSKMYKLMDFLLFCNYYRNDIAAGEALVRKLRFSMTDDEKEGLYADEAAKLWGKFRNDFENIAD |
| | HMNGDVTKELGKADMDFDEKILDSEKKNASDLLYFSKMIYMLTYFLDGKEINDLLTTLISKFDNIKEF |
| | LKIMKSSAVNVECELTAGYKLFNDSQRITNELFIVKNIASMRKPAASAKLTMFRDALTILGIDDKITD |
| | DRISEILKLKEKGKGIHGLRNFITNNVIESSRFVYLIKYANAQKIREVAENEKVVMFVLGGIPDTQIER |
| | YYKSCVEFPDMNSSLEAKRSELARMIKNIRFDDFKNVKQQAKGRENVAKERAKAVIGLYLTVMYLL |
| | VKNLVNVNARYVIAIHCLERDFGLYKEIIPELASKNLKNDYRILSQTLCELCDDRDESPNLFLKKNTC |
| | VPVRATDSESAGIS |
| OZEB01.1 | VEINTSNPTHRSGESSPVRGDMLGLKSELEKRFFGKTFDDNIHIQLIYNILDIEKILAVYVTNIVYALNN |
| SEQ ID NO: | MLGVKGSESHDDFIGYLSTNNTYDVFIDPDNSSLSDDKKANVRKSLSKFNVLLKTKRLGYFGLEEPK |
| 5081 | TKDNRVSEAYKKRVYHMLAIVGQIRQCVFHDKSGAKRFDLYSFINNIDPEYRDTLDYLVEERLKSIN |
| | KDFIQGNKVNISLLIDMMKGYEADDIIRLYYDFIVLKSQKNLGFSIKKLREKMLEEYGFRFKDKQYDS |
| | VRSKMYKLMDFLLFCNYYRNDIAAGEALVRKLRFSMTDDEKEGYMLMKRQSFGANSGMILKISPTT |
| UPPS01.1 | VLSGIFVNAFSSKHGFESGVEINTSNPTHRSGESSPVRGDMLGLKSELEKRFFGKTFDDNIHIQLIYNIL |
| SEQ ID NO: | DIEKILAVYVTNIVYALNNMLGVKGSESHDDFIGYLSTNNTYDVFIDPDNSSLSDDKKANVRKSLSKF |
| 5082 | NVLLKTKRLGYFGLEEPKTKDNRVSEAYKKRVYHMLAIVGQIRQCVFHDKSGAKRFDLYSFINNIDP |
| | EYRDTLDYLVEERLKSINKDFIQGNKVNISLLIDMMKGYEADDIIRLYYDFIVLKSQKNLGFSIKKLRE |
| | KMLEEYGFRFKDKQYDSVRSKMYKLMDFLLFCNYYRNDIAAGEALVRKLRFSMTDDEKEGIYADE |
| | AEKLWVKFRNDFENIADHMNGDVIKELGKADMDFDEKILDSEKKNASDLLYFSKMIYMLTYFLDG |
| | KEINDILTTLISKFDNIKEFLKIMKSSAVDVECELTAGYKLFNDSQRITNELFIVKNIASMRKPAASAKL |
| | TMFRDALTILGIDDNITDDRISEILKLKEKGKGIHGRYTFWQSAVFFKGA |
| OQLI01.1 | VLSGIFVNAFSSKHGFESGVEINTSNPTHRSGESSPVRGDMLGLKSELEKRFFGKTFDDNIHIQLIYNIL |
| SEQ ID NO: | DIEKILAVYVTNIVYALNNMLGEGDESNYDFMGYLSTFNTYKVFTNPNGSTLSDDKKENIRKSLSKF |
| 5083 | NALLKTKRLGYFGLEEPKTKDNRVSEAYKKRVYHMLAIVGQIRQCVFHDKSGAKRFDLYSFINNIDP |
| | EYRETLDYLVDERFDSINKGFIQGNKVNISLLSDMMKDDYEADDIIRLYYDFIVLKSQKNLGFSIKKL |
| | REKMLEEYGFRFKDKQYDSVRSKMYKLMDFLLFCNYYRNDVVAGEALVRKLRFSMTDDEKEGIYA |
| | DEAAKLWGKFRNDFENIADHMNGDVIKELGQADMDFDEKILDSEKKNASDLLYFSKMIYMLTYFL |
| | DDKEINDLLTTLISKFDNIKEFLKIMKSSAVDVECELTAGYKLFNDGQRITNELFIVKNIASMRKPAAS |
| | AKLTMFRDALTILGIDDKITDDRISEILKLKEKGKGIHGLRNFITNNVIESSRFVYLIKYANAQKIREVA |
| | ENEKVVMFVLGGIPDTQIERYYKSCVEFPDMNSSVEAKRSELARMIKNIRFDDFKNVKQQAKGREN |
| | VAKERAKAVIGLYLTVMYLLVKNLVNVNARYVIAIHCLERDFGLYKEIIPELASKNLKNDYRILSQT |
| | LCELCDDRDESPNLFLKKNKRLRKCVEVDINNADSNMTRKYRNCIAHLTVVRELKEYIGDIRTVDSY |
| | FSIYHYVMQRCITKRENDTKQEEKVKSEDDLLKNHGYTIDYATAIKSPFGYKI |
| mgm4491403.3 | MLAIVGQIRQSVFHDKSNELDEYLYSFIDIIDSEYRDTLDYLVDERFDSINKGFVQGNKVNISLLIDMM |
| SEQ ID NO: | KGYEADDIIRLYYDFIVLKSQKNLGFSIKKLREKMLDEYGFRFKDKQYDSVRSKMYKLMDFLLFCN |
| 5084 | AEKLWGKFRNDFENIADHMNGDVIKELGKADMDFDEKILDSEKKNASDLLYFSKMXXXXXXXXX |
| | XXXXXXXXXXXXXXXXXXXXXXXXXXXXXXXXXXTIFLQRLSASLITSRSF |
| USWZ01.1 | MNGDVTKELGKADMDFDEKILDSEKKNASDLLYFSKMIYMLTYFLDGKEINDLLTTLISKFDNIKEFL |
| SEQ ID NO: | KIMKSSAVDVECELTAGYKLFNDSQRITNELFIVKNIASMRKPAASAKLTMFRDALTILGIDDKITDD |
| 5085 | RISEILKLKEKGKGIHGLRNFITNNVTESSRFVYLIKYANAQKIREVAENEKWMFVLGGILDTQIERY |
| | YKSCVEVPDMNSSLEAKRSELARMIKNISFDDFKNVKQQGPRRVGRTAHRRDGRNARRKTLRGFDA |
| | PHPRRRDGQRNLDPDSDTELHDVSVHGRRRRQEFRHRQIRPDDLRGHRQGRNESLLLRHRRPSGLDF |
| | DGRKIL |
| IMG_ | MGKGNHKSIAKASGLKSTFINGNEVTMTSFGKGNSAVLEKKIIDSEVEDLNPDKAFTVEENNVQKGK |
| 3300028833 | LRIKSNRMSDPATADNPVHVSPEKVGKSIKGQDIIGCKDVLEQRYFGQTFDDNIHIQLIYNILDIEKILA |
| SEQ ID NO: | VHVTNATFAVNNIMRIEDTENEDFIGNLSSCNTYDSFRNYESDTNLSPNVKANLKRSNEFFDIIKKDT |
| 5086 | RLGYFGPAFYEKKGKNFVRKPDKSIYHVLALIGNLRQFVVHDTTIITGKEKSRSWLYNIDKQIGPEFIQ |
| | TMTELYNAAVQNIDRDFIETNKVDIRIIHDAFYLIYGSSDWQKIAEEYYRFSIEKSYKNIGFSVKKLRE |
| | EIISTYAVKFENHKYDSVRHKLNKIIDFLIFTSYSTDDISQKVSVLRTCMNDEEKEERFYKPEAKNIWD |
| | KFRDIFNEFIPERINGKAVSELKKEHFSHREINIDSLKISRKNPDSFSKLIYLLTLFLDGKEINDLLTTLIN |
| | KFDNISSFISIMKEMNISCDFTDEYRFFNKSKYICSELRLINSFARMTSPVSLAKREMYREAVEILGTAG |
| | MNEDEKESLLDKVLCIDGNGKYISSKTDRNRDVNLRNFIANNVIESSRFKYLIRYNNAKKTRVLASN |
| | KTVVRFLLERIDELNEKQIDRYYETCSSDKTLKNKKDKIDFLTELIIKIDCSQFLKVKNRVRAGTAEA |
| | QEKERLKAVVGLYLTIMYIITKNMVYVNSRYVTAFHCLERDRVLLNAEKGDYCALTSLFLASENNA |
| | KYALGRNKRASIYIKHNCGTITKDFLVNYRNAIAHLSVVRNMESYISDIKYVDNYFALYHYTMQRW |
| | LFDQKAVTDQSPVFLKKYNNNLNEYHTYCKDFVKALNVPFAYNLARYKNLSIAELFDMNDTKTESS |
| | AKFGNEAIPVE |
| IMG_ | MGKGNHKSIAKASGLKSTFINGNEVTMTSFGKGNSAVLEKKIIDSEVEDLNPDKAFTVEENNVQKGK |
| 3300031992 | LRIKSNRMSDPATADNPVHVSPEKVGKSIKGQDIIGCKDVLEQRYFGQTFDDNIHIQLIYNILDIEKILA |
| SEQ ID NO: | VHVTNATFAVNNIMRIEDTENEDFIGNLSSCNTYDSFRNYESDTNLSPNVKANLKRSNEFFDIIKKDT |
| 5087 | RLGYFGPAFYEKKGKNFVRKPDKSIYHVLALIGNLRQFVVHDTTIITGKEKSRSWLYNIDKQIGPEFIQ |
| | TMTELYNAAVQNIDRDFIETNKVDIRIIHDAFYLIYGSSDWQKIAEEYYRFSIEKSYKNIGFSVKKLRE |
| | EIISTYAVKFENHKYDSVRHKLNKIIDFLIFTSYSTDDISQKVSVLRTCMNDEEKEERFYKPEAKNIWD |
| | KFRDIFNEFIPERINGKAVSELKKEHFSHREINIDSLKISRKNPDSFSKLIYLLTLFLDGKEINDLLTTLIN |
| | KFDNISSFISIMKEMNISCDFTDEYRFFNKSKYICSELRLINSFARMTSPVSLAKREMYREAVEILGTAG |
| | MNEDEKESLLDKVLCIDGNGKYISSKTDRNRDVNLRNFIANNVIESSRFKYLIRYNNAKKTRVLASN |
| | KTVVRFLLERIDELNEKQIDRYYETCSSDKTLKNKKDKIDFLTELIIKIDCSQFLKVKNRVRAGTAEA |
| | QEKERLKAVVGLYLTIMYIITKNMVYVNSRYVTAFHCLERDRVLLNAEKGDYCALTSLFLASENNA |
| | KYALGRNKRASIYIKHNCGTITKDFLVNYRNAIAHLSVVRNMESYISDIKYVDNYFALYHYTMQRW |
| | LFDQKAVTDQSPVFLKKYNNNLNEYHTYCKDFVKALNVPFAYNLARYKNLSIAELFDMNDTKTESS |
| | AKFGNEAIPVE |
| IMG_ | MGKGNHKSIAKASGLKSTFINGNEVTMTSFGKGNSAVLEKKIIDSEVEDLNPDKAFTVEENNVQKGK |
| 3300024342 | LRIKSNRMSDPATADNPVHVSPEKVGKSIKGQDIIGCKDVLEQRYFGQTFDDNIHIQLIYNILDIEKILA |
| SEQ ID NO: | VHVTNATFAVNNIMRIEDTENEDFIGNLSSCNTYDSFRNYESDTNLSPNVKANLKRSNEFFDIIKKDT |
| 5088 | RLGYFGPAFYEKKGKNFVRKPDKSIYHVLALIGNLRQFVVHDTTIITGKEKSRSWLYNIDKQIGPEFIQ |
| | TMTELYNAAVQNIDRDFIETNKVDIRIIHDAFYLIYGSSDWQKIAEEYYRFSIEKSYKNIGFSVKKLRE |
| | EIISTYAVKFENHKYDSVRHKLNKIIDFLIFTSYSTDDISQKVSVLRTCMNDEEKEERFYKPEAKNIWD |
| | KFRDIFNEFIPERINGKAVSELKKEHFSHREINIDSLKISRKNPDSFSKLIYLLTLFLDGKEINDLLTTLIN |
| | KFDNISSFISIMKEMNISCDFTDEYRFFNKSKYICSELRLINSFARMTSPVSLAKREMYREAVEILGTAG |
| | MNEDEKESLLDKVLCIDGNGKYISSKTDRNRDVNLRNFIANNVIESSRFKYLIRYNNAKKTRVLASN |
| | KTVVRFLLERIDELNEKQIDRYYETCSSDKTLKNKKDKIDFLTELIIKIDCSQFLKVKNRVRAGTAEA |
| | QEKERLKAVVGLYLTIMYIITKNMVYVNSRYVTAFHCLERDRVLLNAEKGDYCALTSLFLASENNA |
| | KYALGRNKRASIYIKHNCGTITKDFLVNYRNAIAHLSVVRNMESYISDIKYVDNYFALYHYTMQRW |
| | LFDQKAVTDQSPVFLKKYNNNLNEYHTYCKDFVKALNVPFAYNLARYKNLSIAELFDMNDTKTESS |
| | AKFGNEAIPVE |
| IMG_ | MGKGNHKSIAKASGLKSTFINGNEVTMTSFGKGNSAVLEKKIIDSEVEDLNPDKAFTVEENNVQKGK |
| 3300024342_2 | LRIKSNRMSDPATADNPVHVSPEKVGKSIKGQDIIGCKDVLEQRYFGQTFDDNIHIQLIYNILDIEKILA |
| SEQ ID NO: | VHVTNATFAVNNIMRIEDTENEDFIGNLSSCNTYDSFRNYESDTNLSPNVKANLKRSNEFFDIIKKDT |
| 5089 | RLGYFGPAFYEKKGKNFVRKPDKSIYHVLALIGNLRQFVVHDTTIITGKEKSRSWLYNIDKQIGPEFIQ |
| | TMTELYNAAVQNIDRDFIETNKVDIRIIHDAFYLIYGSSDWQKIAEEYYRFSIEKSYKNIGFSVKKLRE |
| | EIISTYAVKFENHKYDSVRHKLNKIIDFLIFTSYSTDDISQKVSVLRTCMNDEEKEERFYKPEAKNIWD |
| | KFRDIFNEFIPERINGKAVSELKKEHFSHREINIDSLKISRKNPDSFSKLIYLLTLFLDGKEINDLLTTLIN |
| | KFDNISSFISIMKEMNISCDFTDEYRFFNKSKYICSELRLINSFARMTSPVSLAKREMYREAVEILGTAG |
| | MNEDEKESLLDKVLCIDGNGKYISSKTDRNRDVNLRNFIANNVIESSRFKYLIRYNNAKKTRVLASN |
| | KTVVRFLLERIDELNEKQIDRYYETCSSDKTLKNKKDKIDFLTELIIKIDCSQFLKVKNRVRAGTAEA |
| | QEKERLKAVVGLYLTIMYIITKNMVYVNSRYVTAFHCLERDRVLLNAEKGDYCALTSLFLASENNA |
| | KYALGRNKRASIYIKHNCGTITKDFLVNYRNAIAHLSWRNMESYISDIKYVDNYFALYHYTMQRW |
| | LFDQKAVTDQSPVFLKKYNNNLNEYHTYCKDFVKALNVPFAYNLARYKNLSIAELFDMNDTKTESS |
| | AKFGNEAIPVE |
| IMG_ | MAKKKKAKQRREEQEAARMNKIQSAVKAKAETAPAVSSAFVEKRKDKQSKKTFAKASGLKSTLAV |
| 3300024270 | DNSAVMTVFGRGNEAKLDHRINADLQSESLHPQAALKNVHAPNKQKIHFIGRMQDMNLTADHPLH |
| SEQ ID NO: | SHDGERAVGADLLCAKDKLEQLYFGRTFNDNIHIQLIYQILDIQKILALHANNIIFALDNLLHKKNDE |
| 5090 | LSDDFVGMGRMRATIGYDAFRNSTNQKVQETYREFQEFVRRKELLYFGSAFYNGDTRRDEKVIYHI |
| | LSLAASVRQFCFHNDYTSDDGKGFIKADWMYRLEEALPAEYKDTLDALYLEGVEGLDQSFLKNNT |
| | VNIQILCSIFNHDDPNKIAEEYYGFLMTKEYKNMGFSIKKLRECMLELPELSGYKEDQYNSVRSKLY |
| | KLFDFIIAHYFRKHPEKGEEMVDCLRLCMTEDEKDSHYEGTAKKLVRELAYDMQEAAEQANGSNIT |
| | QMQKNEQQGKTKGMFAIRDEIRVSRKPVSYFSKVIYVMTLLLDGKEINDLLTTLINKFENIVSFEDVL |
| | RQLNVDCTFKPEFAFFG |
| IMG_ | MAKKKKAKQRREEQEAARMNKIQSAVKAKAETAPAVSSAFVEKRKDKQSKKTFAKASGLKSTLAV |
| 3300018495 | DNSAVMTVFGRGNEAKLDHRINADLQSESLHPQAALKNVHAPNKQKIHFIGRMQDMNLTADHPLH |
| SEQ ID NO: | SHDGERAVGADLLCAKDKLEQLYFGRTFNDNIHIQLIYQILDIQKILALHANNIIFALDNLLHKKNDE |
| 5091 | LSDDFVGMGRMRATIGYDAFRNSTNQKVQETYREFQEFVRRKELLYFGSAFYNGDTRRDEKVIYHI |
| | LSLAASVRQFCFHNDYTSDDGKGFIKADWMYRLEEALPAEYKDTLDALYLEGVEGLDQSFLKNNT |
| | VNIQILCSIFNHDDPNKIAEEYYGFLMTKEYKNMGFSIKKLRECMLELPELSGYKEDQYNSVRSKLY |
| | KLFDFIIAHYFRKHPEKGEEMVDCLRLCMTEDEKDSHYEGTAKKLVRELAYDMQEAAEQANGSNIT |
| | QMQKNEQQGKTKGMFAIRDEIRVSRKPVSYFSKVIYVMTLLLDGKEINDLLTTLINKFENIVSFEDVL |
| | RQLNVDCTFKPEFAFFGYDRCRNISGELRLINSFARMQKPSAKAKHVMYRDALRILGLDNGMSEEAL |
| | DQEVRRILQIGADGKPIKNANKGFRNFIASNVIESSRFRYLVRYNNPHKTRMIAQNEAIVRFVLSEIPD |
| | EQIRRYYDVCRDPKLPRSSSREAQVDILTGIITDVNYRIFEDVPQSKKINKDRPDANDRMTLKK |
| IMG_ | MAKKKKAKQRREEQEAARMNKIQSAVKAKAETAPAVSSAFVEKRKDKQSKKTFAKASGLKSTLAV |
| 3300022660 | DNSAVMTVFGRGNEAKLDHRINADLQSESLHPQAALKNVHAPNKQKIHFIGRMQDMNLTADHPLH |
| SEQ ID NO: | SHDGERAVGADLLCAKDKLEQLYFGRTFNDNIHIQLIYQILDIQKILALHANNIIFALDNLLHKKNDE |
| 5092 | LSDDFVGMGRMRATIGYDAFRNSTNQKVQETYREFQEFVRRKELLYFGSAFYNGDTRRDEKVIYHI |
| | LSLAASVRQFCFHNDYTSDDGKGFIKADWMYRLEEALPAEYKDTLDALYLEGVEGLDQSFLKNNT |
| | VNIQILCSIFNHDDPNKIAEEYYGFLMTKEYKNMGFSIKKLRECMLELPELSGYKEDQYNSVRSKLY |
| | KLFDFIIAHYFRKHPEKGEEMVDCLRLCMTEDEKDSHYEGTAKKLVRELAYDMQEAAEQANGSNIT |
| | QMQKNEQQGKTKGMFAIRDEIRVSRKPVSYFSKVIYVMTLLLDGKEINDLLTTLINKFENIVSFEDVL |
| | RQLNVDCTFKPEFAFFGYDRCRNISGELRLINSFARMQKPSAKAKHVMYRDALRILGLDNGMSE |
| GCA_ | MKKQKSKKTVSKTSGLKEALSVQGTVIMTSFGKGNMANLSYKIPSSQKPQNLNSSAGLKNVEVSGK |
| 002449585.1_ | KIKFQGRHPKIATTDNPLFKPQPGMDLLCLKDKLEMHYFGKTFDDNIHIQLIYQILDIEKILAVHVNNI |
| ASM244958v1_ | VFTLDNVLHPQKEELTEDFIGAGGWRINLDYQTLRGQTNKYDRFKNYIKRKELLYFGEAFYHENER |
| genomic | RYEEDIFAILTLLSALRQFCFHSDLSSDESDHVNSFWLYQLEDQLSDEFKETLSILWEEVTERIDSEFLK |
| SEQ ID NO: | TNTVNLHILCHVFPKESKETIVRAYYEFLIKKSFKNMGFSIKKLREIMLEQSDLKSFKEDKYNSVRAK |
| 5093 | LYKLFDFIITYYYDHHAFEKEALVSSLRSSLTEENKEEIYIKTARTLASALGADFKKAAADVNAKNIR |
| | DYQKKANDYRISFEDIKIGNTGIGYFSELIYMLTLLLDGKEINDLLTTLINKFDNIISFIDILKKLNLEFK |
| | FKPEYADFFNMTNCRYTLEELRVINSIARMQKPSADARKIMYRDALRILGMDNRPDEEIDRELERTM |
| | PVGADGKFIKGKQGFRNFIASNVIESSRFHYLVRYNNPHKTRTLVKNPNVVKFVLEGIPETQIKRYFD |
| | VCKGQEIPPTSDKSAQIDVLARIISSVDYKIFEDVPQSAKINKDDPSRNFSDALKKQRYQAIVSLYLTV |
| | MYLITKNLVYVNSRYVIAFHCLERDAFLHGVTLPKMNKKIVYSQLTTHLLTDKNYTTYGHLKNQKG |
| | HRKWYVLVKNNLQNSDITAVSSFRNIVAHISVVRNSNEYISGIGELHSYFELYHYLVQSMIAKNNWY |
| | DTSHQPKTAEYLNNLKKHHTYCKDFVKAYCIPFGYVVPRYKNLTINELFDRNNPNPEPKEEV |
| IMG_ | MYRDALRILGLDNGMSEEALDQEVRRILQIGADGKPIKNANKGFRNFIASNVIESSRFRYLVRYNNPH |
| 3300024270_2 | KTRMIAQNEAIVRFVLSEIPDEQIRRYYDVCRDPKLPRSSSREAQVDILTGIITDVNYRIFEDVPQSKKI |
| SEQ ID NO: | NKDRPDANDRMTLKKQRYQAIVSLYLTVMYLVTKNLVYVNSRYVMAFHALERDAYLYGITNIKGD |
| 5094 | YRKLTDNLLADENYKKFGHFKNKKWRGIAEQNLRNSDVPVIKSFRNMAAHISVIRNIDLYIGDIQKV |
| | DSYFALYHFLMQKLIQRVVPENTKGLSDQTKKYYDALEQYNTYCKDFVKAYCTPFAYVTPRYKNL |
| | TIDGLFDRNRPGEDK |
| OWQH01.1 | MGKKIHARDLREQRKTDRTEKFADQNKKREAERAVQKKDAAVSVKSVSSVSSKKDNVTKSMAKA |
| SEQ ID NO: | AGVKSVFAVGNTVYMTSFGRGNDAVLEQKIVDTSHEPLNIDDPAYQLNVVTMNGYSVTGHRGETV |
| 5095 | SAVTDNPLRRFNGGKKDEPEQSVPTDMLCLKPTLEKKFFGKEFNDNIHIQLIYNILDIEKILAVYSTNA |
| | VYALNNTIADENNENWDLFANFSTDNTYDELNAIATYKKSADDVSTDDEKRREAEKKKREAKIAEK |
| | ILADYEKFRKNNRLAYFADAFYVDKNKSKSKPKDKAKGIQREKKKFILYLL |
| OVZD01.1_2 | MGKKIHARDLREQRKTDRTEKFADQNKKREAERAVQKKDAAVSVKSVSSVSSKKDNVTKSMAKA |
| SEQ ID NO: | AGVKSVFAVGNTVYMTSFGRGNDAVLEQKIVDTSHEPLNIDDPAYQLNVVTMNGYSVTGHRGETV |
| 5096 | SAVTDNPLRRFNGGKKDEPEQSVPTDMLCLKPTLEKKFFGKEFNDNIHIQLIYNILDIEKILAVYSTNA |
| | VYALNNTIADENNENWDLFANFSTDNTYDELNAIATYKKSADDVSTDDEKRREAEKKKREAKIAEK |
| | ILADYEKFRKNNRLAYFADAFYVDKNKSKSKPKDKAKGIQREKKKFILYLL |
| GCA_ | MGKKIHARDLREQRKTDRTEKFADQNKKREAERAVQKKDAAVSVKSVSSVSSKKDNVTKSMAKA |
| 003524315.1_ | AGVKSVFAVGNTVYMTSFGRGNDAVLEQKIVDTSHEPLNIDDPAYQLNVVTMNGYSVTGHRGETV |
| ASM352431v1_ | SAVTDNPLRRFNGGKKDEPEQSVPTDMLCLKPTLEKKFFGKEFNDNIHIQLIYNILDIEKILAVYSTNA |
| genomic | VYALNNTIADENNENWDLFANFSTDNTYDELNAIATYKKSADDVSTDDEKRREAEKKKREAKIAEK |
| SEQ ID NO: | ILADYEKFRKNNRLAYFADAFYVDKNKSKSKPKDKAKGIQREKKKFILYLL |
| 5097 | |
| UEOK01.1_2 | MGKKIHARDLREQRKTDRTEKFADQNKKREAERAVQKKDAAVSVKSVSSVSSKKDNVTKSMAKA |
| SEQ ID NO: | AGVKSVFAVGNTVYMTSFGRGNDAVLEQKIVDTSHEPLNIDDPAYQLNVVTMNGYSVTGHRGETV |
| 5098 | SAVTDNPLRRFNGGKKDEPEQSVPTDMLCLKPTLEKKFFGKEFNDNIHIQLIYNILDIEKILAVYSTNA |
| | VYALNNTIADENNENWDLFANFSTDNTYDELNAIATYKKSADDVSTDDEKRREAEKKKREAKIAEK |
| | ILADYEKFRKNNRLAYFADAFYVDKNKSKSKPKDKAKGIQREKKKFILYLL |
| OWSW01.1 | MGKKIHARDLREQRKTDRTEKFADQNKKREAERAVQKKDAAVSVKSVSSVSSKKDNVTKSMAKA |
| SEQ ID NO: | AGVKSVFAVGNTVYMTSFGRGNDAVLEQKIVDTSHEPLNIDDPAYQLNVVTMNGYSVTGHRGETV |
| 5099 | SAVTDNPLRRFNGGKKDEPEQSVPTDMLCLKPTLEKKFFGKEFNDNIHIQLIYNILDIEKILAVYSTNA |
| | VYALNNTIADENNENWDLFANFSTDNTYDELNAIATYKKSADDVSTDDEKRREAEKKKREAKIAEK |
| | ILADYEKFRKNNRLAYFADAFYVDKNKSKSKPKDKAKGIQREKKKFILYLL |
| OZRL01.1 | MGKKIHARDLREQRKTDRTEKFADQNKKREAERAVQKKDAAVSVKSVSSVSSKKDNVTKSMAKA |
| SEQ ID NO: | AGVKSVFAVGNTVYMTSFGRGNDAVLEQKIVDTSHEPLNIDDPAYQLNVVTMNGYSVTGHRGETV |
| 5100 | SAVTDNPLRRFNGGKKDEPEQSVPTDMLCLKPTLEKKFFGKEFNDNIHIQLIYNILDIEKILAVYSTNA |
| | VYALNNTIADENNENWDLFANFSTDNTYDELNAIATYKKSADDVSTDDEKRREAEKKKREAKIAEK |
| | ILADYEKFRKNNRLAYFADAFYVDKNKSKSKPKDKAKGIQREKKKFILYLL |
| OGJH01.1 | MGKKIHARDLREQRKTDRTEKFADQNKKREAERAVQKKDAAVSVKSVSSVSSKKDNVTKSMAKA |
| SEQ ID NO: | AGVKSVFAVGNTVYMTSFGRGNDAVLEQKIVDTSHEPLNIDDPAYQLNVVTMNGYSVTGHRGETV |
| 5101 | SAVTDNPLRRFNGGKKDEPEQSVPTDMLCLKPTLEKKFFGKEFNDNIHIQLIYNILDIEKILAVYSTNA |
| | VYALNNTIADENNENWDLFANFSTDNTYDELNAIATYKKSADDVSTDDEKRREAEKKKREAKIAEK |
| | ILADYEKFRKNNRLAYFADAFYVDKNKSKSKPKDKAKGIQREKKKFILYLL |
| UPRD01.1_2 | MGKKIHARDLREQRKTDRTEKFADQNKKREAERAVQKKDAAVSVKSVSSVSSKKDNVTKSMAKA |
| SEQ ID NO: | AGVKSVFAVGNTVYMTSFGRGNDAVLEQKIVDTSHEPLNIDDPAYQLNVVTMNGYSVTGHRGETV |
| 5102 | SAVTDNPLRRFNGGKKDEPEQSVPTDMLCLKPTLEKKFFGKEFNDNIHIQLIYNILDIEKILAVYSTNA |
| | VYALNNTIADENNENWDLFANFSTDNTYDELNAIATYKKSADDVSTDDEKRREAEKKKREAKIAEK |
| | ILADYEKFRKNNRLAYFADAFYVDKNKSKSKPKDKAKGIQREKKKFILYLL |
| OWRJ01.1_2 | MGKKIHARDLREQRKTDRTEKFADQNKKREAERAVQKKDAAVSVKSVSSVSSKKDNVTKSMAKA |
| SEQ ID NO: | AGVKSVFAVGNTVYMTSFGRGNDAVLEQKIVDTSHEPLNIDDPAYQLNVVTMNGYSVTGHRGETV |
| 5103 | SAVTDNPLRRFNGGKKDEPEQSVPTDMLCLKPTLEKKFFGKEFNDNIHIQLIYNILDIEKILAVYSTNA |
| | VYALNNTIADENNENWDLFANFSTDNTYDELNAIATYKKSADDVSTDDEKRREAEKKKREAKIAEK |
| | ILADYEKFRKNNRLAYFADAFYVDKNKSKSKPKDKAKGIQREKKKFILYLL |
| OKRY01.1 | MGKKIHARDLREQRKTDRTEKFADQNKKREAERAVQKKDAAVSVKSVSSVSSKKDNVTKSMAKA |
| SEQ ID NO: | AGVKSVFAVGNTVYMTSFGRGNDAVLEQKIVDTSHEPLNIDDPAYQLNVVTMNGYSVTGHRGETV |
| 5104 | SAVTDNPLRRFNGGKKDEPEQSVPTDMLCLKPTLEKKFFGKEFNDNIHIQLIYNILDIEKILAVYSTNA |
| | VYALNNTIADENNENWDLFANFSTDNTYDELNAIATYKKSADDVSTDDEKRREAEKKKREAKIAEK |
| | ILADYEKFRKNNRLAYFADAFYVDKNKSKSKPKDKAKGIQREKKKFILYLL |
| OWEZ01.1_2 | MGKKIHARDLREQRKTDRTEKFADQNKKREAERAVQKKDAAVSVKSVSSVSSKKDNVTKSMAKA |
| SEQ ID NO: | AGVKSVFAVGNTVYMTSFGRGNDAVLEQKIVDTSHEPLNIDDPAYQLNVVTMNGYSVTGHRGETV |
| 5105 | SAVTDNPLRRFNGGKKDEPEQSVPTDMLCLKPTLEKKFFGKEFNDNIHIQLIYNILDIEKILAVYSTNA |
| | VYALNNTIADENNENWDLFANFSTDNTYDELNAIATYKKSADDVSTDDEKRREAEKKKREAKIAEK |
| | ILADYEKFRKNNRLAYFADAFYVDKNKSKSKPKDKAKGIQREKKKFILYLL |
| OGYF01.1 | MGKKIHARDLREQRKTDRTEKFADQNKKREAERAVQKKDAAVSVKSVSSVSSKKDNVTKSMAKA |
| SEQ ID NO: | AGVKSVFAVGNTVYMTSFGRGNDAVLEQKIVDTSHEPLNIDDPAYQLNVVTMNGYSVTGHRGETV |
| 5106 | SAVTDNPLRRFNGGKKDEPEQSVPTDMLCLKPTLEKKFFGKEFNDNIHIQLIYNILDIEKILAVYSTNA |
| | VYALNNTIADENNENWDLFANFSTDNTYDELNAIATYKKSADDVSTDDEKRREAEKKKREAKIAEK |
| | ILADYEKFRKNNRLAYFADAFYVDKNKSKSKPKDKAKGIQREKKKFILYLL |
| UPEW01.1_2 | MGKKIHARDLREQRKTDRTEKFADQNKKREAERAVQKKDAAVSVKSVSSVSSKKDNVTKSMAKA |
| SEQ ID NO: | AGVKSVFAVGNTVYMTSFGRGNDAVLEQKIVDTSHEPLNIDDPAYQLNVVTMNGYSVTGHRGETV |
| 5107 | SAVTDNPLRRFNGGKKDEPEQSVPTDMLCLKPTLEKKFFGKEFNDNIHIQLIYNILDIEKILAVYSTNA |
| | VYALNNTIADENNENWDLFANFSTDNTYDELNAIATYKKSADDVSTDDEKRREAEKKKREAKIAEK |
| | ILADYEKFRKNNRLAYFADAFYVDKNKSKSKPKDKAKGIQREKKKFILYLL |
| UAPH01.1 | MGKKIHARDLREQRKTDRTEKFADQNKKREAERAVQKKDAAVSVKSVSSVSSKKDNVTKSMAKA |
| SEQ ID NO: | AGVKSVFAVGNTVYMTSFGRGNDAVLEQKIVDTSHEPLNIDDPAYQLNVVTMNGYSVTGHRGETV |
| 5108 | SAVTDNPLRRFNGGKKDEPEQSVPTDMLCLKPTLEKKFFGKEFNDNIHIQLIYNILDIEKILAVYSTNA |
| | VYALNNTIADENNENWDLFANFSTDNTYDELNAIATYKKSADDVSTDDEKRREAEKKKREAKIAEK |
| | ILADYEKFRKNNRLAYFADAFYVDKNKSKSKPKDKAKGIQREKKKFILYLL |
| UAPL01.1 | MGKKIHARDLREQRKTDRTEKFADQNKKREAERAVQKKDAAVSVKSVSSVSSKKDNVTKSMAKA |
| SEQ ID NO: | AGVKSVFAVGNTVYMTSFGRGNDAVLEQKIVDTSHEPLNIDDPAYQLNVVTMNGYSVTGHRGETV |
| 5109 | SAVTDNPLRRFNGGKKDEPEQSVPTDMLCLKPTLEKKFFGKEFNDNIHIQLIYNILDIEKILAVYSTNA |
| | VYALNNTIADENNENWDLFANFSTDNTYDELNAIATYKKSADDVSTDDEKRREAEKKKREAKIAEK |
| | ILADYEKFRKNNRLAYFADAFYVDKNKSKSKPKDKAKGIQREKKKFILYLL |
| UBLP01.1 | MGKKIHARDLREQRKTDRTEKFADQNKKREAERAVQKKDAAVSVKSVSSVSSKKDNVTKSMAKA |
| SEQ ID NO: | AGVKSVFAVGNTVYMTSFGRGNDAVLEQKIVDTSHEPLNIDDPAYQLNVVTMNGYSVTGHRGETV |
| 5110 | SAVTDNPLRRFNGGKKDEPEQSVPTDMLCLKPTLEKKFFGKEFNDNIHIQLIYNILDIEKILAVYSTNA |
| | VYALNNTIADENNENWDLFANFSTDNTYDELNAIATYKKSADDVSTDDEKRREAEKKKREAKIAEK |
| | ILADYEKFRKNNRLAYFADAFYVDKNKSKSKPKDKAKGIQREKKKFILYLL |
| UZQR01.1 | MGKKIHARDLREQRKTDRTEKFADQNKKREAERAVQKKDAAVSVKSVSSVSSKKDNVTKSMAKA |
| SEQ ID NO: | AGVKSVFAVGNTVYMTSFGRGNDAVLEQKIVDTSHEPLNIDDPAYQLNVVTMNGYSVTGHRGETV |
| 5111 | SAVTDNPLRRFNGGKKDEPEQSVPTDMLCLKPTLEKKFFGKEFNDNIHIQLIYNILDIEKILAVYSTNA |
| | VYALNNTIADENNENWDLFANFSTDNTYDELNAIATYKKSADDVSTDDEKRREAEKKKREAKIAEK |
| | ILADYEKFRKNNRLAYFADAFYVDKNKSKSKPKDKAKGIQREKKKFILYLL |
| OGXR01.1_2 | MGKKIHARDLREQRKTDRTEKFADQNKKREAERAVQKKDAAVSVKSVSSVSSKKDNVTKSMAKA |
| SEQ ID NO: | AGVKSVFAVGNTVYMTSFGRGNDAVLEQKIVDTSHEPLNIDDPAYQLNVVTMNGYSVTGHRGETV |
| 5112 | SAVTDNPLRRFNGGKKDEPEQSVPTDMLCLKPTLEKKFFGKEFNDNIHIQLIYNILDIEKILAVYSTNA |
| | VYALNNTIADENNENWDLFANFSTDNTYDELNAIATYKKSADDVSTDDEKRREAEKKKREAKIAEK |
| | ILADYEKFRKNNRLAYFADAFYVDKNKSKSKPKDKAKGIQREKKKFILYLL |
| UZKF01.1_2 | MGKKIHARDLREQRKTDRTEKFADQNKKREAERAVQKKDAAVSVKSVSSVSSKKDNVTKSMAKA |
| SEQ ID NO: | AGVKSVFAVGNTVYMTSFGRGNDAVLEQKIVDTSHEPLNIDDPAYQLNVVTMNGYSVTGHRGETV |
| 5113 | SAVTDNPLRRFNGGKKDEPEQSVPTDMLCLKPTLEKKFFGKEFNDNIHIQLIYNILDIEKILAVYSTNA |
| | VYALNNTIADENNENWDLFANFSTDNTYDELNAIATYKKSADDVSTDDEKRREAEKKKREAKIAEK |
| | ILADYEKFRKNNRLAYFADAFYVDKNKSKSKPKDKAKGIQREKKKFILYLL |
| OHAO01.1 | MGKKIHARDLREQRKTDRTEKFADQNKKREAERAVQKKDAAVSVKSVSSVSSKKDNVTKSMAKA |
| SEQ ID NO: | AGVKSVFAVGNTVYMTSFGRGNDAVLEQKIVDTSHEPLNIDDPAYQLNVVTMNGYSVTGHRGETV |
| 5114 | SAVTDNPLRRFNGGKKDEPEQSVPTDMLCLKPTLEKKFFGKEFNDNIHIQLIYNILDIEKILAVYSTNA |
| | VYALNNTIADENNENWDLFANFSTDNTYDELNAIATYKKSADDVSTDDEKRREAEKKKREAKIAEK |
| | ILADYEKFRKNNRLAYFADAFYVDKNKSKSKPKDKAKGIQREKKKFILYLL |
| UZOF01.1 | MGKKIHARDLREQRKTDRTEKFADQNKKREAERAVQKKDAAVSVKSVSSVSSKKDNVTKSMAKA |
| SEQ ID NO: | AGVKSVFAVGNTVYMTSFGRGNDAVLEQKIVDTSHEPLNIDDPAYQLNVVTMNGYSVTGHRGETV |
| 5115 | SAVTDNPLRRFNGGKKDEPEQSVPTDMLCLKPTLEKKIFGKEFNDNIHIQLIYNILDIEKILAVYSTNA |
| | VYALNNTIADENNENWDLFANFSTDNTYDELNAIATYKKSADDVSTDDEKRREAEKKKREAKIAEK |
| | ILADYEKFRKNNRLAYFADAFYVDKNKSKSKPKDKAKGIQREKKKFILYLL |
| mgm4743569.3 | MXXXXXXXXXXXXXXXXXXXXXXXXXXXPVMGKKIHARDLREQRKTDRTVKFADQNKKREAE |
| SEQ ID NO: | RAVQKKDAAVSVKSVPSVSSKKDNVTKSMAKAAGVKSVFAVGNTVYMTSFGRGNDAVLEQKIVD |
| 5116 | TSHEPLNIDDPAYQLNVVTMNGYSVIGHRGETVSAVTDNPLRRFNGGKKDEPEQSVPTDMLCLKPT |
| | LEKKFFGKEFDDNIHIQLIYNILDIEKILAVYSTNAIYALNNTIADENDENWDLFANFSTDNTYYELRN |
| | AAAYKESADDESTDDEKRREAEKKKREAKKAEKILADYEKFRKNNRLAYFADAFYVDKNKSKSKS |
| | KDKAEGIQRGKKEIYSILALIAKLRHWCVHSEDGRAEFWLYKLDELKDDFKNVLDVVYNRPVEEIN |
| | NRFIENNKVNIQILDSVYENTDIAELTRSYYEFLITKKYKNMGFSIKKLREIILEGTEYNDNKYDTVRN |
| | KLYQIVDFILYRGYINENSERAEVLVNALRSTLNEDDKTKLYSSEAAFLKKKYMKXXXXXXXXXXX |
| | XXXXXIYENYQKISRFA |
| OROX01.1 | MLCLKPTLEKKFFGKEFNDNIHIQLIYNILDIEKILAVYSTNAIYALNNMSADENIENSDFFMKRTTDE |
| SEQ ID NO: | TFDDFEKKKESTNSREKADFDAFEKFIGNYRLAYFADAFYVDKNKSKSKPKDKAKGIQRGEKEIYSI |
| 5117 | LALIAKLRHWCVHSEEGRAEFWLYKLDELKSDFKNVLDVVYNRPVEKINNRFIENNKVNIQILGSVY |
| | KNTDIAELVRSYYEFLITKKYKNMGFSIKKLRESMLEGKGYADKEYDSVRNKLYQMTDFILYTGYIN |
| | EDSDRADDLVNTLRSSLKEDDKTTVYCKEADYLWKKYRESIREVAASLDVKNINELKNNAFTIPDN |
| | ELRKCFISYADSVSEFTKLIYLLTRFLSGKEINDLVTTLINKFDNIRSFLEVMDELGLERTFTDEYSFFE |
| | GSTKYLAELVELNSFVKSCSFDINAKRTMYRDALDILGIESGKTEEDIEKMIDNIVQFDANGKKLPNK |
| | NHGLRNFIASNVIDSNRFEYLVRYGNPKKIRETAKCKPAVRFVLNEIPDAQIERYYKACYPDEKSLCF |
| | ANMQRDKLAGVIANIKFDDFSDAGSYQKANATSTKITSEAEIKRKNQAIIRLYLTVMYIMLKNLVNV |
| | NARYVIAFHCVERDTKLYAESGLEVGNIEKNKTNLTMAVMGVKLENGIIKTEFDKSLAENAANRYF |
| | RNARWYKLILDNLKKSERAVVRYFVIIYLKSADLP |
| ULZQ01.1 | MLCLKPTLEKKFFGKEFNDNIHIQLIYNILDIEKILAVYSTNAIYALNNMSADENIENSDFFMKRTTDE |
| SEQ ID NO: | TFDDVEKKKESTNSREKADFDAFEKFIGNYRLAYFADAFYVDKNKSKSKPKDKAKGIQRGEKEIYSI |
| 5118 | LALIAKLRHWCVHSEEGRAEFWLYKLDELKSDFKNVLDVVYNRPVEKINNRFIENNKVNIQILGSVY |
| | KNTDIAELVRSYYEFLITKKYKNMGFSIKKLRESMLEGKGYADKEYDSVRNKLYQMTDFILYTGYIN |
| | EDSDRADDLVNTLRSSLKEDDKTTVYCKEADYLWKKYRESIREVAASLDVKNINELKNNAFTIPDN |
| | ELRKCFISYADSVSEFTKLIYLLTRFLSGKEINDLVTTLINKFDNIRSFLEVMDELGLERTFTDEYSFFE |
| | GSTKYLAELVELNSFVKSCSFDINAKRTMYRDALDILGIESGKTEEDIEKMIDNIVQFDANGKKLPNK |
| | NHGLRNFIASNVIDSNRFEYLVRYGNPKKIRETAKCKPAVRFVLNEIPDAQIERYYKACYPDEKSLCF |
| | ANMQRDKLAGVIANIKFDDFSDAGSYQKANATSTKITSEAEIKRKNQAIIRLYLTVMYIMLKNLVNV |
| | NARYVIAFHCVERDTKLYAESGLEVGNIEKNKTNLTMAVMGVKLENGIIKTEFDKSLAENAANRYF |
| | RNARWYKLILDNLKKSERAVVRYFVIIYLKSADLP |
| ORPS01.1 | LIHALNNMSADENIENSDFFMKRTTDETFDDFEKKKESTNSREKADFDAFEKFIGNYRLAYFADAFY |
| SEQ ID NO: | VDKNKSKSKPKDKAKGIQRGEKEIYSILALIAKLRHWCVHSEEGRAEFWLYKLDELKSDFKNVLDV |
| 5119 | VYNRPVEKINNRFIENNKVNIQILGSVYKNTDIAELVRSYYEFLITKKYKNMGFSIKKLRESMLEGKG |
| | YADKEYDSVRNKLYQMTDFILYTGYINEDSDRADDLVNTLRSSLKEDDKTTVYCKEADYLWKKYR |
| | ESIREVAASLDVKNINELKNNAFTIPDNELRKCFISYADSVSEFTKLIYLLTRFLSGK |
| USZB01.1 | LEHIALCAGVAVVFLALSLFDNYRTCAITEKYTACSVRIVYLTCQTLAGYNQHRLVGIVCKEVSCNV |
| SEQ ID NO: | NRCYKACAGSIYIHAGTGLCADQILYKAGCVRIIEVGRAGRNYDAVDTSHEPLNIDDPAYQLNVVT |
| 5120 | MNGYSVTGHRGETVSAVTDNPLRRFNGGKKDEPEQSVPTDMLCLKPTLEKKFFGKEFDDNIHIQLIY |
| | NILDIEKILAVYSTNAIYALNNMSADENIENSDFFMKRTTDETFDDFEKKKESTNSREKADFDAFEKFI |
| | GNYRLAYFADAFYVNKKNPKGKARNVLREDKELYSVLTLIGKLRHWCVHSEEGRAEFWLYKLDEL |
| | KDDFKNVLDVVYNRPVEEINNRFIENNKVNIQILGSVYKNTDIAELVRSYYEFLITKKYKNMGFSIKK |
| | LRESMLEGKGYADKEYDSVRNKLYQMTDFILYTGYINEDSDRADDLVNTLRSSLKEDDKTTVYCKE |
| | ADYLWKKYRESIREVADALDGDNIKRLSKSNIEIQEDKLRKCFISYADSVSEFTKLIYLLTRFLSGKEI |
| | NDLVTTLINKFDNIRSFLEIMDELGLDRTFTAEYSFFEDSTKYLAELVELNSFVKSCSFDINAKRTMYR |
| | DALDILGIKSGKTEEDIEKMIDNILQIDANGDKKLKKNNGLRNFIASNVIDSNRFKYLVRYGNPKKIRE |
| | TAKCKPAVRFVLNEIPDAQIERYYEACCPENTALCSANKKREKLADMIAEIEFENFSDAGNYQKANV |
| | TSKTHEAEIKRKNQSIIRLYLTVMYIMLKNLVNVNARYVIAFHCVERDTKLYAESGLEVGNIEKNKT |
| | NLTMAVMGVKLENGIIKTEFDKSFADENAANRYLRNARWYKLILDNLKKSERAVVNEFRNTVCHLN |
| | AIRNI |
| IMG_ | MGKKVHARDLRNQKVLEQKAKYAKQNIEREAQKAVQKNEVSSTAKSANAVLSENNKTGKSKAKA |
| 3300010266 | AGVKSVFAVGNTVYMTSFGRGNDAVLEQKIIDTSHQPLNVDDPAYKLTDVTVTSYFVEGHRGETVS |
| SEQ ID NO: | AVTDNPLCRFNGKKHRDENQGEPVQSVPTDMLCLKSSLEKKFFGKEFNDNIHIQLIYNILDIEKILAV |
| 5121 | YSTNAIYALNNMSADKNVENSDFFMKRTTDETFDDFEKKKESTNSREKADFDAFEKFIGNYRLAYF |
| | ADAFYVNKKNPKGKVRNVLREDKELYSVLTLIGKLRHWCVHSEEGRAEFWLYRLDELKSDFKNVL |
| | DSVYNRPVEEINDDFVERNKVNIQILHSIYENTDIAELVRSYYEFLITKKYKNMGFSIKKLRESMLEGK |
| | GYADKEYDSVRNKLYQMTDFILYTGYINEDSDRANDLVNTLRSSLKEDDKTTVYCKEADYLWEKY |
| | RKSIKEVADALDGDNIKRLSKSNIEIQEDELRKCFIGYADSVSEFTKLIYLMTRFLSGKEINDLVTTLIN |
| | KFDNIRSFLEVMDELGLERTFTDEYRFFEGSTKYLAELVELNSFVKSCSFDINAKRTMYRDALDILGI |
| | KSGKTEEDIEKMIDNILQIDANGDKKLKKNNGLRNFIASNVTDSNRFKYLVRYGNPKKIRETAKCKPA |
| | VRFVLNEIPDAQIERYYEACCPENTALCSANKRREKLADMIAEIEFENFSDAGNYQKANVTSKTHEA |
| | EIKRKNQSIIRLYLTVMYIMLKNLVNVNDRYVIAFHCVERDTKLYVESGLEVGNIEKNKTNLTMAV |
| | MGVKLENGIIKTEFDKSLAENAANRYLRNARWYKLILDNLKK |
| ORCP01.1 | MGKKIHARDLREQRKTDRTEKFADQNKKREAERAVQKKDAAVSVKSVSSVSSKKDNVTKSMAKA |
| SEQ ID NO: | AGVKSVFAVGNTVYMTSFGRGNDAVLEQKIVDTSHEPLNIDDPAYQLNVVTMNGYSVTGHRGETV |
| 5122 | SAVTDNPLRRFNGGKKDEPEQSVPTDMLCLKPTLEKKFFGKEFNDNIHIQLIYNILDIEKILAVYSTNA |
| | IYALNNMSADENIENSDFFMKRTTDETFDDFEKKKESTNSREKADFDAFEKFIGNYRLAYFADAFYV |
| | NKKNPKGKARNVLREDKELYSVLTLIGKLRHWCVHSEEGRAEFWLYKLDELKDDFKNVLDVVYNR |
| | PVEEINNRFIENNKVNIQILGSVYKNTDIAELVRSYYEFLITKKYKNMGFSIKKLRESMLEGKGYADK |
| | EYDSVRNKLYQMTDFILYTGYINEDSDRADDLVNTLRSSLKEDDKTTVYCKEADYLWKKYRESIRE |
| | VADALDGDNIKRLSKSNIEIQEDKLRKCFISYADSVSEFTKLrYLLTRFLSGKEINDLVTTLINKFDNIR |
| | SFLEIMDELGLDRTFTAEYSFFEGSTKYLAELVELNSFVKSCSFDINAKRTMYRDALDILGIKSGKTEE |
| | DIEKMIDNILQIDANGDKKLKKNNGLRNFIASNVTDSNRFKYLVRYGNPKKIRETAKCKPAVRFVLNE |
| | IPDAQIERYYEACCPKNTALCSANKRREKLADMIAEIEFENFSDAGNYQKANVTSRTSEAEIKRKNQ |
| | AHRLYLTVMYIMLKNLVNVNARYVIAFHCVERDTKLYAESGLEVGNIEKNKRHIVKNKLLNKHKA |
| | DLVCRRQINDTGK |
| IMG_ | MGKKIHARDLRERRKTDRTEKFADQNKKREAERAVQKKDAAVSVKSVSSVSSKKDNVTKSMAKA |
| 3300006464 | AGVKSVFAVGNTVYMTSFGRGNDAVLEQKIVDTSHEPLNIDDPAYQLNVVTMNGYSVTGHRGETV |
| SEQ ID NO: | SAVTDNPLRRFNGGKKDEPEQSVPTDMLCLKPTLEKKFFGKEFDDNIHIQLIYNILDIEKILAVYSTNA |
| 5123 | IYALNNMSADENIESSDFFMKRTTDETFDDFEKKKESTNSREKADFDAFEKFIGNYRLAYFADAFYV |
| | NKKNPKGKARNVLREDKELYSVLTLIGKLRHWCVHSEEGRAEFWLYKLDELKDDFKNVLDVVYNR |
| | PVEEINNRFIENNKVNIQILGSVYKNTDIAELVRSYYEFLITKKYKNMGFSIKKLRESMLEGKGYADK |
| | EYDSVRNKLYQMTDFILYTGYINEDSDRADDLVNTLRSSLKEDDKTTVYCKEADYLWKKYRESIRE |
| | VADALDGDNIKRLSKSNIEIQEDKLRKCFISYADSVSEFTKLIYLLTRFLSGKEINDLVTTLINKFDNIR |
| | SFLEIMDELGLDRTFTAEYSFFEGSTKYLAELVELNSFVKSCSFDINAKRTMYRDALDILGIKSGKTEE |
| | DIEKMIDNILQIDANGDKKLKKNNGLRNFIASNVTDSNRFKYLVRYGNPKKIRETAKCKPAVRFVLNE |
| | IPDAQIERYYEACCPKNTALCSANKRREKLADMIAEIEFENFSDAGNYQKANVTSRTSEAEIKRKNQ |
| | AIIRLYLTVMYIMLKNLVNVNARYVIAFHCVERDTKLYAESGLEVGNIEKNKTNLTMAVMGVKIEN |
| | GIIKTEFDKSLAENAANRYLRNARWYKLILDNLKKSERAVVNEFRNTVCHLNAIRNININSDGIKEVE |
| | NYVALYHY |
| OYAG01.1 | MGKKIHARDLREQRKTDRTEKFADQNKKREAERAVQKKDAAVSVKSVSSVSSKKDNATKSMAKA |
| SEQ ID NO: | AGVKSVFAVGNTVYMTSFGRGNDAVLEQKIVDTSHEPLNIDDPAYQLNVVTMNGYSVTGHRGETV |
| 5124 | SAVTDNPLRRFNGGKKDEPEQSVPTDMLCLKPTLEKKFFGKEFDDNIHIQLIYNILDIEKILAVYSTNA |
| | IYALNNMSADENIENSDFFMKRTTDETFDDFEKKKESTNSREKADFDAFEKFIANYRLAYFADAFYV |
| | NKKNPKGKARNVLREDKELYSVLTLIGKLRHWCVHSEEGRAEFWLYKLDELKDDFKNVLDVVYNR |
| | PVEEINNRFIENNKVNIQILGSVYKNTDIAELVRSYYEFLITKKYKNMGFSIKKLRESMLEGKGYADK |
| | EYDSVRNKLYQMTDFILYTGYINEDSDRADDLVNTLRSSLKEDDKTTVYCKEADYLWKKYCESIRE |
| | VAEALDGDNIKRLSKSNIEIRDNELRKCFISYADSVSEFTKLIYLLTRFLSGKEINDLVTTLINKFDNIRS |
| | FLEIMDELGLDRTFTAEYSFFEDSTKYLAELVELNSFVKSCSFDINAKRTMYRDALDILGIKSGKTEED |
| | IEKMIDNILQIDANGDKKLKKNNGLRNFIASNVTDSNRFKYLVRYGNPKKIRETAKCKPAVRFVLNEI |
| | PDAQIERYYEACCPKNTALCSANKRREKLADMIAEIKFENFSDAGNYQKANVTSKTHEAEIKRKNQ |
| | AHRLYLTCLLYTSPSPRD |
| OWQH01.1_2 | LYKLDELKDDFKNVLDVVYNRPVEEINNRFIENNKVNIQILGSVHEDTDIAELTRSYYEFLITKKYKN |
| SEQ ID NO: | MGFSIKKLREIILEGTEYNDNKYDTVRNKLYQIVDFILYRGYINENSERAEVLVNALRSTLNEDDKTK |
| 5125 | LYSSEAAFLKKKYMKIIRKAADSLDVKKLKDLKKKAFTIPDNELRKCFISYADSVSEFTKLIYLLTRFL |
| | SGKEINDLVTTLINKFDNIRSFLEIMDELGLERTFTDEYRFFEGSTKYLAELVELNSFVKSCSFDMSAK |
| | RTMYRDALDILGIESDKTEEDIEKMIDNILQVDANGKKLPNKNHGLRNFIASNVIDSNRFEYLVRYGN |
| | PKKIRETAKCEPAVRFVLNEIPDAQIERYYKAYYPDEKSLCLANMQRDKLAGVIADIKFDDFSDAGS |
| | YQKANATSTRRTSEAEIKRKNQAIIRLYLTVMYIMLKNLVNVNARYVIAFHCLERDAKLYSESVLKV |
| | GNTNEESRLQTGNTNEEKNKVKLTNLTNLTMAVMGVKLENGTIKTEFDKSLAENAANRYLRNARW |
| | YKLILDNLKKSERAVVTEFRNTVCHLNAIRNININIKEVKEVENYFALYHYLIQKHLENRFADKKVER |
| | DTGDFISKLEEHKTYCKDFVKAYCTPFGYNLVRYKNLTIDGLFDKNYPGKDDSDKQK |
| OVZD01.1 | LYKLDELKDDFKNVLDVVYNRPVEEINNRFIENNKVNIQILGSVHEDTDIAELTRSYYEFLITKKYKN |
| SEQ ID NO: | MGFSIKKLREIILEGTEYNDNKYDTVRNKLYQIVDFILYRGYINENSERAEVLVNALRSTLNEDDKTK |
| 5126 | LYSSEAAFLKKKYMKIIRKAADSLDVKKLKDLKKKAFTIPDNELRKCFISYADSVSEFTKLIYLLTRFL |
| | SGKEINDLVTTLINKFDNIRSFLEIMDELGLERTFTDEYRFFEGSTKYLAELVELNSFVKSCSFDMSAK |
| | RTMYRDALDILGIESDKTEEDIEKMIDNILQVDANGKKLPNKNHGLRNFIASNVIDSNRFEYLVRYGN |
| | PKKIRETAKCEPAVRFVLNEIPDAQIERYYKAYYPDEKSLCLANMQRDKLAGVIADIKFDDFSDAGS |
| | YQKANATSTRRTSEAEIKRKNQAIIRLYLTVMYIMLKNLVNVNARYVIAFHCLERDAKLYSESVLKV |
| | GNTNEESRLQTGNTNEEKNKVKLTNLTNLTMAVMGVKLENGTIKTEFDKSLAENAANRYLRNARW |
| | YKLILDNLKKSERAVVTEFRNTVCHLNAIRNININIKEVKEVENYFALYHYLIQKHLENRFADKKVER |
| | DTGDFISKLEEHKTYCKDFVKAYCTPFGYNLVRYKNLTIDGLFDKNYPGKDDSDKQK |
| UEOK01.1 | LYKLDELKDDFKNVLDVVYNRPVEEINNRFIENNKVNIQILGSVHEDTDIAELTRSYYEFLITKKYKN |
| SEQ ID NO: | MGFSIKKLREIILEGTEYNDNKYDTVRNKLYQIVDFILYRGYINENSERAEVLVNALRSTLNEDDKTK |
| 5127 | LYSSEAAFLKKKYMKIIRKAADSLDVKKLKDLKKKAFTIPDNELRKCFISYADSVSEFTKLIYLLTRFL |
| | SGKEINDLVTTLINKFDNIRSFLEIMDELGLERTFTDEYRFFEGSTKYLAELVELNSFVKSCSFDMSAK |
| | RTMYRDALDILGIESDKTEEDIEKMIDNILQVDANGKKLPNKNHGLRNFIASNVIDSNRFEYLVRYGN |
| | PKKIRETAKCEPAVRFVLNEIPDAQIERYYKAYYPDEKSLCLANMQRDKLAGVIADIKFDDFSDAGS |
| | YQKANATSTRRTSEAEIKRKNQAIIRLYLTVMYIMLKNLVNVNARYVIAFHCLERDAKLYSESVLKV |
| | GNTNEESRLQTGNTNEEKNKVKLTNLTNLTMAVMGVKLENGTIKTEFDKSLAENAANRYLRNARW |
| | YKLILDNLKKSERAVVTEFRNTVCHLNAIRNININIKEVKEVENYFALYHYLIQKHLENRFADKKVER |
| | DTGDFISKLEEHKTYCKDFVKAYCTPFGYNLVRYKNLTIDGLFDKNYPGKDDSDKQK |
| OWSW01.1_2 | LYKLDELKDDFKNVLDVVYNRPVEEINNRFIENNKVNIQILGSVHEDTDIAELTRSYYEFLITKKYKN |
| SEQ ID NO: | MGFSIKKLREIILEGTEYNDNKYDTVRNKLYQIVDFILYRGYINENSERAEVLVNALRSTLNEDDKTK |
| 5128 | LYSSEAAFLKKKYMKIIRKAADSLDVKKLKDLKKKAFTIPDNELRKCFISYADSVSEFTKLIYLLTRFL |
| | SGKEINDLVTTLINKFDNIRSFLEIMDELGLERTFTDEYRFFEGSTKYLAELVELNSFVKSCSFDMSAK |
| | RTMYRDALDILGIESDKTEEDIEKMIDNILQVDANGKKLPNKNHGLRNFIASNVIDSNRFEYLVRYGN |
| | PKKIRETAKCEPAVRFVLNEIPDAQIERYYKAYYPDEKSLCLANMQRDKLAGVIADIKFDDFSDAGS |
| | YQKANATSTRRTSEAEIKRKNQAIIRLYLTVMYIMLKNLVNVNARYVIAFHCLERDAKLYSESVLKV |
| | GNTNEESRLQTGNTNEEKNKVKLTNLTNLTMAVMGVKLENGTIKTEFDKSLAENAANRYLRNARW |
| | YKLILDNLKKSERAVVTEFRNTVCHLNAIRNININIKEVKEVENYFALYHYLIQKHLENRFADKKVER |
| | DTGDFISKLEEHKTYCKDFVKAYCTPFGYNLVRYKNLTIDGLFDKNYPGKDDSDKQK |
| OZRL01.1_2 | LYKLDELKDDFKNVLDVVYNRPVEEINNRFIENNKVNIQILGSVHEDTDIAELTRSYYEFLITKKYKN |
| SEQ ID NO: | MGFSIKKLREIILEGTEYNDNKYDTVRNKLYQIVDFILYRGYINENSERAEVLVNALRSTLNEDDKTK |
| 5129 | LYSSEAAFLKKKYMKIIRKAADSLDVKKLKDLKKKAFTIPDNELRKCFISYADSVSEFTKLIYLLTRFL |
| | SGKEINDLVTTLINKFDNIRSFLEIMDELGLERTFTDEYRFFEGSTKYLAELVELNSFVKSCSFDMSAK |
| | RTMYRDALDILGIESDKTEEDIEKMIDNILQVDANGKKLPNKNHGLRNFIASNVIDSNRFEYLVRYGN |
| | PKKIRETAKCEPAVRFVLNEIPDAQIERYYKAYYPDEKSLCLANMQRDKLAGVIADIKFDDFSDAGS |
| | YQKANATSTRRTSEAEIKRKNQAIIRLYLTVMYIMLKNLVNVNARYVIAFHCLERDAKLYSESVLKV |
| | GNTNEESRLQTGNTNEEKNKVKLTNLTNLTMAVMGVKLENGTIKTEFDKSLAENAANRYLRNARW |
| | YKLILDNLKKSERAVVTEFRNTVCHLNAIRNININIKEVKEVENYFALYHYLIQKHLENRFADKKVER |
| | DTGDFISKLEEHKTYCKDFVKAYCTPFGYNLVRYKNLTIDGLFDKNYPGKDDSDKQK |
| OYBO01.1 | LYKLDELKDDFKNVLDVVYNRPVEEINNRFIENNKVNIQILGSVHEDTDIAELTRSYYEFLITKKYKN |
| SEQ ID NO: | MGFSIKKLREIILEGTEYNDNKYDTVRNKLYQIVDFILYRGYINENSERAEVLVNALRSTLNEDDKTK |
| 5130 | LYSSEAAFLKKKYMKIIRKAADSLDVKKLKDLKKKAFTIPDNELRKCFISYADSVSEFTKLIYLLTRFL |
| | SGKEINDLVTTLINKFDNIRSFLEIMDELGLERTFTDEYRFFEGSTKYLAELVELNSFVKSCSFDMSAK |
| | RTMYRDALDILGIESDKTEEDIEKMIDNILQVDANGKKLPNKNHGLRNFIASNVIDSNRFEYLVRYGN |
| | PKKIRETAKCEPAVRFVLNEIPDAQIERYYKAYYPDEKSLCLANMQRDKLAGVIADIKFDDFSDAGS |
| | YQKANATSTRRTSEAEIKRKNQAIIRLYLTVMYIMLKNLVNVNARYVIAFHCLERDAKLYSESVLKV |
| | GNTNEESRLQTGNTNEEKNKVKLTNLTNLTMAVMGVKLENGTIKTEFDKSLAENAANRYLRNARW |
| | YKLILDNLKKSERAVVTEFRNTVCHLNAIRNININIKEVKEVENYFALYHYLIQKHLENRFADKKVER |
| | DTGDFISKLEEHKTYCKDFVKAYCTPFGYNLVRYKNLTIDGLFDKNYPGKDDSDKQK |
| OGJH01.1_2 | LYKLDELKDDFKNVLDVVYNRPVEEINNRFIENNKVNIQILGSVHEDTDIAELTRSYYEFLITKKYKN |
| SEQ ID NO: | MGFSIKKLREIILEGTEYNDNKYDTVRNKLYQIVDFILYRGYINENSERAEVLVNALRSTLNEDDKTK |
| 5131 | LYSSEAAFLKKKYMKIIRKAADSLDVKKLKDLKKKAFTIPDNELRKCFISYADSVSEFTKLIYLLTRFL |
| | SGKEINDLVTTLINKFDNIRSFLEIMDELGLERTFTDEYRFFEGSTKYLAELVELNSFVKSCSFDMSAK |
| | RTMYRDALDILGIESDKTEEDIEKMIDNILQVDANGKKLPNKNHGLRNFIASNVIDSNRFEYLVRYGN |
| | PKKIRETAKCEPAVRFVLNEIPDAQIERYYKAYYPDEKSLCLANMQRDKLAGVIADIKFDDFSDAGS |
| | YQKANATSTRRTSEAEIKRKNQAIIRLYLTVMYIMLKNLVNVNARYVIAFHCLERDAKLYSESVLKV |
| | GNTNEESRLQTGNTNEEKNKVKLTNLTNLTMAVMGVKLENGTIKTEFDKSLAENAANRYLRNARW |
| | YKLILDNLKKSERAVVTEFRNTVCHLNAIRNININIKEVKEVENYFALYHYLIQKHLENRFADKKVER |
| | DTGDFISKLEEHKTYCKDFVKAYCTPFGYNLVRYKNLTIDGLFDKNYPGKDDSDKQK |
| UPRD01.1 | LYKLDELKDDFKNVLDVVYNRPVEEINNRFIENNKVNIQILGSVHEDTDIAELTRSYYEFLITKKYKN |
| SEQ ID NO: | MGFSIKKLREIILEGTEYNDNKYDTVRNKLYQIVDFILYRGYINENSERAEVLVNALRSTLNEDDKTK |
| 5132 | LYSSEAAFLKKKYMKIIRKAADSLDVKKLKDLKKKAFTIPDNELRKCFISYADSVSEFTKLIYLLTRFL |
| | SGKEINDLVTTLINKFDNIRSFLEIMDELGLERTFTDEYRFFEGSTKYLAELVELNSFVKSCSFDMSAK |
| | RTMYRDALDILGIESDKTEEDIEKMIDNILQVDANGKKLPNKNHGLRNFIASNVIDSNRFEYLVRYGN |
| | PKKIRETAKCEPAVRFVLNEIPDAQIERYYKAYYPDEKSLCLANMQRDKLAGVIADIKFDDFSDAGS |
| | YQKANATSTRRTSEAEIKRKNQAIIRLYLTVMYIMLKNLVNVNARYVIAFHCLERDAKLYSESVLKV |
| | GNTNEESRLQTGNTNEEKNKVKLTNLTNLTMAVMGVKLENGTIKTEFDKSLAENAANRYLRNARW |
| | YKLILDNLKKSERAVVTEFRNTVCHLNAIRNININIKEVKEVENYFALYHYLIQKHLENRFADKKVER |
| | DTGDFISKLEEHKTYCKDFVKAYCTPFGYNLVRYKNLTIDGLFDKNYPGKDDSDKQK |
| OWRJ01.13 | LYKLDELKDDFKNVLDVVYNRPVEEINNRFIENNKVNIQILGSVHEDTDIAELTRSYYEFLITKKYKN |
| SEQ ID NO: | MGFSIKKLREIILEGTEYNDNKYDTVRNKLYQIVDFILYRGYINENSERAEVLVNALRSTLNEDDKTK |
| 5133 | LYSSEAAFLKKKYMKIIRKAADSLDVKKLKDLKKKAFTIPDNELRKCFISYADSVSEFTKLIYLLTRFL |
| | SGKEINDLVTTLINKFDNIRSFLEIMDELGLERTFTDEYRFFEGSTKYLAELVELNSFVKSCSFDMSAK |
| | RTMYRDALDILGIESDKTEEDIEKMIDNILQVDANGKKLPNKNHGLRNFIASNVIDSNRFEYLVRYGN |
| | PKKIRETAKCEPAVRFVLNEIPDAQIERYYKAYYPDEKSLCLANMQRDKLAGVIADIKFDDFSDAGS |
| | YQKANATSTRRTSEAEIKRKNQAIIRLYLTVMYIMLKNLVNVNARYVIAFHCLERDAKLYSESVLKV |
| | GNTNEESRLQTGNTNEEKNKVKLTNLTNLTMAVMGVKLENGTIKTEFDKSLAENAANRYLRNARW |
| | YKLILDNLKKSERAVVTEFRNTVCHLNAIRNININIKEVKEVENYFALYHYLIQKHLENRFADKKVER |
| | DTGDFISKLEEHKTYCKDFVKAYCTPFGYNLVRYKNLTIDGLFDKNYPGKDDSDKQK |
| OKRY01.1_2 | LYKLDELKDDFKNVLDVVYNRPVEEINNRFIENNKVNIQILGSVHEDTDIAELTRSYYEFLITKKYKN |
| SEQ ID NO: | MGFSIKKLREIILEGTEYNDNKYDTVRNKLYQIVDFILYRGYINENSERAEVLVNALRSTLNEDDKTK |
| 5134 | LYSSEAAFLKKKYMKIIRKAADSLDVKKLKDLKKKAFTIPDNELRKCFISYADSVSEFTKLIYLLTRFL |
| | SGKEINDLVTTLINKFDNIRSFLEIMDELGLERTFTDEYRFFEGSTKYLAELVELNSFVKSCSFDMSAK |
| | RTMYRDALDILGIESDKTEEDIEKMIDNILQVDANGKKLPNKNHGLRNFIASNVIDSNRFEYLVRYGN |
| | PKKIRETAKCEPAVRFVLNEIPDAQIERYYKAYYPDEKSLCLANMQRDKLAGVIADIKFDDFSDAGS |
| | YQKANATSTRRTSEAEIKRKNQAIIRLYLTVMYIMLKNLVNVNARYVIAFHCLERDAKLYSESVLKV |
| | GNTNEESRLQTGNTNEEKNKVKLTNLTNLTMAVMGVKLENGTIKTEFDKSLAENAANRYLRNARW |
| | YKLILDNLKKSERAVVTEFRNTVCHLNAIRNININIKEVKEVENYFALYHYLIQKHLENRFADKKVER |
| | DTGDFISKLEEHKTYCKDFVKAYCTPFGYNLVRYKNLTIDGLFDKNYPGKDDSDKQK |
| OWEZ01.1 | LYKLDELKDDFKNVLDVVYNRPVEEINNRFIENNKVNIQILGSVHEDTDIAELTRSYYEFLITKKYKN |
| SEQ ID NO: | MGFSIKKLREIILEGTEYNDNKYDTVRNKLYQIVDFILYRGYINENSERAEVLVNALRSTLNEDDKTK |
| 5135 | LYSSEAAFLKKKYMKIIRKAADSLDVKKLKDLKKKAFTIPDNELRKCFISYADSVSEFTKLIYLLTRFL |
| | SGKEINDLVTTLINKFDNIRSFLEIMDELGLERTFTDEYRFFEGSTKYLAELVELNSFVKSCSFDMSAK |
| | RTMYRDALDILGIESDKTEEDIEKMIDNILQVDANGKKLPNKNHGLRNFIASNVIDSNRFEYLVRYGN |
| | PKKIRETAKCEPAVRFVLNEIPDAQIERYYKAYYPDEKSLCLANMQRDKLAGVIADIKFDDFSDAGS |
| | YQKANATSTRRTSEAEIKRKNQAIIRLYLTVMYIMLKNLVNVNARYVIAFHCLERDAKLYSESVLKV |
| | GNTNEESRLQTGNTNEEKNKVKLTNLTNLTMAVMGVKLENGTIKTEFDKSLAENAANRYLRNARW |
| | YKLILDNLKKSERAVVTEFRNTVCHLNAIRNININIKEVKEVENYFALYHYLIQKHLENRFADKKVER |
| | DTGDFISKLEEHKTYCKDFVKAYCTPFGYNLVRYKNLTIDGLFDKNYPGKDDSDKQK |
| UZOF01.1_2 | LYKLDELKDDFKNVLDVVYNRPVEEINNRFIENNKVNIQILGSVHEDTDIAELTRSYYEFLITKKYKN |
| SEQ ID NO: | MGFSIKKLREIILEGTEYNDNKYDTVRNKLYQIVDFILYRGYINENSERAEVLVNALRSTLNEDDKTK |
| 5136 | LYSSEAAFLKKKYMKIIRKAADSLDVKKLKDLKKKAFTIPDNELRKCFISYADSVSEFTKLIYLLTRFL |
| | SGKEINDLVTTLINKFDNIRSFLEIMDELGLERTFTDEYRFFEGSTKYLAELVELNSFVKSCSFDMSAK |
| | RTMYRDALDILGIESDKTEEDIEKMIDNILQVDANGKKLPNKNHGLRNFIASNVIDSNRFEYLVRYGN |
| | PKKIRETAKCEPAVRFVLNEIPDAQIERYYKAYYPDEKSLCLANMQRDKLAGVIADIKFDDFSDAGS |
| | YQKANATSTRRTSEAEIKRKNQAIIRLYLTVMYIMLKNLVNVNARYVIAFHCLERDAKLYSESVLKV |
| | GNTNEESRLQTGNTNEEKNKVKLTNLTNLTMAVMGVKLENGTIKTEFDKSLAENAANRYLRNARW |
| | YKLILDNLKKSERAVVTEFRNTVCHLNAIRNININIKEVKEVENYFALYHYLIQKHLENRFADKKVER |
| | DTGDFISKLEEHKTYCKDFVKAYCTPFGYNLVRYKNLTIDGLFDKNYPGKDDSDKQK |
| OGYF01.12 | LYKLDELKDDFKNVLDVVYNRPVEEINNRFIENNKVNIQILGSVHEDTDIAELTRSYYEFLITKKYKN |
| SEQ ID NO: | MGFSIKKLREIILEGTEYNDNKYDTVRNKLYQIVDFILYRGYINENSERAEVLVNALRSTLNEDDKTK |
| 5137 | LYSSEAAFLKKKYMKIIRKAADSLDVKKLKDLKKKAFTIPDNELRKCFISYADSVSEFTKLIYLLTRFL |
| | SGKEINDLVTTLINKFDNIRSFLEIMDELGLERTFTDEYRFFEGSTKYLAELVELNSFVKSCSFDMSAK |
| | RTMYRDALDILGIESDKTEEDIEKMIDNILQVDANGKKLPNKNHGLRNFIASNVIDSNRFEYLVRYGN |
| | PKKIRETAKCEPAVRFVLNEIPDAQIERYYKAYYPDEKSLCLANMQRDKLAGVIADIKFDDFSDAGS |
| | YQKANATSTRRTSEAEIKRKNQAIIRLYLTVMYIMLKNLVNVNARYVIAFHCLERDAKLYSESVLKV |
| | GNTNEESRLQTGNTNEEKNKVKLTNLTNLTMAVMGVKLENGTIKTEFDKSLAENAANRYLRNARW |
| | YKLILDNLKKSERAVVTEFRNTVCHLNAIRNININIKEVKEVENYFALYHYLIQKHLENRFADKKVER |
| | DTGDFISKLEEHKTYCKDFVKAYCTPFGYNLVRYKNLTIDGLFDKNYPGKDDSDKQK |
| UPEW01.1 | LYKLDELKDDFKNVLDVVYNRPVEEINNRFIENNKVNIQILGSVHEDTDIAELTRSYYEFLITKKYKN |
| SEQ ID NO: | MGFSIKKLREIILEGTEYNDNKYDTVRNKLYQIVDFILYRGYINENSERAEVLVNALRSTLNEDDKTK |
| 5138 | LYSSEAAFLKKKYMKIIRKAADSLDVKKLKDLKKKAFTIPDNELRKCFISYADSVSEFTKLIYLLTRFL |
| | SGKEINDLVTTLINKFDNIRSFLEIMDELGLERTFTDEYRFFEGSTKYLAELVELNSFVKSCSFDMSAK |
| | RTMYRDALDILGIESDKTEEDIEKMIDNILQVDANGKKLPNKNHGLRNFIASNVIDSNRFEYLVRYGN |
| | PKKIRETAKCEPAVRFVLNEIPDAQIERYYKAYYPDEKSLCLANMQRDKLAGVIADIKFDDFSDAGS |
| | YQKANATSTRRTSEAEIKRKNQAIIRLYLTVMYIMLKNLVNVNARYVIAFHCLERDAKLYSESVLKV |
| | GNTNEESRLQTGNTNEEKNKVKLTNLTNLTMAVMGVKLENGTIKTEFDKSLAENAANRYLRNARW |
| | YKLILDNLKKSERAVVTEFRNTVCHLNAIRNININIKEVKEVENYFALYHYLIQKHLENRFADKKVER |
| | DTGDFISKLEEHKTYCKDFVKAYCTPFGYNLVRYKNLTIDGLFDKNYPGKDDSDKQK |
| UAPH01.1_2 | LYKLDELKDDFKNVLDVVYNRPVEEINNRFIENNKVNIQILGSVHEDTDIAELTRSYYEFLITKKYKN |
| SEQ ID NO: | MGFSIKKLREIILEGTEYNDNKYDTVRNKLYQIVDFILYRGYINENSERAEVLVNALRSTLNEDDKTK |
| 5139 | LYSSEAAFLKKKYMKIIRKAADSLDVKKLKDLKKKAFTIPDNELRKCFISYADSVSEFTKLIYLLTRFL |
| | SGKEINDLVTTLINKFDNIRSFLEIMDELGLERTFTDEYRFFEGSTKYLAELVELNSFVKSCSFDMSAK |
| | RTMYRDALDILGIESDKTEEDIEKMIDNILQVDANGKKLPNKNHGLRNFIASNVIDSNRFEYLVRYGN |
| | PKKIRETAKCEPAVRFVLNEIPDAQIERYYKAYYPDEKSLCLANMQRDKLAGVIADIKFDDFSDAGS |
| | YQKANATSTRRTSEAEIKRKNQAIIRLYLTVMYIMLKNLVNVNARYVIAFHCLERDAKLYSESVLKV |
| | GNTNEESRLQTGNTNEEKNKVKLTNLTNLTMAVMGVKLENGTIKTEFDKSLAENAANRYLRNARW |
| | YKLILDNLKKSERAVVTEFRNTVCHLNAIRNININIKEVKEVENYFALYHYLIQKHLENRFADKKVER |
| | DTGDFISKLEEHKTYCKDFVKAYCTPFGYNLVRYKNLTIDGLFDKNYPGKDDSDKQK |
| UAPL01.1_2 | LYKLDELKDDFKNVLDVVYNRPVEEINNRFIENNKVNIQILGSVHEDTDIAELTRSYYEFLITKKYKN |
| SEQ ID NO: | MGFSIKKLREIILEGTEYNDNKYDTVRNKLYQIVDFILYRGYINENSERAEVLVNALRSTLNEDDKTK |
| 5140 | LYSSEAAFLKKKYMKIIRKAADSLDVKKLKDLKKKAFTIPDNELRKCFISYADSVSEFTKLIYLLTRFL |
| | SGKEINDLVTTLINKFDNIRSFLEIMDELGLERTFTDEYRFFEGSTKYLAELVELNSFVKSCSFDMSAK |
| | RTMYRDALDILGIESDKTEEDIEKMIDNILQVDANGKKLPNKNHGLRNFIASNVIDSNRFEYLVRYGN |
| | PKKIRETAKCEPAVRFVLNEIPDAQIERYYKAYYPDEKSLCLANMQRDKLAGVIADIKFDDFSDAGS |
| | YQKANATSTRRTSEAEIKRKNQAIIRLYLTVMYIMLKNLVNVNARYVIAFHCLERDAKLYSESVLKV |
| | GNTNEESRLQTGNTNEEKNKVKLTNLTNLTMAVMGVKLENGTIKTEFDKSLAENAANRYLRNARW |
| | YKLILDNLKKSERAVVTEFRNTVCHLNAIRNININIKEVKEVENYFALYHYLIQKHLENRFADKKVER |
| | DTGDFISKLEEHKTYCKDFVKAYCTPFGYNLVRYKNLTIDGLFDKNYPGKDDSDKQK |
| UBLP01.1_2 | LYKLDELKDDFKNVLDVVYNRPVEEINNRFIENNKVNIQILGSVHEDTDIAELTRSYYEFLITKKYKN |
| SEQ ID NO: | MGFSIKKLREIILEGTEYNDNKYDTVRNKLYQIVDFILYRGYINENSERAEVLVNALRSTLNEDDKTK |
| 5141 | LYSSEAAFLKKKYMKIIRKAADSLDVKKLKDLKKKAFTIPDNELRKCFISYADSVSEFTKLIYLLTRFL |
| | SGKEINDLVTTLINKFDNIRSFLEIMDELGLERTFTDEYRFFEGSTKYLAELVELNSFVKSCSFDMSAK |
| | RTMYRDALDILGIESDKTEEDIEKMIDNILQVDANGKKLPNKNHGLRNFIASNVIDSNRFEYLVRYGN |
| | PKKIRETAKCEPAVRFVLNEIPDAQIERYYKAYYPDEKSLCLANMQRDKLAGVIADIKFDDFSDAGS |
| | YQKANATSTRRTSEAEIKRKNQAIIRLYLTVMYIMLKNLVNVNARYVIAFHCLERDAKLYSESVLKV |
| | GNTNEESRLQTGNTNEEKNKVKLTNLTNLTMAVMGVKLENGTIKTEFDKSLAENAANRYLRNARW |
| | YKLILDNLKKSERAVVTEFRNTVCHLNAIRNININIKEVKEVENYFALYHYLIQKHLENRFADKKVER |
| | DTGDFISKLEEHKTYCKDFVKAYCTPFGYNLVRYKNLTIDGLFDKNYPGKDDSDKQK |
| UZQR01.1_2 | LYKLDELKDDFKNVLDVVYNRPVEEINNRFIENNKVNIQILGSVHEDTDIAELTRSYYEFLITKKYKN |
| SEQ ID NO: | MGFSIKKLREIILEGTEYNDNKYDTVRNKLYQIVDFILYRGYINENSERAEVLVNALRSTLNEDDKTK |
| 5142 | LYSSEAAFLKKKYMKIIRKAADSLDVKKLKDLKKKAFTIPDNELRKCFISYADSVSEFTKLIYLLTRFL |
| | SGKEINDLVTTLINKFDNIRSFLEIMDELGLERTFTDEYRFFEGSTKYLAELVELNSFVKSCSFDMSAK |
| | RTMYRDALDILGIESDKTEEDIEKMIDNILQVDANGKKLPNKNHGLRNFIASNVIDSNRFEYLVRYGN |
| | PKKIRETAKCEPAVRFVLNEIPDAQIERYYKAYYPDEKSLCLANMQRDKLAGVIADIKFDDFSDAGS |
| | YQKANATSTRRTSEAEIKRKNQAIIRLYLTVMYIMLKNLVNVNARYVIAFHCLERDAKLYSESVLKV |
| | GNTNEESRLQTGNTNEEKNKVKLTNLTNLTMAVMGVKLENGTIKTEFDKSLAENAANRYLRNARW |
| | YKLILDNLKKSERAVVTEFRNTVCHLNAIRNININIKEVKEVENYFALYHYLIQKHLENRFADKKVER |
| | DTGDFISKLEEHKTYCKDFVKAYCTPFGYNLVRYKNLTIDGLFDKNYPGKDDSDKQK |
| OGXR01.1 | LYKLDELKDDFKNVLDVVYNRPVEEINNRFIENNKVNIQILGSVHEDTDIAELTRSYYEFLITKKYKN |
| SEQ ID NO: | MGFSIKKLREIILEGTEYNDNKYDTVRNKLYQIVDFILYRGYINENSERAEVLVNALRSTLNEDDKTK |
| 5143 | LYSSEAAFLKKKYMKIIRKAADSLDVKKLKDLKKKAFTIPDNELRKCFISYADSVSEFTKLIYLLTRFL |
| | SGKEINDLVTTLINKFDNIRSFLEIMDELGLERTFTDEYRFFEGSTKYLAELVELNSFVKSCSFDMSAK |
| | RTMYRDALDILGIESDKTEEDIEKMIDNILQVDANGKKLPNKNHGLRNFIASNVIDSNRFEYLVRYGN |
| | PKKIRETAKCEPAVRFVLNEIPDAQIERYYKAYYPDEKSLCLANMQRDKLAGVIADIKFDDFSDAGS |
| | YQKANATSTRRTSEAEIKRKNQAIIRLYLTVMYIMLKNLVNVNARYVIAFHCLERDAKLYSESVLKV |
| | GNTNEESRLQTGNTNEEKNKVKLTNLTNLTMAVMGVKLENGTIKTEFDKSLAENAANRYLRNARW |
| | YKLILDNLKKSERAVVTEFRNTVCHLNAIRNININIKEVKEVENYFALYHYLIQKHLENRFADKKVER |
| | DTGDFISKLEEHKTYCKDFVKAYCTPFGYNLVRYKNLTIDGLFDKNYPGKDDSDKQK |
| UZKF01.1 | LYKLDELKDDFKNVLDVVYNRPVEEINNRFIENNKVNIQILGSVHEDTDIAELTRSYYEFLITKKYKN |
| SEQ ID NO: | MGFSIKKLREIILEGTEYNDNKYDTVRNKLYQIVDFILYRGYINENSERAEVLVNALRSTLNEDDKTK |
| 5144 | LYSSEAAFLKKKYMKIIRKAADSLDVKKLKDLKKKAFTIPDNELRKCFISYADSVSEFTKLIYLLTRFL |
| | SGKEINDLVTTLINKFDNIRSFLEIMDELGLERTFTDEYRFFEGSTKYLAELVELNSFVKSCSFDMSAK |
| | RTMYRDALDILGIESDKTEEDIEKMIDNILQVDANGKKLPNKNHGLRNFIASNVIDSNRFEYLVRYGN |
| | PKKIRETAKCEPAVRFVLNEIPDAQIERYYKAYYPDEKSLCLANMQRDKLAGVIADISDAGSYQKAN |
| | ATSTRRTSEAEIKRKNQAIIRLYLTVMYIMLKNLVNVNARYVIAFHCLERDAKLYSESVLKVGNTNE |
| | ESRLQTGNTNEEKNKVKLTNLTNLTMAVMGVKLENGTIKTEFDKSLAENAANRYLRNARWYKLIL |
| | DNLKKSERAVVTEFRNTVCHLNAIRNININIKEVKEVENYFALYHYLIQKHLENRFADKKVERDTGD |
| | FISKLEEHKTYCKDFVKAYCTPFGYNLVRYKNLTIDGLFDKNYPGKDDSDKQK |
| ORTQ01.1 | LAKAAGLKSTFVISPQEKELAMTAFGRGNDALLQKRIVDGVVRDVAGEKQQFQVQRQDESRFRLQN |
| SEQ ID NO: | SRLADRTVTADDPLHRAETPRRQPLGAGMDQLRRKAILEQKYFGRTFDDNIHIQLIYNILDIHKMLA |
| 5145 | VPANHIVHTLNLLGGYGETDFMGMLPAGLPYDKLRVVKKKNGDTVDIKADIAAYAKRPQLAYLGA |
| | AFYDVTPGKSKRDAARGRVKREQDVYTILSLMSLLRQFCAHDSVRIWGQNTPAALYHLQALPQDM |
| | KDLLDDSWRRALGGVNDHFLDTNKVNLLTLFEYYGAETKQARVALTQDFYRFVVLKEQKNMGFSL |
| | RRLREELLKLPDAAYLTGQEYDSVRQKLYMLLDFLLCRLYAQERADRCEELVSALRCALSDEEKDT |
| | VYQAEAAALWQALGDTLRRELLPLLKGKKLQDKDKKKPDELGLSRDVLDGVLFRPAQQGNRANA |
| | DYFCRLMHLSTWFMDGKEINTLLTTLISKFENIDSLRNVLESMGLACSFVPAYAMFDHSRYIAGQLR |
| | VVNNIARMRKPAIGAKREMYRAAVVLLGVDSPEAAAAITDDLLQIDPETGKVRPRGDSARDTGLRN |
| | FIANNVVESRRFTYLLRYMTPEQARVLAQNEKLIAFVLSTVPDTQLERYCRTCGREDITDRPAQIRYL |
| | TAQIMGVRYESFTDVEQRGRGDNPKKERYKALIGLYLTVLYLAVKNMVNCNARYVIAFYCRDRDT |
| | ALYQKEVCWYDLEEDKKSGKQRQVEDYTALTRYFVSQGYLNRHACGYLRSNMNGIGNGLLTAYR |
| | NAVDHLNVIPPLGSLCRDIGRVDSYFALYHYAVQQYLNGRYYRKTPREQELFAAMAQHRTWCSDL |
| | VKALNTPFGYNLARYKNLSIDGLFDREGDHVVREDGEKPAE |
| UMHX01.1 | LAKAAGLKSTFVISPQEKELAMTAFGRGNDALLQKRIVDGVVRDVAGEKQQFQVQRQDESRFRLQN |
| SEQ ID NO: | SRLADRTVTADDPLHRAETPRRQPLGAGMDQLRRKAILEQKYFGRTFDDNIHIQLIYNILDIHKMLA |
| 5146 | VPANHIVHTLNLLGGYGETDFMGMLPAGLPYDKLRVVKKKNGDTVDIKADIAAYAKRPQLAYLGA |
| | AFYDVTPGKSKRDAARGRVKREQDVYTILSLMSLLRQFCAHDSVRIWGQNTPAALYHLQALPQDM |
| | KDLLDDSWRRALGGVNDHFLDTNKVNLLTLFEYYGAETKQARVALTQDFYRFVVLKEQKNMGFSL |
| | RRLREELLKLPDAAYLTGQEYDSVRQKLYMLLDFLLCRLYAQERADRCEELVSALRCALSDEEKDT |
| | VYQAEAAALWQALGDTLRRELLPLLKGKKLQDKDKKKPDELGLSRDVLDGVLFRPAQQGNRANA |
| | DYFCRLMHLSTWFMDGKEINTLLTTLISKFENIDSLRNVLESMGLACSFVPAYAMFDHSRYIAGQLR |
| | VVNNIARMRKPAIGAKREMYRAAVVLLGVDSPEAAAAITDDLLQIDPETGKVRPRGDSARDTGLRN |
| | FIANNVVESRRFTYLLRYMTPEQARVLAQNEKLIAFVLSTVPDTQLERYCRTCGREDITDRPAQIRYL |
| | TAQIMGVRYESFTDVEQRGRGDNPKKERYKALIGLYLTVLYLAVKNMVNCNARYVIAFYCRDRDT |
| | ALYQKEVCWYDLEEDKKSGKQRQVEDYTALTRYFVSQGYLNRHACGYLRSNMNGIGNGLLTAYR |
| | NAVDHLNVIPPLGSLCRDIGRVDSYFALYHYAVQQYLNGRYYRKTPREQELFAAMAQHRTWCSDL |
| | VKALNTPFGYNLARYKNLSIDGLFDREGDHVVREDGEKPAE |
| ORMU01.1 | LKRMLLCAIIQASTKRDRKGGVRMEREVKKPPKKSLAKAAGLKSTFVISPQEKELAMTAFGRGNDA |
| SEQ ID NO: | LLQKRIVDGVVRDVAGEKQQFQVQRQDESRFRLQNSRLADRTVTADDPLHRAEAPHRQPLGAGMD |
| 5147 | QLRRKAVLEQKYFGRTFDDNIHIQLIYNILDIHKMLAVPANHIVHTLNLLGGYGETDFVGMLPAGLP |
| | YDKLWTPKAGDTSRNVKRDVKADIAAYAKRPQLAYLGAAFYDVTPGKSKRDAARGRVKREQDVY |
| | TILSLMSLLRQFCAHDSVRIWGQNTPAALYHLQALPQDMKDLLDDGWRRALGGVNDHFLDTNKVN |
| | LLTLFEYYGAETKQERVALTQDFYRFVVLKEQKNMGFSLRRLREELLKLPDAAYLTGQEYDSVRQK |
| | LYMLLDFLLCRLYAQERADRCEELVSALRCALSDEEKDAVYQAEAAALWQALGDTLRRELL |
| OQVZ01.1 | MLPFFRPQRRTTVMTAFGQGSTAILEKQIVDRAISDLQPVQQFQVEPASAAKYRLKNSRVRFPDVTA |
| SEQ ID NO: | DDPLYRRKDGGFVPGMDALRRKNVLEQRFFGRSFADNIHIQMIYSILDIHKILAAASGHIVHLLNIVK |
| 5148 | GDADRDFLGMLAAHVSYDKLNEKAEKSIADFCKSPRLIYYSAAFYETLDNGKSERRSNEDIFNILAL |
| | MTCLRNFSSHHSIAIKVRDYSAAGLYNLRRLGTDMKKMLDTFYTEAFRQLNRSFQDHNTTNLTCLF |
| | DILNISDSARQKQLAEEFYRYVVFKEQKNLGFSVRKLREEMLLLPDAAVIADKRYDTCRSKLYNLM |
| | DFLILRVYRTGRADRCDKLTEALRAALTDEEKAAVYHEEALSLWNEMRTLILDGLLPQMTPENLSR |
| | LSGQKRKGELSLDGAMLKECLYEPGPVPEDAAPEEANAEYFCRMIYLATLFMDGKEINTLLTTLISK |
| | FENIAAFLQTMEQMNIEAELGPEYAIFTRSRAVAEQLRVINSFALMKKPQVNAKQQLYRAAVTLLGT |
| | EDPDGVTDEMLRIDPVTGKMLPLNRRHHGDTGLRNFIANNVVESRRFQYLIRYSDPAQLHQLASNK |
| | KLVRFVLSGIPDTQINRYYETCGQTRPAGRAAKVEFLTGMIAAIRFDQFRDVNQKERGANTQKERYK |
| | AMLGLYQTVLYLAVKNLVNINARYVMAFHCVERDMFLYDGELTDPKGSNVPAFLAVNGRDGVQP |
| | QYLLLTQLFIQRGYLKRSACEQIQHNMTNISDRLLREYRNAVAHLNVIAHLADYSADMREITSYYGL |
| | YHYLMQRHLFKRHAWQVRRPERPTEEEEKRIEQEQKQLAWERALFDKTLQYHSYNKDLVKALNAP |
| | FGYNLARYKNLSIEQLFSKDAAPATEIKANRA |
| IMG_ | MAKKLNAKEKRLLSQQAQKDKYKKMEEERQAAEQARLAEEARQKAETERKKKEALEKEAREKLE |
| 3300022661 | KELLEKNPSLKKVKKSKAKAAGLKSTFAIGNELLMTSFGKGNEAVPEHYIFENGMISMQNPPAFDVE |
| SEQ ID NO: | NRGTSFSIAGKNAMNAIADDPRRTSKKVIGEDLIGAKSALEKRYFGKTFEDNIHIQLIYNILDIEKILSK |
| 5149 | HINNIVFSINNIRGIADPERDDLIGYMSLRDSYEYFMDEKNEKRKVLRESYRKLFKSSRLSYFGSAFYV |
| | EKQSTQKKKSGQKNFELRNEKDCYYMLALLGELRQVLAHSSAQKQGKEQTEARSSVYNLRTVGNN |
| | DMRKILNSLYAERVDALNENFMNYAKKDLTILFGIMDASSYEKKAEIARDFYDFTVRKSYKNIGFSI |
| | KKIRERMMDCFFANVKEITPDSPDFQSVRQKFYKILDFLLFTYYKDNKEETKKIIAALRASLTELEKE |
| | LFYQKQANILWNKMQMVVTEQIYPRTKGSAIQNLIADPEISADMLKGVMITPESVDYFSKMIYLLTL |
| | FIDGKEINDLLTTMINKFENIASFVSVLKDRGLPCNFRNDYSVFNNALKISAELREINSFARMEKATPG |
| | AKKQMFLDAAIILGSNESAEELS |
| OHBM01.1 | VKKIPQLAYFGSAFYNTPEDTSAKITKTKIKSNEEIYYTFMLLSTARNFSAHYLDRNRAKSSDAEDFD |
| SEQ ID NO: | GTSVIMYNLDNEELYKKLYNKKVHMALTGMKKVLDANFNKKVEHLNNSFIKNSAKDFVILCEVLGI |
| 5150 | KSRDEKTKFVKDYYDFVVRKNYKHLGFSVKELRELLFANHDSNKYIKEFDKISNKKFDSVRSRLNRL |
| | ADYIIYDYYNKNNAKVSDLVKYLRAAADDEQKKKIYLNESINLVKSGILERIKKILPKLNGKIIGNMQ |
| | PDSTITASMLHNTGKDWHPISENAHYFTKWIYTLTLFMDGKEINDLVTTLINKFDNIASFIEVLKSQSV |
| | CTHFSEERKMFIDSAEICSELSAMNSFARMEAPGASSKRAMFVEAARILGDNRSKEELEEYFDTLFDK |
| | SASKKEKGFRNFIRNNVVDSNRFKYLTRYTDTSSVKAFSNNKALVKFAIKDIPQEQILRYYNSCFGAS |
| | ERYYNDGMSDKLVEAIGKINLMQFNGVIQQADRNMLPEEKKKANAQKEKYKSIIRLYLTVCYLFFK |
| | NLVYVNSRYYSAFYNLEKDRSLFEINGELKPTGKFDEGHYTGLVKLFIDNGWINPRASAYLTVNLAN |
| | SDETAIRTFRNTAEHLEALRNADKYLNDLKQFDSYFEIYHYITQRNIKEKCEMLKEQTVKYNNDLLK |
| | YHGYSKDFVKALCVPFGYNLPRFKNLSIDALFDKNDKREKLKKGFED |
| UXMD01.1 | MEGINMGRKVHFAKAAGLKSAFAIGNDKVIVTSFGKGNDAILEKTIENDKVINIEQNIDIELMKRDFN |
| SEQ ID NO: | VKRRGDHGRPIITNNPGNREKIGKDMIDRKDQLEMRYFGRTFDDNIHIQLIYNIMDIEKILSIHVNNAL |
| 5151 | YALNNVLNRGSGDFNDTIGMMLAKPYDVFRNSEKYANFNENUCKPQLSYFGGAFFETGFNTKAQKR |
| | KTEKKSEKDIYYIISLLGFIRQAAVHGYDWNKTDEAAVALYTLDESFDKLYKNTKFRQEARRALDNL |
| | YDTRIDALNSQFLENASKDLTIIFKIYSVTDRSSKIKLIRQYYDFVVKKEYKYLGFSIKQLREMIADDN |
| | SIIKSKNYDTMRARLNRLIDFVIYINYIENPEKAKKLVENLRSHIGDDEKSRIYASEAKQLWQLLKGPV |
| | MDGILPQMNGKTISSMRADTVISETSVERMKNKTWEPIGKSAHYFIKLVYLLTLFLDGKEINDLVTTL |
| | INKMDNISSFNKLLENIDSKPPYEEEYVIFADSVIIADDLRVLNSFARMEKPDASAKRIMFVEAAQML |
| | GDKGTEQELTKYFDDLMDRNSSKEQKGFRNFIRNNVIESSRFKYLVRYCSVEDVIKFSKNKALIKFVL |
| | KEIPENQILRYYNSCTGNECREFSSEMTLKLAELIENMSFEQFENVRQNARRNSSEETDKLQKQNIIRL |
| | YLTVCYIFFKNLIYVNSRYFLAFYCLERDLRLWDIFENEQSYLMLTEKFMELGKVRKTAKKSKVKNS |
| | GEPSYEDAKHIPYNYIAANLRNADNVAIRKFRNITDHIITVQEAGLYLQDIKNPESYYQIYHYIAQRNL |
| | CDKLKNSNITEKTKEYFALVKNHGSYCKDFVKALCVPFGYNLPRFKNLSIDGLFDMNDKRENRDTT |
| | TEG |
| GCA_ | MEGINMGRKVHFAKAAGLKSAFAIGNDKVIVTSFGKGNDAILEKTIENDKVINIEQNIDIELMKRDFN |
| 900555525.1_ | VKRRGDHGRPIITNNPGNREKIGKDMIDRKDQLEMRYFGRTFDDNIHIQLIYNIMDIEKILSIHVNNAL |
| UMGS1840_ | YALNNVLNRGSGDFNDTIGMMLAKPYDVFRNSEKYANFNENIKKPQLSYFGGAFFETGFNTKAQKR |
| genomic | KTEKKSEKDIYYIISLLGFIRQAAVHGYDWNKTDEAAVALYTLDESFDKLYKNTKFRQEARRALDNL |
| SEQ ID NO: | YDTRIDALNSQFLENASKDLTIIFKIYSVTDRSSKIKLIRQYYDFVVKKEYKYLGFSIKQLREMIADDN |
| 5152 | SIIKSKNYDTMRARLNRLIDFVIYINYIENPEKAKKLVENLRSHIGDDEKSRIYASEAKQLWQLLKGPV |
| | MDGILPQMNGKTISSMRADTVISETSVERMKNKTWEPIGKSAHYFIKLVYLLTLFLDGKEINDLVTTL |
| | INKMDNISSFNKLLENIDSKPPYEEEYVIFADSGIMAGELRGLNSFARMEKPDASAKRIMFVEAAQML |
| | GDKGTEQELTKYFDDLMDRNSSKEQKGFRNFIRNNVIESSRFKYLVRYCSVEDVIKFSKNKALIKFVL |
| | KEIPENQILRYYNSCTGNECREFSSEMTLKLAELIENMSFEQFENVRQNARRNSSEETDKLQKQNIIRL |
| | YLTVCYIFFKNLIYVNSRYFLAFYCLERDLRLWDIFENEQSYLMLTEKFMELGKVRKTAKKSKVKNS |
| | GEPSYEDAKHIPYNYIAANLRNADNVAIRKFRNITDHIITVQEAGLYLQDIKNPESYYQIYHYIAQRNL |
| | CDKLKNSNITEKTKEYFALVKNHGSYCKDFVKALCVPFGYNLPRFKNLSIDGLFDMNDKRENRDTT |
| | TEG |
| OPOQ01.1 | MEGINMGRKVHFAKAAGLKSAFAIGNDKVIVTSFGKGNDAILEKTIENDKVINIEQNIDIELMKRDFN |
| SEQ ID NO: | VKRRGDHGRPIITNNPGNREKIGKDMIDRKDQLEMRYFGRTFDDNIHIQLIYNIMDIEKILSIHVNNAL |
| 5153 | YALNNVLNRGSGDFNDTIGMMLAKPYDVFRNSEKYANFNENIKKPQLSYFGGAFFETGFNTKAQKR |
| | KTEKKSEKDIYYIISLLGFIRQAAVHGYDWNKTDEAAVALYTLDESFDKLYKNTKFRQEARRALDNL |
| | YDTRIDALNSQFLENASKDLTIIFKIYSVTDRSSKIKLIRQYYDFVVKKEYKYLGFSIKQLREMIADDN |
| | SIIKSKNYDTMRARLNRLIDFVIYINYIENPEKAKKLVENLRSHIGDDEKSRIYASEAKQLWQLLKGPV |
| | MDGILPQMNGKTISSMRADTVISETSVERMKNKTWEPIGKSAHYFIKLVYLLTLFLDGKEINDLVTTL |
| | INKMDNISSFNKLLENIDSKPPYEEEYVIFADSGIMAGELRGLNSFARMEKPDASAKRIMFVEAAQML |
| | GDKGTEQELTKYFDDLMDRNSSKEQKGFRNFIRNNVIESSRFKYLVRYCSVEDVIKFSKNKALIKFVL |
| | KEIPENQILRYYNSCTGNECREFSSEMTLKLAELIENMSFEQFENVRQNARRNSSEETDKLQKQNIIRL |
| | YLTVCYIFFKNLIYVNSRYFLAFYCLERDLRLWDIFENEQSYLMLTEKFMELGKVRKTAKKSKVKNS |
| | GEPSYEDAKHIPYNYIAANLRNADNVAIRKFRNITDHIITVQEAGLYLQDIKNPESYYQIYHYIAQRNL |
| | CDKLKNSNITEKTKEYFALVKNHGSYCKDFVKALCVPFGYNLPRFKNLSIDGLFDMNDKRENRDTT |
| | TEG |
| IMG_ | MENKENIGKVENQNQKKRSGAKASGLKSTFALGENRVLMTSFGKGNEAIPEKLIVDGAVTDYEKNL |
| 3300029305 | EVTPLKKDFKVKGKHFNNPIVASDPYRRTKVGKDVIDRKEVLEQKYYGRTFDDNIHIQLIYNIMDVE |
| SEQ ID NO: | KILSVHINNILYGLNNVLNRNSDDASDIIGMMRAKPYNDFCVANDKYEQFKGNLENSQLSYYGTAF |
| 5154 | YKTGFDIKAKKERVLKRDEKDIYYILSLLSTVRQFLAHKSDDNRNSKEDNYQVALYTFDEEFDDLYK |
| | EKNIVFRKDARKVLDGLYDSRVISLNESFLKNAKKDLTILFKAYGIENRGDKMKIIREYYDFLIRKSY |
| | KNLGFSLKLLRECIISENKWIADKKYDTMRSRLNRLFDFVTYKYYEDNQTRATVLVEKLRAHSVQK |
| | EKDRIYADEALVLWNGVKSIICNKIKEELNGKNLATMRIDPAIGETSIERLTVLAWKPIGTNATYFTKI |
| | VYLLTLFLDGKEINDMVTTLINKFENIASFNEVLSSTECKTQINREYSIFENSNEVSKELRVLNSFARM |
| | EMPDASTNREMFVEAAKILGYDADRKNLEKYFDTLLDKNASKAEKGFRNFIRNNVINSLRFKYLIKY |
| | CNVEDVKCFSKNKFLVEFVKKNIPEAQILRY |
| IMG_ | MEKMEKIRKSENRKSRAKAAGLKSTFVVADKLALTSFGKGNKANLEKIIKNEEVEEINKPPKFDAKV |
| 3300009671 | EEKQIHIIGKTIKDGITEKPAGMRNDLIGAKQELEKMFFGKTFDDNIHIQLIYNILDIKKIFSVYANNIV |
| SEQ ID NO: | YAVDHLDRTAKDKDVDYLGTLFTGNTYQHLLSVNPGDSKYKLKKDALKRFNTYYESAKSHFIYFG |
| 5155 | DVFYRKPTYEEASAMKEKGQGKKAQKPLVKTEAEVHQILRFLGTIRQCLVHKTDAKRDIIFNPDSMS |
| | NEFKTLIDSYYNGRVKALNDDFIKHNGSSSLPILFHYYGATEENRRAELTEGFYDFIIKRENKNMGFS |
| | LKKIREKMLEKQEASFIKEDGYNSVRHKLYILMDFIIYKTYAADIELQESIVATLRSNLTDEDKEATYE |
| | IQAKALWNKIGDDIVKKLMPLIDGNKIKGYKDEKIEIKKEWLKDVMISTENASYMTKMVYFMTLFL |
| | DGKEINEFLTVLINKFENIQGFFDVLGHNALAEKIEEPKEISKRPLKGFAELAAFTQKSTDVGLTEHLR |
| | LFENSVNISDEIRVTKNFARMERTIPDINRAQYADAAKVLGVIGAGEQD |
| IMG_ | MEKMEKIRKSENRKSRAKAAGLKSTFVVADKLALTSFGKGNKANLEKIIKNEEVEEINKPPKFDAKV |
| 3300026290 | EEKQIHIIGKTIKDGITEKPAGMRNDLIGAKQELEKMFFGKTFDDNIHIQLIYNILDIKKIFSVYANNIV |
| SEQ ID NO: | YAVDHLDRTAKDKDVDYLGTLFTGNTYQHLLSVNPGDSKYKLKKDALKRFNTYYESAKSHFIYFG |
| 5156 | DVFYRKPTYEEASAMKEKGQGKKAQKPLVKTEAEVHQILRFLGTIRQCLVHKTDAKRDIIFNPDSMS |
| | NEFKTLIDSYYNGRVKALNDDFIKHNGSSSLPILFHYYGATEENRRAELTEGFYDFIIKRENKNMGFS |
| | LKKIREKMLEKQEASFIKEDGYNSVRHKLYILMDFIIYKTYAADIELQESIVATLRSNLTDEDKEATYE |
| | IQAKALWNKIGDDIVKKLMPLIDGNKIKGYKDEKIEIKKEWLKDVMISTENASYMTKMVYFMTLFL |
| | DGKEINEFLTVLINKFENIQGFFD |
| UOPK01.1 | MEKMEKIRKSENRKSRAKAAGLKSTFVVADKLALTSFGKGNKANLEKIIKNEEVEEINKPPKFDAKV |
| SEQ ID NO: | EEKQIHIIGKTIKDGITEKPAGMRNDLIGAKQELEKMFFGKTFDDNIHIQLIYNILDIKKIFSVYANNIV |
| 5157 | YAVDHLDRTAKDKDVDYLGTLFTGNTYQHLLSVNPGDSKYKLKKDALKRFNTYYESAKSHFIYFG |
| | DVFYRKPTYKEASAMKEKGQGKKAQKPLVKTKAEVHQILRFLGTIRQCLVHKMDAKWDIIFNPDS |
| | MSNEFKTLIDSYYNGRVKALNDDFIKHNRSSSLPILFHYYGATEENRRAELTEGFYDFIIKRENKNMG |
| | FSLKKIREKMLEKQEASFIKEDGYNSVRHKLYILMDFIIYKPYAADIELQESIVATLRSNLTDEDKEAT |
| | YEIQAKALWNKIGDDIVKKLMPLIDGNKIKGYKDEKIEIKKEWLKDVMISTENASYMTKMVYFMTL |
| | FLDGKEINEFLTVLINKFENIQGFFDVLGHNAFTQKSTDVGLTEHLRLFE |
| IMG_ | MSEEVKKKSKQKSKTKALGLKSILVKEDEIILTSFGKGSKAIKEKVIKQNVITNIASPATFDVKLDEYN |
| 3300009826 | LEVSGKNFITAKPTLPIKVSLSKRQQGKKEFKRRLEEQNLKVQAKREIGEDQIFAKSKLEKHFFGQNF |
| SEQ ID NO: | NDNIKVQIIYNILDIGKILAPYVNDIIYSVNNLWRNCKGDYISGIKFETSYQDCDKKFDKRYKNLKKN |
| 5158 | AIYYSDVFYEVDNNKLVFKNKSDVYNILRVLSLVRQTVMHGYYDNKFLFNDKDLDKELKDLLDWF |
| | YREKVKETNINFLKFNQEANFQILDQLYSNINDKKAIYKLFYDYLIRQEGKNLCFSLKKLREELLKRP |
| | EFSVITSHDFDSIRPKLYHFIDFIILEYYQKQEKLIFEFVEELRANLDEDKKELIYRNKAENIAPSLKVLII |
| | DVLLPLMNGDKIRSFNKKTKEIDSNLFNEIKITDQASYFTKILYFLCLFLDGKEINEMLSTIINKLENIAS |
| | FLEVEGIEKSLDEKLALLSKHFGQKRTNSNKQIIKTNFKENYQMFLDSSQIAEELKIVKAITRMKKKIE |
| | PKEIMYLEAAYLLGYQSSGNQDEDEKNILKQMKLADRGKGVSKDVRNFITNNVIKSQRFLYLVRHM |
| | NPKNIKNVGNNQLIIKFVIDGLPDKQIIRYYNSVTDKNENIPLEMMKQKLVEKITGLKFDDFLLVKNN |
| | PKTKKDLEEKEIKKALVGLYLTILYLVYKNLVNVNARYTIAFYTHERDTKFHGFDMKKPESQKEIVK |
| | LFMEKPYLKTNQIKYLEINLPQLTDEVIFREYRNQIAHLNAVSELDKYLDKLKPINSYFALYHYINQA |
| | SLLERLNYKNNKDKDLNGIKNLIH |
| UPCU01.1 | MLKKRIYQNEADQLWTSYQELFKRIRGFKGAQVKEYSSKNMPIPIQKQIQNILKPAEQVTYFTKLMY |
| SEQ ID NO: | LLTMFLDGKEINDLLTTLINKFDNISSLLKTMEQLELQTTFKEDYTFFQQSSRLCKEITQLKSFARMGN |
| 5159 | PISNLKEVMMVDAIQILGTEKSEQELQSMACFFFRDKNGKKLNTGEHGMRNFIGNNVISNTRFQYLIR |
| | YGNPQKLHTLSQNETVVRFVLSRIAKNQRVQGMNGKNQIDRYYETCGGTNSWSVSEEEKINFLCKIL |
| | TNMSYDQFQDVKQSGAEITAEEKRKKERYKAIISLYLTVLYQLIKNLVNINARYIIAFHCLERDAILYS |
| | SKFNTSINLKKRYTALTEMILGYETDEKARRKDTRTVYEKAEAAKNRHLKNVKWNCKTRENLENA |
| | DKNAIVAFRNIVAHLWIIRDADRFITGMGAMKRYFDCYHYLLQRELGYILEKSNQGSEYTKKSLEKV |
| | QQYHSYCKDFLHMLCLPFAYCIPRYKNLSIAELFDRHEPEAEPKEEASSVNNSQFITT |
| mgm4547164.3_ | VPKFPRILPEAKDISLFSKLIYALTMFLDGKEINDLLTTLINKFENIQCFLKIMPQIGVNANLVDEYIFFN |
| 2 | NSEKIASELKLIKSFAKMGEPVANTKRAMMIDAIKIIGTELNDDELKTLADLFFFDENGNKKGRNQH |
| SEQ ID NO: | GMRNFIINNVISNKRFHYLIRYGDPSHLHEIVKNEAVVKFVLTRIAKLQKKQGQQGKNQIDRYYECCI |
| 5160 | GKGDKKTVKEKIEALTDIITNMNYDQFEKNRDVIERKGNNNAEKEKYKKILSLYLTVIYHILKNIVNI |
| | NSRYVIGFRCVERDAQLYKEKGYSINIGKLDRSGYTSVTKLCLGIANDDPCTRKKAEKEMAQAAQD |
| | TLNRLSEKNSKLFKKYNSYSDTEKEKEFQKQIIREKAATALNDHLRNPSYNHMLREYLSQTDKTACK |
| | IFRNKAAHLEVARYAHQYINEITEVKSYFQLYHYIMQRIIMDNMYDETSGKTKAKENVNDYFDDVR |
| | KNKDYNNQLLKLLCVPFGYCIPRFKNLANEALFDMNEDTEPTPNINPVQTS |
| UWSB01.1 | MSKAKTKTKAVGLKSAFIIDDKVLITSFGKNNNAIPEKEIIGENVKNIEENFSLAVDSDKGAKFKIENN |
| SEQ ID NO: | KHTIETECNNPQYAVQSDLLHAKDKIEMYIFGKTFPNDNIHIQIAYNILDIKKILSLYANNIIFSLNNLR |
| 5161 | HKEEGKFEQDFIGMLYTVNTYAELQKNCSKCICQKICNYKLCKNDGDICKSYKKFKNYLAEINPYLS |
| | YFSEAFYEYIPEKNSKENDKAKRRSEKDIYNIIRTMSLVRQSCFHDLKSTRSAVFNIEDTEIKELLDRL |
| | YQKKIEDVNNGFIKNNGKNIAILADIYNKNTNDEKKKLAADFYNYIILKENKNFGFNLKTVREKLIKK |
| | NFENKICDSVRHKAYILMDYMLYRYYSENEEIKKSFVEDLRSNYDDKNSNYNDKKRNIYEKYADEV |
| | EPKVKGKIELLINKISPQKIRKEKRMDINKEWIKDVQLKNSGNCFPKVIWLMTLFLDGKEINELVSAM |
| | INKFENIQSFIEILIHEHLDHSFDNNGYKMFENSGAIANELKAVKSFSRMQGEIANPTILALHADAARIL |
| | GLNADYTDTELKEHIKTLYHTEENKNQKPKDNNMRNFIVNNVIKSNRFLYLVRYNNPKRSRKLASN |
| | GELVKFVLEGISKDSSGMSKIINRYYVSVNVGIAGEPTNIKEAEKIPLKRKIDKLADMITDMNFDRFK |
| | DVKQKMYIPKNSSQEAKEEAQKKAKLENQKKERDKAVIGLYLTVLYLITKNLVKINARYTIAISCLE |
| | RDTQFFGIDIRDKSETDKRPRKPYITLANKFVNEKYINDKGGHIKKSMQYVANDDRFYREYRNMIAH |
| | LEA |
| OZGD01.1 | MKKKNIRATREALKAQKIKKSQENEALKKQKLAEEAAQKRREELEKKNLAQWEETSAEGRRSRVK |
| SEQ ID NO: | AVGVKSVFVVGDDLYLATFGNGNETVLEKKITPDGKITTFPEEETFTAKLKFAKTELTEATSIGISNG |
| 5162 | RIVLPEISVDNPLHTTMQKNTIKKSAGEDMLQLKDVLENRYFDRSFNNDLHIRLIYNILDIEKILAEYT |
| | TNAVFAIDNVSGCSDDFLSNFSTRNQWDEFQNPEQHREHFGNKDNVICSVKKQQDLFFNFFKNNRIG |
| | YFGKAFFHAESERKIVKKTAKEVYHILTLIGSLRQWITHSTEGGISRLWLYQLEDALSSEYQETMNNC |
| | YNSTIYGLQKDFEKTNAPNLNFLAEILGKNASELAEPYFRFIITKEYKNLGFSIKTLREMLLDQPDLQE |
| | IRENHNVYDSIRSKLYKMMDFVLVYAYSNERKSKADALASNLRSAITEDAKKRVYQNEADQLWTS |
| | YQELFKRIRGFKGAQVKEYSSQNMPIPIQKQIQNILKPAEQVTCFTKLMYLLTMFLDGKEINDLLTTLI |
| | NKFDNISSLLKTMEQLELQTTFKEDYTFFQQSSCLCEEITQLKSFARMGNPISNLKEVMMVDAIQILG |
| | TEKSEQELQSMACFFFRDKNGKKLNAGEHGMRNFIGNNVISNTRFQYLRKH |
| ORJW01.1 | MKKKNIRATREALKAQKIKKSQENEALKKQKLAEEAAQKRREELEKKNLAQWEETSAEGRRSRVK |
| SEQ ID NO: | AVGVKSVFVVGDDLYLATFGNGNETVLEKKITPDGKITTFPEEETFTAKLKFAKTELTEATSIGISNG |
| 5163 | RIVLPEISVDNPLHTTMQKNTIKKSAGEDMLQLKDVLENRYFDRSFNNDLHIRLIYNILDIEKILAEYT |
| | TNAVFAIDNVSGCSDDFLSNFSTRNQWDEFQNPEQHREHFGNKDNVICSVKKQQDLFFNFFKNNRIG |
| | YFGKAFFHAESERKIVKKTAKEVYHILTLIGSLRQWITHSTEGGISRLWLYQLEDALSSEYQETMNNC |
| | YNSTIYGLQKDFEKTNAPNLNFLAEILGKNASELAEPYFRFIITKEYKNLGFSIKTLREMLLDQPDLQE |
| | IRENHNVYDSIRSKLYKMMDFVLVYAYSNERKSKADALASNLRSAITEDAKKRVYQNEADQLWTS |
| | YQELFKRIRGFKGAQVKEYSSQNMPIPIQKQIQNILKPAEQVTCFTKLMYLLTMFLDGKEINDLLTTLI |
| | NKFDNISSLLKTMEQLELQTTFKEDYTFFQQSSCLCEEITQLKSFARMGNPISNLKEVMMVDAIQILG |
| | TEKSEQELQSMACFFFRDKNGKKLNAGEHGMRNFIGNNVISNTRFQYLRKH |
| OZBA01.1 | MKKKNIRATREALKAQKIKKSQENEALKKQKLAEEAAQKRREELEKKNLAQWEETSAEGRRSRVK |
| SEQ ID NO: | AVGVKSVFVVGDDLYLATFGNGNETVLEKKITPDGKITTFPEEETFTAKLKFAKTELTEATSIGISNG |
| 5164 | RIVLPEISVDNPLHTTMQKNTIKKSAGEDMLQLKDVLENRYFDRSFNNDLHIRLIYNILDIEKILAEYT |
| | TNAVFAIDNVSGCSDDFLSNFSTRNQWDEFQNPEQHREHFGNKDNVICSVKKQQDLFFNFFKNNRIG |
| | YFGKAFFHAESERKIVKKTAKEVYHILTLIGSLRQWITHSTEGGISRLWLYQLEDALSSEYQETMNNC |
| | YNSTIYGLQKDFEKTNAPNLNFLAEILGKNASELAEPYFRFIITKEYKNLGFSIKTLREMLLDQPDLQE |
| | IRENHNVYDSIRSKLYKMMDFVLVYAYSNERKSKADALASNLRSAITEDAKKRVYQNEADQLWTS |
| | YQELFKRIRGFKGAQVKEYSSQNMPIPIQKQIQNILKPAEQVTCFTKLMYLLTMFLDGKEINDLLTTLI |
| | NKFDNISSLLKTMEQLELQTTFKEDYTFFQQSSCLCEEITQLKSFARMGNPISNLKEVMMVDAIQILG |
| | TEKSEQELQSMACFFFRDKNGKKLNAGEHGMRNFIGNNVISNTRFQYLRKH |
| OZZW01.1 | MKKKNIRATREALKAQKIKKSQENEALKKQKLAEEAAQKRREELEKKNLAQWEETSAEGRRSRVK |
| SEQ ID NO: | AVGVKSVFVVGDDLYLATFGNGNETVLEKKITPDGKITTFPEEETFTAKLKFAKTELTEATSIGISNG |
| 5165 | RIVLPEISVDNPLHTTMQKNTIKKSAGEDMLQLKDVLENRYFDRSFNNDLHIRLIYNILDIEKILAEYT |
| | TNAVFAIDNVSGCSDDFLSNFSTRNQWDEFQNPEQHREHFGNKDNVICSVKKQQDLFFNFFKNNRIG |
| | YFGKAFFHAESERKIVKKTAKEVYHILTLIGSLRQWITHSTEGGISRLWLYQLEDALSSEYQETMNNC |
| | YNSTIYGLQKDFEKTNAPNLNFLAEILGKNASELAEPYFRFIITKEYKNLGFSIKTLREMLLDQPDLQE |
| | IRENHNVYDSIRSKLYKMMDFVLVYAYSNERKSKADALASNLRSAITEDAKKRVYQNEADQLWTS |
| | YQELFKRIRGFKGAQVKEYSSQNMPIPIQKQIQNILKPAEQVTCFTKLMYLLTMFLDGKEINDLLTTLI |
| | NKFDNISSLLKTMEQLELQTTFKEDYTFFQQSSCLCEEITQLKSFARMGNPISNLKEVMMVDAIQILG |
| | TEKSEQELQSMACFFFRDKNGKKLNAGEHGMRNFIGNNVISNTRFQYLRKH |
| UAFA01.1 | MKKKNIRATREALKAQKIKKSQENEALKKQKLAEEAAQKRREELEKKNLAQWEETSAEGRRSRVK |
| SEQ ID NO: | AVGVKSVFVVGDDLYLATFGNGNETVLEKKITPDGKITTFPEEETFTAKLKFAKTELTEATSIGISNG |
| 5166 | RIVLPEISVDNPLHTTMQKNTIKKSAGEDMLQLKDVLENRYFDRSFNNDLHIRLIYNILDIEKILAEYT |
| | TNAVFAIDNVSGCSDDFLSNFSTRNQWDEFQNPEQHREHFGNKDNVICSVKKQQDLFFNFFKNNRIG |
| | YFGKAFFHAESERKIVKKTAKEVYHILTLIGSLRQWITHSTEGGISRLWLYQLEDALSSEYQETMNNC |
| | YNSTIYGLQKDFEKTNAPNLNFLAEILGKNASELAEPYFRFIITKEYKNLGFSIKTLREMLLDQPDLQE |
| | IRENHNVYDSIRSKLYKMMDFVLVYAYSNERKSKADALASNLRSAITEDAKKRVYQNEADQLWTS |
| | YQELFKRIRGFKGAQVKEYSSQNMPIPIQKQIQNILKPAEQVTCFTKLMYLLTMFLDGKEINDLLTTLI |
| | NKFDNISSLLKTMEQLELQTTFKEDYTFFQQSSCLCEEITQLKSFARMGNPISNLKEVMMVDAIQILG |
| | TEKSEQELQSMACFFFRDKNGKKLNAGEHGMRNFIGNNVISNTRFQYLRKH |
| OZDP01.1 | MKKKNIRATREALKAQKIKKSQENEALKKQKLAEEAAQKRREELEKKNLAQWEETSAEGRRSRVK |
| SEQ ID NO: | AVGVKSVFVVGDDLYLATFGNGNETVLEKKITPDGKITTFPEEETFTAKLKFAKTELTEATSIGISNG |
| 5167 | RIVLPEISVDNPLHTTMQKNTIKKSAGEDMLQLKDVLENRYFDRSFNNDLHIRLIYNILDIEKILAEYT |
| | TNAVFAIDNVSGCSDDFLSNFSTRNQWDEFQNPEQHREHFGNKDNVICSVKKQQDLFFNFFKNNRIG |
| | YFGKAFFHAESERKIVKKTAKEVYHILTLIGSLRQWITHSTEGGISRLWLYQLEDALSSEYQETMNNC |
| | YNSTIYGLQKDFEKTNAPNLNFLAEILGENASELAEPYFRFIITKEYKNLGFSIKTLREMLLDQPDLQEI |
| | RENHNVYDSIRSKLYKMMDFVLVYAYSNERKSKADALASNLRSAITEDAKKRVYQNEADQLWTSY |
| | QELFKRIRGFKGAQVKEYSSQNMPIPIQKQIQNILKPAEQVTCFTKLMYLLTMFLDGKEINDLLTTLIN |
| | KFDNISSLLKTMEQLELQTTFKEDYTFFQQSSCLCEEITQLKSFARMGNPISNLKEVMMVDAIQILGTE |
| | KSEQELQSMACFFFRDKNGKKLNAGEHGMRNFIGNNVISCL |
| UPCU01.1_2 | MKKKNIRATREALKAQKIKKSQENEALKKQKLAEEAAQKRREELEKKNLAQWEETSAEGRRSRVK |
| SEQ ID NO: | AVGVKSVFVVGDDLYLATFGNGNETVLEKKITPDGKITTFPEEETFTAKLKFAQTEPTVATSIGISNG |
| 5168 | RIVLPEISVDNPLHTTMQKNTIKRSAGEDILQLKDVLENRYFDRSFNDDLHIRLIYNILDIEKILAEYTT |
| | NAVFAIDNVSGCSDDFLSNFSTRNQWDEFQNPEQHREHFGNKDNVICSVKKQQDLFFNFFKNNRIGY |
| | FGKAFFHAESERKIVKKTEKEVYHILTLIGSLRQWITHSTEGGISRLWLYQLEDALSREYQETMNNCY |
| | NSTIYGLQKDFEKTNAPNLNFLAEILGKNASELAEPYFRFIITKEYKNLGFSIKTLREMLLDQPDLQEIR |
| | ENHNVYDSIRSKLYKMIDFVLVYAYSNERKSKADALASNLRSAITEDAKKKDLSERSGSVVDKLSGII |
| | QENSRFQRCSSKRILKQKHANPHSEADSKYLKASGTSDLLHKVDVFVDDVLRW |
| OGRM01.1 | MVTAERKMTMKKREECLGSREELEQKNLKKWEETNAENRRSRAKAVGVKSVFVVGEDLYLATFG |
| SEQ ID NO: | NGNETLLEKKITPDGTITSFPKEEAFTAKLKFAQTESTEATSIGISNGRIVLPEVPVDNPCYAAPQAKT |
| 5169 | AKKVAGEDLLQLKEVLEKRYFGCSFDDDLHIRLIYNILDIEKILAEYVTNAVFSIDNVSGNAHDFLGY |
| | LSTRNSYDAFMHPEKYPEHFENKSDLIERVRKQGDDFLAFVDNKRIGYFGKAFFYQDGRKEIEKPDG |
| | EIYHLLTLIGSLRQWITHSDEREEGTSRTWLYQLEKFLLPEYQETMNVNYNDIVKELTTNFTKTNATN |
| | LNFLAELLHVPVKAIAESYFRFAITKEYKNLGFCIKTIREILLERRELSDIKENHAVYDSIRSKLYKMM |
| | DFVLVHAYESEEGKKEAEELASSLRFALTEEEKESIYLNEAERLWKMYGDKLLKIKDFKGSQVNLYS |
| | YKSKPVDVQLPAILKPAKEVTCFTKLMYILTMFLDGKEINDLLTTLINKFDNINSLLKTMEQLELQTA |
| | FVKEYTFFSQSQRLCAEITQLKSFARMGKPVSNAKEAMMIDAIQILGTDKTEKELETMAKRFFRDGN |
| | GKLLK |
| mgm4547164.3 | MSKHRTSYAKAMGLKSILVSDSVTEMLSFAKGSDARLEKMVEDDRITDLIDKNEEAFSAEFVKNRN |
| SEQ ID NO: | DNRYGYSIKNSKFSHPENRSVIAADPLLKGSVKSDMLELKSTLEKRIFGTESNGNALIQIAYNIQDIEKI |
| 5170 | LAEYITNIVYAVNNIAGMDKDIIGFGKFSPEHTYEEFSEPDNHKEHYNNDKYLINAVKNQYEEFDAFL |
| | DNPRFGYFGKAFFQKKQNRSTDFVIKYDIECYHILSLISGLRNWIVHNNEDKARVSRTWLYDLENNL |
| | DHEYIETLDYMYDDIANEIVNSFSTRNSANVNYISEILNISSDKLAEQYFRFSIMKDQKNLGFNIIKLRE |
| | TMLDRQEMSDIHENHNVFDTIRSKLYTMMDFVIYRYYMEEDKKTTAENNNLPDERKKLSKKDIFVI |
| | NLRGCFNDEHKDKLYAEEAEQLWKVLGNIMKQXKACA |
| IMG_ | MKGTVVKNGKFLEIKGENGKIYQLKPFHLPEGKTIQWLNAGDRVTFRTKDKGRIAEKSVDKIKTYK |
| 3300018493 | LPVTPRTHEEIFGDKSAQRPKTKAKAIGLKSLLYYDDKIIATSFGKGNKANVEKIVSDKIENIYDPANY |
| SEQ ID NO: | SIFINDKLKSFVLQDKKGENSVSINLFNATISNEADHKGEITINAGQVGRDQIGLKDALEEKIFGKTYN |
| 5171 | DNIHVQIAYNILDVEKILTEYINDIVYAMNNAADISPDRDLVGYLGHLFNYQKYWSNPKSANNKPNF |
| | DKFVNSPRLINYGEAFYTVGRDGPRRKSEREIFYMLSFVGYARQFIAHEYGKHISIYNPAKAADKEV |
| | ADFLDRLFADKIDEVNSDFLKLNAKNIAIICDIFPNENRNTLIKEFYQFSVLKAHKNMGFSIKTLRETL |
| | LALEQAQQLRSYIMQHQDFRRQVNTQLDFMIYKRYKDSSRAKSFADALRATARKEDKPALYIAEAS |
| | KLYAETAKFITTGILAALDSKQAQKLENFPAIPPEAIKDVCIGSQAYDFVKLIYLFTLLLDGKEINNLLT |
| | GLISKFDNINSLGRIYTEITGLVNLEDRYVKFEKDYSIFKDCGRVVAQLQMLNSFARMQKRPDSQTN |
| | AKAKKAKDPFAKTDFGDAVMVLGVSPQDKKAAIDKLTPGMKNYISNNVLNSSRFRYLVRYADVKN |
| | VSILAKSKVLTEFVLADIPDNQIERYTESCGGNSSLSVKEKRQFLAQKIAELSIDNMYVEMDKKATEQ |
| | QMLQRENNKNILGLYLTVLYLVCKNLVNVNARYLMAFHCLARDSYLLGKPYKKDNVYDYAVLTA |
| | DYIRHSKNAHMAQFLATDTEKSNNRLIHQ |
| IMG_ | LSTKKRFRYSVAAKAAGLKSSLAVDTDRTVMTSFGHGNAAILEKEIVDGEISVLNIENPAFDAVINDK |
| 3300024303 | KYALTGHHAGVHALVDQPQNRSDAVHIRGALEKKYFGDTFADNIHVQIAYNILDITKILTVYANNV |
| SEQ ID NO: | VYALNNLVHADDDTQADELDSLGNFSAGTSYAKSKSKSKSKQQDFVELFIKKKEIHGYFGDTFAFL |
| 5172 | DKRIADADKEKQVYAMLACLGSLRQACSHYRIRYSVNGKNVDADADTWLFSSAQLDQTDPLFSEM |
| | LNRIYSHKIKTVNQNFFENNRKANFPILKKMYPETTLKVLMNEYYDFSIRKGYKNFGFSIKSLREALL |
| | SPQYESLIGVQIKDNKEYDTVRSKLYQLFDFALTRYFNQHPDMVDAFVVELRSLAKDEDAKNAVYE |
| | KYAKAVWNDVKQPIAVMLSYMNGSAIKNIKAFELKPDQKELNGIMNSNALDVPHFCKLVYFLTRFL |
| | DGKEINDLLTTLVNKFDNIHSFNQVLTALGLSASYEADYKIFEDSGRVVEYLREINSFARMTVDMEKI |
| | KRSAYKKALLILGSSKYSDEDLDARVDEMLGVDYNQNGEKIKVRVDTGFRNFIANNVVESSRFHYLI |
| | RYCHPRKIRNLAGNAALIEYQLRRLPELQILRYYEACTEPIKRTARTMDEKIGTLIDLIVKMDFSQFED |
| | VQQNDRVRVFSDAEKKEKIRKMREKQRYQSIISLYLTMLYLNVKNLVNINARYVMAFQAWERDNY |
| | LLLQLSGKEAEAEYLNLTRHFIEPLDGA |
| IMG_ | MKSKVIKSPAKAAGLKSILVHDNIMYLTYFDKGPQGGLEKKVTKQKDVYEVLDIANPIHFDAKANR |
| 3300028603 | VNIDIQGTNGIIAKPSNPFYSNKVIGMDLVRTKYALEQQIFGQRFMNDNIHVQIAYQVLDILKALVPYI |
| SEQ ID NO: | NDITYSLNAKIALKDLNLDKDDFFEINPKKIDDSKNERLLQGMMDAIKNNAVYFQEVFYDIKKDKLI |
| 5173 | LKSTDLIKSYLKILIKLRQTVSHYDNSNSHYIFSGGENKEDIQLLKNLFENKRDKVNKDFIDLNKRSNF |
| | FILDKIFNIHNLQQSNLMHQYFYEYSILSMHKNIGFSIKTLREEILKLEGASRLLSTEYDSVRGKMYNL |
| | LDFILYHYFEIETRGVITQSIVEDLRKNQTEEGKLDIYSTLAVKTLSAVKSKLETLEGLMNGDTIQKIN |
| | REKTVTRDFQPKLVKGNFLVFIIYFITLFLDKKEVNDLTTTIINKLENIAAFQKVYKEITGHNIEFLNEY |
| | QVLENAEQTAKEMRFVQVMGLKKPELIITHSLLLDAHKILGYQPRGDEKDILKETNATKEFRNFLINS |
| | VIKSRKFVYLIKHVRAEDISKMAKNKYLVEYVLHRIAKNAPSQIDRYYKTITGQSDGTSKEKIEKLTH |
| | RISQLKYSDFAAIKTKTVNPFREQSKALIGLYLTVLQILYKNLVNVNARYTMGFWALEKDTLLHQIP |
| | YKGHIPLLGLVEKFLYNSDDPEEAWLKKRQIQIIKQNLSDLGQGKEKHILIKYRNLIAHQNVIRKSHE |
| | LLKDIRHVDSYFQLFHIAIQKQLNEMIKDGTVNPSSKIKDQLAWVEKNNQVSKNLLHTLNLPFAYNT |
| | ARYNKLSIGDLFDRNEEK |
| IMG_ | MKSKVIKSPAKAAGLKSILVHDNIMYLTYFDKGPQGGLEKKVTKQKDVYEVLDIANPIHFDAKANR |
| 3300027711 | VNIDIQGTNGIIAKPSNPFYSNKVIGMDLVRTKYALEQQIFGQRFMNDNIHVQIAYQVLDILKALVPYI |
| SEQ ID NO: | NDITYSLNAKIALKDLNLDKDDFFEINPKKIDDSKNERLLQGMMDAIKNNAVYFQEVFYDIKKDKLI |
| 5174 | LKSTDLIKSYLKILTKLRQTVSHYDNSNSHYIFSGGENKEDIQLLKNLFENKREKVNKDFIDLNKRSN |
| | FFILDKIFNIHNLQQSNLMHQYFYEYSILSMHKNIGFSIKTLREEILKLEGASRLLSTEYDSVRGKMYN |
| | LLDFILYHYFEIETRGVITQSIVEDLRKNQTEEGKLDIYSRLAVKTLSAVKSKLETLEGLMNGDTIQKI |
| | NREKTVIRDFQPKLVKGNFLVFIIYFITLFLDKKEVNDLTTTIINKLENIAAFQKVYKEITGHNIEFLNE |
| | YQVLENAEQTAKEMRFVQVMGLKKPELIITHSLLLDAHKILGYQPRGDEKDILKETNATKEFRNFLI |
| | NSVIKSRKFVYLIKHVRAEDISKMAKNKYLVEYVLHRIAKNAPSQIDRYYKTITGQSDGTSKEKIEKL |
| | THRISQLKYSDFAAIKTKTVNPFREQSKALIGLYLTVLQILYKNLVNVNARYTMGFWALEKDTLLHQ |
| | IPYKGHIPLLGLVEKFLYNSDDPEEAWLKKSQIQIIKQNLSDLGQGKEKHILIKYRNLIAHQNVIRKSH |
| | ELLKDIRHVDSYFQLFHIAIQKQLNEMIKDGTVNPSSKIKDQLAWVEKNNQVSKNLLHTLNLPFAYN |
| | TARYNKLSIGDLFDRNEEK |
| IMG_ | LFSLYDIQDLSSQKAIDLARKFYNWNVIHGQKNLGVSVRFLRENLITLSEASFLSLKEFDTIRSKLYLF |
| 3300034093 | LDFIIATDYLSLPNQLNPLVEKLRMAKSEEDKDKIYLEESRLIWQTIKDRVHIKLVPLMNIKNIKTLPK |
| SEQ ID NO: | RSLDEKHYRAIMIKNDASSFSKLMYVFSTFLDMKESNDLLSGLINKFSEIASMNNLLNESSSIFDNSRI |
| 5175 | NDHSKLFEKSSVIAKELMIVKALIQKQKEVVFSDRSLLDAALTIGIPEELQNIDYVKGLFKQYEQNNF |
| | KNFLINNVVKSRRFIYLMRYVNPLIIKQMMTHLPSIRFILNRLPIEQIDRYIFSALGKNPSGFNSVNTKI |
| | DELANQLIKIKLEQFTSVVQGRPKKFANQLSKPNFQENNFKEKQKALLGLYLTVPYLFFKGLVNVNS |
| | RYTIALHAFERDNDIILNSPEIFKQEKPDYLMLTKHYLKLGKFKTRVKTYLIDNQAHFNANMFKHYR |
| | DQIAHLGIIKNAVRFFKSNHHVMKSYFEIYHTILGLGFNDHVHHLDHSQAFLATAIDSIRKYGTYSKD |
| | LLNVLHTPFAYNLPRYKNLSIHDLFDKNEITKEK |
| IMG_ | MAKNKIRPGDKRKQDAQAAAAKHRVQNEAREKEIAEEAAKKEAAAAVKKSSITFSDEKGTVKTKS |
| 3300012983 | SAKAAGLKSAFVIGDDVLLTSFGKGNDVILEKRFSKENNATDFDNKLNITPISSRVADDKKTKYEFNI |
| SEQ ID NO: | RNKATTDDPRINGSASPARQDMLGQKAKLEKKYFGVEFNDNIHIQLIHNILDIEKILAIHINNIVTSLN |
| 5176 | NIMDVDEPKTGDIIGYSSLLKTWNEFENKTETKLFTDFENFYNNSKLSYFGSGFYDTGFDTKAQLNS |
| | KKRSKEEVYYILCLLGQLRQEITHGNSNYIYNLANDTSEAATEVKSILNSFYGAQVEN |
| UPLX01.1 | MILILGEGTIRMAKKKNARQRREEEKNRIKAIIEKIKNKVVEKEETEEIVENNETKNVESIVVEPKKKS |
| SEQ ID NO: | LAKASGVKSVFINNDEIIMDTSFGRGNDAVIEKIIKDNNIDNENKDKPVYDVVAIENEGNIIKVQSERFK |
| 5177 | AIESANTEIPPERNGMDLIKRKDKLEEVYFGHTFNDNIHIQLIYNILDIEKILSVYINNIVYALGNLERK |
| | DTDEEKDLIGYSSARAKYEDFIENEKLEDRKKLLEEFIENGDRLGYFGNVFFKNDKELKSKKEIYNIL |
| | GLLGSLRQFCFHYNEAVFENEEGKINQDIAPFSTLSTTYCFLTKSFIYEALRYIRLAL |
| GCA_ | MERQKRKMKSKSKMAGVKSVFVIGDELLMTSFGDGDDAVLEKDIDENGVVNDCRNPAAYDAVYG |
| 900544545.1_ | TDSIRVKKTNNNIRAKVNNPLAKSNIRSEESALFRTRVNEYKREQKDKYETLFFGKTFDDNIHIQLISK |
| UMGS692_ | ILDIEKTFSVVIGNIVYAINNLSLEQSIDRPIDIFGDKNTQGISLREDNDYLKTMLPRCEYLFHNILNSDS |
| genomic | DNNSKMNYNKVNKGKEEKDNRNNENIEKLKKALEVIKIIRVDSFHGVDGIKGDQKFPRSKYNLAVN |
| SEQ ID NO: | YNEEIQKTISEPFNRKVEEVQQDFYRNSCVNIDFLKEIMYGSNYTDRGSDSLECSYFNFAILKQNKNM |
| 5178 | GFSITSIRECLLDLYELNFESMQNLRPRANSFCDFLIYDYYCKNESERANLVDCLRSAASEEEKKNIYF |
| | QTAERVKEKFRNAFNRISRFDASYIKNSREKNLSGGSSLPKYSFIEGFTKRSKKINDNDEKNADLFCN |
| | MLYYLAQFLDGKEINIFLTSIHNIFQNIDSFLKVMKEKGMECKFQKDFKMFSHAGHVAKKIEIVISLA |
| | KMKKTLDFYNAQALKDAVTILGVSKKHQYLDMNSYLDFYMFDNRSGATGKNAGKDHNLRNFLVS |
| | NVIRSRKFNYLSRYSNLAEVKKLAQNPSLVQFVLSRIEPSLICRYYESSQGISSEGITIDEQIKKLTGIIV |
| | DMNIDLFENINNGEIGMRYSKATPQSIERRNQMRVCWFVS |
| OMCP01.1 | MERQKRKMKSKSKMAGVKSVFVIGDELLMTSFGDGDDAVLEKDIDENGVVNDCRNPAAYDAVYG |
| SEQ ID NO: | TDSIRVKKTNNNIRAKVNNPLAKSNIRSEESALFRTRVNEYKREQKDKYETLFFGKTFDDNIHIQLISK |
| 5179 | ILDIEKTFSVVIGNIVYAINNLSLEQSIDRPIDIFGDKNTQGISLREDNDYLKTMLPRCEYLFHNILNSDS |
| | DNNSKMNYNKVNKGKEEKDNRNNENIEKLKKALEVIKIIRVDSFHGVDGIKGDQKFPRSKYNLAVN |
| | YNEEIQKTISEPFNRKVEEVQQDFYRNSCVNIDFLKEIMYGSNYTDRGSDSLECSYFNFAILKQNKNM |
| | GFSITSIRECLLDLYELNFESMQNLRPRANSFCDFLIYDYYCKNESERANLVDCLRSAASEEEKKNIYF |
| | QTAERVKEKFRNAFNRISRFDASYIKNSREKNLSGGSSLPKYSFIEGFTKRSKKINDNDEKNADLFCN |
| | MLYYLAQFLDGKEINIFLTSIHNIFQNIDSFLKVMKEKGMECKFQKDFKMFSHAGHVAKKIEIVISLA |
| | KMKKTLDFYNAQALKDAVTILGVSKKHQYLDMNSYLDFYMFDNRSGATGKNAGKDHNLRNFLVS |
| | NVIRSRKFNYLSRYSNLAEVKKLAQNPSLVQFVLSRIEPSLICRYYESSQGISSEGITIDEQIKKLTGIIV |
| | DMNIDLFENINNGEIGMRYSKATPQSIERRNQMRVCWFVS |
| OMEK01.1 | MERQKRKMKSKSKMAGVKSVFVIGDELLMTSFGDGDDAVLEKDIDENGVVNDCRNPAAYDAVYG |
| SEQ ID NO: | TDSIRVKKTNNNIRAKVNNPLAKSNIRSEESALFRTRVNEYKREQKDKYETLFFGKTFDDNIHIQLISK |
| 5180 | ILDIEKTFSVVIGNIVYAINNLSLEQSIDRPIDIFGDKNTQGISLREDNDYLKTMLPRCEYLFHNILNSDS |
| | DNNSKMNYNKVNKGKEEKDNRNNENIEKLKKALEVIKIIRVDSFHGVDGIKGDQKFPRSKYNLAVN |
| | YNEEIQKTISEPFNRKVEEVQQDFYRNSCVNIDFLKEIMYGSNYTDRGSDSLECSYFNFAILKQNKNM |
| | GFSITSIRECLLDLYELNFESMQNLRPRANSFCDFLIYDYYCKNESERANLVDCLRSAASEEEKKNIYF |
| | QTAERVKEKFRNAFNRISRFDASYIKNSREKNLSGGSSLPKYSFIEGFTKRSKKINDNDEKNADLFCN |
| | MLYYLAQFLDGKEINIFLTSIHNIFQNIDSFLKVMKEKGMECKFQKDFKMFSHAGHVAKKIEIVISLA |
| | KMKKTLDFYNAQALKDAVTILGVSKKHQYLDMNSYLDFYMFDNRSGATGKNAGKDHNLRNFLVS |
| | NVIRSRKFNYLSRYSNLAEVKKLAQNPSLVQFVLSRIEPSLICRYYESSQGISSEGITIDEQIKKLTGIIV |
| | DMNIDLFENINNGEIGMRYSKATPQSIERRNQMRVCWFVS |
| OLYJ01.1 | MERQKRKMKSKSKMAGVKSVFVIGDELLMTSFGDGDDAVLEKDIDENGVVNDCRNPAAYDAVYG |
| SEQ ID NO: | TDSIRVKKTNNNIRAKVNNPLAKSNIRSEESALFRTRVNEYKREQKDKYETLFFGKTFDDNIHIQLISK |
| 5181 | ILDIEKTFSVVIGNIVYAINNLSLEQSIDRPIDIFGDKNTQGISLREDNDYLKTMLPRCEYLFHNILNSDS |
| | DNNSKMNYNKVNKGKEEKDNRNNENIEKLKKALEVIKIIRVDSFHGVDGIKGDQKFPRSKYNLAVN |
| | YNEEIQKTISEPFNRKVEEVQQDFYRNSCVNIDFLKEIMYGSNYTDRGSDSLECSYFNFAILKQNKNM |
| | GFSITSIRECLLDLYELNFESMQNLRPRANSFCDFLIYDYYCKNESERANLVDCLRSAASEEEKKNIYF |
| | QTAERVKEKFRNAFNRISRFDASYIKNSREKNLSGGSSLPKYSFIEGFTKRSKKINDNDEKNADLFCN |
| | MLYYLAQFLDGKEINIFLTSIHNIFQNIDSFLKVMKEKGMECKFQKDFKMFSHAGHVAKKIEIVISLA |
| | KMKKTLDFYNAQALKDAVTILGVSKKHQYLDMNSYLDFYMFDNRSGATGKNAGKDHNLRNFLVS |
| | NVIRSRKFNYLSRYSNLAEVKKLAQNPSLVQFVLSRIEPSLICRYYESSQGISSEGITIDEQIKKLTGIIV |
| | DMNIDLFENINNGEIGMRYSKATPQSIERRNQMRVCWFVS |
| OMCO01.1 | MERQKRKMKSKSKMAGVKSVFVIGDELLMTSFGDGDDAVLEKDIDENGVVNDCRNPAAYDAVYG |
| SEQ ID NO: | TDSIRVKKTNNNIRAKVNNPLAKSNIRSEESALFRTRVNEYKREQKDKYETLFFGKTFDDNIHIQLISK |
| 5182 | ILDIEKTFSVVIGNIVYAINNLSLEQSIDRPIDIFGDKNTQGISLREDNDYLKTMLPRCEYLFHNILNSDS |
| | DNNSKMNYNKVNKGKEEKDNRNNENIEKLKKALEVIKIIRVDSFHGVDGIKGDQKFPRSKYNLAVN |
| | YNEEIQKTISEPFNRKVEEVQQDFYRNSCVNIDFLKEIMYGSNYTDRGSDSLECSYFNFAILKQNKNM |
| | GFSITSIRECLLDLYELNFESMQNLRPRANSFCDFLIYDYYCKNESERANLVDCLRSAASEEEKKNIYF |
| | QTAERVKEKFRNAFNRISRFDASYIKNSREKNLSGGSSLPKYSFIEGFTKRSKKINDNDEKNADLFCN |
| | MLYYLAQFLDGKEINIFLTSIHNIFQNIDSFLKVMKEKGMECKFQKDFKMFSHAGHVAKKIEIVISLA |
| | KMKKTLDFYNAQALKDAVTILGVSKKHQYLDMNSYLDFYMFDNRSGATGKNAGKDHNLRNFLVS |
| | NVIRSRKFNYLSRYSNLAEVKKLAQNPSLVQFVLSRIEPSLICRYYESSQGISSEGITIDEQIKKLTGIIV |
| | DMNIDLFENINNGEIGMRYSKATPQSIERRNQMRVCWFVS |
| OUQC01.1 | MERQKRKMKSKSKMAGVKSVFVIGDELLMTSFGDGDDAVLEKDIDENGVVNDCRNPAAYDAVYG |
| SEQ ID NO: | TDSIRVKKTNNNIRAKVNNPLAKSNIRSEESALFRTRVNEYKREQKDKYETLFFGKTFDDNIHIQLISK |
| 5183 | ILDIEKTFSVVIGNIVYAINNLSLEQSIDRPIDIFGDKNTQGISLREDNDYLKTMLPRCEYLFHNILNSDS |
| | DNNSKMNYNKVNKGKEEKDNRNNENIEKLKKALEVIKIIRVDSFHGVDGIKGDQKFPRSKYNLAVN |
| | YNEEIQKTISEPFNRKVEEVQQDFYRNSCVNIDFLKEIMYGSNYTDRGSDSLECSYFNFAILKQNKNM |
| | GFSITSIRECLLDLYELNFESMQNLRPRANSFCDFLIYDYYCKNESERANLVDCLRSAASEEEKKNIYF |
| | QTAERVKEKFRNAFNRISRFDASYIKNSREKNLSGGSSLPKYSFIECS |
| IMG_ | MKKSKVKLNGVKAVYHISPDVRVTTAFGRGNNSVLDKRIENGTIEELQNHSDIDVNISRKTYSFRKK |
| 3300031760 | SLKKDAGQFSVPDNTNDQLGIRKELEEEIFGEKFDDNIHIQAAYAVNDIIKTLSVAANLAATAINGLD |
| SEQ ID NO: | RENTEYDMIGFYIIPHITYQTYAGNKKPKFDEFIGRVKAQGTFSYFPDILPKFREESEEESDKEKLYYL |
| 5184 | MCIVSLIRNSTIHYAAGNSRNADSMDYIFGELNKEALTETADDLIKSKINSINKGFSNNQKNNIYRLLK |
| | AKADTPENTARLIRRLYAFTIRKQDKNLGFSLKKLRECAIRSIEDMKGLLGDTYDTVRSKLYTLVDF |
| | VVYSYLKYHKEGKKFSEEMVDQLRAAESDKDKNIVYCQGAKRLYNIKIISQTINALISDIKSDFDQPK |
| | HGNECYQPINDGMKEAEKDFITTDQLSLFTKFIYVLCQFLDGKNINILLSSLISKFQQIEAFNGDIRKLN |
| | LNIRDDGKIGYDSKKYSIFEKSGQISMELDMLRGVIKMDINDLNAYKTMIKDALLVIGVNESDIDSIY |
| | EYYFNQKDKKNSVAGFFRNNIINSRRFRYIIKYINPSDAYRIIQNENVRNYVLGRMNDAIIDRYAHSV |
| | GIEDKVHDKRKVLSDILSTVKFDNFTELKYINPKDRNKDQKAKGREKPKAILGLYLTIVYIVVKSLVR |
| | INSQYVMAVYHLERDSRLCGVSSNDNYPLSMTKRYCDRDNHLLKEKHIVKLERYQNTPEKICTTYR |
| | NAIAHLSAVRKGVKYIGDIQKTDSYFGIYHYCMQKLLYSADSADKQPFADFVSSVFGDEKELDKLRS |
| | GIYSQAILRALNYPFGYNPARYKNLSYEKIFMRAWQDEDTNKKT |
| IMG_ | MKKSKVKLNGVKAVYHISPDVRVTAAFGRGNNSVLDKRIENGTIEELQNHSDIDVNISRKTYSFRKK |
| 3300028886 | SLKKDAGQFSVPDNTNDQLGIRTELEEEIFGGNFDDNIHIQAAYAVNDIIKTLSVAANLAETAINGLD |
| SEQ ID NO: | RKNTENDIIGFYIIPQITYQTYAGNKKPKFDEFIGRVKAQGTFSYFPDILPKFKEESEEESDKEKLYYLM |
| 5185 | CIISLIRNSATHSKNSNSDTTDYIFGKLNSDNKEALTETADNLIKSKIDSINEGFSKNQKNNIYRLLKAG |
| | ADTTENTARLIRRLYAFIIKKQDKNLGFSLKKLRECAIRSIEYMKYLPGKKYDTVRSKLYTLVDFVVY |
| | SYLKYHKEGKKFSEEMVDQLRAAESDEDKNIVYCQGAERLYNIEIIRRTIKALIKDMDIKSEFKQPDK |
| | DNTYYQPIMDGMEEAKKDFITTDQLSLFTKFIYVLCQFLDGKNINILLSSLISKFQQIEAFNGDIRKLNL |
| | NIRDDGKIGYDSKKYSIFEKSGQIADDLDRLRGVIKMDINDLNAYETMIKDALRVIGVDESDIESIYQT |
| | H |
| IMG_ | MKKSKVKLNGVKAVYHISPDVRVTAAFGRGNNSVLDKRIENGTIEELQNHSDIDVNISRKTYSFRKK |
| 3300032007 | SLKKDAGQFSVPDNTNDQLGIRTELEEEIFGGNFDDNIHIQAAYAVNDIIKTLSVAANLAETAINGLD |
| SEQ ID NO: | RKNTENDIIGFYIIPQITYQTYAGNKKPKFDEFIGRVKAQGTFSYFPDILPKFKEESEEESDKEKLYYLM |
| 5186 | CIISLIRNSATHSKNSNSDTTDYIFGKLNSDNKEALTETADNLIKSKIDSINEGFSKNQKNNIYRLLKAG |
| | ADTTENTARLIRRLYAFIIKKQDKNLGFSLKKLRECAIRSIEYMKYLPGKKYDTVRSKLYTLVDFVVY |
| | SYLKYHKEGKKFSEEMVDQLRAAESDEDKNIVYCQGAERLYNIEIIRRTIKALIKDMDIKSEFKQPDK |
| | DNTYYQPIMDGMEEAKKDFITTDQLSLFTKFIYVLCQFLDGKNINILLSSLISKFQQIEAFNGDIRKLNL |
| | NIRDDGKIGYDSKKYSIFEKSGQIADDLDRLRGVIKMDINDLNAYETMIKDALRVIGVDESDIESIYQT |
| | H |
| GCA_ | MAKKKRMSAKERKQQQINLRIKKATEDSTKKVNTTVAVNNKPISKEIKKSKAKLAGVKWVIKAND |
| 900314705.1_ | DVAYISSFGKGNNSVLEKRIIGDVSSDVNKDSHMYVNPKYTKKNYEIKNGFSSGSSLTTHPNKPDKN |
| Rumen_ | SGMDALCLKTYFEKEIFKDKFNDNMHIQAIYNIFDIEKTLAKHITNIIYAVNSLDRSYIQSGNDTIGFGL |
| uncultured_ | NFNIPYAEYGGGKDSNGKPENKSAWEKRESFIKFYNNAKDRFGYFESVFYQNGKQISEEKFYIYLNIL |
| genome_ | NFVRNSTFHYNNTSSHLYKERYCKINPKNNLKTDFEFVSYLNEFVKNKFKNVNKNFISNEKNNLYIIL |
| RUG026_genomic | NAYGEDIEDVEVVKKYSKELYKLSVLKTNKNLGVNVKKLRESAIEYGYCPLPYDKEKEVAKLSSIK |
| SEQ ID NO: | HKLYKTYDFVITHYLNSNDKLLLEIVEALRLSKNDDKKENVYKIYAEKIFKAEYVINPIKTISNLFAEK |
| 5187 | GDKLFNEKVSISEEYVEDIRIDKNIHNFTKVIFFLTCFLDGKEINDLLTNIISKLQVIEDHNNVIKAIANN |
| | NDAVYKDYSDKYAVFKNSGKIATELEAIKSIARMENKINKAFKEPLLKDAMLALGVSPNDLDEKYE |
| | KYFKTDVDADKDHQKVSTFLMNNVINNSRFKYVVKYINPADINRLAKNKHLVKFVLDQIPHKQIDS |
| | YYNSVSTVEEPSYKGKIQLLTKKITGLNFYSLFENCKIPNVEKEKKKAVITLYFTIIYILVKNLVNINGL |
| | YTLALYFVERDGFFYKKICEKKDKKKTNKDVDYLLLPEIFSGSKYREETKNLKLPKEKDREIMKKYL |
| | PNDEDRKEYNKFFKQYRNNIVHLNIIANLSKLTSTIDKEINSYFEIFHYCAQRVMFDYCKNNNKVVL |
| mgm4773634.3 | LPVNEGETRKDLIGLKKQLEEVVFLKYADENHQEGQHFNDNIRIQIAYSIFDIIKVLVPISAQLIYTVN |
| SEQ ID NO: | GLDRHNDKEDAIGYYLNYSVTYENFGAVKENSSEKAKFKILEKRNKYEKFVSKAKENFIYFKDVFY |
| 5188 | EEKPAQLNNGQKTNKKSQVEYQLKSDEEIYYILNCLNFLRNNIAHFKISNQNDGNAIFRDCYYDKSA |
| | PKNLFNKGMYQVTDSAYGKAVDKINKSSVKYEDKNLYLLAKALGFAESKYSERHKELAQLIFKTSIL |
| | KSNSNRGYSnCKIRELLFEKNILTISDDEKTVNTYRAKLYKILDLVLTYYLSSSEYENMIEKFIDQLRG |
| | NQYEEEKQESYANFTEKIGEIDEIRIALKRVVSLFEGKEYANKNVIKLKEEWIDECKINKNVSDFTKLI |
| | YFISRFLSGKEINILLTQCISKLQNIDAFNKTVEELVEKGILEMHHYKRDYSLFERSGEIAKELEIVKSIS |
| | KMDRSFDHYPLEKLYKDFLLTLGVKESNKNDSENNIEDENSLEYCYEKYFSKDSKTKLSAFIKNSVIN |
| | SQRFLYVVKYVKPKDVNAIMKNPSVVYYVLQQMTEAQIERYCKTIGIDIDFELKICKRKDLLKMLIDI |
| | DFSKIRGNRSLQNKKNRGELNRNDTIEREKKKALLGLYYTVAYIFLKNMVNVNGRYILAFYCLERD |
| | KILYKEAFAKQLSTIEKSKKWSTREFYDTLTRLFTGKLNLDCQSVPLLSEKASEKLDRYIFEEPKGKSE |
| | GEKDGGDWSGYSNINDRIYVFYRNTVEHLNLIGNIGRYLEFYENVAMDCYSYDVAIGSKTKEDIKM |
| | SRVYFSFYHHMMQKMFFEEYKASKNRLINKSNNRSHIKSEKKNK |
| ULSD01.1 | MMGKHLNAKQRELEKKLKNQQKGMMYNKSTDAVSVPTLQAAPKKAAEASTLITPGTLKTKAKAM |
| SEQ ID NO: | GLKSTLVFDDKIVVTSFLNSKTEENEKCAHIEKITDCNGQTIVERPRMFNTSINAQQVDLSKDNDETN |
| 5189 | YPNPAFEDCGRDYINIKSALEKRVFGKTYNKDNLHVDIAYNIFDIKKIIGTYINNITYIFYNLGREEYN |
| | AKKDIIGNQDSDYINKLLNNTSAYFTYFDGVFKQITDRDSNKDREVKNSYNALVLKVLYYLRQFCM |
| | HGNTYTKRNEESFLSDTALYNVKDFFAKADPQINELIDAVYADGIKTINNDFMAHAKNNMYIICEVY |
| | KNEVEDSLMKEYYDFVVRKEGNNLGFNTRQLREILIDKYVGNLRDKKYDTFRNKLYTVLGFILVKEI |
| | KRNPKIQDSFIAKLRANQSGDEGKLNIYNEFAPKIWSVVSSKFNSAIKCFDEESLSKFKGYKDIDESLIS |
| | KYGITVSNTDTLVKILYFLCKFLDGKEINELCCAMINKFDNINDLIKTAAQCGEDIEFVKEYKLFINSK |
| | DLSDQIRVVKSISKMKPELSNIGEVLLLDAIDILGYKINKYKCDADGNRLVDSNNKPVYSEEYCTFKK |
| | DFFETCELDEFGRVKYDKKGKPVINHRRRNFIINNVLSSKWFFYVAKYNRPSECQKFMKSKKLIALA |
| | LKDVP |
| IMG_ | LNEIRQWTAHYESAYKIFSGSELIKEELGANKEPQNNRWMVIESYYKGLVNRINRGFLNNSALYNFP |
| 3300006226 | LLFDLVKPKDENEKKKLIEEYYKFSVLKDGKNVGVNLRTVREAMFKNGFHDVKEKEHDTYRSKFY |
| SEQ ID NO: | GIVDFLLYRSESKNFSGWSEELRKTVDKVAKEKCYDKWGESVAARMRPKVTALLDKLSKMEWKK |
| 5190 | KPNKEDLEKLAEPYKSYLADVQLSADDADPLVKLLAFLCNFWEGKEINELLSAYIHKFENIQEFIDTI |
| | EKLEGKKPTFSEKYALFNEPARRRTEEVAEIPGTRAGEIAQNLRVLASIGKMKPDLGDAKRQLYKAA |
| | IEMLGVPDDSQFVSDQWLAENVLLDKTQSGYANRKTEVNPFRNFVAKQVIESRRFMYLVRYTKPKT |
| | VRTLMENKAVVHYVLSRIDNSKNVKGKEDIITSYYKTLKEYDPQKHQHLPTDKAEREKEINRRIDAL |
| | ADYLCKYSFEKNVLKQKDGIVRNTKSATKNVEIERLKALTGLYLTVAYIAIKNLVKANARYYIAFSIF |
| | ERDYALFEKKLGRDALDERPKYPDDKGKETEADYNFFALTKYLLDKDDKAFGSWKPYQWDESKN |
| | KGENWKALRLHIKQHKKENQRHFSQKWLNFFRQQIENAKNISETGYLLTAARNHAEHLNVLTALPK |
| | FVGEFRKTEGKMTSYFELYHFLLQKLMLADAGLKNLDKYRERINKYQTSCKDLIKITYVSLGYNLA |
| | RYKNLTIEALFDSDSENGKALTKEREKKAEERAKERAKKH |
| IMG_ | MSDNKKTIAKRMGIKSVLAHGKDEQGHTKLAITAFGKGNKTDDEILKTDAKGTNLEQKHKGRNITA |
| 3300002469 | EKIVSKGIQTRGTIAREYHDTFLDTLGENLGEDYLKLKETLEKEFFGKSFPGDSVRIQIIHQILDIQKLL |
| SEQ ID NO: | GIYITDIIYCINNLRDETHLKDESDIVGLSMNDDHKLKINLGNMLPYLGFFGDAFKMPPKPKKDKSGK |
| 5191 | VINQGETPEDVHNKNVLRILGTMRQTAHFRNASLPFARDGKLANRFKKYTEEEKKNPKGKTVKMT |
| | VLKWDAWQTVEDYYAKLVDRINEGFCKNAATNVHFLTELLPXESKXQLTEDYFRFAILKEGKNLX |
| | VNMKRLREVMXALFVPELTAPETKKXYDSYRAKIYGLTDFLLFKHXHNTKQLEEWVAVLRETSNE |
| | DAKENLYDEFARTAWNTVGDSAKQLIENMQSYFTKKEKEITKTAQPVLSTSSIAHTSKKITQFSSFAK |
| | LLAFLCNFWEGKEINELLSAYIHKFENIQEFIXXXEKLEGKKPTFSEKYALFNEPARRRTEEVAEIPGT |
| | RAGEIAQNLRVLASIGKMKPDLGDAKRQLYKAAIEMLGVPDDSQFVSDQWLAENVLLDKTQSGYA |
| | NRKTEVNPFRNFVAKQVIESRRFMYLVRYTKPKTVRTLMENKAVVHYVLSRIDNSKNVKGKEDIITS |
| | YYKTLKEYDPQKHQHLPTDKAEREKEINRRIDALADYLCKYSFEKNVLKQKDGIVRNTKSATKNVEI |
| | ERLKALTGLYLTVAYIAIKNLVKANARYYIAFSIFERDYALFEKKLGRDALDERPKYPDDKGKETEA |
| | DYNFFALTKYLLDKDDKAFGSWKPYQWDESKNKGENWKALRLHIKQHKKEN |
| IMG_ | MGKTHKKNGNGSAKAHGLKMVITSNNDVSVATFGNKTKPTIIEQTLDFDTKEKIYDIDEKNFDASIE |
| 3300026549 | PIKTLKLVAKKKINNEKEFPEYNIQVNQNRKDLLGFKDKLEAEMFVGSNYKDNLHVQIAYNILDFKK |
| SEQ ID NO: | IIGLFIGDVLNSIEHLSKNPVDEVGTINVNIGYDDLSKSKKEKIDKVLKELYKYSIYFDDVFENNNSLK |
| 5192 | SDYDILRILSLIRQSVLHDSTFKNSLFTPGNNEALLDLANKAMNFVKNDFNLFKENFSSNSIVNVRILN |
| | KKLGENNWGGKYYNYVLRRDNKNIGFSITKIKTKFMEFFFNGKEDEIKTFFGKLSTLFEFLIFEYYKD |
| | ASHEIFVASIIESLRECRTEEEKEIIYEKEFQRLISENILKKELELISTIDAEYISNVKEESKGYKLNVQKS |
| | SWSFNYFPSLIYVLCKFLDQKEVSELTTSIINKLENIKSLILTAKDLKIWDCDFIPELKIFNENQINDIIDE |
| | FRVVYNLSVSKRKLKKVEPNTNNTKISKALYIDALNMFKKDDFVNNDNLSDYVQLEKTDEENALKK |
| | TKKFLINNIIKNRRFIYLLKYIDPKDCHKLVTNEKILEYIFNGEKDKYLPDSIIESYYSKITGKKINLPSR |
| | DRMTNILINLIKEIDISTVISSAFDSERIEKQKQIFTLYLTICYLIVKGLINTNSVYLLACSAYDRDAYYA |
| | FGAEEDRTMGLKLLNRYLEGERSKAKPKTRVIAYLEKNIITAKTVLKYDLKRDNLYIGKGYRDAISH |
| | FNFVNMAPSYIDRIKSVSSFFDLYNFTVQNWYLEKAKEQNIDDGYVEQLRVNLEKYGKTQKDFLKII |
| | NVPFAYNLARYKNLTIEDLFYDRYNLKGDKETSTD |
| IMG_ | MNKIHKKQGKTTAKSLGLKSVLKIENDLVVTTFGKKDNPMVVEQSINKASGEKELYVDEDQVKFDS |
| 3300019376 | SLIKEKNILSLDSIQHSNHQIIVNIDQKDASEIGMDYLRLKPELEKEFFGKTFYDNVHIQIAYNLLDLKK |
| SEQ ID NO: | IIGLHIGNAIQALENLGRDGSDLVGICDATKPLNYLDDVKQKADIGFMNRLKPYFMYFDGVLKLDNS |
| 5193 | KNKNGELNQLDIENWDVIRILSLIRQGCAHAGAYSSLLYTAQNNKVYADLINKALSIFSDDLDKFNK |
| | SFLKQSKMNLFILFDLYNCRFDRSLQEKIIKEYYRYVLYKDNKNLGFSLKNVRNLIIEGKYDEQERSG |
| | KLQTIRSKLNTLLDFYLYGYYQKNPTFVENIVAKLRESKNDEDKEKVYEEEYHRLLSENNYLVDKK |
| | CSDIVYRINEAVKNRKIFVNANINAVVEKVSCSCFPSLIYVLCKFLDGKEVNELTTAIINKLENIASLIN |
| | ALVTLKSYGGFSEQYKIFDYPNINGLIDDFRMVKNLTSTKRKLKKASGGEDRIGRQLYADAINIFKED |
| | SFVSANDEKGTGLDQYVNKFFSKDDLGARKVRNLLLNNIIKNRRFVYLIKYIDPKDCYKLVHNEKIV |
| | RFALGQYDESQMPLNQLQKYYDAVIENREGFRKCNDRKKIIDTLVSEINRVSIDGILDIGNRLVNRGN |
| | NDYINHQKQIISLYLTIAYLIVKGVVHTNSLYFIAWHAYERDNNFKFGNDGKDYLALTKEYLTNKKK |
| | RVKQLLDHNIEEANNSLDSKYFSAYRNKVVHLNFCNIFVNYLDGIGDIHSYYDIYQYVIQKWSIAERS |
| | KDFIDPQYLTKLSNDLKQYRTYQRNFLKIINLPFAYNLARYKNLTIGDLFNDKYPLPKETVKEFYNEE |
| IMG_ | MKQQRYESFSLGFVRXXXXXXXXXXXXXXXXXXXXXXXXXXXXXXXXXXXXXXXXXHGDPKQ |
| 2061766007_3 | NIYKVEGFGSHTEIANLLDRLYSERVNELNSGFLIKAKNNLILLFRAFGVKGKEQKAAFXXXXXXXX |
| SEQ ID NO: | XXXXXXXXXXXXXXXXXADIEEAFEIRKKDYYSVRGKVYPFMDFAIFRYYRNSEEASVKLVSELRA |
| 5194 | SMNEVEKEEVYRREAQKXXXXXXXXXXXXXXXXXXXXXXXKVEDKDISKEMLEDILITPDAAQFT |
| | KFVYLITLFINGKEINDLLTTLIHQFEXXXXXXXXXXXXXXXXXRGWKLSSGKSFRFSDGVKRSPGN |
| IMG_ | MNHQTRKSTSKRLGVQTIVNKNNNIFVFSNNQPKTKSVQLADEHQQLIEQNNDLDNFKTDLEYGNI |
| 3300008271 | KFGLSNNALEAFYPNQYTIRKKSSSINQWLVDKYCPTQCPDSNLILQLIHNNEDFKKIIALYSDVVFS |
| SEQ ID NO: | MKVFKGNRNEDYISKIFNNMNAKEIIDKVKSVIDSIKKRPYLFGFNPKDSASDQQIAYHLKNISMLRN |
| 5195 | YITHDSNDNLRIDSDTYASLTEQLDQFIEQENKKFTEQNGHNLALISQFYPSWSDEEVVKNYHDYYF |
| | NMLDKNLGVNLRQIALLIREKNNISQMLDDDRRAKFNVVLKFYLYTWLKANQAQLDDYIQQLRQA |
| | QLDDKDTIYQKIAQDIPANDINRLIKLCQQIDFQIKPTRFKRIPIKTINEQWDFRVLMIYSLTKFLTIKET |
| | NELISALLNKIEAMSNLLEIDRALKVQAVDAIQPNQWFFVSLPMPKKPVKNTKQPKPKHQSQSKPAN |
| | GIRGLAELRAQFQPSITHSVSSDNQLIQHQPVITSLKSIDYQRITRQLTIVNRIRSYHQPKHAEYHRQEL |
| | IDAISLFWGSDELCITDGIFDEEIKVLVNGSTKPVSRKLKNILRNNVIKTKFFNYLVRYIEPKKVANLL |
| | HNNYGLALFLVQQLTPSQLESLMIEYIPLEDENQLVGQTPREELTEAQKQRLEQYEHQLAMIFSEKIS |
| | LTYCVNRKMTVGRLALLNHI |
| IMG_ | MXXXXLKGKNPFRNFIANNVIESTRFIYVVKFCNPDKVRSLVNNTVVTKFVLGRMPETQIDRYYQSC |
| 2061766007 | IANPDSAAQLAARIDALADMMRNMRFEDFKDVQQKSGDPIENMRKERFKAIIRLYLAVVYQLVKNL |
| SEQ ID NO: | VNVNSRYVIAFHCLERDCHIYTGKSVSKSKKYFTLIDVLLEEGDSSRSGYLARNVRMREHIAHDVDI |
| 5196 | GKSLIITTKSTDSATGEVKYSKLRIIGFYRNNIAHLTAVRSFADYIGDIARIDSXXXXDYSLDRKVEDL |
| | ADMMKKMHFDAFKDVKQDTKSIKNKTEDRKERMRKERYKAMIGLYLSVVYQLVKNLVYVNSRY |
| | VMAFHAXXXXDLPRLYGADPHAVEEGSQFQKRSSLR |
| OHAC01.1 | MNIMRNAFKRANYVLCLLLALSGTSCINRLNDEIKEGSILISFSFEASKAATKVTKNTFDIGDRSGIFA |
| SEQ ID NO: | MLTGNSLDQQRYIDNLLLECSDNSKLISKKEVYYPEGDATLDFISYYPYQEENVSKGSSLLDVTVQA |
| 5197 | DQNKTANYSLSNFMTARIGNVPNSEKTIKLEYKHRFAKIKLVLIPQEGEDTDEMLKANPRIIATGFRT |
| | QAVYDLQSDKLSSVDDASETDIIPFGTWKKEGNTLSGKEFIVIPQTHSDGGQAFTLEWNGKIYPCPLP |
| | SATIEEDTELEICINALQSTSATLTGVIANIKEWELSEQGESENRYEITAVHTASLSFSTSDIYRIYHQGK |
| | PVAEVCREYLYTAPADAVATKAIVAYSVQDNEQTDLTNGIVLQLPDKTATTHGGKVSWNEADNSL |
| | TYISGHSRPIEKFYIDENRKIVTEKPAAPALAINVSSYVIRDIRNGILHTYPIVKIGAQYWMKEDLQTA |
| | HYNDSKSMPLRKALGDGEGYLKWAGTNSHFYNGEAVLTGKLAPLDWRLPTENDWNRLKEYIGDIR |
| | TVDSYFSIYHYVMQRCITKRENTWSSDVYSATNETGFCIQPAGLLLERENKTALVNANSSTAYWLY |
| | DGTQKQLDKVVMFANSNNDIALKNAVKPEGKDYYNAFSIRCIKE |
| OJKY01.1 | VYINSRYALAFAKYEHDASLLLDGWVYDRYKTVFSDLTVDSLQKGKLNRRASKYLQVNLEHSDTD |
| SEQ ID NO: | LIRQYRNKVAHLNAMFDLMSKVYVDATMQGKKGMNEHSALVSMIDRSNIPGKVIVLMDRGYESFN |
| 5198 | NIAHLQEKEWNFIIRAKESYGMISNLQLPNSEEFDVDTTLTLTRRQTKETLALLSAYPERYRWIQPHT |
| | TFDYIAPKAPNMYDLHFRVVRFRISDGCYETIYTDLDPETFPVEKIKELYRLRWGIETSFRELKYISGL |
| | SCLHGKKADFLLQEVFARLIFYNYASLIARQVPAPQGKQINFSVAILACKQFLKGKIRSAQIFEILSMH |
| | LSPIRPGRQYKRYQNPVSAVAFQYRLS |
| OMBP01.1 | VYINSRYALAFAKYEHDASLLLDGWVYDRYKTVFSDLTVDSLQKGKLNRRASKYLQVNLEHSDTD |
| SEQ ID NO: | LIRQYRNKVAHLNAMFDLMSKVYVDATMQGKKGMNEHSALVSMIDRSNIPGKVIVLMDRGYESFN |
| 5199 | NIAHLQEKEWNFIIRAKESYGMISNLQLPNSEEFDVDTTLTLTRRQTKETLALLSAYPERYRWIQPHT |
| | TFDYIAPKAPNMYDLHFRVVRFRISDGCYETIYTDLDPETFPVEKIKELYRLRWGIETSFRELKYISGL |
| | SCLHGKKADFLLQEVFARLILYNYASLIARKIPVPQEKQINFSVAILVCKQFLKGKIRPAQIFEILSKYL |
| | SPIRPGRQYRRYQNPVSAVAFQYRLS |
| ORQL01.1 | VYINSRYALAFAKYEHDASLLLDGWVYDRYKTVFSDLTVDSLQKGKLNRRASKYLQVNLEHSDTD |
| SEQ ID NO: | LIRQYRNKVAHLNAMFDLMSKVYVDATMQGKKGMNEHSALVSMIDRSNIPGKVIVLMDRGYESFN |
| 5200 | NIAHLQEKKWNYIIRAKESYGMISNLQLPNSEEFDVDTTLTLTRRQTKETLALLSAYPERYRWIQPHT |
| | TFDYIAPKDPAMYDLRFRVVRFRISGGCYETVYTNLDSETFPIGKIKELYRLRWGIETSFRELKYTIGL |
| | SCLHGKKTDFLLQEVFARLILYNYASLIARKIPVPQEKQINFSVAILVCKQFLKGKIRPAQIFGILSKHL |
| | SPIRPGRQYKRYQNPVSAVAFQYRFS |
| OWST01.1 | MRFSCAFFLEQQMRDGADDQQADDSTLKEDHEQLPDVERQLGAEDQTADLREVEDLRDGDDRDD |
| SEQ ID NO: | EAGHVARTGARDQDGRGKHIGKADDHRGSGSGGIRHLQQLEQGQEGRAEDLEDVGVVGADQRNG |
| 5201 | ADAHNGGQDAEPHITGVLCAVLKEPADAGEVRNALEREVHAVLAGALVALGDGLRRSFALDHIGL |
| | GLFVQGPQQRADQRADDADEADEQVVNAEVLHHPDLIEHDQRKGDGNGGEERRDDARLLSGVVA |
| | ALILVEGQHDTERAVADPRGHAVDRGAAGDLEERAHELRRQRADILEQTEVGQQRQQEGRDHIDD |
| | DQRADQIIEHETALIGAGDGIEDAAPLVGAQLKKCDPREDRTQHTHDDPERTADEAAVKYGAFHDE |
| | LGLCQRHERHHSGDRHDRHAQNRQESTDRTGNNVRDDLDRDRPLACRVFDRDHKENNTDRGRND |
| | KHRFQFTSVFHILPPLIVEHIKMFLFSSHIFICSQQTSYLSFPEGQVPVRPLPCVPHGICRPAEQARQSLS |
| | SLSKLSLEDFRNVEQSANAARNAQKAKYQGMLSLYLNVIYQIIKNMVYINSRYALAFAKYEHDASL |
| | LLDGWVYDRYKTVFSDLTVDSLQKGKLNRRASKYLQVNLEHSDTDLIRQYRNKVAHLNAMFDLM |
| | SKVYVDATMQGKKGMNEHSALVSMIDRSNIPGKVIVLMDTQKGRCKPNLEQHLSEYDLSLHPTHR |
| | GIRI |
| UPMX01.1 | VPHGICRPAEQARQSLSSLSKLSLEDFRNVEQSANAARNAQKAKYQGMLSLYLNVIYQIIKNMVYIN |
| SEQ ID NO: | SRYVLAFAKYEHDASLLLDGWVYDRYKTVFSDLTVGSLQKGKLNRRASKYLQVNLEHSDTDLIRQ |
| 5202 | YRNKVAHLNAMFDLMSKYYPNIAELSKDEVAKQAPFGAKWRLLAQVEVRCYILISNISGSVKVAPL |
| | QILQFPVILPHKFQDAGKFNLQFSDFSEITETADKLRWLRYQKGLRQRDVADYAGIYRSTYIHYEEYG |
| | KDFYSPKHMEKIAQLFEVPVERLLDDYNLFLRNGQGKQIKAIRMKLGLTQREYADRLGISLCNLKQ |
| | WEQNRKQLFKSTWEKYFK |
| IMG_206176 | MEINSRTTPPSRGLKLYELFVLLESQHRSHYTPVAGSETHQYPCIYGRLSWSHYTPVAGSETTEAADL |
| 6007 8 | SHKDIMSHYTPVAGSETFSYYPSISAKICRTTPPSRQCHQFKGXXXXXXXXXXXXXXXXXXXXXXX |
| SEQ ID NO: | XXXXXXXXXXXXXXXXXXXXXXXXXXXXXXXXXXXXXXXXXXXXXXXXXXXXXXXXXXXXX |
| 5203 | XXXXXXXXXXXXXXXXXXXXXXXXXXXXXXXXXXXXXXXXXXXXXXXXXXXXXXXXXXXXX |
| | XXXXXXXXXXXXXXXXXXXXXXXXXXXXXXXXXXXXXXXXXXXXXXXXXXXXXXXXXXXXX |
| | XXXXXXXXXXXXXXXXXXXXXXXXXXXXXXXXXXXXXXXXXXXXXXXXXXXXXXXXXXXXX |
| | XXXXXXXXXXXXXXXXXXXXXXXXXXXXXXXXXXXXXXXXXXXXXXXXXXXXXXXXXXXXX |
| | DVTFHENYAFFNQDCDGYAREIDVVRNIARMKKPVPGARKTMYRDALTVLGIPEHMQADMFDAEL |
| | EKMLEKPKDEKGRKLKGKNPFRNFIANNVIESNRFIYVXXXXERQEPLPQLHRQQRHRIHPVYLCGEI |
| | LQSR |

### Cas 13 Variants

[0333] The Cas proteins herein include variants and mutated forms of Cas proteins (comparing to wildtype or naturally occurring Cas proteins). In some examples, the present disclosure includes variants and mutated forms of the Cas proteins. The variants or mutated forms of Cas protein may be catalytically inactive, e.g., have no or reduced nuclease activity compared to a corresponding wildtype. In certain examples, the variants or mutated forms of Cas protein have nickase activity.

[0334] In some cases, the present disclosure provides for mutated Cas13 proteins comprising one or more modified of amino acids, wherein the amino acids: (a) interact with a guide RNA that forms a complex with the mutated Cas 13 protein; (b) are in a HEPN active site, an inter-domain linker domain, or a bridge helix domain of the mutated Cas 13 protein; or a combination thereof.

[0335] The term “corresponding amino acid” or “residue which corresponds to” refers to a particular amino acid or analogue thereof in a Cas13 homolog or ortholog that is identical or functionally equivalent to an amino acid in reference Cas protein. Accordingly, as used herein, referral to an “amino acid position corresponding to amino acid position [X]” of a specified Cas 13 protein represents referral to a collection of equivalent positions in other recognized Cas 13 and structural homologs and families. The mutations described herein apply to all Cas13 protein that is orthologs or homologs of the referred Cas protein (e.g., PbCas13b). For example, the mutations apply to Cas13a, Cas13b, Cas13c, Cas13d, e.g., SEQ ID NOs 1-4092, 4102-5203, and 5260-5265.

[0336] In an aspect, the invention relates to a mutated Cas13 protein comprising one or more mutation of an amino acid corresponding to the following amino acids of Prevotella buccae Cas13b (PbCas13b): T405, H407, K457, H500, K570, K590, N634, R638, N652, N653, K655, S658, K741, K744, N756, S757, R762, R791, K846, K857, K870, R877, K183, K193, R600, K607, K612, R614, K617, K826, K828, K829, R824, R830, Q831, K835, K836, R838, R618, D434, K431, R53, K943, R1041, Y164, R285, R287, K292, E296, N297, Q646, N647, R402, K393, N653, N652, R482, N480, D396, E397, D398, E399, K294, E400, R56, N157, H161, H452, N455, K484, N486, G566, H567, A656, V795, A796, W842, K871, E873, R874, R1068, N1069, or H1073.

[0337] PbCas13b as used herein preferably has the sequence of NCBI Reference Sequence WP_004343973.1. It is to be understood that WP_004343973.1 refers to the wild type (i.e. unmutated) PbCas13b. LshCas13a (Leptotrichia shahii Cas13a) as used herein preferably has the sequence of NCBI Reference Sequence WP_018451595.1. It is to be understood that WP_018451595.1 refers to the wild type (i.e. unmutated) LshCas13b. Pgu Cas13b (Porphyromonas gulae Cas13b) as used herein preferably has the sequence of NCBI Reference Sequence WP_039434803.1. It is to be understood that WP_039434803.1 refers to the wild type (i.e. unmutated) Pgu Cas13b. Psp Cas13b (Prevotella sp. P5-125 Cas13b) as used herein preferably has the sequence of NCBI Reference Sequence WP_044065294.1. It is to be understood that WP_044065294.1 refers to the wild type (i.e. unmutated) Psp Cas13b.

[0338] In embodiments of the invention, a Type VI system comprises a mutated Cas13 effector protein according to the invention as described herein (and optionally a small accessory protein encoded upstream or downstream of a Cas13 protein). In certain embodiments, the small accessory protein enhances the Cas13's ability to target RNA. Insights from the structure of Cas13 enables further rational engineering to improve functionality for RNA targeting specificity, base editing, and nucleic acid detection, etc. Based on the elucidated crystal structure of the Cas13 effector with its crRNA described herein, functional implications of rational engineering and mutagenesis can be postulated, of which non-limiting mutations are exemplified in Table 6 below (with reference to PbCas13b; WP_004343973.1).

TABLE 6

| Residue | Descrption | Expected result |
|---|---|---|
| T405 | coordinates first base of guide | alter activity |
| | (U) | |
| H407 | basestacking with U0 | possible PFS |
| | | involvment |
| H407Y/W/F | basestacking with U0 | alter PFS |
| K457 | direct readout of A31 | |
| H500 | hydrogen bond with bb of G11 | alter activity |
| K570 | direct readout of G25 | alter activity |
| K590 | bb of U27 | alter activity |
| N634 | bb of A29 | alter activity |
| R638 | bb of A28 | alter activity |
| N652 | direct readout of U2 and C36 | alter activity |
| N653 | direct readout of C36 | alter activity |
| K655 | hydrogen bonds with bb of na 3 | alter activity |
| S658 | coordinates first base of guide | alter activity |
| K741 | direct readout of U27 | alter activity |
| K744 | hydrogen bonds with bb of na 6 | alter activity |
| N756 | direct readout of C33 and C5 | alter activity |
| S757 | direct readout of A32 | alter activity |
| R762 | hydrogen bond with bb of G10 | alter activity |
| R791 | bb of A22 | alter activity |
| K846 | hydrogen bond with bb of U18 | alter activity |
| K857 | hydrogen bond with bb of C15 | alter activity |
| K870 | hydrogen bond with base of | alter activity |
| | U19 | |
| R877 | direct readout of U18 | alter activity |
| | Channels | |
| K183 | Outerchannel rim | alter activity |
| K193 | Outerchannel rim | alter activity |
| R600 | Outerchannel rim | alter activity |
| K607 | Outerchannel rim | alter activity |
| K612 | Outerchannel rim | alter activity |
| R614 | Outerchannel rim | alter activity |
| K617 | Outerchannel rim | alter activity |
| K826 | Bridge helix domain | alter activity |
| K828 | Bridge helix domain | alter activity |
| K829 | Bridge helix domain | alter activity |
| R824 | Bridge helix domain | alter activity |
| R830 | Bridge helix domain | alter activity |
| Q831 | Bridge helix domain | alter activity |
| K835 | Bridge helix domain | alter activity |
| K836 | Bridge helix domain | alter activity |
| R838 | Bridge helix domain | alter activity |
| R618 | conserved outer channel | alter activity |
| | arginien | |
| D434 | Conserved loop | alter activity |
| K431 | Conserved loop | alter activity |
| | Active site pocket | |
| 46-57 | HEP1 | |
| 73-79 | HEP1 | |
| 152-164 | HEP1 | |
| 1036-1046 | HEP2 | |
| 1064-1074 | HEP2 | |
| R53A/K/D/E | HEP1 | change in base |
| | | specificity |
| K943A/R/D/E | HEP2 | change in base |
| | | specificity |
| R1041A/K/D/E | HEP2 | change in base |
| | | specificity |
| Y164A/FAV | | affect base stacking at |
| | | active site |
| | Interdomain linker | |
| 285-299 | | |
| R285 | central channel active pocket | alter activity |
| R287 | central channel active pocket | alter activity |
| K292 | central channel active pocket | alter activity |
| E296 | central channel active pocket | alter activity |
| N297 | central channel active pocket | alter activity |
| | Other | |
| | Trans active site loop | alter activity |
| Q646 | Trans active site loop | alter activity |
| N647 | Trans active site loop | alter activity |
| | HEPN interface | |
| | crRNA processiong | |
| R402 | remove crRNA processing | alter crRNA processing |
| K393 | remove crRNA processing | alter crRNA processing |
| N653 | remove crRNA processing | alter crRNA processing |
| N652 | remove crRNA processing | alter crRNA processing |
| R482 | remove crRNA processing | alter crRNA processing |
| N480 | remove crRNA processing | alter crRNA processing |
| | LID domain | |
| D396 | hairpin with unknown function | alter crRNA processing |
| E397 | hairpin with unknown function | alter crRNA processing |
| D398 | hairpin with unknown function | alter crRNA processing |
| E399 | hairpin with unknown function | alter crRNA processing |
| K294 | IDL | alter activity |

[0339] The Cas13 protein herein may comprise one or more mutations. In some cases, the Cas13 protein comprises one or more mutations of amino acid corresponding to the following amino acids of Prevotella buccae Cas13b (PbCas13b): T405, H407, K457, H500, K570, K590, N634, R638, N652, N653, K655, S658, K741, K744, N756, S757, R762, R791, K846, K857, K870, R877, K183, K193, R600, K607, K612, R614, K617, K826, K828, K829, R824, R830, Q831, K835, K836, R838, R618, D434, K431, R53, K943, R1041, Y164, R285, R287, K292, E296, N297, Q646, N647, R402, K393, N653, N652, R482, N480, D396, E397, D398, E399, K294, E400, R56, N157, H161, H452, N455, K484, N486, G566, H567, A656, V795, A796, W842, K871, E873, R874, R1068, N1069, or H1073.

[0340] In some cases, the Cas13 protein comprises one or more mutations of an amino acid corresponding to the following amino acids of Prevotella buccae Cas13b (PbCas13b): H407, K457, H500, K570, K590, N634, R638, N652, N653, K655, S658, K741, K744, N756, S757, R762, R791, K846, K857, K870, R877, K183, K193, R600, K607, K612, R614, K617, K826, K828, K829, R824, R830, Q831, K835, K836, R838, R618, D434, K431, R53, K943, R1041, Y164, R285, R287, K292, E296, N297, Q646, N647, R402, K393, N653, N652, R482, N480, D396, E397, D398, E399, K294, E400, R56, N157, H161, H452, N455, K484, N486, G566, H567, W842, K871, E873, R874, R1068, N1069, or H1073.

[0341] In some cases, the Cas13 protein comprises one or more mutations of an amino acid corresponding to the following amino acids of Prevotella buccae Cas13b (PbCas13b): T405, H407, K457, H500, K570, K590, N634, R638, N652, N653, K655, S658, K741, K744, N756, S757, R762, R791, K846, K857, K870, R877, K183, K193, R600, K607, K612, R614, K617, K826, K828, K829, R824, R830, Q831, K835, K836, R838, R618, D434, K431, R53, K943, R1041, Y164, R285, R287, K292, E296, N297, Q646, N647, R402, K393, N653, N652, R482, N480, D396, E397, D398, E399, K294, or E400.

[0342] In some cases, the Cas13 protein comprises one or more mutations of an amino acid corresponding to the following amino acids of Prevotella buccae Cas13b (PbCas13b): K393, R402, N482, T405, H407, S658, N653, A656, K655, N652, H567, N455, H500, K871, K857, K870, W842, E873, R877, K846, R874, R762, V795, A796, R791, G566, K590, R638, H452, S757, N756, N486, K484, N480, K457, K741, R56, N157, H161, R1068, N1069, or H1073.

[0343] In some cases, the Cas13 protein comprises one or more mutations of an amino acid corresponding to the following amino acids of PbCas13b: K393, R402, N482, H407, S658, N653, K655, N652, H567, N455, H500, K871, K857, K870, W842, E873, R877, K846, R874, R762, R791, G566, K590, R638, H452, S757, N756, N486, K484, N480, K457, K741, R56, N157, H161, R1068, N1069, or H1073.

[0344] In some cases, the Cas13 protein comprises one or more mutations of an amino acid corresponding to the following amino acids of PbCas13b: W842, K846, K870, E873, or R877. In some cases, the Cas13 protein comprises in helical domain 1 one or more mutations of an amino acid corresponding to the following amino acids in helical domain 1 of PbCas13b: W842, K846, K870, E873, or R877. In some cases, the Cas13 protein comprises in helical domain 1-3 one or more mutations of an amino acid corresponding to the following amino acids in helical domain 1-3 of PbCas13b: W842, K846, K870, E873, or R877. In some cases, the Cas13 protein comprises in the helical bridge domain one or more mutations of an amino acid corresponding to the following amino acids in the helical bridge domain of PbCas13b: W842, K846, K870, E873, or R877. In some cases, the Cas13 protein comprises one or more mutations of an amino acid corresponding to the following amino acids of PbCas13b: K393, R402, N480, N482, N652, or N653. In some cases, the Cas13 protein comprises one or more mutations of an amino acid corresponding to the following amino acids of PbCas13b: K393, R402, N480, or N482. In some cases, the Cas13 protein comprises in the LID domain one or more mutations of an amino acid corresponding to the following amino acids in the LID domain of PbCas13b: K393, R402, N480, or N482. In some cases, the Cas13 protein comprises one or more mutations of an amino acid corresponding to the following amino acids of PbCas13b: N652 or N653. In some cases, the Cas13 protein comprises in helical domain 2 one or more mutations of an amino acid corresponding to the following amino acids in helical domain 2 of PbCas13b: N652 or N653.

[0345] In some cases, the Cas13 protein comprises one or more mutations of an amino acid corresponding to the following amino acids of PbCas13b: T405, H407, S658, N653, A656, K655, N652, H567, N455, H500, K871, K857, K870, W842, E873, R877, K846, R874, R762, V795, A796, R791, G566, K590, R638, H452, S757, N756, N486, K484, N480, K457, or K741. In some cases, the Cas13 protein comprises one or more mutations of an amino acid corresponding to the following amino acids of PbCas13b: H407, S658, N653, K655, N652, H567, N455, H500, K871, K857, K870, W842, E873, R877, K846, R874, R762, R791, G566, K590, R638, H452, S757, N756, N486, K484, N480, K457, or K741. In some cases, the Cas13 protein comprises one or more mutations of an amino acid corresponding to the following amino acids of PbCas13b: S658, N653, A656, K655, N652, H567, H500, K871, K857, K870, W842, E873, R877, K846, R874, R762, V795, A796, R791, G566, K590, R638, S757, N756, or K741. In some cases, the Cas13 protein comprises in a helical domain one or more mutations of an amino acid corresponding to the following amino acids in a helical domain of PbCas13b: S658, N653, A656, K655, N652, H567, H500, K871, K857, K870, W842, E873, R877, K846, R874, R762, V795, A796, R791, G566, K590, R638, S757, N756, or K741.

[0346] In some cases, the Cas13 protein comprises one or more mutations of an amino acid corresponding to the following amino acids of PbCas13b: H567, H500, K871, K857, K870, W842, E873, R877, K846, R874, R762, V795, A796, R791, G566, S757, or N756. In some cases, the Cas13 protein comprises in helical domain 1 one or more mutations of an amino acid corresponding to the following amino acids in helical domain 1 of PbCas13b: H567, H500, K871, K857, K870, W842, E873, R877, K846, R874, R762, V795, A796, R791, G566, S757, or N756. In some cases, the Cas13 protein comprises one or more mutations of an amino acid corresponding to the following amino acids of PbCas13b: H567, H500, R762, V795, A796, R791, G566, S757, or N756. In some cases, the Cas13 protein comprises in helical domain 1 one or more mutations of an amino acid corresponding to the following amino acids in helical domain 1 of PbCas13b: H567, H500, R762, V795, A796, R791, G566, S757, or N756.

[0347] In some cases, the Cas13 protein comprises one or more mutations of an amino acid corresponding to the following amino acids of PbCas13b: K871, K857, K870, W842, E873, R877, K846, or R874. In some cases, the Cas13 protein comprises in the helical bridge domain one or more mutations of an amino acid corresponding to the following amino acids in the helical bridge domain of PbCas13b: K871, K857, K870, W842, E873, R877, K846, or R874. In some cases, the Cas13 protein comprises one or more mutations of an amino acid corresponding to the following amino acids of PbCas13b: H567, H500, or G566. In some cases, the Cas13 protein comprises in helical domain 1-2 one or more mutations of an amino acid corresponding to the following amino acids in helical domain 1-2 of PbCas13b: H567, H500, or G566. In some cases, the Cas13 protein comprises one or more mutations of an amino acid corresponding to the following amino acids of PbCas13b: K871, K857, K870, W842, E873, R877, K846, R874, R762, V795, A796, R791, S757, or N756. In some cases, the Cas13 protein comprises in helical domain 1-3 one or more mutation of an amino acid corresponding to the following amino acids in helical domain 1-3 of PbCas13b: K871, K857, K870, W842, E873, R877, K846, R874, R762, V795, A796, R791, S757, or N756. In some cases, the Cas13 protein comprises one or more mutations of an amino acid corresponding to the following amino acids of PbCas13b: R762, V795, A796, R791, S757, or N756. In some cases, the Cas13 protein comprises in helical domain 1-3 one or more mutation of an amino acid corresponding to the following amino acids in helical domain 1-3 of PbCas13b: R762, V795, A796, R791, S757, or N756. In some cases, the Cas13 protein comprises one or more mutations of an amino acid corresponding to the following amino acids of PbCas13b: 5658, N653, A656, K655, N652, K590, R638, or K741. In some cases, the Cas13 protein comprises in helical domain 2 one or more mutations of an amino acid corresponding to the following amino acids in helical domain 2 of PbCas13b: S658, N653, A656, K655, N652, K590, R638, or K741. In some cases, the Cas13 protein comprises one or more mutations of an amino acid corresponding to the following amino acids of PbCas13b: T405, H407, N486, K484, N480, H452, N455, or K457. In some cases, the Cas13 protein comprises in the LID domain one or more mutations of an amino acid corresponding to the following amino acids in the LID domain of PbCas13b: T405, H407, N486, K484, N480, H452, N455, or K457. In some cases, the Cas13 protein comprises one or more mutations of an amino acid corresponding to the following amino acids of PbCas13b: S658, N653, K655, N652, H567, H500, K871, K857, K870, W842, E873, R877, K846, R874, R762, R791, G566, K590, R638, S757, N756, or K741.

[0348] In some cases, the Cas13 protein comprises in a helical domain one or more mutations of an amino acid corresponding to the following amino acids in a helical domain of PbCas13b: S658, N653, K655, N652, H567, H500, K871, K857, K870, W842, E873, R877, K846, R874, R762, R791, G566, K590, R638, S757, N756, or K741. In some cases, the Cas13 protein comprises one or more mutations of an amino acid corresponding to the following amino acids of PbCas13b: H567, H500, K871, K857, K870, W842, E873, R877, K846, R874, R762, R791, G566, S757, or N756. In some cases, the Cas13 protein comprises in helical domain 1 one or more mutations of an amino acid corresponding to the following amino acids in helical domain 1 of PbCas13b: H567, H500, K871, K857, K870, W842, E873, R877, K846, R874, R762, R791, G566, S757, or N756. In some cases, the Cas13 protein comprises one or more mutations of an amino acid corresponding to the following amino acids of PbCas13b: H567, H500, R762, R791, G566, S757, or N756. In some cases, the Cas13 protein comprises in helical domain 1 one or more mutations of an amino acid corresponding to the following amino acids in helical domain 1 of PbCas13b: H567, H500, R762, R791, G566, S757, or N756. In some cases, the Cas13 protein comprises one or more mutations of an amino acid corresponding to the following amino acids of PbCas13b: K871, K857, K870, W842, E873, R877, K846, R874, R762, R791, S757, or N756. In some cases, the Cas13 protein comprises in helical domain 1-3 one or more mutations of an amino acid corresponding to the following amino acids in helical domain 1-3 of PbCas13b: K871, K857, K870, W842, E873, R877, K846, R874, R762, R791, S757, or N756. In some cases, the Cas13 protein comprises one or more mutations of an amino acid corresponding to the following amino acids of PbCas13b: R762, R791, S757, or N756. In some cases, the Cas13 protein comprises in helical domain 1-3 one or more mutations of an amino acid corresponding to the following amino acids in helical domain 1-3 of PbCas13b: R762, R791, S757, or N756.

[0349] In some cases, the Cas13 protein comprises one or more mutations of an amino acid corresponding to the following amino acids of PbCas13b: 5658, N653, K655, N652, K590, R638, or K741. In some cases, the Cas13 protein comprises in helical domain 2 one or more mutations of an amino acid corresponding to the following amino acids in helical domain 2 of PbCas13b: S658, N653, K655, N652, K590, R638, or K741.

[0350] In some cases, the Cas13 protein comprises one or more mutations of an amino acid corresponding to the following amino acids of PbCas13b: H407, N486, K484, N480, H452, N455, or K457. In some cases, the Cas13 protein comprises in the LID domain one or more mutations of an amino acid corresponding to the following amino acids in the LID domain of PbCas13b: H407, N486, K484, N480, H452, N455, or K457.

[0351] In some cases, the Cas13 protein comprises one or more mutations of an amino acid corresponding to the following amino acids of PbCas13b: R56, N157, H161, R1068, N1069, or H1073. In some cases, the Cas13 protein comprises in a HEPN domain one or more mutations of an amino acid corresponding to the following amino acids in a HEPN domain of PbCas13b: R56, N157, H161, R1068, N1069, or H1073.

[0352] In some cases, the Cas13 protein comprises one or more mutations of an amino acid corresponding to the following amino acids of PbCas13b: R56, N157, or H161. In some cases, the Cas13 protein comprises in HEPN domain 1 one or more mutations of an amino acid corresponding to the following amino acids in HEPN domain 1 of PbCas13b: R56, N157, or H161. In some cases, the Cas13 protein comprises one or more mutations of an amino acid corresponding to the following amino acids of PbCas13b: R1068, N1069, or H1073. In some cases, the Cas13 protein comprises in HEPN domain 2 one or more mutations of an amino acid corresponding to the following amino acids in HEPN domain 2 of PbCas13b: R1068, N1069, or H1073.

[0353] In some cases, the Cas13 protein comprises one or more mutations of an amino acid corresponding to the following amino acids of PbCas13b: K393, R402, N482, T405, H407, N486, K484, N480, H452, N455, or K457. In some cases, the Cas13 protein comprises in the LID domain one or more mutations of an amino acid corresponding to the following amino acids in the LID domain of PbCas13b: K393, R402, N482, T405, H407, N486, K484, N480, H452, N455, or K457. In some cases, the Cas13 protein comprises one or more mutations of an amino acid corresponding to the following amino acids of PbCas13b: K393, R402, N482, H407, N486, K484, N480, H452, N455, or K457. In some cases, the Cas13 protein comprises in the LID domain one or more mutations of an amino acid corresponding to the following amino acids in the LID domain of PbCas13b: K393, R402, N482, H407, N486, K484, N480, H452, N455, or K457.

[0354] In some cases, the Cas13 protein comprises one or more mutations of an amino acid corresponding to the following amino acids of PbCas13b: T405, H407, S658, N653, A656, K655, N652, H567, N455, H500, K871, K857, K870, W842, E873, R877, K846, R874, R762, V795, A796, R791, G566, K590, R638, H452, S757, N756, N486, K484, N480, K457, K741, K393, R402, or N482. In some cases, the Cas13 protein comprises one or more mutations of an amino acid corresponding to the following amino acids of PbCas13b: H407, S658, N653, K655, N652, H567, N455, H500, K871, K857, K870, W842, E873, R877, K846, R874, R762, R791, G566, K590, R638, H452, S757, N756, N486, K484, N480, K457, K741, K393, R402, or N482.

[0355] In some cases, the Cas13 protein comprises one or more mutations of an amino acid corresponding to the following amino acids of PbCas13b: S658, N653, A656, K655, N652, H567, N455, H500, K871, K857, K870, W842, E873, R877, K846, R874, R762, V795, A796, R791, G566, K590, R638, H452, S757, N756, N486, K484, N480, K457, or K741. In some cases, the Cas13 protein comprises one or more mutations of an amino acid corresponding to the following amino acids of PbCas13b: 5658, N653, K655, N652, H567, N455, H500, K871, K857, K870, W842, E873, R877, K846, R874, R762, R791, G566, K590, R638, H452, S757, N756, N486, K484, N480, K457, or K741.

[0356] In some cases, the Cas13 protein comprises one or more mutations of an amino acid corresponding to the following amino acids of PbCas13b: N486, K484, N480, H452, N455, or K457. In some cases, the Cas13 protein comprises in the LID domain one or more mutations of an amino acid corresponding to the following amino acids in the LID domain of PbCas13b: N486, K484, N480, H452, N455, or K457. In some cases, the Cas13 protein comprises one or more mutations of an amino acid corresponding to the following amino acids of PbCas13b: K393, R402, N482, N486, K484, N480, H452, N455, or K457. In some cases, the Cas13 protein comprises in the LID domain one or more mutations of an amino acid corresponding to the following amino acids in the LID domain of PbCas13b: K393, R402, N482, N486, K484, N480, H452, N455, or K457.

[0357] In some cases, the Cas13 protein comprises one or more mutations of an amino acid corresponding to the following amino acids of PbCas13b: S658, N653, A656, K655, N652, H567, N455, H500, K871, K857, K870, W842, E873, R877, K846, R874, R762, V795, A796, R791, G566, K590, R638, H452, S757, N756, N486, K484, N480, K457, K741, K393, R402, or N482. In some cases, the Cas13 protein comprises one or more mutations of an amino acid corresponding to the following amino acids of PbCas13b: S658, N653, K655, N652, H567, N455, H500, K871, K857, K870, W842, E873, R877, K846, R874, R762, R791, G566, K590, R638, H452, S757, N756, N486, K484, N480, K457, K741, K393, R402, or N482.

[0358] In some cases, the Cas13 protein comprises one or more mutations of an amino acid corresponding to the following amino acids of Prevotella buccae Cas13b (PbCas13b): R53, Y164, K943, or R1041. In some cases, the Cas13 protein comprises one or more mutations of an amino acid corresponding to the following amino acids of Prevotella buccae Cas13b (PbCas13b): R53 or Y164.

[0359] In some cases, the Cas13 protein comprises one or more mutations of an amino acid corresponding to the following amino acids of Prevotella buccae Cas13b (PbCas13b): K943 or R1041. In some cases, the Cas13 protein comprises in a HEPN domain one or more mutations of an amino acid corresponding to the following amino acids in a HEPN domain of Prevotella buccae Cas13b (PbCas13b): R53, Y164, K943, or R1041. In some cases, the Cas13 protein comprises in HEPN domain 1 one or more mutations of an amino acid corresponding to the following amino acids in HEPN domain 1 of Prevotella buccae Cas13b (PbCas13b): R53 or Y164. In some cases, the Cas13 protein comprises in HEPN domain 2 one or more mutations of an amino acid corresponding to the following amino acids in HEPN domain 2 of Prevotella buccae Cas13b (PbCas13b): K943 or R1041.

[0360] In some cases, the Cas13 protein comprises one or more mutations of an amino acid corresponding to the following amino acids of Prevotella buccae Cas13b (PbCas13b): R53, Y164, K943, R1041, R56, N157, H161, R1068, N1069, or H1073.

[0361] In some cases, the Cas13 protein comprises one or more mutations of an amino acid corresponding to the following amino acids of Prevotella buccae Cas13b (PbCas13b): R53, Y164, R56, N157, or H161. In some cases, the Cas13 protein comprises one or more mutations of an amino acid corresponding to the following amino acids of Prevotella buccae Cas13b (PbCas13b): K943, R1041, R1068, N1069, or H1073. In some cases, the Cas13 protein comprises in a HEPN domain one or more mutations of an amino acid corresponding to the following amino acids in a HEPN domain of Prevotella buccae Cas13b (PbCas13b): R53, Y164, K943, R1041, R56, N157, H161, R1068, N1069, or H1073. In some cases, the Cas13 protein comprises in HEPN domain 1 one or more mutations of an amino acid corresponding to the following amino acids in HEPN domain 1 of Prevotella buccae Cas13b (PbCas13b): R53, Y164, R56, N157, or H161. In some cases, the Cas13 protein comprises in HEPN domain 2 one or more mutations of an amino acid corresponding to the following amino acids in HEPN domain 2 of Prevotella buccae Cas13b (PbCas13b): K943, R1041, R1068, N1069, or H1073.

[0362] In some cases, the Cas13 protein comprises one or more mutations of an amino acid corresponding to the following amino acids of Prevotella buccae Cas13b (PbCas13b): R53, Y164, K183, K193, K943, or R1041. In some cases, the Cas13 protein comprises one or more mutations of an amino acid corresponding to the following amino acids of Prevotella buccae Cas13b (PbCas13b): R53, Y164, K183, or K193. In some cases, the Cas13 protein comprises one or more mutations of an amino acid corresponding to the following amino acids of Prevotella buccae Cas13b (PbCas13b): K943 or R1041. In some cases, the Cas13 protein comprises in a HEPN domain one or more mutations of an amino acid corresponding to the following amino acids in a HEPN domain of Prevotella buccae Cas13b (PbCas13b): R53, Y164, K183, K193, K943, or R1041.

[0363] In some cases, the Cas13 protein comprises in HEPN domain 1 one or more mutations of an amino acid corresponding to the following amino acids in HEPN domain 1 of Prevotella buccae Cas13b (PbCas13b): R53, Y164, K183, or K193. In some cases, the Cas13 protein comprises in HEPN domain 2 one or more mutations of an amino acid corresponding to the following amino acids in HEPN domain 2 of Prevotella buccae Cas13b (PbCas13b): K943 or R1041. In some cases, the Cas13 protein comprises one or more mutations of an amino acid corresponding to the following amino acids of Prevotella buccae Cas13b (PbCas13b): R53, Y164, K183, K193, K943, R1041, R56, N157, H161, R1068, N1069, or H1073. In some cases, the Cas13 protein comprises one or more mutations of an amino acid corresponding to the following amino acids of Prevotella buccae Cas13b (PbCas13b): R53, Y164, K183, K193, R56, N157, or H161. In some cases, the Cas13 protein comprises one or more mutations of an amino acid corresponding to the following amino acids of Prevotella buccae Cas13b (PbCas13b): K943, R1041, R1068, N1069, or H1073. In some cases, the Cas13 protein comprises in a HEPN domain one or more mutations of an amino acid corresponding to the following amino acids in a HEPN domain of Prevotella buccae Cas13b (PbCas13b): R53, Y164, K183, K193, K943, R1041, R56, N157, H161, R1068, N1069, or H1073. In some cases, the Cas13 protein comprises in HEPN domain 1 one or more mutations of an amino acid corresponding to the following amino acids in HEPN domain 1 of Prevotella buccae Cas13b (PbCas13b): R53, Y164, K183, K193, R56, N157, or H161.

[0364] In some cases, the Cas13 protein comprises in HEPN domain 2 one or more mutations of an amino acid corresponding to the following amino acids in HEPN domain 2 of Prevotella buccae Cas13b (PbCas13b): K943, R1041, R1068, N1069, or H1073. In some cases, the Cas13 protein comprises one or more mutations of an amino acid corresponding to the following amino acids of Prevotella buccae Cas13b (PbCas13b): K183 or K193. In some cases, the Cas13 protein comprises in HEPN domain 1 one or more mutations of an amino acid corresponding to the following amino acids in HEPN domain 1 of Prevotella buccae Cas13b (PbCas13b): K183 or K193.

[0365] In some cases, the Cas13 protein comprises one or more mutations of an amino acid corresponding to the following amino acids of Prevotella buccae Cas13b (PbCas13b): R53, Y164, K943, or R1041. In some cases, the Cas13 protein comprises in a HEPN domain one or more mutations of an amino acid corresponding to the following amino acids in a HEPN domain of Prevotella buccae Cas13b (PbCas13b): R53, Y164, K943, or R1041. In some cases, the Cas13 protein comprises one or more mutations of an amino acid corresponding to the following amino acids of Prevotella buccae Cas13b (PbCas13b): R53, K943, or R1041; preferably R53A, R53K, R53D, or R53E; K943A, K943R, K943D, or K943E; or R1041A, R1041K, R1041D, or R1041E.

[0366] In some cases, the Cas13 protein comprises in a HEPN domain one or more mutations of an amino acid corresponding to the following amino acids in a HEPN domain of Prevotella buccae Cas13b (PbCas13b): R53, K943, or R1041; preferably R53A, R53K, R53D, or R53E; K943A, K943R, K943D, or K943E; or R1041A, R1041K, R1041D, or R1041E.

[0367] In some cases, the Cas13 protein comprises a mutation of an amino acid corresponding to amino acid Y164 of Prevotella buccae Cas13b (PbCas13b), preferably Y164A, Y164F, or Y164W. In some cases, the Cas13 protein comprises HEPN domain 1 a mutations of an amino acid corresponding to amino acid Y164 HEPN domain 1 of Prevotella buccae Cas13b (PbCas13b), preferably Y164A, Y164F, or Y164W. In some cases, the Cas13 protein comprises one or more mutations of an amino acid corresponding to the following amino acids of Prevotella buccae Cas13b (PbCas13b): T405, H407, K457, D434, K431, R402, K393, R482, N480, D396, E397, D398, or E399.

[0368] In some cases, the Cas13 protein comprises in the LID domain one or more mutations of an amino acid corresponding to the following amino acids in the LID domain of Prevotella buccae Cas13b (PbCas13b): T405, H407, K457, D434, K431, R402, K393, R482, N480, D396, E397, D398, or E399. In some cases, the Cas13 protein comprises a mutation of an amino acid corresponding to amino acid H407 of Prevotella buccae Cas13b (PbCas13b), preferably H407Y, H407W, or H407F. In some cases, the Cas13 protein comprises one or more mutations of an amino acid corresponding to the following amino acids of Prevotella buccae Cas13b (PbCas13b): R402, K393, R482, N480, D396, E397, D398, or E399. In some cases, the Cas13 protein comprises in the LID domain one or more mutations of an amino acid corresponding to the following amino acids in the LID domain of Prevotella buccae Cas13b (PbCas13b): R402, K393, R482, N480, D396, E397, D398, or E399. In some cases, the Cas13 protein comprises one or more mutations of an amino acid corresponding to the following amino acids of Prevotella buccae Cas13b (PbCas13b): K457, D434, or K431. In some cases, the Cas13 protein comprises in the LID domain one or more mutations of an amino acid corresponding to the following amino acids in the LID domain of Prevotella buccae Cas13b (PbCas13b): K457, D434, or K431.

[0369] In some cases, the Cas13 protein comprises one or more mutations of an amino acid corresponding to the following amino acids of Prevotella buccae Cas13b (PbCas13b): H500, K570, K590, N634, R638, N652, N653, K655, S658, K741, K744, N756, S757, R762, R791, K846, K857, K870, R877, R600, K607, K612, R614, K617, K826, K828, K829, R824, R830, Q831, K835, K836, R838, R618, Q646, N647, N653, or N652. In some cases, the Cas13 protein comprises in a helical domain one or more mutations of an amino acid corresponding to the following amino acids in a helical domain of Prevotella buccae Cas13b (PbCas13b): H500, K570, K590, N634, R638, N652, N653, K655, S658, K741, K744, N756, S757, R762, R791, K846, K857, K870, R877, R600, K607, K612, R614, K617, K826, K828, K829, R824, R830, Q831, K835, K836, R838, R618, Q646, N647, N653, or N652. In some cases, the Cas13 protein comprises one or more mutations of an amino acid corresponding to the following amino acids of Prevotella buccae Cas13b (PbCas13b): H500, K570, N756, S757, R762, R791, K846, K857, K870, R877, K826, K828, K829, R824, R830, Q831, K835, K836, or R838. In some cases, the Cas13 protein comprises in helical domain 1 one or more mutations of an amino acid corresponding to the following amino acids in helical domain 1 of Prevotella buccae Cas13b (PbCas13b): H500, K570, N756, S757, R762, R791, K846, K857, K870, R877, K826, K828, K829, R824, R830, Q831, K835, K836, or R838.

[0370] In some cases, the Cas13 protein comprises one or more mutations of an amino acid corresponding to the following amino acids of Prevotella buccae Cas13b (PbCas13b): H500, K570, N756, S757, R762, or R791. In some cases, the Cas13 protein comprises in helical domain 1 one or more mutations of an amino acid corresponding to the following amino acids in helical domain 1 of Prevotella buccae Cas13b (PbCas13b): H500, K570, N756, S757, R762, or R791. In some cases, the Cas13 protein comprises one or more mutations of an amino acid corresponding to the following amino acids of Prevotella buccae Cas13b (PbCas13b): K846, K857, K870, R877, K826, K828, K829, R824, R830, Q831, K835, K836, or R838. In some cases, the Cas13 protein comprises in the helical bridge domain one or more mutations of an amino acid corresponding to the following amino acids in the helical bridge domain of Prevotella buccae Cas13b (PbCas13b): K846, K857, K870, R877, K826, K828, K829, R824, R830, Q831, K835, K836, or R838. In some cases, the Cas13 protein comprises one or more mutations of an amino acid corresponding to the following amino acids of Prevotella buccae Cas13b (PbCas13b): H500 or K570. In some cases, the Cas13 protein comprises in helical domain 1-2 one or more mutations of an amino acid corresponding to the following amino acids in helical domain 1-2 of Prevotella buccae Cas13b (PbCas13b): H500 or K570.

[0371] In some cases, the Cas13 protein comprises one or more mutations of an amino acid corresponding to the following amino acids of Prevotella buccae Cas13b (PbCas13b): N756, S757, R762, R791, K846, K857, K870, R877, K826, K828, K829, R824, R830, Q831, K835, K836, or R838. In some cases, the Cas13 protein comprises in helical domain 1-3 one or more mutations of an amino acid corresponding to the following amino acids in helical domain 1-3 of Prevotella buccae Cas13b (PbCas13b): N756, S757, R762, R791, K846, K857, K870, R877, K826, K828, K829, R824, R830, Q831, K835, K836, or R838. In some cases, the Cas13 protein comprises one or more mutations of an amino acid corresponding to the following amino acids of Prevotella buccae Cas13b (PbCas13b): N756, S757, R762, or R791. In some cases, the Cas13 protein comprises in helical domain 1-3 one or more mutations of an amino acid corresponding to the following amino acids in helical domain 1-3 of Prevotella buccae Cas13b (PbCas13b): N756, S757, R762, or R791. In some cases, the Cas13 protein comprises one or more mutations of an amino acid corresponding to the following amino acids of Prevotella buccae Cas13b (PbCas13b): N756, S757, R762, R791, K846, K857, K870, or R877. In some cases, the Cas13 protein comprises in helical domain 1-3 one or more mutations of an amino acid corresponding to the following amino acids in helical domain 1-3 of Prevotella buccae Cas13b (PbCas13b): N756, S757, R762, R791, K846, K857, K870, or R877.

[0372] In some cases, the Cas13 protein comprises one or more mutations of an amino acid corresponding to the following amino acids of Prevotella buccae Cas13b (PbCas13b): K826, K828, K829, R824, R830, Q831, K835, K836, or R838. In some cases, the Cas13 protein comprises in helical domain 1-3 one or more mutations of an amino acid corresponding to the following amino acids in helical domain 1-3 of Prevotella buccae Cas13b (PbCas13b): K826, K828, K829, R824, R830, Q831, K835, K836, or R838.

[0373] In some cases, the Cas13 protein comprises one or more mutations of an amino acid corresponding to the following amino acids of Prevotella buccae Cas13b (PbCas13b): K590, N634, R638, N652, N653, K655, S658, K741, K744, R600, K607, K612, R614, K617, R618, Q646, N647, N653, or N652. In some cases, the Cas13 protein comprises in helical domain 2 one or more mutations of an amino acid corresponding to the following amino acids in helical domain 2 of Prevotella buccae Cas13b (PbCas13b): K590, N634, R638, N652, N653, K655, S658, K741, K744, R600, K607, K612, R614, K617, R618, Q646, N647, N653, or N652. In some cases, the Cas13 protein comprises one or more mutations of an amino acid corresponding to the following amino acids of Prevotella buccae Cas13b (PbCas13b): Q646 or N647. In some cases, the Cas13 protein comprises in helical domain 2 one or more mutations of an amino acid corresponding to the following amino acids in helical domain 2 of Prevotella buccae Cas13b (PbCas13b): Q646 or N647. In some cases, the Cas13 protein comprises one or more mutations of an amino acid corresponding to the following amino acids of Prevotella buccae Cas13b (PbCas13b): N653 or N652. In some cases, the Cas13 protein comprises in helical domain 2 one or more mutations of an amino acid corresponding to the following amino acids in helical domain 2 of Prevotella buccae Cas13b (PbCas13b): N653 or N652. In some cases, the Cas13 protein comprises one or more mutations of an amino acid corresponding to the following amino acids of Prevotella buccae Cas13b (PbCas13b): K590, N634, R638, N652, N653, K655, S658, K741, or K744. In some cases, the Cas13 protein comprises in helical domain 2 one or more mutations of an amino acid corresponding to the following amino acids in helical domain 2 of Prevotella buccae Cas13b (PbCas13b): K590, N634, R638, N652, N653, K655, S658, K741, or K744. In some cases, the Cas13 protein comprises one or more mutations of an amino acid corresponding to the following amino acids of Prevotella buccae Cas13b (PbCas13b): R600, K607, K612, R614, K617, or R618. In some cases, the Cas13 protein comprises in helical domain 2 one or more mutations of an amino acid corresponding to the following amino acids in helical domain 2 of Prevotella buccae Cas13b (PbCas13b): R600, K607, K612, R614, K617, or R618. In some cases, the Cas13 protein comprises one or more mutations of an amino acid corresponding to the following amino acids of Prevotella buccae Cas13b (PbCas13b): R285, R287, K292, E296, N297, or K294. In some cases, the Cas13 protein comprises in the IDL domain one or more mutations of an amino acid corresponding to the following amino acids in the IDL domain of Prevotella buccae Cas13b (PbCas13b): R285, R287, K292, E296, N297, or K294. In some cases, the Cas13 protein comprises one or more mutations of an amino acid corresponding to the following amino acids of Prevotella buccae Cas13b (PbCas13b): R285, K292, E296, or N297. In some cases, the Cas13 protein comprises in the IDL domain one or more mutations of an amino acid corresponding to the following amino acids in the IDL domain of Prevotella buccae Cas13b (PbCas13b): R285, K292, E296, or N297.

[0374] In some cases, the Cas13 protein comprises one or more mutations of an amino acid corresponding to the following amino acids of Prevotella buccae Cas13b (PbCas13b): T405, H500, K570, K590, N634, R638, N652, N653, K655, S658, K741, K744, N756, S757, R762, R791, K846, K857, K870, R877, K183, K193, R600, K607, K612, R614, K617, K826, K828, K829, R824, R830, Q831, K835, K836, R838, R618, D434, K431, R285, R287, K292, E296, N297, Q646, N647, or K294. In some cases, the Cas13 protein comprises one or more mutations of an amino acid corresponding to the following amino acids of Prevotella buccae Cas13b (PbCas13b): R402, K393, N653, N652, R482, N480, D396, E397, D398, or E399. In some cases, the Cas13 protein comprises one or more mutations of an amino acid corresponding to the following amino acids of Prevotella buccae Cas13b (PbCas13b): R53, K655, R762, or R1041; preferably R53A or R53D; K655A; R762A; or R1041E or R1041D. In some cases, the Cas13 protein comprises one or more mutations of an amino acid corresponding to the following amino acids of Prevotella buccae Cas13b (PbCas13b): N297, E296, K292, or R285; preferably N297A, E296A, K292A, or R285A. In some cases, the Cas13 protein comprises in (e.g., the central channel of) the IDL domain one or more mutations of an amino acid corresponding to the following amino acids in (e.g., the central channel of) the IDL domain of Prevotella buccae Cas13b (PbCas13b): N297, E296, K292, or R285; preferably N297A, E296A, K292A, or R285A. In some cases, the Cas13 protein comprises one or more mutations of an amino acid corresponding to the following amino acids of Prevotella buccae Cas13b (PbCas13b): Q831, K836, R838, N652, N653, R830, K655 or R762; preferably Q831A, K836A, R838A, N652A, N653A, R830A, K655A, or R762A.

[0375] In some cases, the Cas13 protein comprises one or more mutations of an amino acid corresponding to the following amino acids of Prevotella buccae Cas13b (PbCas13b): N652, N653, R830, K655 or R762; preferably N652A, N653A, R830A, K655A, or R762A. In some cases, the Cas13 protein comprises one or more mutations of an amino acid corresponding to the following amino acids of Prevotella buccae Cas13b (PbCas13b): K655 or R762; preferably K655A or R762A. In some cases, the Cas13 protein comprises in a helical domain one or more mutations of an amino acid corresponding to the following amino acids in a helical domain of Prevotella buccae Cas13b (PbCas13b): Q831, K836, R838, N652, N653, R830, K655 or R762; preferably Q831A, K836A, R838A, N652A, N653A, R830A, K655A, or R762A. In some cases, the Cas13 protein comprises a helical domain one or more mutations of an amino acid corresponding to the following amino acids a helical domain of Prevotella buccae Cas13b (PbCas13b): N652, N653, R830, K655 or R762; preferably N652A, N653A, R830A, K655A, or R762A.

[0376] In some cases, the Cas13 protein comprises in helical domain 2 one or more mutations of an amino acid corresponding to the following amino acids in helical domain 2 of Prevotella buccae Cas13b (PbCas13b): K655 or R762; preferably K655A or R762A. In some cases, the Cas13 protein comprises one or more mutations of an amino acid corresponding to the following amino acids of Prevotella buccae Cas13b (PbCas13b): R614, K607, K193, K183 or R600; preferably R614A, K607A, K193A, K183A or R600A. In some cases, the Cas13 protein comprises in the trans-subunit loop of helical domain 2 one or more mutations of an amino acid corresponding to the following amino acids in the trans-subunit loop of helical domain 2 of Prevotella buccae Cas13b (PbCas13b): Q646 or N647; preferably Q646A or N647A. In some cases, the Cas13 protein comprises one or more mutations of an amino acid corresponding to the following amino acids of Prevotella buccae Cas13b (PbCas13b): R53 or R1041; preferably R53A or R53D, or R1041E or R1041D. In some cases, the Cas13 protein comprises in a HEPN domain one or more mutations of an amino acid corresponding to the following amino acids in a HEPN domain of Prevotella buccae Cas13b (PbCas13b): R53 or R1041; preferably R53A or R53D, or R1041E or R1041D. In some cases, the Cas13 protein comprises one or more mutations of an amino acid corresponding to the following amino acids of Prevotella buccae Cas13b (PbCas13b): K457, D397, E398, D399, E400, T405, H407 or D434; preferably D397A, E398A, D399A, E400A, T405A, H407A, H407W, H407Y, H407F or D434A. In some cases, the Cas13 protein comprises in the LID domain one or more mutations of an amino acid corresponding to the following amino acids in the LID domain of Prevotella buccae Cas13b (PbCas13b): K457, D397, E398, D399, E400, T405, H407 or D434; preferably D397A, E398A, D399A, E400A, T405A, H407A, H407W, H407Y, H407F or D434A.

[0377] In some cases, the Cas13 protein comprises a mutation of an amino acid corresponding to amino acid T405 of Prevotella buccae Cas13b (PbCas13b). In some cases, the Cas13 protein comprises a mutation of an amino acid corresponding to amino acid H407 of Prevotella buccae Cas13b (PbCas13b). In some cases, the Cas13 protein comprises a mutation of an amino acid corresponding to amino acid K457 of Prevotella buccae Cas13b (PbCas13b). In some cases, the Cas13 protein comprises a mutation of an amino acid corresponding to amino acid H500 of Prevotella buccae Cas13b (PbCas13b). In some cases, the Cas13 protein comprises a mutation of an amino acid corresponding to amino acid K570 of Prevotella buccae Cas13b (PbCas13b). In some cases, the Cas13 protein comprises a mutation of an amino acid corresponding to amino acid K590 of Prevotella buccae Cas13b (PbCas13b). In some cases, the Cas13 protein comprises a mutation of an amino acid corresponding to amino acid N634 of Prevotella buccae Cas13b (PbCas13b). In some cases, the Cas13 protein comprises a mutation of an amino acid corresponding to amino acid R638 of Prevotella buccae Cas13b (PbCas13b). In some cases, the Cas13 protein comprises a mutation of an amino acid corresponding to amino acid N652 of Prevotella buccae Cas13b (PbCas13b). In some cases, the Cas13 protein comprises a mutation of an amino acid corresponding to amino acid N653 of Prevotella buccae Cas13b (PbCas13b). In some cases, the Cas13 protein comprises a mutation of an amino acid corresponding to amino acid K655 of Prevotella buccae Cas13b (PbCas13b). In some cases, the Cas13 protein comprises a mutation of an amino acid corresponding to amino acid 5658 of Prevotella buccae Cas13b (PbCas13b). In some cases, the Cas13 protein comprises a mutation of an amino acid corresponding to amino acid K741 of Prevotella buccae Cas13b (PbCas13b). In some cases, the Cas13 protein comprises a mutation of an amino acid corresponding to amino acid K744 of Prevotella buccae Cas13b (PbCas13b). In some cases, the Cas13 protein comprises a mutation of an amino acid corresponding to amino acid N756 of Prevotella buccae Cas13b (PbCas13b). In some cases, the Cas13 protein comprises a mutation of an amino acid corresponding to amino acid 5757 of Prevotella buccae Cas13b (PbCas13b). In some cases, the Cas13 protein comprises a mutation of an amino acid corresponding to amino acid R762 of Prevotella buccae Cas13b (PbCas13b). In some cases, the Cas13 protein comprises a mutation of an amino acid corresponding to amino acid R791 of Prevotella buccae Cas13b (PbCas13b). In some cases, the Cas13 protein comprises a mutation of an amino acid corresponding to amino acid K846 of Prevotella buccae Cas13b (PbCas13b). In some cases, the Cas13 protein comprises a mutation of an amino acid corresponding to amino acid K857 of Prevotella buccae Cas13b (PbCas13b). In some cases, the Cas13 protein comprises a mutation of an amino acid corresponding to amino acid K870 of Prevotella buccae Cas13b (PbCas13b). In some cases, the Cas13 protein comprises a mutation of an amino acid corresponding to amino acid R877 of Prevotella buccae Cas13b (PbCas13b). In some cases, the Cas13 protein comprises a mutation of an amino acid corresponding to amino acid K183 of Prevotella buccae Cas13b (PbCas13b). In some cases, the Cas13 protein comprises a mutation of an amino acid corresponding to amino acid K193 of Prevotella buccae Cas13b (PbCas13b). In some cases, the Cas13 protein comprises a mutation of an amino acid corresponding to amino acid R600 of Prevotella buccae Cas13b (PbCas13b). In some cases, the Cas13 protein comprises a mutation of an amino acid corresponding to amino acid K607 of Prevotella buccae Cas13b (PbCas13b). In some cases, the Cas13 protein comprises a mutation of an amino acid corresponding to amino acid K612 of Prevotella buccae Cas13b (PbCas13b). In some cases, the Cas13 protein comprises a mutation of an amino acid corresponding to amino acid R614 of Prevotella buccae Cas13b (PbCas13b). In some cases, the Cas13 protein comprises a mutation of an amino acid corresponding to amino acid K617 of Prevotella buccae Cas13b (PbCas13b). In some cases, the Cas13 protein comprises a mutation of an amino acid corresponding to amino acid K826 of Prevotella buccae Cas13b (PbCas13b). In some cases, the Cas13 protein comprises a mutation of an amino acid corresponding to amino acid K828 of Prevotella buccae Cas13b (PbCas13b). In some cases, the Cas13 protein comprises a mutation of an amino acid corresponding to amino acid K829 of Prevotella buccae Cas13b (PbCas13b). In some cases, the Cas13 protein comprises a mutation of an amino acid corresponding to amino acid R824 of Prevotella buccae Cas13b (PbCas13b). In some cases, the Cas13 protein comprises a mutation of an amino acid corresponding to amino acid R830 of Prevotella buccae Cas13b (PbCas13b). In some cases, the Cas13 protein comprises a mutation of an amino acid corresponding to amino acid Q831 of Prevotella buccae Cas13b (PbCas13b).

[0378] In some cases, the Cas13 protein comprises a mutation of an amino acid corresponding to amino acid K835 of Prevotella buccae Cas13b (PbCas13b). In some cases, the Cas13 protein comprises a mutation of an amino acid corresponding to amino acid K836 of Prevotella buccae Cas13b (PbCas13b). In some cases, the Cas13 protein comprises a mutation of an amino acid corresponding to amino acid R838 of Prevotella buccae Cas13b (PbCas13b). In some cases, the Cas13 protein comprises a mutation of an amino acid corresponding to amino acid R618 of Prevotella buccae Cas13b (PbCas13b). In some cases, the Cas13 protein comprises a mutation of an amino acid corresponding to amino acid D434 of Prevotella buccae Cas13b (PbCas13b). In some cases, the Cas13 protein comprises a mutation of an amino acid corresponding to amino acid K431 of Prevotella buccae Cas13b (PbCas13b). In some cases, the Cas13 protein comprises a mutation of an amino acid corresponding to amino acid R53 of Prevotella buccae Cas13b (PbCas13b). In some cases, the Cas13 protein comprises a mutation of an amino acid corresponding to amino acid K943 of Prevotella buccae Cas13b (PbCas13b). In some cases, the Cas13 protein comprises a mutation of an amino acid corresponding to amino acid R1041 of Prevotella buccae Cas13b (PbCas13b). In some cases, the Cas13 protein comprises a mutation of an amino acid corresponding to amino acid Y164 of Prevotella buccae Cas13b (PbCas13b). In some cases, the Cas13 protein comprises a mutation of an amino acid corresponding to amino acid R285 of Prevotella buccae Cas13b (PbCas13b). In some cases, the Cas13 protein comprises a mutation of an amino acid corresponding to amino acid R287 of Prevotella buccae Cas13b (PbCas13b). In some cases, the Cas13 protein comprises a mutation of an amino acid corresponding to amino acid K292 of Prevotella buccae Cas13b (PbCas13b). In some cases, the Cas13 protein comprises a mutation of an amino acid corresponding to amino acid E296 of Prevotella buccae Cas13b (PbCas13b). In some cases, the Cas13 protein comprises a mutation of an amino acid corresponding to amino acid N297 of Prevotella buccae Cas13b (PbCas13b). In some cases, the Cas13 protein comprises a mutation of an amino acid corresponding to amino acid Q646 of Prevotella buccae Cas13b (PbCas13b).

[0379] In some cases, the Cas13 protein comprises a mutation of an amino acid corresponding to amino acid N647 of Prevotella buccae Cas13b (PbCas13b). In some cases, the Cas13 protein comprises a mutation of an amino acid corresponding to amino acid R402 of Prevotella buccae Cas13b (PbCas13b). In some cases, the Cas13 protein comprises a mutation of an amino acid corresponding to amino acid K393 of Prevotella buccae Cas13b (PbCas13b). In some cases, the Cas13 protein comprises a mutation of an amino acid corresponding to amino acid N653 of Prevotella buccae Cas13b (PbCas13b). In some cases, the Cas13 protein comprises a mutation of an amino acid corresponding to amino acid N652 of Prevotella buccae Cas13b (PbCas13b). In some cases, the Cas13 protein comprises a mutation of an amino acid corresponding to amino acid R482 of Prevotella buccae Cas13b (PbCas13b). In some cases, the Cas13 protein comprises a mutation of an amino acid corresponding to amino acid N480 of Prevotella buccae Cas13b (PbCas13b). In some cases, the Cas13 protein comprises a mutation of an amino acid corresponding to amino acid D396 of Prevotella buccae Cas13b (PbCas13b). In some cases, the Cas13 protein comprises a mutation of an amino acid corresponding to amino acid E397 of Prevotella buccae Cas13b (PbCas13b). In some cases, the Cas13 protein comprises a mutation of an amino acid corresponding to amino acid D398 of Prevotella buccae Cas13b (PbCas13b). In some cases, the Cas13 protein comprises a mutation of an amino acid corresponding to amino acid E399 of Prevotella buccae Cas13b (PbCas13b). In some cases, the Cas13 protein comprises a mutation of an amino acid corresponding to amino acid K294 of Prevotella buccae Cas13b (PbCas13b). In some cases, the Cas13 protein comprises a mutation of an amino acid corresponding to amino acid E400 of Prevotella buccae Cas13b (PbCas13b). In some cases, the Cas13 protein comprises a mutation of an amino acid corresponding to amino acid R56 of Prevotella buccae Cas13b (PbCas13b). In some cases, the Cas13 protein comprises a mutation of an amino acid corresponding to amino acid N157 of Prevotella buccae Cas13b (PbCas13b). In some cases, the Cas13 protein comprises a mutation of an amino acid corresponding to amino acid H161 of Prevotella buccae Cas13b (PbCas13b). In some cases, the Cas13 protein comprises a mutation of an amino acid corresponding to amino acid H452 of Prevotella buccae Cas13b (PbCas13b). In some cases, the Cas13 protein comprises a mutation of an amino acid corresponding to amino acid N455 of Prevotella buccae Cas13b (PbCas13b). In some cases, the Cas13 protein comprises a mutation of an amino acid corresponding to amino acid K484 of Prevotella buccae Cas13b (PbCas13b). In some cases, the Cas13 protein comprises a mutation of an amino acid corresponding to amino acid N486 of Prevotella buccae Cas13b (PbCas13b). In some cases, the Cas13 protein comprises a mutation of an amino acid corresponding to amino acid G566 of Prevotella buccae Cas13b (PbCas13b). In some cases, the Cas13 protein comprises a mutation of an amino acid corresponding to amino acid H567 of Prevotella buccae Cas13b (PbCas13b). In some cases, the Cas13 protein comprises a mutation of an amino acid corresponding to amino acid A656 of Prevotella buccae Cas13b (PbCas13b). In some cases, the Cas13 protein comprises a mutation of an amino acid corresponding to amino acid V795 of Prevotella buccae Cas13b (PbCas13b). In some cases, the Cas13 protein comprises a mutation of an amino acid corresponding to amino acid A796 of Prevotella buccae Cas13b (PbCas13b). In some cases, the Cas13 protein comprises a mutation of an amino acid corresponding to amino acid W842 of Prevotella buccae Cas13b (PbCas13b). In some cases, the Cas13 protein comprises a mutation of an amino acid corresponding to amino acid K871 of Prevotella buccae Cas13b (PbCas13b). In some cases, the Cas13 protein comprises a mutation of an amino acid corresponding to amino acid E873 of Prevotella buccae Cas13b (PbCas13b). In some cases, the Cas13 protein comprises a mutation of an amino acid corresponding to amino acid R874 of Prevotella buccae Cas13b (PbCas13b). In some cases, the Cas13 protein comprises a mutation of an amino acid corresponding to amino acid R1068 of Prevotella buccae Cas13b (PbCas13b). In some cases, the Cas13 protein comprises a mutation of an amino acid corresponding to amino acid N1069 of Prevotella buccae Cas13b (PbCas13b). In some cases, the Cas13 protein comprises a mutation of an amino acid corresponding to amino acid H1073 of Prevotella buccae Cas13b (PbCas13b).

[0380] In some cases, the Cas13 protein comprises one or more mutations of an amino acid corresponding to the following amino acids of Leptotrichia shahii Cas13a (LshCas13a): R597, N598, H602, R1278, N1279, or H1283. The present disclosure also includes a mutated Cas13 protein comprising one or more mutations of an amino acid corresponding to the following amino acids of Leptotrichia shahii Cas13a (LshCas13a): R597, N598, H602, R1278, N1279, or H1283. In some cases, the Cas13 protein comprises in a HEPN domain one or more mutations of an amino acid corresponding to the following amino acids in a HEPN domain of Leptotrichia shahii Cas13a (LshCas13a): R597, N598, H602, R1278, N1279, or H1283. In some cases, the Cas13 protein comprises one or more mutations of an amino acid corresponding to the following amino acids of Leptotrichia shahii Cas13a (LshCas13a): R597, N598, or H602. In some cases, the Cas13 protein comprises in HEPN domain 1 one or more mutation of an amino acid corresponding to the following amino acids in HEPN domain 1 of Leptotrichia shahii Cas13a (LshCas13a): R597, N598, or H602. In some cases, the Cas13 protein comprises one or more mutations of an amino acid corresponding to the following amino acids of Leptotrichia shahii Cas13a (LshCas13a): R1278, N1279, or H1283. In some cases, the Cas13 protein comprises in HEPN domain 2 one or more mutations of an amino acid corresponding to the following amino acids in HEPN domain 2 of Leptotrichia shahii Cas13a (LshCas13a): R1278, N1279, or H1283. In some cases, the Cas13 protein comprises one or more mutations of an amino acid corresponding to the following amino acids of Porphyromonas gulae Cas13b (PguCas13b): R146, H151, R1116, or H1121. In some cases, the Cas13 protein comprises one or more mutations of an amino acid corresponding to the following amino acids of Porphyromonas gulae Cas13b (PguCas13b): R146, H151, R1116, or H1121. In some cases, the Cas13 protein comprises in a HEPN domain one or more mutations of an amino acid corresponding to the following amino acids in a HEPN domain of Porphyromonas gulae Cas13b (PguCas13b): R146, H151, R1116, or H1121.

[0381] In some cases, the Cas13 protein comprises one or more mutations of an amino acid corresponding to the following amino acids of Porphyromonas gulae Cas13b (PguCas13b): R146 or H151. In some cases, the Cas13 protein comprises in HEPN domain 1 one or more mutations of an amino acid corresponding to the following amino acids in HEPN domain 1 of Porphyromonas gulae Cas13b (PguCas13b): R146 or H151. In some cases, the Cas13 protein comprises one or more mutations of an amino acid corresponding to the following amino acids of Porphyromonas gulae Cas13b (PguCas13b): R1116 or H1121. In some cases, the Cas13 protein comprises in HEPN domain 2 one or more mutations of an amino acid corresponding to the following amino acids in HEPN domain 2 of Porphyromonas gulae Cas13b (PguCas13b): R1116 or H1121. In some cases, the Cas13 protein comprises one or more mutations of an amino acid corresponding to the following amino acids of Prevotella sp. P5-125 Cas13b (PspCas13b): H133 or H1058. The present disclosure also provides a mutated Cas13 protein comprising one or more mutations of an amino acid corresponding to the following amino acids of Prevotella sp. P5-125 Cas13b (PspCas13b): H133 or H1058. In some cases, the Cas13 protein comprises in a HEPN domain one or more mutations of an amino acid corresponding to the following amino acids in a HEPN domain of Prevotella sp. P5-125 Cas13b (PspCas13b): H133 or H1058.

[0382] In some cases, the Cas13 protein comprises a mutation of an amino acid corresponding to amino acid H133 of Prevotella sp. P5-125 Cas13b (PspCas13b). In some cases, the Cas13 protein comprises in HEPN domain 1 a mutation of an amino acid corresponding to amino acid H133 in HEPN domain 1 of Prevotella sp. P5-125 Cas13b (PspCas13b). In some cases, the Cas13 protein comprises a mutation of an amino acid corresponding to amino acid H1058 of Prevotella sp. P5-125 Cas13b (PspCas13b). In some cases, the Cas13 protein comprises in HEPN domain 2 a mutation of an amino acid corresponding to the amino acid H1058 in HEPN domain 2 of Prevotella sp. P5-125 Cas13b (PspCas13b).

[0383] The Cas protein herein may comprise one or more amino acids mutated. In some embodiments, the amino acid is mutated to A, P, or V, preferably A. In some embodiments, the amino acid is mutated to a hydrophobic amino acid. In some embodiments, the amino acid is mutated to an aromatic amino acid. In some embodiments, the amino acid is mutated to a charged amino acid. In some embodiments, the amino acid is mutated to a positively charged amino acid. In some embodiments, the amino acid is mutated to a negatively charged amino acid. In some embodiments, the amino acid is mutated to a polar amino acid. In some embodiments, the amino acid is mutated to an aliphatic amino acid.

### Structural (Sub)Domains

[0384] In another aspect, the disclosure provides a mutated Cas13 protein comprising one or more mutations of amino acids, wherein the amino acids: interact with a guide RNA that forms a complex with the engineered Cas 13 protein; or are in a HEPN active site, a lid domain, a helical domain, selected from a helical 1 or a helical 2 domain, an inter-domain linker (IDL) domain, or a bridge helix domain of the mutated Cas 13 protein, or a combination thereof.

[0385] Based on the crystal structure of the Cas protein, different structural domains can be identified. In addition to sequence alignments, the information of the crystal structure and domain architecture allows corresponding amino acids of different orthologs (e.g. Cas13b orthologs) and homologs (other Cas13 proteins, such as Cas13a, Cas13c, or Cas13d) to be identified. By means of example, and without limitation, the crystal structure of PbCas13b in complex with crRNA as reported herein, identifies the following structural domains: HEPN1 and HEPN2 (catalytic domains, respectively spanning from amino acid 1 to 285 and 930 to 1127); IDL (interdomain linker, spanning from amino acids 286 to 301); helical domains 1 and 2, whereby helical domain is split in helical domain 1-1, 1-2, and 1-3 (respectively spanning from amino acids 302 to 374, 499 to 581, and 747 to 929), and helical domain 2 spanning from amino acids 582 to 746; LID (spanning from amino acids 375 to 498). Helical domain 1, in particular helical domain 1-3 encompasses a bridge helix as a discernible subdomain. Accordingly, particular mutations according to the invention as described herein, apart from having a specified amino acid position in the Cas13 polypeptide can also be linked to a particular structural domain of the Cas13 protein. Hence a corresponding amino acid in a Cas13 ortholog or homolog can have a specified amino acid position in the Cas13 polypeptide as well as belong to a corresponding structural domain. Mutations may be identified by locations in structural (sub) domains, by position corresponding to amino acids of a particular Cas13 protein (e.g. PbCas13b), by interactions with a guide RNA, or a combination thereof.

[0386] The types of mutations can be conservative mutations or non-conservative mutations. In certain preferred embodiments, the amino acid which is mutated is mutated into alanine (A). In certain preferred embodiments, if the amino acid to be mutated is an aromatic amino acid, it is mutated into alanine or another aromatic amino acid (e.g. H, Y, W, or F). In certain preferred embodiments, if the amino acid to be mutated is a charged amino acid, it is mutated into alanine or another charged amino acid (e.g. H, K, R, D, or E). In certain preferred embodiments, if the amino acid to be mutated is a charged amino acid, it is mutated into alanine or another charged amino acid having the same charge. In certain preferred embodiments, if the amino acid to be mutated is a charged amino acid, it is mutated into alanine or another charged amino acid having the opposite charge.

[0387] In some embodiments, the invention also provides for methods and compositions wherein one or more amino acid residues of the effector protein may be modified e.g., an engineered or non-naturally-occurring effector protein or Cas13. In an embodiment, the modification may comprise mutation of one or more amino acid residues of the effector protein. The one or more mutations may be in one or more catalytically active domains of the effector protein, or a domain interacting with the crRNA (such as the guide sequence or direct repeat sequence). The effector protein may have reduced or abolished nuclease activity or alternatively increased nuclease activity compared with an effector protein lacking said one or more mutations. The effector protein may not direct cleavage of the RNA strand at the target locus of interest. In a preferred embodiment, the one or more mutations may comprise two mutations. In a preferred embodiment the one or more amino acid residues are modified in a Cas13 protein, e.g., an engineered or non-naturally-occurring effector protein or Cas13. In some cases, the CRISPR-Cas protein comprises one or more mutations in the helical domain.

[0388] The present disclosure also provides for methods of altering activity of CRISPR-Cas proteins. In some examples, such methods comprise identifying one or more candidate amino acids in the Cas13 protein based on a three-dimensional structure of at least a portion of the Cas 13 protein, wherein the one or more candidate amino acids interact with a guide RNA that forms a complex with the Cas13 protein, or are in a HEPN active site, an inter-domain linker domain, or a bridge helix domain of the Cas13 protein; and mutating the one or more candidate amino acids thereby generating a mutated Cas13 protein, wherein activity the mutated Cas13 protein is different than the Cas13 protein.

### Destabilized Cas13 and Fusion Proteins

[0389] In certain embodiments, the Cas protein according to the invention as described herein is associated with or fused to a destabilization domain (DD). In some embodiments, the DD is ER50. A corresponding stabilizing ligand for this DD is, in some embodiments, 4HT. As such, in some embodiments, one of the at least one DDs is ER50 and a stabilizing ligand therefor is 4HT or CMP8. In some embodiments, the DD is DHFR50. A corresponding stabilizing ligand for this DD is, in some embodiments, TMP. As such, in some embodiments, one of the at least one DDs is DHFR50 and a stabilizing ligand therefor is TMP. In some embodiments, the DD is ER50. A corresponding stabilizing ligand for this DD is, in some embodiments, CMP8. CMP8 may therefore be an alternative stabilizing ligand to 4HT in the ER50 system. While it may be possible that CMP8 and 4HT can/should be used in a competitive matter, some cell types may be more susceptible to one or the other of these two ligands, and from this disclosure and the knowledge in the art the skilled person can use CMP8 and/or 4HT.

[0390] In some embodiments, one or two DDs may be fused to the N-terminal end of the Cas with one or two DDs fused to the C-terminal of the Cas. In some embodiments, the at least two DDs are associated with the Cas13 and the DDs are the same DD, i.e. the DDs are homologous. Thus, both (or two or more) of the DDs could be ER50 DDs. This is preferred in some embodiments. Alternatively, both (or two or more) of the DDs could be DHFR50 DDs. This is also preferred in some embodiments. In some embodiments, the at least two DDs are associated with the Cas and the DDs are different DDs, i.e. the DDs are heterologous. Thus, one of the DDS could be ER50 while one or more of the DDs or any other DDs could be DHFR50. Having two or more DDs which are heterologous may be advantageous as it would provide a greater level of degradation control. A tandem fusion of more than one DD at the N or C-term may enhance degradation; and such a tandem fusion can be, for example ER50-ER50-Cas or DHFR-DHFR-Cas It is envisaged that high levels of degradation would occur in the absence of either stabilizing ligand, intermediate levels of degradation would occur in the absence of one stabilizing ligand and the presence of the other (or another) stabilizing ligand, while low levels of degradation would occur in the presence of both (or two of more) of the stabilizing ligands. Control may also be imparted by having an N-terminal ER50 DD and a C-terminal DHFR50 DD.

[0391] In some embodiments, the fusion of the Cas with the DD comprises a linker between the DD and the Cas13. In some embodiments, the linker is a GlySer linker. In some embodiments, the DD-Cas13 further comprises at least one Nuclear Export Signal (NES). In some embodiments, the DD-Cas13 comprises two or more NESs. In some embodiments, the DD-Cas comprises at least one Nuclear Localization Signal (NLS). This may be in addition to an NES. In some embodiments, the Cas13 comprises or consists essentially of or consists of a localization (nuclear import or export) signal as, or as part of, the linker between the Cas13 and the DD. HA or Flag tags are also within the ambit of the invention as linkers. Applicants use NLS and/or NES as linker and also use Glycine Serine linkers as short as GS up to (GGGGS)₃ (SEQ ID NO: 5204).

[0392] Destabilizing domains have general utility to confer instability to a wide range of proteins; see, e.g., Miyazaki, J Am Chem Soc. Mar. 7, 2012; 134(9): 3942-3945, incorporated herein by reference. CMP8 or 4-hydroxytamoxifen can be destabilizing domains. More generally, A temperature-sensitive mutant of mammalian DHFR (DHFRts), a destabilizing residue by the N-end rule, was found to be stable at a permissive temperature but unstable at 37° C. The addition of methotrexate, a high-affinity ligand for mammalian DHFR, to cells expressing DHFRts inhibited degradation of the protein partially. This was an important demonstration that a small molecule ligand can stabilize a protein otherwise targeted for degradation in cells. A rapamycin derivative was used to stabilize an unstable mutant of the FRB domain of mTOR (FRB*) and restore the function of the fused kinase, GSK-3β.6,7 This system demonstrated that ligand-dependent stability represented an attractive strategy to regulate the function of a specific protein in a complex biological environment. A system to control protein activity can involve the DD becoming functional when the ubiquitin complementation occurs by rapamycin induced dimerization of FK506-binding protein and FKBP12. Mutants of human FKBP12 or ecDHFR protein can be engineered to be metabolically unstable in the absence of their high-affinity ligands, Shield-1 or trimethoprim (TMP), respectively. These mutants are some of the possible destabilizing domains (DDs) useful in the practice of the invention and instability of a DD as a fusion with a Cas13 confers to the Cas13 degradation of the entire fusion protein by the proteasome. Shield-1 and TMP bind to and stabilize the DD in a dose-dependent manner. The estrogen receptor ligand binding domain (ERLBD, residues 305-549 of ERS1) can also be engineered as a destabilizing domain. Since the estrogen receptor signaling pathway is involved in a variety of diseases such as breast cancer, the pathway has been widely studied and numerous agonist and antagonists of estrogen receptor have been developed. Thus, compatible pairs of ERLBD and drugs are known. There are ligands that bind to mutant but not wild-type forms of the ERLBD. By using one of these mutant domains encoding three mutations (L384M, M421G, G521R)12, it is possible to regulate the stability of an ERLBD-derived DD using a ligand that does not perturb endogenous estrogen-sensitive networks. An additional mutation (Y537S) can be introduced to further destabilize the ERLBD and to configure it as a potential DD candidate. This tetra-mutant is an advantageous DD development. The mutant ERLBD can be fused to a Cas13 and its stability can be regulated or perturbed using a ligand, whereby the Cas13 has a DD. Another DD can be a 12-kDa (107-amino-acid) tag based on a mutated FKBP protein, stabilized by Shield1 ligand; see, e.g., Nature Methods 5, (2008). For instance a DD can be a modified FK506 binding protein 12 (FKBP12) that binds to and is reversibly stabilized by a synthetic, biologically inert small molecule, Shield-1; see, e.g., Banaszynski L A, Chen L C, Maynard-Smith L A, Ooi A G, Wandless T J. A rapid, reversible, and tunable method to regulate protein function in living cells using synthetic small molecules. Cell. 2006; 126:995-1004; Banaszynski L A, Sellmyer M A, Contag C H, Wandless T J, Thorne S H. Chemical control of protein stability and function in living mice. Nat Med. 2008; 14:1123-1127; Maynard-Smith L A, Chen L C, Banaszynski L A, Ooi A G, Wandless T J. A directed approach for engineering conditional protein stability using biologically silent small molecules. The Journal of biological chemistry. 2007; 282:24866-24872; and Rodriguez, Chem Biol. Mar. 23, 2012; 19(3): 391-398—all of which are incorporated herein by reference and may be employed in the practice of the invention in selected a DD to associate with a Cas13 in the practice of this invention. As can be seen, the knowledge in the art includes a number of DDs, and the DD can be associated with, e.g., fused to, advantageously with a linker, to a Cas13, whereby the DD can be stabilized in the presence of a ligand and when there is the absence thereof the DD can become destabilized, whereby the Cas13 is entirely destabilized, or the DD can be stabilized in the absence of a ligand and when the ligand is present the DD can become destabilized; the DD allows the Cas13 and hence the CRISPR-Cas13 complex or system to be regulated or controlled—turned on or off so to speak, to thereby provide means for regulation or control of the system, e.g., in an in vivo or in vitro environment. For instance, when a protein of interest is expressed as a fusion with the DD tag, it is destabilized and rapidly degraded in the cell, e.g., by proteasomes. Thus, absence of stabilizing ligand leads to a D associated Cas being degraded. When a new DD is fused to a protein of interest, its instability is conferred to the protein of interest, resulting in the rapid degradation of the entire fusion protein. Peak activity for Cas is sometimes beneficial to reduce off-target effects. Thus, short bursts of high activity are preferred. The present invention is able to provide such peaks. In some senses the system is inducible. In some other senses, the system repressed in the absence of stabilizing ligand and de-repressed in the presence of stabilizing ligand.

### Dead Cas Proteins

[0393] In certain embodiments, the Cas protein herein is a catalytically inactive or dead Cas protein. In some cases, Cas protein herein is a catalytically inactive or dead Cas13 effector protein (dCas13). In some cases, a dead Cas protein, e.g., a dead Cas13 protein has nickase activity. In some embodiments, the dCas13 protein comprises mutations in the nuclease domain. In some embodiments, the dCas13 effector protein has been truncated. In some cases, the dead Cas proteins may be fused with a deaminase herein, e.g., an adenosine deaminase.

[0394] To reduce the size of a fusion protein of the Cas13 protein and the one or more functional domains, the C-terminus of the Cas13 protein can be truncated while still maintaining its RNA binding function. For example, at least 20 amino acids, at least 40 amino acids, at least 50 amino acids, at least 60 amino acids, at least 80 amino acids, at least 100 amino acids, at least 120 amino acids, at least 140 amino acids, at least 150 amino acids, at least 160 amino acids, at least 180 amino acids, at least 200 amino acids, at least 220 amino acids, at least 240 amino acids, at least 250 amino acids, at least 260 amino acids, or at least 300 amino acids, or at least 350 amino acids, or up to 120 amino acids, or up to 140 amino acids, or up to 160 amino acids, or up to 180 amino acids, or up to 200 amino acids, or up to 250 amino acids, or up to 300 amino acids, or up to 350 amino acids, or up to 400 amino acids, may be truncated at the C-terminus of the Cas13 effector. Specific examples of Cas13 truncations include C-terminal Δ 984-1090, C-terminal Δ 1026-1090, and C-terminal Δ 1053-1090, C-terminal Δ 934-1090, C-terminal Δ 884-1090, C-terminal Δ 834-1090, C-terminal 4784-1090, and C-terminal Δ 734-1090, wherein amino acid positions correspond to amino acid positions of Prevotella sp. P5-125 Cas13b protein. The skilled person will understand that similar truncations can be designed for other Cas13b orthologs, or other Cas13 types or subtypes, such as Cas13a, Cas13c, or Cas13d. In some cases, the truncated Cas13b is encoded by nt 1-984 of Prevotella sp. P5-125 Cas13b or the corresponding nt of a Cas13b ortholog or homolog. Examples of Cas13 truncations also include C-terminal Δ 795-1095, wherein amino acid positions correspond to amino acid positions of Riemerella anatipestifer Cas13b protein. Examples of Cas13 truncations further include C-terminal Δ 875-1175, C-terminal Δ 895-1175, C-terminal Δ 915-1175, C-terminal Δ 935-1175, C-terminal Δ 955-1175, C-terminal Δ 975-1175, C-terminal Δ 995-1175, C-terminal Δ 1015-1175, C-terminal Δ 1035-1175, C-terminal 1055-1175, C-terminal Δ 1075-1175, C-terminal Δ 1095-1175, C-terminal Δ 1115-1175, C-terminal Δ 1135-1175, C-terminal Δ 1155-1175, wherein amino acid positions correspond to amino acid positions of Porphyromonas gulae Cas13b protein.

[0395] In some embodiments, the N-terminus of the Cas13 protein may be truncated. For example, at least 20 amino acids, at least 40 amino acids, at least 50 amino acids, at least 60 amino acids, at least 80 amino acids, at least 100 amino acids, at least 120 amino acids, at least 140 amino acids, at least 150 amino acids, at least 160 amino acids, at least 180 amino acids, at least 200 amino acids, at least 220 amino acids, at least 240 amino acids, at least 250 amino acids, at least 260 amino acids, or at least 300 amino acids, or at least 350 amino acids, or up to 120 amino acids, or up to 140 amino acids, or up to 160 amino acids, or up to 180 amino acids, or up to 200 amino acids, or up to 250 amino acids, or up to 300 amino acids, or up to 350 amino acids, or up to 400 amino acids, may be truncated at the N-terminus of the Cas13 protein. Examples of Cas13 truncations include N-terminal Δ41-125, N-terminal Δ1-88, or N-terminal Δ1-72, wherein amino acid positions of the truncations correspond to amino acid positions of Prevotella sp. P5-125 Cas13b protein.

[0396] In some embodiments, both the N- and the C-termini of the Cas13 protein may be truncated. For example, at least 20 amino acids may be truncated at the C-terminus of the Cas13 effector, and at least 20 amino acids, at least 40 amino acids, at least 60 amino acids, at least 80 amino acids, at least 100 amino acids, at least 120 amino acids, at least 140 amino acids, at least 160 amino acids, at least 180 amino acids, at least 200 amino acids, at least 220 amino acids, at least 240 amino acids, at least 260 amino acids, at least 300 amino acids, or at least 350 amino acids may be truncated at the N-terminus of the Cas13 protein. For example, at least 40 amino acids may be truncated at the C-terminus of the Cas13 protein, and at least 20 amino acids, at least 40 amino acids, at least 60 amino acids, at least 80 amino acids, at least 100 amino acids, at least 120 amino acids, at least 140 amino acids, at least 160 amino acids, at least 180 amino acids, at least 200 amino acids, at least 220 amino acids, at least 240 amino acids, at least 260 amino acids, at least 300 amino acids, or at least 350 amino acids may be truncated at the N-terminus of the Cas13 protein. For example, at least 60 amino acids may be truncated at the C-terminus of the Cas13 protein, and at least 20 amino acids, at least 40 amino acids, at least 60 amino acids, at least 80 amino acids, at least 100 amino acids, at least 120 amino acids, at least 140 amino acids, at least 160 amino acids, at least 180 amino acids, at least 200 amino acids, at least 220 amino acids, at least 240 amino acids, at least 260 amino acids, at least 300 amino acids, or at least 350 amino acids may be truncated at the N-terminus of the Cas13 protein. For example, at least 80 amino acids may be truncated at the C-terminus of the Cas13 protein, and at least 20 amino acids, at least 40 amino acids, at least 60 amino acids, at least 80 amino acids, at least 100 amino acids, at least 120 amino acids, at least 140 amino acids, at least 160 amino acids, at least 180 amino acids, at least 200 amino acids, at least 220 amino acids, at least 240 amino acids, at least 260 amino acids, at least 300 amino acids, or at least 350 amino acids may be truncated at the N-terminus of the Cas13 protein. For example, at least 100 amino acids may be truncated at the C-terminus of the Cas13 protein, and at least 20 amino acids, at least 40 amino acids, at least 60 amino acids, at least 80 amino acids, at least 100 amino acids, at least 120 amino acids, at least 140 amino acids, at least 160 amino acids, at least 180 amino acids, at least 200 amino acids, at least 220 amino acids, at least 240 amino acids, at least 260 amino acids, at least 300 amino acids, or at least 350 amino acids may be truncated at the N-terminus of the Cas13 protein. For example, at least 120 amino acids may be truncated at the C-terminus of the Cas13 protein, and at least 20 amino acids, at least 40 amino acids, at least 60 amino acids, at least 80 amino acids, at least 100 amino acids, at least 120 amino acids, at least 140 amino acids, at least 160 amino acids, at least 180 amino acids, at least 200 amino acids, at least 220 amino acids, at least 240 amino acids, at least 260 amino acids, at least 300 amino acids, or at least 350 amino acids may be truncated at the N-terminus of the Cas13 protein. For example, at least 140 amino acids may be truncated at the C-terminus of the Cas13 protein, and at least 20 amino acids, at least 40 amino acids, at least 60 amino acids, at least 80 amino acids, at least 100 amino acids, at least 120 amino acids, at least 140 amino acids, at least 160 amino acids, at least 180 amino acids, at least 200 amino acids, at least 220 amino acids, at least 240 amino acids, at least 260 amino acids, at least 300 amino acids, or at least 350 amino acids may be truncated at the N-terminus of the Cas13 protein. For example, at least 160 amino acids may be truncated at the C-terminus of the Cas13 protein, and at least 20 amino acids, at least 40 amino acids, at least 60 amino acids, at least 80 amino acids, at least 100 amino acids, at least 120 amino acids, at least 140 amino acids, at least 160 amino acids, at least 180 amino acids, at least 200 amino acids, at least 220 amino acids, at least 240 amino acids, at least 260 amino acids, at least 300 amino acids, or at least 350 amino acids may be truncated at the N-terminus of the Cas13 protein. For example, at least 180 amino acids may be truncated at the C-terminus of the Cas13 protein, and at least 20 amino acids, at least 40 amino acids, at least 60 amino acids, at least 80 amino acids, at least 100 amino acids, at least 120 amino acids, at least 140 amino acids, at least 160 amino acids, at least 180 amino acids, at least 200 amino acids, at least 220 amino acids, at least 240 amino acids, at least 260 amino acids, at least 300 amino acids, or at least 350 amino acids may be truncated at the N-terminus of the Cas13 protein. For example, at least 200 amino acids may be truncated at the C-terminus of the Cas13 protein, and at least 20 amino acids, at least 40 amino acids, at least 60 amino acids, at least 80 amino acids, at least 100 amino acids, at least 120 amino acids, at least 140 amino acids, at least 160 amino acids, at least 180 amino acids, at least 200 amino acids, at least 220 amino acids, at least 240 amino acids, at least 260 amino acids, at least 300 amino acids, or at least 350 amino acids may be truncated at the N-terminus of the Cas13 protein. For example, at least 220 amino acids may be truncated at the C-terminus of the Cas13 protein, and at least 20 amino acids, at least 40 amino acids, at least 60 amino acids, at least 80 amino acids, at least 100 amino acids, at least 120 amino acids, at least 140 amino acids, at least 160 amino acids, at least 180 amino acids, at least 200 amino acids, at least 220 amino acids, at least 240 amino acids, at least 260 amino acids, at least 300 amino acids, or at least 350 amino acids may be truncated at the N-terminus of the Cas13 protein. For example, at least 240 amino acids may be truncated at the C-terminus of the Cas13 protein, and at least 20 amino acids, at least 40 amino acids, at least 60 amino acids, at least 80 amino acids, at least 100 amino acids, at least 120 amino acids, at least 140 amino acids, at least 160 amino acids, at least 180 amino acids, at least 200 amino acids, at least 220 amino acids, at least 240 amino acids, at least 260 amino acids, at least 300 amino acids, or at least 350 amino acids may be truncated at the N-terminus of the Cas13 protein. For example, at least 260 amino acids may be truncated at the C-terminus of the Cas13 protein, and at least 20 amino acids, at least 40 amino acids, at least 60 amino acids, at least 80 amino acids, at least 100 amino acids, at least 120 amino acids, at least 140 amino acids, at least 160 amino acids, at least 180 amino acids, at least 200 amino acids, at least 220 amino acids, at least 240 amino acids, at least 260 amino acids, at least 300 amino acids, or at least 350 amino acids may be truncated at the N-terminus of the Cas13 protein. For example, at least 280 amino acids may be truncated at the C-terminus of the Cas13 protein, and at least 20 amino acids, at least 40 amino acids, at least 60 amino acids, at least 80 amino acids, at least 100 amino acids, at least 120 amino acids, at least 140 amino acids, at least 160 amino acids, at least 180 amino acids, at least 200 amino acids, at least 220 amino acids, at least 240 amino acids, at least 260 amino acids, at least 300 amino acids, or at least 350 amino acids may be truncated at the N-terminus of the Cas13 protein. For example, at least 300 amino acids may be truncated at the C-terminus of the Cas13 protein, and at least 20 amino acids, at least 40 amino acids, at least 60 amino acids, at least 80 amino acids, at least 100 amino acids, at least 120 amino acids, at least 140 amino acids, at least 160 amino acids, at least 180 amino acids, at least 200 amino acids, at least 220 amino acids, at least 240 amino acids, at least 260 amino acids, at least 300 amino acids, or at least 350 amino acids may be truncated at the N-terminus of the Cas13 protein. For example, at least 350 amino acids may be truncated at the C-terminus of the Cas13 protein, and at least 20 amino acids, at least 40 amino acids, at least 60 amino acids, at least 80 amino acids, at least 100 amino acids, at least 120 amino acids, at least 140 amino acids, at least 160 amino acids, at least 180 amino acids, at least 200 amino acids, at least 220 amino acids, at least 240 amino acids, at least 260 amino acids, at least 300 amino acids, or at least 350 amino acids may be truncated at the N-terminus of the Cas13 protein. For example, at least 20 amino acids may be truncated at the N-terminus of the Cas13 protein, and at least 20 amino acids, at least 40 amino acids, at least 60 amino acids, at least 80 amino acids, at least 100 amino acids, at least 120 amino acids, at least 140 amino acids, at least 160 amino acids, at least 180 amino acids, at least 200 amino acids, at least 220 amino acids, at least 240 amino acids, at least 260 amino acids, at least 300 amino acids, or at least 350 amino acids may be truncated at the C-terminus of the Cas13 protein. For example, at least 40 amino acids may be truncated at the N-terminus of the Cas13 protein, and at least 20 amino acids, at least 40 amino acids, at least 60 amino acids, at least 80 amino acids, at least 100 amino acids, at least 120 amino acids, at least 140 amino acids, at least 160 amino acids, at least 180 amino acids, at least 200 amino acids, at least 220 amino acids, at least 240 amino acids, at least 260 amino acids, at least 300 amino acids, or at least 350 amino acids may be truncated at the C-terminus of the Cas13 protein. For example, at least 60 amino acids may be truncated at the N-terminus of the Cas13 protein, and at least 20 amino acids, at least 40 amino acids, at least 60 amino acids, at least 80 amino acids, at least 100 amino acids, at least 120 amino acids, at least 140 amino acids, at least 160 amino acids, at least 180 amino acids, at least 200 amino acids, at least 220 amino acids, at least 240 amino acids, at least 260 amino acids, at least 300 amino acids, or at least 350 amino acids may be truncated at the C-terminus of the Cas13 protein. For example, at least 80 amino acids may be truncated at the N-terminus of the Cas13 protein, and at least 20 amino acids, at least 40 amino acids, at least 60 amino acids, at least 80 amino acids, at least 100 amino acids, at least 120 amino acids, at least 140 amino acids, at least 160 amino acids, at least 180 amino acids, at least 200 amino acids, at least 220 amino acids, at least 240 amino acids, at least 260 amino acids, at least 300 amino acids, or at least 350 amino acids may be truncated at the C-terminus of the Cas13 protein. For example, at least 100 amino acids may be truncated at the N-terminus of the Cas13 protein, and at least 20 amino acids, at least 40 amino acids, at least 60 amino acids, at least 80 amino acids, at least 100 amino acids, at least 120 amino acids, at least 140 amino acids, at least 160 amino acids, at least 180 amino acids, at least 200 amino acids, at least 220 amino acids, at least 240 amino acids, at least 260 amino acids, at least 300 amino acids, or at least 350 amino acids may be truncated at the C-terminus of the Cas13 protein. For example, at least 120 amino acids may be truncated at the N-terminus of the Cas13 protein, and at least 20 amino acids, at least 40 amino acids, at least 60 amino acids, at least 80 amino acids, at least 100 amino acids, at least 120 amino acids, at least 140 amino acids, at least 160 amino acids, at least 180 amino acids, at least 200 amino acids, at least 220 amino acids, at least 240 amino acids, at least 260 amino acids, at least 300 amino acids, or at least 350 amino acids may be truncated at the C-terminus of the Cas13 protein. For example, at least 140 amino acids may be truncated at the N-terminus of the Cas13 protein, and at least 20 amino acids, at least 40 amino acids, at least 60 amino acids, at least 80 amino acids, at least 100 amino acids, at least 120 amino acids, at least 140 amino acids, at least 160 amino acids, at least 180 amino acids, at least 200 amino acids, at least 220 amino acids, at least 240 amino acids, at least 260 amino acids, at least 300 amino acids, or at least 350 amino acids may be truncated at the C-terminus of the Cas13 protein. For example, at least 160 amino acids may be truncated at the N-terminus of the Cas13 protein, and at least 20 amino acids, at least 40 amino acids, at least 60 amino acids, at least 80 amino acids, at least 100 amino acids, at least 120 amino acids, at least 140 amino acids, at least 160 amino acids, at least 180 amino acids, at least 200 amino acids, at least 220 amino acids, at least 240 amino acids, at least 260 amino acids, at least 300 amino acids, or at least 350 amino acids may be truncated at the C-terminus of the Cas13 protein. For example, at least 180 amino acids may be truncated at the N-terminus of the Cas13 protein, and at least 20 amino acids, at least 40 amino acids, at least 60 amino acids, at least 80 amino acids, at least 100 amino acids, at least 120 amino acids, at least 140 amino acids, at least 160 amino acids, at least 180 amino acids, at least 200 amino acids, at least 220 amino acids, at least 240 amino acids, at least 260 amino acids, at least 300 amino acids, or at least 350 amino acids may be truncated at the C-terminus of the Cas13 protein. For example, at least 200 amino acids may be truncated at the N-terminus of the Cas13 protein, and at least 20 amino acids, at least 40 amino acids, at least 60 amino acids, at least 80 amino acids, at least 100 amino acids, at least 120 amino acids, at least 140 amino acids, at least 160 amino acids, at least 180 amino acids, at least 200 amino acids, at least 220 amino acids, at least 240 amino acids, at least 260 amino acids, at least 300 amino acids, or at least 350 amino acids may be truncated at the C-terminus of the Cas13 protein. For example, at least 220 amino acids may be truncated at the N-terminus of the Cas13 protein, and at least 20 amino acids, at least 40 amino acids, at least 60 amino acids, at least 80 amino acids, at least 100 amino acids, at least 120 amino acids, at least 140 amino acids, at least 160 amino acids, at least 180 amino acids, at least 200 amino acids, at least 220 amino acids, at least 240 amino acids, at least 260 amino acids, at least 300 amino acids, or at least 350 amino acids may be truncated at the C-terminus of the Cas13 protein. For example, at least 240 amino acids may be truncated at the N-terminus of the Cas13 protein, and at least 20 amino acids, at least 40 amino acids, at least 60 amino acids, at least 80 amino acids, at least 100 amino acids, at least 120 amino acids, at least 140 amino acids, at least 160 amino acids, at least 180 amino acids, at least 200 amino acids, at least 220 amino acids, at least 240 amino acids, at least 260 amino acids, at least 300 amino acids, or at least 350 amino acids may be truncated at the C-terminus of the Cas13 protein. For example, at least 260 amino acids may be truncated at the N-terminus of the Cas13 protein, and at least 20 amino acids, at least 40 amino acids, at least 60 amino acids, at least 80 amino acids, at least 100 amino acids, at least 120 amino acids, at least 140 amino acids, at least 160 amino acids, at least 180 amino acids, at least 200 amino acids, at least 220 amino acids, at least 240 amino acids, at least 260 amino acids, at least 300 amino acids, or at least 350 amino acids may be truncated at the C-terminus of the Cas13 protein. For example, at least 280 amino acids may be truncated at the N-terminus of the Cas13 protein, and at least 20 amino acids, at least 40 amino acids, at least 60 amino acids, at least 80 amino acids, at least 100 amino acids, at least 120 amino acids, at least 140 amino acids, at least 160 amino acids, at least 180 amino acids, at least 200 amino acids, at least 220 amino acids, at least 240 amino acids, at least 260 amino acids, at least 300 amino acids, or at least 350 amino acids may be truncated at the C-terminus of the Cas13 protein. For example, at least 300 amino acids may be truncated at the N-terminus of the Cas13 protein, and at least 20 amino acids, at least 40 amino acids, at least 60 amino acids, at least 80 amino acids, at least 100 amino acids, at least 120 amino acids, at least 140 amino acids, at least 160 amino acids, at least 180 amino acids, at least 200 amino acids, at least 220 amino acids, at least 240 amino acids, at least 260 amino acids, at least 300 amino acids, or at least 350 amino acids may be truncated at the C-terminus of the Cas13 protein. For example, at least 350 amino acids may be truncated at the N-terminus of the Cas13 protein, and at least 20 amino acids, at least 40 amino acids, at least 60 amino acids, at least 80 amino acids, at least 100 amino acids, at least 120 amino acids, at least 140 amino acids, at least 160 amino acids, at least 180 amino acids, at least 200 amino acids, at least 220 amino acids, at least 240 amino acids, at least 260 amino acids, at least 300 amino acids, or at least 350 amino acids may be truncated at the C-terminus of the Cas13 protein.

### Split Proteins

[0397] It is noted that in this context, and more generally for the various applications as described herein, the use of a split version of the Cas protein can be envisaged. Indeed, this may not only allow increased specificity but may also be advantageous for delivery. The Cas13 is split in the sense that the two parts of the Cas13 enzyme substantially comprise a functioning Cas13. The split may be so that the catalytic domain(s) are unaffected. That Cas13 may function as a nuclease or it may be a dead-Cas13 which is essentially an RNA-binding protein with very little or no catalytic activity, due to typically mutation(s) in its catalytic domains.

[0398] Each half of the split Cas13 may be fused to a dimerization partner. By means of example, and without limitation, employing rapamycin sensitive dimerization domains, allows to generate a chemically inducible split Cas13 for temporal control of Cas13 activity. Cas13 can thus be rendered chemically inducible by being split into two fragments and that rapamycin-sensitive dimerization domains may be used for controlled reassembly of the Cas13. The two parts of the split Cas13 can be thought of as the N′ terminal part and the C′ terminal part of the split Cas13. The fusion is typically at the split point of the Cas13. In other words, the C′ terminal of the N′ terminal part of the split Cas13 is fused to one of the dimer halves, whilst the N′ terminal of the C′ terminal part is fused to the other dimer half.

[0399] The Cas13 does not have to be split in the sense that the break is newly created. The split point is typically designed in silico and cloned into the constructs. Together, the two parts of the split Cas13, the N′ terminal and C′ terminal parts, form a full Cas13, comprising preferably at least 70% or more of the wildtype amino acids (or nucleotides encoding them), preferably at least 80% or more, preferably at least 90% or more, preferably at least 95% or more, and most preferably at least 99% or more of the wildtype amino acids (or nucleotides encoding them). Some trimming may be possible, and mutants are envisaged. Non-functional domains may be removed entirely. What is important is that the two parts may be brought together and that the desired Cas13 function is restored or reconstituted. The dimer may be a homodimer or a heterodimer.

[0400] In certain embodiments, the Cas13 effector as described herein may be used for mutation-specific, or allele-specific targeting, such as. for mutation-specific, or allele-specific knockdown.

[0401] The RNA targeting effector protein can moreover be fused to another functional RNase domain, such as a non-specific RNase or Argonaute 2, which acts in synergy to increase the RNase activity or to ensure further degradation of the message.

### Functional Domains

[0402] The Cas protein or variants thereof (e.g., a catalytically inactive form) may be associated with one or more functional domains (e.g., via fusion protein or suitable linkers). In an embodiment, the Cas protein, or an ortholog or homolog thereof, may be used as a generic nucleic acid binding protein with fusion to or being operably linked to one or more functional domains. In one example, the functional domain is a deaminase. In another example, the functional domain is a transposase. In another example, the functional domain is a reverse transcriptase.

[0403] It is also envisaged that the RNA-targeting effector protein-guide RNA complex as a whole may be associated with two or more functional domains. For example, there may be two or more functional domains associated with the RNA-targeting effector protein, or there may be two or more functional domains associated with the guide RNA or crRNA (via one or more adaptor proteins), or there may be one or more functional domains associated with the RNA-targeting effector protein and one or more functional domains associated with the guide RNA or crRNA (via one or more adaptor proteins).

[0404] In some embodiments of the non-naturally occurring or engineered composition of the invention, the Cas13 effector protein is associated with one or more functional domains. The association can be by direct linkage of the effector protein to the functional domain, or by association with the crRNA. In a non-limiting example, the crRNA comprises an added or inserted sequence that can be associated with a functional domain of interest, including, for example, an aptamer or a nucleotide that binds to a nucleic acid binding adapter protein. The functional domain may be a functional heterologous domain.

[0405] In some embodiments, the invention also provides for the one or more heterologous functional domains to have one or more of the following activities: methylase activity, demethylase activity, transcription activation activity, transcription repression activity, transcription release factor activity, histone modification activity, nuclease activity, single-strand RNA cleavage activity, double-strand RNA cleavage activity, single-strand DNA cleavage activity, double-strand DNA cleavage activity and nucleic acid binding activity. At least one or more heterologous functional domains may be at or near the amino-terminus of the effector protein and/or wherein at least one or more heterologous functional domains is at or near the carboxy-terminus of the effector protein. The one or more heterologous functional domains may be fused to the effector protein. The one or more heterologous functional domains may be tethered to the effector protein. The one or more heterologous functional domains may be linked to the effector protein by a linker moiety.

[0406] In an embodiment, the Cas13 protein or an ortholog or homolog thereof, may be used as a generic nucleic acid binding protein with fusion to or being operably linked to a functional domain. Exemplary functional domains may include but are not limited to translational initiator, translational activator, translational repressor, nucleases, in particular ribonucleases, a spliceosome, beads, a light inducible/controllable domain or a chemically inducible/controllable domain. In certain embodiments, the one or more functional domains are controllable, e.g., inducible.

[0407] In some embodiments, one or more functional domains are associated with a Cas protein via an adaptor protein, for example as used with the modified guides of Konnerman et al. (Nature 517, 583-588, 29 Jan. 2015). In some embodiments, the one or more functional domains is attached to the adaptor protein so that upon binding of the Cas effector protein to the gRNA and target, the functional domain is in a spatial orientation allowing for the functional domain to function in its attributed function.

[0408] In some embodiments, one or more functional domains are associated with a dead gRNA (dRNA). In some embodiments, a dRNA complex with active Cas protein directs gene regulation by a functional domain at on gene locus while an gRNA directs DNA cleavage by the active Cas protein at another locus, for example as described analogously in CRISPR-Cas systems by Dahlman et al., ‘Orthogonal gene control with a catalytically active Cas9 nuclease’. In some embodiments, dRNAs are selected to maximize selectivity of regulation for a gene locus of interest compared to off-target regulation. In some embodiments, dRNAs are selected to maximize target gene regulation and minimize target cleavage

[0409] For the purposes of the following discussion, reference to a functional domain could be a functional domain associated with the Cas protein or a functional domain associated with the adaptor protein. In some embodiments, the one or more functional domains is attached to the adaptor protein so that upon binding of the Cas effector protein to the gRNA and target, the functional domain is in a spatial orientation allowing for the functional domain to function in its attributed function.

[0410] In the practice of the invention, loops of the gRNA may be extended, without colliding with the Cas protein by the insertion of distinct RNA loop(s) or distinct sequence(s) that may recruit adaptor proteins that can bind to the distinct RNA loop(s) or distinct sequence(s). The adaptor proteins may include but are not limited to orthogonal RNA-binding protein/aptamer combinations that exist within the diversity of bacteriophage coat proteins. A list of such coat proteins includes, but is not limited to: Qβ, F2, GA, fr, JP501, M12, R17, BZ13, JP34, JP500, KU1, M11, MX1, TW18, VK, SP, FI, ID2, NL95, TW19, AP205, ϕCb5, ϕCb8r, ϕCb12r, ϕCb23r, 7s and PRR1. These adaptor proteins or orthogonal RNA binding proteins can further recruit effector proteins or fusions which comprise one or more functional domains.

[0411] Examples of functional domains include deaminase domain, transposase domain, reverse transcriptase domain, integrase domain, recombinase domain, resolvase domain, invertase domain, protease domain, DNA methyltransferase domain, DNA hydroxylmethylase domain, DNA demethylase domain, histone acetylase domain, histone deacetylases domain, nuclease domain, repressor domain, activator domain, nuclear-localization signal domains, transcription-regulatory protein (or transcription complex recruiting) domain, cellular uptake activity associated domain, nucleic acid binding domain, antibody presentation domain, histone modifying enzymes, recruiter of histone modifying enzymes; inhibitor of histone modifying enzymes, histone methyltransferase, histone demethylase, histone kinase, histone phosphatase, histone ribosylase, histone deribosylase, histone ubiquitinase, histone deubiquitinase, histone biotinase and histone tail protease. In some preferred embodiments, the functional domain is a transcriptional activation domain, such as, without limitation, VP64, p65, MyoD1, HSF1, RTA, SETT/9 or a histone acetyltransferase. In some embodiments, the functional domain is a transcription repression domain, preferably KRAB. In some embodiments, the transcription repression domain is SID, or concatemers of SID (eg SID4X). In some embodiments, the functional domain is an epigenetic modifying domain, such that an epigenetic modifying enzyme is provided. In some embodiments, the functional domain is an activation domain, which may be the P65 activation domain.

[0412] In some examples, the Cas protein is associated with a ligase or functional fragment thereof. The ligase may ligate a single-strand break (a nick) generated by the Cas protein. In certain cases, the ligase may ligate a double-strand break generated by the Cas protein. In certain examples, the Cas is associated with a reverse transcriptase or functional fragment thereof.

[0413] In some embodiments, the one or more functional domains is an NLS (Nuclear Localization Sequence) or an NES (Nuclear Export Signal). In some embodiments, the one or more functional domains is a transcriptional activation domain comprises VP64, p65, MyoD1, HSF1, RTA, SET7/9 and a histone acetyltransferase. Other references herein to activation (or activator) domains in respect of those associated with the CRISPR enzyme include any known transcriptional activation domain and specifically VP64, p65, MyoD1, HSF1, RTA, SET7/9 or a histone acetyltransferase.

[0414] In some embodiments, the one or more functional domains is a transcriptional repressor domain. In some embodiments, the transcriptional repressor domain is a KRAB domain. In some embodiments, the transcriptional repressor domain is a NuE domain, NcoR domain, SID domain or a SID4X domain.

[0415] In some embodiments, the one or more functional domains have one or more activities comprising methylase activity, demethylase activity, transcription activation activity, transcription repression activity, transcription release factor activity, histone modification activity, RNA cleavage activity, DNA cleavage activity, DNA integration activity or nucleic acid binding activity.

[0416] Histone modifying domains are also preferred in some embodiments. Exemplary histone modifying domains are discussed below. Transposase domains, HR (Homologous Recombination) machinery domains, recombinase domains, and/or integrase domains are also preferred as the present functional domains. In some embodiments, DNA integration activity includes HR machinery domains, integrase domains, recombinase domains and/or transposase domains.

[0417] In some embodiments, the DNA cleavage activity is due to a nuclease. In some embodiments, the nuclease comprises a Fok1 nuclease. See, “Dimeric CRISPR RNA-guided FokI nucleases for highly specific genome editing”, Shengdar Q. Tsai, Nicolas Wyvekens, Cyd Khayter, Jennifer A. Foden, Vishal Thapar, Deepak Reyon, Mathew J. Goodwin, Martin J. Aryee, J. Keith Joung Nature Biotechnology 32(6): 569-77 (2014), relates to dimeric RNA-guided FokI Nucleases that recognize extended sequences and can edit endogenous genes with high efficiencies in human cells.

[0418] In some embodiments, the one or more functional domains is attached to the Cas protein so that upon binding to the sgRNA and target the functional domain is in a spatial orientation allowing for the functional domain to function in its attributed function.

[0419] In particular embodiments, the Cas protein comprise one or more heterologous functional domains. As used herein, a heterologous functional domain is a polypeptide that is not derived from the same species as the Cas protein. For example, a heterologous functional domain of a Cas protein derived from species A is a polypeptide derived from a species different from species A, or an artificial polypeptide. The one or more heterologous functional domains may comprise one or more nuclear localization signal (NLS) domains. The one or more heterologous functional domains may comprise at least two or more NLSs. The one or more heterologous functional domains may comprise one or more transcriptional activation domains. A transcriptional activation domain may comprise VP64. The one or more heterologous functional domains may comprise one or more transcriptional repression domains. A transcriptional repression domain may comprise a KRAB domain or a SID domain. The one or more heterologous functional domain may comprise one or more nuclease domains. The one or more nuclease domains may comprise Fok1.

[0420] Functional domains may be used to regulate transcription, e.g., transcriptional repression. Transcriptional repression is often mediated by chromatin modifying enzymes such as histone methyltransferases (HMTs) and deacetylases (HDACs). Repressive histone effector domains are known and an exemplary list is provided below. In the exemplary table, preference was given to proteins and functional truncations of small size to facilitate efficient viral packaging (for instance via AAV). In general, however, the domains may include HDACs, histone methyltransferases (HMTs), and histone acetyltransferase (HAT) inhibitors, as well as HDAC and HMT recruiting proteins. The functional domain may be or include, in some embodiments, HDAC Effector Domains, HDAC Recruiter Effector Domains, Histone Methyltransferase (HMT) Effector Domains, Histone Methyltransferase (HMT) Recruiter Effector Domains, or Histone Acetyltransferase Inhibitor Effector Domains.

[0421] In some embodiments, the functional domain may be a Methyltransferase (HMT) Effector Domain. Preferred examples include NUE, vSET, EHMT2/G9A, SUV39H1, dim-5, KYP, SUVR4, SET4, SET1, SETD8, and TgSET8. NUE is exemplified in the present Examples and, although preferred, it is envisaged that others in the class will also be useful.

[0422] In some embodiments, the functional domain may be a Histone Methyltransferase (HMT) Recruiter Effector Domain. Preferred examples include Hp1a, PHF19, and NIPP1.

[0423] In some embodiments, the functional domain may be Histone Acetyltransferase Inhibitor Effector Domain. Preferred examples include SET/TAF-1β.

[0424] In some cases, the target endogenous (regulatory) control elements (such as enhancers and silencers) in addition to a promoter or promoter-proximal elements. Thus, the invention can also be used to target endogenous control elements (including enhancers and silencers) in addition to targeting of the promoter. These control elements can be located upstream and downstream of the transcriptional start site (TSS), starting from 200 bp from the TSS to 100 kb away. Targeting of known control elements can be used to activate or repress the gene of interest. In some cases, a single control element can influence the transcription of multiple target genes. Targeting of a single control element could therefore be used to control the transcription of multiple genes simultaneously.

[0425] Targeting of putative control elements on the other hand (e.g. by tiling the region of the putative control element as well as 200 bp up to 100 kB around the element) can be used as a means to verify such elements (by measuring the transcription of the gene of interest) or to detect novel control elements (e.g. by tiling 100 kb upstream and downstream of the TSS of the gene of interest). In addition, targeting of putative control elements can be useful in the context of understanding genetic causes of disease. Many mutations and common SNP variants associated with disease phenotypes are located outside coding regions. Targeting of such regions with either the activation or repression systems described herein can be followed by readout of transcription of either a) a set of putative targets (e.g. a set of genes located in closest proximity to the control element) or b) whole-transcriptome readout by e.g. RNAseq or microarray. This would allow for the identification of likely candidate genes involved in the disease phenotype. Such candidate genes could be useful as novel drug targets.

[0426] In some embodiments is for the one or more functional domains to comprise an acetyltransferase, preferably a histone acetyltransferase. These are useful in the field of epigenomics, for example in methods of interrogating the epigenome. Methods of interrogating the epigenome may include, for example, targeting epigenomic sequences. Targeting epigenomic sequences may include the guide being directed to an epigenomic target sequence. Epigenomic target sequence may include, in some embodiments, include a promoter, silencer or an enhancer sequence.

[0427] The functional domains may be acetyltransferases domains. Examples of acetyltransferases are known but may include, in some embodiments, histone acetyltransferases. In some embodiments, the histone acetyltransferase may comprise the catalytic core of the human acetyltransferase p300 (Gerbasch & Reddy, Nature Biotech 6th April 2015).

### Nuclear Localization Sequences

[0428] In some embodiments, the Cas protein is fused to one or more nuclear localization sequences (NLSs), such as about or more than about 1, 2, 3, 4, 5, 6, 7, 8, 9, 10, or more NLSs. In some embodiments, the Cas comprises about or more than about 1, 2, 3, 4, 5, 6, 7, 8, 9, 10, or more NLSs at or near the amino-terminus, about or more than about 1, 2, 3, 4, 5, 6, 7, 8, 9, 10, or more NLSs at or near the carboxy-terminus, or a combination of these (e.g. zero or at least one or more NLS at the amino-terminus and zero or at one or more NLS at the carboxy terminus). When more than one NLS is present, each may be selected independently of the others, such that a single NLS may be present in more than one copy and/or in combination with one or more other NLSs present in one or more copies. In a preferred embodiment of the invention, the Cas protein comprises at most 6 NLSs. In some embodiments, an NLS is considered near the N- or C-terminus when the nearest amino acid of the NLS is within about 1, 2, 3, 4, 5, 10, 15, 20, 25, 30, 40, 50, or more amino acids along the polypeptide chain from the N- or C-terminus. Non-limiting examples of NLSs include an NLS sequence derived from: the NLS of the SV40 virus large T-antigen, having the amino acid sequence PKKKRKV (SEQ ID NO: 5205); the NLS from nucleoplasmin (e.g. the nucleoplasmin bipartite NLS with the sequence KRPAATKKAGQAKKKK (SEQ ID NO: 5206); the c-myc NLS having the amino acid sequence PAAKRVKLD (SEQ ID NO: 5207) or RQRRNELKRSP (SEQ ID NO: 5208); the hRNPA1 M9 NLS having the sequence NQSSNFGPMKGGNFGGRSSGPYGGGGQYFAKPRNQGGY (SEQ ID NO: 5209); the sequence RMRIZFKNKGKDTAELRRRRVEVSVELRKAKKDEQILKRRNV (SEQ ID NO: 5210) of the IBB domain from importin-alpha; the sequences VSRKRPRP (SEQ ID NO: 5211) and PPKKARED (SEQ ID NO: 5212) of the myoma T protein; the sequence PQPKKKPL (SEQ ID NO: 5213) of human p53; the sequence SALIKKKKKMAP (SEQ ID NO: 5214) of mouse c-abl IV; the sequences DRLRR (SEQ ID NO: 5215) and PKQKKRK (SEQ ID NO: 5216) of the influenza virus NS1; the sequence RKLKKKIKKL (SEQ ID NO: 5217) of the Hepatitis virus delta antigen; the sequence REKKKFLKRR (SEQ ID NO: 5218) of the mouse Mx1 protein; the sequence KRKGDEVDGVDEVAKKKSKK (SEQ ID NO: 5219) of the human poly(ADP-ribose) polymerase; and the sequence RKCLQAGMNLEARKTKK (SEQ ID NO: 5220) of the steroid hormone receptors (human) glucocorticoid. In general, the one or more NLSs are of sufficient strength to drive accumulation of the Cas in a detectable amount in the nucleus of a eukaryotic cell. In general, strength of nuclear localization activity may derive from the number of NLSs in the Cas, the particular NLS(s) used, or a combination of these factors. Detection of accumulation in the nucleus may be performed by any suitable technique. For example, a detectable marker may be fused to the Cas, such that location within a cell may be visualized, such as in combination with a means for detecting the location of the nucleus (e.g. a stain specific for the nucleus such as DAPI). Cell nuclei may also be isolated from cells, the contents of which may then be analyzed by any suitable process for detecting protein, such as immunohistochemistry, Western blot, or enzyme activity assay. Accumulation in the nucleus may also be determined indirectly, such as by an assay for the effect of CRISPR complex formation (e.g. assay for DNA cleavage or mutation at the target sequence, or assay for altered gene expression activity affected by CRISPR complex formation and/or Cas enzyme activity), as compared to a control no exposed to the Cas or complex, or exposed to a Cas lacking the one or more NLSs. In certain embodiments of the herein described Cas effector protein complexes and systems the codon optimized Cas effector proteins comprise an NLS attached to the C-terminal of the protein. In certain embodiments, other localization tags may be fused to the Cas protein, such as without limitation for localizing the Cas to particular sites in a cell, such as organelles, such as mitochondria, plastids, chloroplast, vesicles, golgi, (nuclear or cellular) membranes, ribosomes, nucleolus, ER, cytoskeleton, vacuoles, centrosome, nucleosome, granules, centrioles, etc.

[0429] In certain embodiments of the invention, at least one nuclear localization signal (NLS) is attached to the nucleic acid sequences encoding the Cas proteins. In preferred embodiments at least one or more C-terminal or N-terminal NLSs are attached (and hence nucleic acid molecule(s) coding for the Cas protein can include coding for NLS(s) so that the expressed product has the NLS(s) attached or connected). In a preferred embodiment a C-terminal NLS is attached for optimal expression and nuclear targeting in eukaryotic cells, preferably human cells. The invention also encompasses methods for delivering multiple nucleic acid components, wherein each nucleic acid component is specific for a different target locus of interest thereby modifying multiple target loci of interest. The nucleic acid component of the complex may comprise one or more protein-binding RNA aptamers. The one or more aptamers may be capable of binding a bacteriophage coat protein.

### Linkers

[0430] In some preferred embodiments, the functional domain is linked to a dead-Cas to target and activate epigenomic sequences such as promoters or enhancers. One or more guides directed to such promoters or enhancers may also be provided to direct the binding of the CRISPR enzyme to such promoters or enhancers.

[0431] The term “associated with” is used here in relation to the association of the functional domain to the Cas effector protein or the adaptor protein. It is used in respect of how one molecule ‘associates’ with respect to another, for example between an adaptor protein and a functional domain, or between the Cas effector protein and a functional domain. In the case of such protein-protein interactions, this association may be viewed in terms of recognition in the way an antibody recognizes an epitope. Alternatively, one protein may be associated with another protein via a fusion of the two, for instance one subunit being fused to another subunit. Fusion typically occurs by addition of the amino acid sequence of one to that of the other, for instance via splicing together of the nucleotide sequences that encode each protein or subunit. Alternatively, this may essentially be viewed as binding between two molecules or direct linkage, such as a fusion protein. In any event, the fusion protein may include a linker between the two subunits of interest (i.e. between the enzyme and the functional domain or between the adaptor protein and the functional domain). Thus, in some embodiments, the Cas effector protein or adaptor protein is associated with a functional domain by binding thereto. In other embodiments, the Cas effector protein or adaptor protein is associated with a functional domain because the two are fused together, optionally via an intermediate linker.

[0432] The term “linker” as used in reference to a fusion protein refers to a molecule which joins the proteins to form a fusion protein. Generally, such molecules have no specific biological activity other than to join or to preserve some minimum distance or other spatial relationship between the proteins. However, in certain embodiments, the linker may be selected to influence some property of the linker and/or the fusion protein such as the folding, net charge, or hydrophobicity of the linker.

[0433] Suitable linkers for use in the methods of the present invention are well known to those of skill in the art and include, but are not limited to, straight or branched-chain carbon linkers, heterocyclic carbon linkers, or peptide linkers. However, as used herein the linker may also be a covalent bond (carbon-carbon bond or carbon-heteroatom bond). In particular embodiments, the linker is used to separate the Cas protein and the nucleotide deaminase by a distance sufficient to ensure that each protein retains its required functional property. Preferred peptide linker sequences adopt a flexible extended conformation and do not exhibit a propensity for developing an ordered secondary structure. In certain embodiments, the linker can be a chemical moiety which can be monomeric, dimeric, multimeric or polymeric. Preferably, the linker comprises amino acids. Typical amino acids in flexible linkers include Gly, Asn and Ser. Accordingly, in particular embodiments, the linker comprises a combination of one or more of Gly, Asn and Ser amino acids. Other near neutral amino acids, such as Thr and Ala, also may be used in the linker sequence. Exemplary linkers are disclosed in Maratea et al. (1985), Gene 40: 39-46; Murphy et al. (1986) Proc. Nat'l. Acad. Sci. USA 83: 8258-62; U.S. Pat. Nos. 4,935,233; and 4,751,180. For example, GlySer linkers GGS, GGGS (SEQ ID NO: 5221) or GSG can be used. GGS, GSG, GGGS (SEQ ID NO: 5221) or GGGGS (SEQ ID NO: 5222) linkers can be used in repeats of 3 (such as (GGS)₃ (SEQ ID NO: 5223), (GGGGS)₃ (SEQ ID NO: 5204)) or 5, 6, 7, 9 or even 12 or more, to provide suitable lengths. In some cases, the linker may be (GGGGS)₃₋₁₅, For example, in some cases, the linker may be (GGGGS)₃₋₁₁, e.g., GGGGS (SEQ ID NO: 5222), (GGGGS)₂ (SEQ ID NO: 5224, (GGGGS)₃ (SEQ ID NO: 5204), (GGGGS)₄ (SEQ ID NO: 5225), (GGGGS)₅ (SEQ ID NO: 5226), (GGGGS)₆ (SEQ ID NO: 5227), (GGGGS)₇ (SEQ ID NO: 5228), (GGGGS)₈ (SEQ ID NO: 5229), (GGGGS)₉ (SEQ ID NO: 5230), (GGGGS)₁₀ (SEQ ID NO: 5231), or (GGGGS)₁₁ (SEQ ID NO: 5232).

[0434] In particular embodiments, linkers such as (GGGGS)₃ (SEQ ID NO: 5204) are preferably used herein. (GGGGS)₆ (SEQ ID NO: 5227), (GGGGS)₉ (SEQ ID NO: 5230) or (GGGGS)₁₂ (SEQ ID NO: 5233) may preferably be used as alternatives. Other preferred alternatives are (GGGGS)₁ (SEQ ID NO: 5222), (GGGGS)₂ (SEQ ID NO:5224), (GGGGS)₄ (SEQ ID NO: 5225), (GGGGS)₅ (SEQ ID NO: 5226), (GGGGS)₇ (SEQ ID NO: 5228), (GGGGS)₈ (SEQ ID NO: 5229), (GGGGS)₁₀ (SEQ ID NO: 5231), or (GGGGS)₁₁ (SEQ ID NO: 5232). In yet a further embodiment, LEPGEKPYKCPECGKSFSQSGALTRHQRTHTR (SEQ ID NO: 5234) is used as a linker. In yet an additional embodiment, the linker is an XTEN linker. In particular embodiments, the Cas protein is linked to the deaminase protein or its catalytic domain by means of an LEPGEKPYKCPECGKSFSQSGALTRHQRTHTR (SEQ ID NO: 5234) linker. In further particular embodiments, the Cas protein is linked C-terminally to the N-terminus of a deaminase protein or its catalytic domain by means of an LEPGEKPYKCPECGKSFSQSGALTRHQRTHTR (SEQ ID NO: 5234) linker. In addition, N- and C-terminal NLSs can also function as linker (e.g., PKKKRKVEASSPKKRKVEAS (SEQ ID NO: 5235)).

[0435] Examples of linkers are shown in the Table 7 below.

TABLE 7

| | |
|---|---|
| GGS | GGTGGTAGT |
| GGSx3 (9) | GGTGGTAGTGGAGGGAGCGGCGGTTCA (SEQ ID NO: 5236) |
| GGSx7 (21) | ggtggaggaggctctggtggaggcggtagcggaggcggagggtcgGGTGGTAGTGGAGGG |
| | AGCGGCGGTTCA (SEQ ID NO: 5237) |
| XTEN | TCGGGATCTGAGACGCCTGGGACCTCGGAATCGGCTACGCCCGAA |
| | AGT (SEQ ID NO: 5238) |
| Z- | Gtggataacaaatttaacaaagaaatgtgggcggcgtgggaagaaattcgtaacctgccgaacctgaacggc |
| EGFR_Short | tggcagatgaccgcgtttattgcgagcctggtggatgatccgagccagagcgcgaacctgctggcggaagcg |
| | aaaaaactgaacgatgcgcaggcgccgaaaaccggcggtggttctggt (SEQ ID NO: 5239) |
| GSAT | Ggtggttctgccggtggctccggttctggctccagcggtggcagctctggtgcgtccggcacgggtactgcg |
| | ggtggcactggcagcggttccggtactggctctggc (SEQ ID NO: 5240) |

[0436] Linkers may be used between the guide RNAs and the functional domain (activator or repressor), or between the Cas protein and the functional domain. The linkers may be used to engineer appropriate amounts of “mechanical flexibility”.

[0437] In certain embodiments, the one or more functional domains are controllable, e.g., inducible.

### Modulation of Cas13 Proteins

[0438] The invention provides accessory proteins that modulate CRISPR protein function. In certain embodiments, the accessory protein modulates catalytic activity of a CRISPR protein. In an embodiment of the invention, an accessory protein modulates targeted, or sequence specific, nuclease activity. In an embodiment of the invention, an accessory protein modulates collateral nuclease activity. In an embodiment of the invention, an accessory protein modulates binding to a target nucleic acid.

[0439] According to the invention, the nuclease activity to be modulated can be directed against nucleic acids comprising or consisting of RNA, including without limitation mRNA, miRNA, siRNA and nucleic acids comprising cleavable RNA linkages along with nucleotide analogs. In an embodiment of the invention, the nuclease activity to be modulated can be directed against nucleic acids comprising or consisting of DNA, including without limitation nucleic acids comprising cleavable DNA linkages and nucleic acid analogs.

[0440] In an embodiment of the invention, an accessory protein enhances an activity of a CRISPR protein. In certain such embodiments, the accessory protein comprises a HEPN domain and enhances RNA cleavage. In certain embodiments, the accessory protein inhibits an activity of a CRISPR protein. In certain such embodiments, the accessory protein comprises an inactivated HEPN domain or lacks an HEPN domain altogether.

[0441] According to the invention, naturally occurring accessory proteins of Type VI CRISPR systems comprise small proteins encoded at or near a CRISPR locus that function to modify an activity of a CRISPR protein. In general, a CRISPR locus can be identified as comprising a putative CRISPR array and/or encoding a putative CRISPR effector protein. In an embodiment, an effector protein can be from 800 to 2000 amino acids, or from 900 to 1800 amino acids, or from 950 to 1300 amino acids. In an embodiment, an accessory protein can be encoded within 25 kb, or within 20 kb or within 15 kb, or within 10 kb of a putative CRISPR effector protein or array, or from 2 kb to 10 kb from a putative CRISPR effector protein or array.

[0442] In an embodiment of the invention, an accessory protein is from 50 to 300 amino acids, or from 100 to 300 amino acids or from 150 to 250 amino acids or about 200 amino acids. Non-limiting examples of accessory proteins include the csx27 and csx28 proteins identified herein.

[0443] Identification and use of a CRISPR accessory protein of the invention is independent of CRISPR effector protein classification. Accessory proteins of the invention can be found in association with or engineered to function with a variety of CRISPR effector proteins. Examples of accessory proteins identified and used herein are representative of CRISPR effector proteins generally. It is understood that CRISPR effector protein classification may involve homology, feature location (e.g., location of REC domains, NUC domains, HEPN sequences), nucleic acid target (e.g. DNA or RNA), absence or presence of tracr RNA, location of guide/spacer sequence 5′ or 3′ of a direct repeat, or other criteria. In embodiments of the invention, accessory protein identification and use transcend such classifications.

[0444] In type VI CRISPR-Cas systems that target RNA, the Cas proteins usually comprise two conserved HEPN domains which are involved in RNA cleavage. In certain embodiments, the Cas protein processes crRNA to generate mature crRNA. The guide sequence of the crRNA recognizes target RNA with a complementary sequence and the Cas protein degrades the target strand. More particularly, in certain embodiments, upon target binding, the Cas protein undergoes a structural rearrangement that brings two HEPN domains together to form an active HEPN catalytic site and the target RNA is then cleaved. The location of the catalytic site near the surface of the Cas protein allows non-specific collateral ssRNA cleavage.

[0445] In certain embodiments, accessory proteins are instrumental in increasing or reducing target and/or collateral RNA cleavage. Without being bound by theory, an accessory protein that activates CRISPR activity (e.g., a csx28 protein or ortholog or variant comprising a HEPN domain) can be envisioned as capable of interacting with a Cas protein and combining its HEPN domain with a HEPN domain of the Cas protein to form an active HEPN catalytic site, whereas an inhibitory accessory protein (e.g. csx27 with lacks an HEPN domain) can be envisioned as capable of interacting with a Cas protein and reducing or blocking a conformation of the Cas protein that would bring together two HEPN domains.

[0446] According to the invention, in certain embodiments, enhancing activity of a Type VI Cas protein or complex thereof comprises contacting the Type VI Cas protein or complex thereof with an accessory protein from the same organism that activates the Cas protein. In other embodiments, enhancing activity of a Type VI Cas protein of complex thereof comprises contacting the Type VI Cas protein or complex thereof with an activator accessory protein from a different organism within the same subclass (e.g., Type VI-b). In other embodiments, enhancing activity of a Type VI Cas protein or complex thereof comprises contacting the Type VI Cas protein or complex thereof with an accessory protein not within the subclass (e.g., a Type VI Cas protein other than Type VI-b with a Type VI-b accessory protein or vice-versa).

[0447] According to the invention, in certain embodiments, repressing activity of a Type VI Cas protein or complex thereof comprises contacting the Type VI Cas protein or complex thereof with an accessory protein from the same organism that represses the Cas protein. In other embodiments, repressing activity of a Type VI Cas protein or complex thereof comprises contacting the Type VI Cas protein or complex thereof with a repressor accessory protein from a different organism within the same subclass (e.g., Type VI-b). In other embodiments, repressing activity of a Type VI Cas protein or complex thereof comprises contacting the Type VI Cas protein or complex thereof with a repressor accessory protein not within the subclass (e.g., a Type VI Cas protein other than Type VI-b with a Type VI-b repressor accessory protein or vice-versa).

[0448] In certain embodiments where the Type VI Cas protein and the Type VI accessory protein are from the same organism, the two proteins will function together in an engineered CRISPR system. In certain embodiments, it will be desirable to alter the function of the engineered CRISPR system, for example by modifying either or both of the proteins or their expression. In embodiments where the Type VI Cas protein and the Type VI accessory protein are from different organisms which may be within the same class or different classes, the proteins may function together in an engineered CRISPR system but it will often be desired or necessary to modify either or both of the proteins to function together.

[0449] Accordingly, in certain embodiments of the invention either or both of a Cas protein and an accessory protein may be modified to adjust aspects of protein-protein interactions between the Cas protein and accessory protein. In certain embodiments, either or both of a Cas protein and an accessory protein may be modified to adjust aspects of protein-nucleic acid interactions. Ways to adjust protein-protein interactions and protein-nucleic acid interaction include without limitation, fitting molecular surfaces, polar interactions, hydrogen bonds, and modulating van der Waals interactions. In certain embodiments, adjusting protein-protein interactions or protein-nucleic acid binding comprises increasing or decreasing binding interactions. In certain embodiments, adjusting protein-protein interactions or protein-nucleic acid binding comprises modifications that favor or disfavor a conformation of the protein or nucleic acid.

[0450] By “fitting”, is meant determining including by automatic, or semi-automatic means, interactions between one or more atoms of a Cas13 protein (and optionally at least one atoms of a Cas13 accessory protein), or between one or more atoms of a Cas13 protein and one or more atoms of a nucleic acid, (or optionally between one or more atoms of a Cas13 accessory protein and a nucleic acid), and calculating the extent to which such interactions are stable. Interactions include attraction and repulsion, brought about by charge, steric considerations and the like.

[0451] The three-dimensional structure of Type VI CRISPR protein or complex thereof (and/or a Type VI CRISPR accessory protein or complex thereof in the context of Cas13b) provides in the context of the instant invention an additional tool for identifying additional mutations in orthologs of Cas13. The crystal structure can also be basis for the design of new and specific Cas13s (and optionally Cas13 accessory proteins). Various computer-based methods for fitting are described further. Binding interactions of Cas13s (and optionally accessory proteins), and nucleic acids can be examined through the use of computer modeling using a docking program. Docking programs are known; for example GRAM, DOCK or AUTODOCK (see Walters et al. Drug Discovery Today, vol. 3, no. 4 (1998), 160-178, and Dunbrack et al. Folding and Design 2 (1997), 27-42). This procedure can include computer fitting to ascertain how well the shape and the chemical structure of the binding partners. Computer-assisted, manual examination of the active site or binding site of a Type VI system may be performed. Programs such as GRID (P. Goodford, J. Med. Chem, 1985, 28, 849-57)—a program that determines probable interaction sites between molecules with various functional groups—may also be used to analyze the active site or binding site to predict partial structures of binding compounds. Computer programs can be employed to estimate the attraction, repulsion or steric hindrance of the two binding partners, e.g., components of a Type VI CRISPR system, or a nucleic acid molecule and a component of a Type VI CRISPR system.

[0452] Amino acid substitutions may be made on the basis of differences or similarities in amino acid properties (such as polarity, charge, solubility, hydrophobicity, hydrophilicity, and/or the amphipathic nature of the residues) and it is therefore useful to group amino acids together in functional groups. Amino acids may be grouped together based on the properties of their side chains alone. In comparing orthologs, there are likely to be residues conserved for structural or catalytic reasons. These sets may be described in the form of a Venn diagram (Livingstone C. D. and Barton G. J. (1993) “Protein sequence alignments: a strategy for the hierarchical analysis of residue conservation” Comput. Appl. Biosci. 9: 745-756) (Taylor W. R. (1986) “The classification of amino acid conservation” J. Theor. Biol. 119; 205-218). Conservative substitutions may be made, for example according to the table below which describes a generally accepted Venn diagram grouping of amino acids (see Table 8 below).

TABLE 8

| Set | | Sub-set | |
|---|---|---|---|
| Hydrophobic | F W Y H K M I L V A G C | Aromatic | F W Y H |
| | SEQ ID NO: 5241 | | SEQ ID NO: |
| | | | 5242 |
| | | Aliphatic | I L V |
| Polar | W Y H K R E D C S T N Q | Charged | H K R E D |
| | SEQ ID NO: 5243 | | SEQ ID NO: |
| | | | 5244 |
| | | Positively | H K R |
| | | charged | |
| | | Negatively | E D |
| | | charged | |
| Small | V C A G S P T N D | Tiny | A G S |
| | SEQ ID NO: 5245 | | |

[0453] In some embodiments, the modifications in Cas13 may comprise modification of one or more amino acid residues of the Cas13 protein (and/or may comprise modification of one or more amino acid residues of the Cas13 accessory protein). In some embodiments, the modifications in Cas13 may comprise modification of one or more amino acid residues located in a region which comprises residues which are positively charged in the unmodified Cas13 protein (and/or Cas13 accessory protein). In some embodiments, the modifications in Cas13 may comprise modification of one or more amino acid residues which are positively charged in the unmodified Cas13 protein (and/or Cas13 accessory protein). In some embodiments, the modifications in Cas13 may comprise modification of one or more amino acid residues which are not positively charged in the unmodified Cas13 protein (and/or Cas13 accessory protein). The modification may comprise modification of one or more amino acid residues which are uncharged in the unmodified Cas13 protein (and/or Cas13 accessory protein). The modification may comprise modification of one or more amino acid residues which are negatively charged in the unmodified Cas13 protein (and/or Cas13 accessory protein). The modification may comprise modification of one or more amino acid residues which are hydrophobic in the unmodified Cas13 protein (and/or Cas13 accessory protein). The modification may comprise modification of one or more amino acid residues which are polar in the unmodified Cas13 protein (and/or Cas13 accessory protein). The modification may comprise substitution of a hydrophobic amino acid or polar amino acid with a charged amino acid, which can be a negatively charged or positively charged amino acid. The modification may comprise substitution of a negatively charged amino acid with a positively charged or polar or hydrophobic amino acid. The modification may comprise substitution of a positively charged amino acid with a negatively charged or polar or hydrophobic amino acid.

[0454] Embodiments herein also include sequences (both polynucleotide or polypeptide) which may comprise homologous substitution (substitution and replacement are both used herein to mean the interchange of an existing amino acid residue or nucleotide, with an alternative residue or nucleotide) that may occur i.e., like-for-like substitution in the case of amino acids such as basic for basic, acidic for acidic, polar for polar, etc. Non-homologous substitution may also occur i.e., from one class of residue to another or alternatively involving the inclusion of unnatural amino acids such as ornithine (hereinafter referred to as Z), diaminobutyric acid ornithine (hereinafter referred to as B), norleucine ornithine (hereinafter referred to as O), pyriylalanine, thienylalanine, naphthylalanine and phenylglycine. Variant amino acid sequences may include suitable spacer groups that may be inserted between any two amino acid residues of the sequence including alkyl groups such as methyl, ethyl or propyl groups in addition to amino acid spacers such as glycine or β-alanine residues. A further form of variation, which involves the presence of one or more amino acid residues in peptoid form, may be well understood by those skilled in the art. For the avoidance of doubt, “the peptoid form” is used to refer to variant amino acid residues wherein the α-carbon substituent group is on the residue's nitrogen atom rather than the α-carbon. Processes for preparing peptides in the peptoid form are known in the art, for example Simon R J et al., PNAS (1992) 89(20), 9367-9371 and Horwell D C, Trends Biotechnol. (1995) 13(4), 132-134.

[0455] Homology modelling: Corresponding residues in other Cas13 orthologs can be identified by the methods of Zhang et al., 2012 (Nature; 490(7421): 556-60) and Chen et al., 2015 (PLoS Comput Biol; 11(5): e1004248)—a computational protein-protein interaction (PPI) method to predict interactions mediated by domain-motif interfaces. PrePPI (Predicting PPI), a structure based PPI prediction method, combines structural evidence with non-structural evidence using a Bayesian statistical framework. The method involves taking a pair query proteins and using structural alignment to identify structural representatives that correspond to either their experimentally determined structures or homology models. Structural alignment is further used to identify both close and remote structural neighbors by considering global and local geometric relationships. Whenever two neighbors of the structural representatives form a complex reported in the Protein Data Bank, this defines a template for modelling the interaction between the two query proteins. Models of a complex are created by superimposing the representative structures on their corresponding structural neighbor in the template. This approach is in Dey et al., 2013 (Prot Sci; 22: 359-66).

### Guide Sequences

[0456] The systems and compositions herein may further comprise one or more guide sequences. The guide sequences may hybridize or be capable of hybridizing with a target sequence. In embodiments of the invention the terms guide sequence and guide RNA and crRNA are used interchangeably as in foregoing cited documents such as WO 2014/093622 (PCT/US2013/074667). In general, a guide sequence is any polynucleotide sequence having sufficient complementarity with a target polynucleotide sequence to hybridize with the target sequence and direct sequence-specific binding of a CRISPR complex to the target sequence. In some embodiments, the degree of complementarity between a guide sequence and its corresponding target sequence, when optimally aligned using a suitable alignment algorithm, is about or more than about 50%, 60%, 75%, 80%, 85%, 90%, 95%, 97.5%, 99%, or more. Optimal alignment may be determined with the use of any suitable algorithm for aligning sequences, non-limiting example of which include the Smith-Waterman algorithm, the Needleman-Wunsch algorithm, algorithms based on the Burrows-Wheeler Transform (e.g., the Burrows Wheeler Aligner), ClustalW, Clustal X, BLAT, Novoalign (Novocraft Technologies; available at www.novocraft.com), ELAND (Illumina, San Diego, Calif.), SOAP (available at soap.genomics.org.cn), and Maq (available at maq.sourceforge.net). In some embodiments, a guide sequence is about or more than about 5, 10, 11, 12, 13, 14, 15, 16, 17, 18, 19, 20, 21, 22, 23, 24, 25, 26, 27, 28, 29, 30, 35, 40, 45, 50, 75, or more nucleotides in length. In some embodiments, a guide sequence is less than about 75, 50, 45, 40, 35, 30, 25, 20, 15, 12, or fewer nucleotides in length. Preferably the guide sequence is 10-30 nucleotides long, such as 30 nucleotides long. The ability of a guide sequence to direct sequence-specific binding of a CRISPR complex to a target sequence may be assessed by any suitable assay. For example, the components of a CRISPR system sufficient to form a CRISPR complex, including the guide sequence to be tested, may be provided to a host cell having the corresponding target sequence, such as by transfection with vectors encoding the components of the CRISPR sequence, followed by an assessment of preferential cleavage within the target sequence, such as by Surveyor assay as described herein. Similarly, cleavage of a target polynucleotide sequence may be evaluated in a test tube by providing the target sequence, components of a CRISPR complex, including the guide sequence to be tested and a control guide sequence different from the test guide sequence, and comparing binding or rate of cleavage at the target sequence between the test and control guide sequence reactions. Other assays are possible, and will occur to those skilled in the art. A guide sequence may be selected to target any target sequence. In some embodiments, the target sequence is a sequence within a genome of a cell. Exemplary target sequences include those that are unique in the target genome.

[0457] As used herein, the term “crRNA” or “guide RNA” or “single guide RNA” or “sgRNA” or “one or more nucleic acid components” of a Type VI CRISPR-Cas locus effector protein comprises any polynucleotide sequence having sufficient complementarity with a target nucleic acid sequence to hybridize with the target nucleic acid sequence and direct sequence-specific binding of a RNA-targeting complex to the target RNA sequence.

[0458] In some examples, the composition may comprise a Cas protein and a heterologous guide sequence, e.g., a guide sequence and the Cas protein does not exist in the same cell or the same species in nature.

[0459] In certain embodiments, the CRISPR system as provided herein can make use of a crRNA or analogous polynucleotide comprising a guide sequence, wherein the polynucleotide is an RNA, a DNA or a mixture of RNA and DNA, and/or wherein the polynucleotide comprises one or more nucleotide analogs. The sequence can comprise any structure, including but not limited to a structure of a native crRNA, such as a bulge, a hairpin or a stem loop structure. In certain embodiments, the polynucleotide comprising the guide sequence forms a duplex with a second polynucleotide sequence which can be an RNA or a DNA sequence.

[0460] In certain embodiments, guides of the invention comprise non-naturally occurring nucleic acids and/or non-naturally occurring nucleotides and/or nucleotide analogs, and/or chemically modifications. Non-naturally occurring nucleic acids can include, for example, mixtures of naturally and non-naturally occurring nucleotides. Non-naturally occurring nucleotides and/or nucleotide analogs may be modified at the ribose, phosphate, and/or base moiety. In an embodiment of the invention, a guide nucleic acid comprises ribonucleotides and non-ribonucleotides. In one such embodiment, a guide comprises one or more ribonucleotides and one or more deoxyribonucleotides. In an embodiment of the invention, the guide comprises one or more non-naturally occurring nucleotide or nucleotide analog such as a nucleotide with phosphorothioate linkage, boranophosphate linkage, a locked nucleic acid (LNA) nucleotides comprising a methylene bridge between the 2′ and 4′ carbons of the ribose ring, or bridged nucleic acids (BNA). Other examples of modified nucleotides include 2′-O-methyl analogs, 2′-deoxy analogs, 2-thiouridine analogs, N6-methyladenosine analogs, or 2′-fluoro analogs. Further examples of modified bases include, but are not limited to, 2-aminopurine, 5-bromo-uridine, pseudouridine (Ψ), N1-methylpseudouridine (mePΨ), 5-methoxyuridine(5moU), inosine, 7-methylguanosine. Examples of guide RNA chemical modifications include, without limitation, incorporation of 2′-O-methyl (M), 2′-O-methyl 3′phosphorothioate (MS), S-constrained ethyl (cEt), or 2′-O-methyl 3′thioPACE (MSP) at one or more terminal nucleotides. Such chemically modified guide RNAs can comprise increased stability and increased activity as compared to unmodified guide RNAs, though on-target vs. off-target specificity is not predictable. (See, Hendel, 2015, Nat Biotechnol. 33(9):985-9, doi: 10.1038/nbt.3290, published online 29 Jun. 2015; Allerson et al., J. Med. Chem. 2005, 48:901-904; Bramsen et al., Front. Genet., 2012, 3:154; Deng et al., PNAS, 2015, 112:11870-11875; Sharma et al., MedChemComm., 2014, 5:1454-1471; Li et al., Nature Biomedical Engineering, 2017, 1, 0066 DOI: 10.1038/s41551-017-0066).

[0461] In some embodiments, the 5′ and/or 3′ end of a guide RNA is modified by a variety of functional moieties including fluorescent dyes, polyethylene glycol, cholesterol, proteins, or detection tags. (See Kelly et al., 2016, J. Biotech. 233:74-83). In certain embodiments, a guide comprises ribonucleotides in a region that binds to a target DNA and one or more deoxyribonucleotides and/or nucleotide analogs in a region that binds to Cas9, Cpf1, or C2c1. In an embodiment of the invention, deoxyribonucleotides and/or nucleotide analogs are incorporated in engineered guide structures, such as, without limitation, 5′ and/or 3′ end, stem-loop regions, and the seed region. In certain embodiments, the modification is not in the 5′-handle of the stem-loop regions. Chemical modification in the 5′-handle of the stem-loop region of a guide may abolish its function (see Li, et al., Nature Biomedical Engineering, 2017, 1:0066). In certain embodiments, at least 1, 2, 3, 4, 5, 6, 7, 8, 9, 10, 11, 12, 13, 14, 15, 16, 17, 18, 19, 20, 21, 22, 23, 24, 25, 26, 27, 28, 29, 30, 35, 40, 45, 50, or 75 nucleotides of a guide is chemically modified. In some embodiments, 3-5 nucleotides at either the 3′ or the 5′ end of a guide is chemically modified. In some embodiments, only minor modifications are introduced in the seed region, such as 2′-F modifications. In some embodiments, 2′-F modification is introduced at the 3′ end of a guide. In certain embodiments, three to five nucleotides at the 5′ and/or the 3′ end of the guide are chemically modified with 2′-O-methyl (M), 2′-O-methyl-3′-phosphorothioate (MS), S-constrained ethyl(cEt), or 2′-O-methyl-3′-thioPACE (MSP). Such modification can enhance genome editing efficiency (see Hendel et al., Nat. Biotechnol. (2015) 33(9): 985-989). In certain embodiments, all of the phosphodiester bonds of a guide are substituted with phosphorothioates (PS) for enhancing levels of gene disruption. In certain embodiments, more than five nucleotides at the 5′ and/or the 3′ end of the guide are chemically modified with 2′-O-Me, 2′-F or S-constrained ethyl(cEt). Such chemically modified guide can mediate enhanced levels of gene disruption (see Ragdarm et al., 0215, PNAS, E7110-E7111). In an embodiment of the invention, a guide is modified to comprise a chemical moiety at its 3′ and/or 5′ end. Such moieties include, but are not limited to amine, azide, alkyne, thio, dibenzocyclooctyne (DBCO), or Rhodamine. In certain embodiments, the chemical moiety is conjugated to the guide by a linker, such as an alkyl chain. In certain embodiments, the chemical moiety of the modified guide can be used to attach the guide to another molecule, such as DNA, RNA, protein, or nanoparticles. Such chemically modified guide can be used to identify or enrich cells generically edited by a CRISPR system (see Lee et al., eLife, 2017, 6:e25312, DOI:10.7554)

[0462] In some embodiments, the modification to the guide is a chemical modification, an insertion, a deletion or a split. In some embodiments, the chemical modification includes, but is not limited to, incorporation of 2′-O-methyl (M) analogs, 2′-deoxy analogs, 2-thiouridine analogs, N6-methyladenosine analogs, 2′-fluoro analogs, 2-aminopurine, 5-bromo-uridine, pseudouridine (Ψ), N1-methylpseudouridine (me1Ψ), 5-methoxyuridine(5moU), inosine, 7-methylguanosine, 2′-O-methyl-3′-phosphorothioate (MS), S-constrained ethyl(cEt), phosphorothioate (PS), or 2′-O-methyl-3′-thioPACE (MSP). In some embodiments, the guide comprises one or more of phosphorothioate modifications. In certain embodiments, at least 1, 2, 3, 4, 5, 6, 7, 8, 9, 10, 11, 12, 13, 14, 15, 16, 17, 18, 19, 20, or 25 nucleotides of the guide are chemically modified. In certain embodiments, one or more nucleotides in the seed region are chemically modified. In certain embodiments, one or more nucleotides in the 3′-terminus are chemically modified. In certain embodiments, none of the nucleotides in the 5′-handle is chemically modified. In some embodiments, the chemical modification in the seed region is a minor modification, such as incorporation of a 2′-fluoro analog. In a specific embodiment, one nucleotide of the seed region is replaced with a 2′-fluoro analog. In some embodiments, 5 or 10 nucleotides in the 3′-terminus are chemically modified. Such chemical modifications at the 3′-terminus of the Cpf1 CrRNA improve gene cutting efficiency (see Li, et al., Nature Biomedical Engineering, 2017, 1:0066). In a specific embodiment, 5 nucleotides in the 3′-terminus are replaced with 2′-fluoro analogues. In a specific embodiment, 10 nucleotides in the 3′-terminus are replaced with 2′-fluoro analogues. In a specific embodiment, 5 nucleotides in the 3′-terminus are replaced with 2′-O-methyl (M) analogs.

[0463] In some embodiments, the loop of the 5′-handle of the guide is modified. In some embodiments, the loop of the 5′-handle of the guide is modified to have a deletion, an insertion, a split, or chemical modifications. In certain embodiments, the loop comprises 3, 4, or 5 nucleotides. In certain embodiments, the loop comprises the sequence of UCUU, UUUU, UAUU, or UGUU.

[0464] In one aspect, the guide comprises portions that are chemically linked or conjugated via a non-phosphodiester bond. In one aspect, the guide comprises, in non-limiting examples, direct repeat sequence portion and a targeting sequence portion that are chemically linked or conjugated via a non-nucleotide loop. In some embodiments, the portions are joined via a non-phosphodiester covalent linker. Examples of the covalent linker include but are not limited to a chemical moiety selected from the group consisting of carbamates, ethers, esters, amides, imines, amidines, aminotrizines, hydrozone, disulfides, thioethers, thioesters, phosphorothioates, phosphorodithioates, sulfonamides, sulfonates, fulfones, sulfoxides, ureas, thioureas, hydrazide, oxime, triazole, photolabile linkages, C—C bond forming groups such as Diels-Alder cyclo-addition pairs or ring-closing metathesis pairs, and Michael reaction pairs.

[0465] In some embodiments, portions of the guide are first synthesized using the standard phosphoramidite synthetic protocol (Herdewijn, P., ed., Methods in Molecular Biology Col 288, Oligonucleotide Synthesis: Methods and Applications, Humana Press, New Jersey (2012)). In some embodiments, the non-targeting guide portions can be functionalized to contain an appropriate functional group for ligation using the standard protocol known in the art (Hermanson, G. T., Bioconjugate Techniques, Academic Press (2013)). Examples of functional groups include, but are not limited to, hydroxyl, amine, carboxylic acid, carboxylic acid halide, carboxylic acid active ester, aldehyde, carbonyl, chlorocarbonyl, imidazolylcarbonyl, hydrozide, semicarbazide, thio semicarbazide, thiol, maleimide, haloalkyl, sulfonyl, ally, propargyl, diene, alkyne, and azide. Once a non-targeting portions of a guide is functionalized, a covalent chemical bond or linkage can be formed between the two oligonucleotides. Examples of chemical bonds include, but are not limited to, those based on carbamates, ethers, esters, amides, imines, amidines, aminotrizines, hydrozone, disulfides, thioethers, thioesters, phosphorothioates, phosphorodithioates, sulfonamides, sulfonates, sulfones, sulfoxides, ureas, thioureas, hydrazide, oxime, triazole, photolabile linkages, C—C bond forming groups such as Diels-Alder cyclo-addition pairs or ring-closing metathesis pairs, and Michael reaction pairs.

[0466] In some embodiments, one or more portions of a guide can be chemically synthesized. In some embodiments, the chemical synthesis uses automated, solid-phase oligonucleotide synthesis machines with 2′-acetoxyethyl orthoester (2′-ACE) (Scaringe et al., J. Am. Chem. Soc. (1998) 120: 11820-11821; Scaringe, Methods Enzymol. (2000) 317: 3-18) or 2′-thionocarbamate (2′-TC) chemistry (Dellinger et al., J. Am. Chem. Soc. (2011) 133: 11540-11546; Hendel et al., Nat. Biotechnol. (2015) 33:985-989).

[0467] In some embodiments, the guide portions can be covalently linked using various bioconjugation reactions, loops, bridges, and non-nucleotide links via modifications of sugar, internucleotide phosphodiester bonds, purine and pyrimidine residues. Sletten et al., Angew. Chem. Int. Ed. (2009) 48:6974-6998; Manoharan, M. Curr. Opin. Chem. Biol. (2004) 8: 570-9; Behlke et al., Oligonucleotides (2008) 18: 305-19; Watts, et al., Drug. Discov. Today (2008) 13: 842-55; Shukla, et al., ChemMedChem (2010) 5: 328-49.

[0468] In some embodiments, the guide portions can be covalently linked using click chemistry. In some embodiments, guide portions can be covalently linked using a triazole linker. In some embodiments, guide portions can be covalently linked using Huisgen 1,3-dipolar cycloaddition reaction involving an alkyne and azide to yield a highly stable triazole linker (He et al., ChemBioChem (2015) 17: 1809-1812; WO 2016/186745). In some embodiments, guide portions are covalently linked by ligating a 5′-hexyne portion and a 3′-azide portion. In some embodiments, either or both of the 5′-hexyne guide portion and a 3′-azide guide portion can be protected with 2′-acetoxyethl orthoester (2′-ACE) group, which can be subsequently removed using Dharmacon protocol (Scaringe et al., J. Am. Chem. Soc. (1998) 120: 11820-11821; Scaringe, Methods Enzymol. (2000) 317: 3-18).

[0469] In some embodiments, guide portions can be covalently linked via a linker (e.g., a non-nucleotide loop) that comprises a moiety such as spacers, attachments, bioconjugates, chromophores, reporter groups, dye labeled RNAs, and non-naturally occurring nucleotide analogues. More specifically, suitable spacers for purposes of this invention include, but are not limited to, polyethers (e.g., polyethylene glycols, polyalcohols, polypropylene glycol or mixtures of ethylene and propylene glycols), polyamines group (e.g., spennine, spermidine and polymeric derivatives thereof), polyesters (e.g., poly(ethyl acrylate)), polyphosphodiesters, alkylenes, and combinations thereof. Suitable attachments include any moiety that can be added to the linker to add additional properties to the linker, such as but not limited to, fluorescent labels. Suitable bioconjugates include, but are not limited to, peptides, glycosides, lipids, cholesterol, phospholipids, diacyl glycerols and dialkyl glycerols, fatty acids, hydrocarbons, enzyme substrates, steroids, biotin, digoxigenin, carbohydrates, polysaccharides. Suitable chromophores, reporter groups, and dye-labeled RNAs include, but are not limited to, fluorescent dyes such as fluorescein and rhodamine, chemiluminescent, electrochemiluminescent, and bioluminescent marker compounds. The design of example linkers conjugating two RNA components are also described in WO 2004/015075.

[0470] The linker (e.g., a non-nucleotide loop) can be of any length. In some embodiments, the linker has a length equivalent to about 0-16 nucleotides. In some embodiments, the linker has a length equivalent to about 0-8 nucleotides. In some embodiments, the linker has a length equivalent to about 0-4 nucleotides. In some embodiments, the linker has a length equivalent to about 2 nucleotides. Example linker design is also described in WO2011/008730.

[0471] In some embodiments, the degree of complementarity, when optimally aligned using a suitable alignment algorithm, is about or more than about 50%, 60%, 75%, 80%, 85%, 90%, 95%, 97.5%, 99%, or more. Optimal alignment may be determined with the use of any suitable algorithm for aligning sequences, non-limiting example of which include the Smith-Waterman algorithm, the Needleman-Wunsch algorithm, algorithms based on the Burrows-Wheeler Transform (e.g., the Burrows Wheeler Aligner), ClustalW, Clustal X, BLAT, Novoalign (Novocraft Technologies; available at www.novocraft.com), ELAND (Illumina, San Diego, Calif.), SOAP (available at soap.genomics.org.cn), and Maq (available at maq.sourceforge.net). The ability of a guide sequence (within a RNA-targeting guide RNA or crRNA) to direct sequence-specific binding of a nucleic acid-targeting complex to a target nucleic acid sequence may be assessed by any suitable assay. For example, the components of a RNA-targeting CRISPR-Cas system sufficient to form a nucleic acid-targeting complex, including the guide sequence to be tested, may be provided to a host cell having the corresponding target nucleic acid sequence, such as by transfection with vectors encoding the components of the nucleic acid-targeting complex, followed by an assessment of preferential targeting (e.g., cleavage) within the target nucleic acid sequence, such as by Surveyor assay as described herein. Similarly, cleavage of a target nucleic acid sequence may be evaluated in a test tube by providing the target nucleic acid sequence, components of a nucleic acid-targeting complex, including the guide sequence to be tested and a control guide sequence different from the test guide sequence, and comparing binding or rate of cleavage at the target sequence between the test and control guide sequence reactions. Other assays are possible, and will occur to those skilled in the art. A guide sequence, and hence a RNA-targeting guide RNA or crRNA may be selected to target any target nucleic acid sequence. The target sequence may be DNA. The target sequence may be any RNA sequence. In some embodiments, the target sequence may be a sequence within a RNA molecule selected from the group consisting of messenger RNA (mRNA), pre-mRNA, ribosomal RNA (rRNA), transfer RNA (tRNA), micro-RNA (miRNA), small interfering RNA (siRNA), small nuclear RNA (snRNA), small nucleolar RNA (snoRNA), double stranded RNA (dsRNA), non-coding RNA (ncRNA), long non-coding RNA (lncRNA), and small cytoplasmatic RNA (scRNA). In some preferred embodiments, the target sequence may be a sequence within a RNA molecule selected from the group consisting of mRNA, pre-mRNA, and rRNA. In some preferred embodiments, the target sequence may be a sequence within a RNA molecule selected from the group consisting of ncRNA, and lncRNA. In some more preferred embodiments, the target sequence may be a sequence within an mRNA molecule or a pre-mRNA molecule.

[0472] In some embodiments, a RNA-targeting guide RNA or crRNA is selected to reduce the degree secondary structure within the RNA-targeting guide RNA or crRNA. In some embodiments, about or less than about 75%, 50%, 40%, 30%, 25%, 20%, 15%, 10%, 5%, 1%, or fewer of the nucleotides of the RNA-targeting guide RNA participate in self-complementary base pairing when optimally folded. Optimal folding may be determined by any suitable polynucleotide folding algorithm. Some programs are based on calculating the minimal Gibbs free energy. An example of one such algorithm is mFold, as described by Zuker and Stiegler (Nucleic Acids Res. 9 (1981), 133-148). Another example folding algorithm is the online webserver RNAfold, developed at Institute for Theoretical Chemistry at the University of Vienna, using the centroid structure prediction algorithm (see e.g., A. R. Gruber et al., 2008, Cell 106(1): 23-24; and P A Carr and G M Church, 2009, Nature Biotechnology 27(12): 1151-62).

[0473] In some embodiments, a nucleic acid-targeting guide is designed or selected to modulate intermolecular interactions among guide molecules, such as among stem-loop regions of different guide molecules. It will be appreciated that nucleotides within a guide that base-pair to form a stem-loop are also capable of base-pairing to form an intermolecular duplex with a second guide and that such an intermolecular duplex would not have a secondary structure compatible with CRISPR complex formation. Accordingly, is useful to select or design DR sequences in order to modulate stem-loop formation and CRISPR complex formation. In some embodiments, about or less than about 75%, 50%, 40%, 30%, 25%, 20%, 15%, 10%, 5%, 1%, or fewer of nucleic acid-targeting guides are in intermolecular duplexes. It will be appreciated that stem-loop variation will often be within limits imposed by DR-CRISPR effector interactions. One way to modulate stem-loop formation or change the equilibrium between stem-loop and intermolecular duplex is to vary nucleotide pairs in the stem of the stem-loop of a DR. For example, in one embodiment, a G-C pair is replaced by an A-U or U-A pair. In another embodiment, an A-U pair is substituted for a G-C or a C-G pair. In another embodiment, a naturally occurring nucleotide is replaced by a nucleotide analog. Another way to modulate stem-loop formation or change the equilibrium between stem-loop and intermolecular duplex is to modify the loop of the stem-loop of a DR. Without be bound by theory, the loop can be viewed as an intervening sequence flanked by two sequences that are complementary to each other. When that intervening sequence is not self-complementary, its effect will be to destabilize intermolecular duplex formation. The same principle applies when guides are multiplexed: while the targeting sequences may differ, it may be advantageous to modify the stem-loop region in the DRs of the different guides. Moreover, when guides are multiplexed, the relative activities of the different guides can be modulated by balancing the activity of each individual guide. In certain embodiments, the equilibrium between intermolecular stem-loops vs. intermolecular duplexes is determined. The determination may be made by physical or biochemical means and can be in the presence or absence of a CRISPR effector.

[0474] In certain embodiments, a guide RNA or crRNA may comprise, consist essentially of, or consist of a direct repeat (DR) sequence and a guide sequence or spacer sequence. In certain embodiments, the guide RNA or crRNA may comprise, consist essentially of, or consist of a direct repeat sequence fused or linked to a guide sequence or spacer sequence. In certain embodiments, the direct repeat sequence may be located upstream (i.e., 5′) from the guide sequence or spacer sequence. In other embodiments, the direct repeat sequence may be located downstream (i.e., 3′) from the guide sequence or spacer sequence. In other embodiments, multiple DRs (such as dual DRs) may be present.

[0475] In certain embodiments, the crRNA comprises a stem loop, preferably a single stem loop. In certain embodiments, the direct repeat sequence forms a stem loop, preferably a single stem loop.

[0476] In certain embodiments, the spacer length of the guide RNA is from 15 to 35 nt. In certain embodiments, the spacer length of the guide RNA is at least 15 nucleotides. In certain embodiments, the spacer length is from 15 to 17 nt, e.g., 15, 16, or 17 nt, from 17 to 20 nt, e.g., 17, 18, 19, or 20 nt, from 20 to 24 nt, e.g., 20, 21, 22, 23, or 24 nt, from 23 to 25 nt, e.g., 23, 24, or 25 nt, from 24 to 27 nt, e.g., 24, 25, 26, or 27 nt, from 27-30 nt, e.g., 27, 28, 29, or 30 nt, from 30-35 nt, e.g., 30, 31, 32, 33, 34, or 35 nt, or 35 nt or longer.

[0477] The “tracrRNA” sequence or analogous terms includes any polynucleotide sequence that has sufficient complementarity with a crRNA sequence to hybridize. In general, degree of complementarity is with reference to the optimal alignment of the sca sequence and tracr sequence, along the length of the shorter of the two sequences. Optimal alignment may be determined by any suitable alignment algorithm, and may further account for secondary structures, such as self-complementarity within either the sca sequence or tracr sequence. In some embodiments, the degree of complementarity between the tracr sequence and sca sequence along the length of the shorter of the two when optimally aligned is about or more than about 25%, 30%, 40%, 50%, 60%, 70%, 80%, 90%, 95%, 97.5%, 99%, or higher. In certain embodiments, the tracrRNA may not be required. Indeed, the CRISPR-Cas effector protein from Bergeyella zoohelcum and orthologs thereof do not require a tracrRNA to ensure cleavage of an RNA target.

[0478] In further detail, the assay is as follows for a RNA target, provided that a PFS sequence is required to direct recognition. Two E. coli strains are used in this assay. One carries a plasmid that encodes the endogenous effector protein locus from the bacterial strain. The other strain carries an empty plasmid (e.g. pACYC184, control strain). All possible 7 or 8 bp PFS sequences are presented on an antibiotic resistance plasmid (pUC19 with ampicillin resistance gene). The PFS is located next to the sequence of proto-spacer 1 (the RNA target to the first spacer in the endogenous effector protein locus). Two PFS or PAM libraries were cloned. One has a 8 random by 5′ of the proto-spacer (e.g. total of 65536 different PFS or PAM sequences=complexity). The other library has 7 random bp 3′ of the proto-spacer (e.g. total complexity is 16384 different PFSs). Both libraries were cloned to have in average 500 plasmids per possible PFS. Test strain and control strain were transformed with 5′PFS and 3′PFS library in separate transformations and transformed cells were plated separately on ampicillin plates. Recognition and subsequent cutting/interference with the plasmid renders a cell vulnerable to ampicillin and prevents growth. Approximately 12 h after transformation, all colonies formed by the test and control strains where harvested and plasmid RNA was isolated. Plasmid RNA was used as template for PCR amplification and subsequent deep sequencing. Representation of all PFSs in the untransformed libraries showed the expected representation of PFSs in transformed cells. Representation of all PFS or PAMs found in control strains showed the actual representation. Representation of all PFSs in test strain showed which PFSs are not recognized by the enzyme and comparison to the control strain allows extracting the sequence of the depleted PFS. In particular embodiments, the cleavage, such as the RNA cleavage is not PFS or PAM dependent. Indeed, for the Bergeyella zoohelcum Cas13b effector protein and its orthologs, RNA target cleavage appears to be PFS independent, and hence the Cas13 of the invention may act in a PFS or PAM independent fashion.

[0479] For minimization of toxicity and off-target effect, it will be important to control the concentration of RNA-targeting guide RNA delivered. Optimal concentrations of nucleic acid—targeting guide RNA can be determined by testing different concentrations in a cellular or non-human eukaryote animal model and using deep sequencing the analyze the extent of modification at potential off-target genomic loci. The concentration that gives the highest level of on-target modification while minimizing the level of off-target modification should be chosen for in vivo delivery. The RNA-targeting system is derived advantageously from a CRISPR-Cas system. In some embodiments, one or more elements of a RNA-targeting system is derived from a particular organism comprising an endogenous RNA-targeting system of a Cas13 proteins as herein-discussed.

### Dead Guide Sequences

[0480] In one aspect, the invention provides guide sequences which are modified in a manner which allows for formation of the CRISPR Cas complex and successful binding to the target, while at the same time, not either allowing for or not allowing for successful nuclease activity (i.e. without nuclease activity/without indel activity). For matters of explanation such modified guide sequences are referred to as “dead guides” or “dead guide sequences”. These dead guides or dead guide sequences can be thought of as catalytically inactive or conformationally inactive with regard to nuclease activity. Indeed, dead guide sequences may not sufficiently engage in productive base pairing with respect to the ability to promote catalytic activity or to distinguish on-target and off-target binding activity. Briefly, the assay involves synthesizing a CRISPR target RNA and guide RNAs comprising mismatches with the target RNA, combining these with the RNA targeting enzyme and analyzing cleavage based on gels based on the presence of bands generated by cleavage products, and quantifying cleavage based upon relative band intensities.

[0481] Hence, in a related aspect, the invention provides a non-naturally occurring or engineered composition RNA targeting CRISPR-Cas system comprising a functional RNA targeting enzyme as described herein, and guide RNA (gRNA) or crRNA wherein the gRNA or crRNA comprises a dead guide sequence whereby the gRNA is capable of hybridizing to a target sequence such that the RNA targeting CRISPR-Cas system is directed to a genomic locus of interest in a cell without detectable RNA cleavage activity of a non-mutant RNA targeting enzyme of the system. It is to be understood that any of the gRNAs or crRNAs according to the invention as described herein elsewhere may be used as dead gRNAs/crRNAs comprising a dead guide sequence.

[0482] The ability of a dead guide sequence to direct sequence-specific binding of a CRISPR complex to an RNA target sequence may be assessed by any suitable assay. For example, the components of a CRISPR-Cas system sufficient to form a CRISPR-Cas complex, including the dead guide sequence to be tested, may be provided to a host cell having the corresponding target sequence, such as by transfection with vectors encoding the components of the system, followed by an assessment of preferential cleavage within the target sequence.

[0483] As explained further herein, several structural parameters allow for a proper framework to arrive at such dead guides. Dead guide sequences can be typically shorter than respective guide sequences which result in active RNA cleavage. In particular embodiments, dead guides are 5%, 10%, 20%, 30%, 40%, 50%, shorter than respective guides directed to the same.

[0484] As explained below and known in the art, one aspect of gRNA or crRNA-RNA targeting specificity is the direct repeat sequence, which is to be appropriately linked to such guides. In particular, this implies that the direct repeat sequences are designed dependent on the origin of the RNA targeting enzyme. Structural data available for validated dead guide sequences may be used for designing CRISPR-Cas specific equivalents. Structural similarity between, e.g., the orthologous nuclease domains HEPN of two or more CRISPR-Cas effector proteins may be used to transfer design equivalent dead guides. Thus, the dead guide herein may be appropriately modified in length and sequence to reflect such CRISPR-Cas specific equivalents, allowing for formation of the CRISPR-Cas complex and successful binding to the target RNA, while at the same time, not allowing for successful nuclease activity.

[0485] Dead guides allow one to use gRNA or crRNA as a means for gene targeting, without the consequence of nuclease activity, while at the same time providing directed means for activation or repression. Guide RNA or crRNA comprising a dead guide may be modified to further include elements in a manner which allow for activation or repression of gene activity, in particular protein adaptors (e.g. aptamers) as described herein elsewhere allowing for functional placement of gene effectors (e.g. activators or repressors of gene activity). One example is the incorporation of aptamers, as explained herein and in the state of the art. By engineering the gRNA or crRNA comprising a dead guide to incorporate protein-interacting aptamers (Konermann et al., “Genome-scale transcription activation by an engineered CRISPR-Cas9 complex,” doi:10.1038/nature14136, incorporated herein by reference), one may assemble multiple distinct effector domains. Such may be modeled after natural processes.

### Prime Editing

[0486] The compositions and systems may be used for prime editing. In some embodiments, the compositions and systems may comprise a Cas protein, and RNA polymerase (e.g., RNA-dependent RNA polymerase) associated with the Cas, and a guide molecule.

[0487] In some embodiments, the Cas proteins herein may be used for prime editing. In some cases, the Cas protein may be a nickase, e.g., a RNA nickase. The Cas protein may be a dCas. In some cases, the Cas has one or more mutations. In some cases, the guide molecule may be a prime editor guide molecule.

[0488] The Cas protein may be associated with a RNA polymerase. The RNA polymerase may be fused to the C-terminus of a Cas protein. Alternatively or additionally, the RNA polymerase may be fused to the N-terminus of a Cas protein. The fusion may be via a linker and/or an adaptor protein. In some examples, the RNA polymerase may be a RNA-dependent RNA polymerase, which facilitates replication of RNA from an RNA template, e.g., the synthesis of an RNA strand complementary to a given RNA template.

[0489] The guide molecule for prime editing may be a prime editor guide molecule (also known as prime editing guide molecule) (pegRNA). In some examples, a pegRNA is a sgRNA comprising a primer binding sequence (PBS) and a template containing a desired RNA sequence (e.g., added at the 3′ end).

[0490] In some embodiments, the Cas protein herein may target DNA using a guide RNA containing a binding sequence that hybridizes to the target sequence on the DNA. The guide RNA may further comprise an editing sequence that contains new genetic information that replaces target DNA nucleotides. The small sizes of the Cas protein herein may allow easier packaging and delivery of the prime editing system, e.g., with a viral vector, e.g., AAV or lentiviral vector.

[0491] A single-strand break (a nick) may be generated on the target nucleic acid (e.g., RNA) by the Cas protein at the target site to expose a 3′-hydroxyl group, thus priming the RNA polymerase of an edit-encoding extension on the guide directly into the target site. These steps may result in a branched intermediate with two redundant single-stranded nucleic acid flaps: a 5′ flap that contains the unedited nucleic acid sequence, and a 3′ flap that contains the edited sequence copied from the guide RNA. The 5′ flaps may be removed by a structure-specific endonuclease, e.g., FEN122, which excises 5′ flaps generated during lagging-strand nucleic acid synthesis and long-patch base excision repair. The non-edited nucleic acid strand may be nicked to induce bias nucleic acid repair to preferentially replace the non-edited strand. Examples of prime editing systems and methods include those described in Anzalone A V et al., Search-and-replace genome editing without double-strand breaks or donor DNA, Nature. 2019 Oct. 21. doi: 10.1038/s41586-019-1711-4, which is incorporated by reference herein in its entirety. The reverse transcriptase in the examples may be replaced with an RNA polymerase (e.g., an RNA-dependent RNA polymerase).

[0492] The Cas protein may be used to prime-edit a single nucleotide on a target nucleic acid (e.g., RNA). Alternatively or additionally, the Cas protein may be used to prime-edit at least 2, at least 3, at least 4, at least 5, at least 6, at least 7, at least 8, at least 10, at least 11, at least 12, at least 13, at least 14, at least 15, at least 16, at least 17, at least 18, at least 19, at least 20, at least 21, at least 22, at least 23, at least 24, at least 25, at least 26, at least 27, at least 28, at least 29, at least 30, at least 40, at least 50, at least 60, at least 70, at least 80, at least 90, at least 100, at least 200, at least 300, at least 400, at least 500, at least 600, at least 700, at least 800, at least 900, or at least 10000 nucleotides on a target nucleic acid.

### Diagnostic and Detection Systems

[0493] The Type VI CRISPR proteins described herein can be leveraged for CRISPR-based diagnostics (CRISPR-Dx). CRISPR-Cas can be reprogrammed with guide molecules to provide a platform for specific RNA and DNA sensing. Upon recognition of its RNA or DNA target, activated CRISPR-Cas engages in “collateral” cleavage of nearby non-targeted nucleic acids (e.g., RNA and/or ssDNA). See Abudayyeh et al. “C2c2 is a single-component programmable RNA-guided RNA-targeting CRISPR effector.” Science. Aug. 5, 2016; 353(6299); Gootenberg et al. “Nucleic acid detection with CRISPR-Cas13a/C2c2” Science. Apr. 28, 2017; 356, 438-442.

### Collateral Activity

[0494] In some embodiments, the Cas proteins possess collateral activity, that is in certain environment, an activated Cas protein remains active following binding of a target sequence and continues to non-specifically cleave non-target oligonucleotides. This guide molecule-programmed collateral cleavage activity provides an ability to use Cas13 systems to detect the presence of a specific target oligonucleotide to trigger in vivo programmed cell death or in vitro non-specific RNA degradation that can serve as a readout. (Abudayyeh et al. 2016; East-Seletsky et al, 2016).

[0495] The programmability, specificity, and collateral activity of the RNA-guided Cas13 also make it an ideal switchable nuclease for non-specific cleavage of nucleic acids. In one embodiment, a Cas13 system is engineered to provide and take advantage of collateral non-specific cleavage of nucleic acids, such as ssDNA. In another embodiment, a Cas13 system is engineered to provide and take advantage of collateral non-specific cleavage of ssDNA. Accordingly, engineered Cas13 systems may provide platforms for nucleic acid detection and transcriptome manipulation, and inducing cell death. Cas13 may be developed for use as a mammalian transcript knockdown and binding tool. Cas13 may be capable of robust collateral cleavage of RNA and ssDNA when activated by sequence-specific targeted DNA binding.

[0496] In certain embodiments, Cas13 is provided or expressed in an in vitro system or in a cell, transiently or stably, and targeted or triggered to non-specifically cleave cellular nucleic acids. In one embodiment, Cas13 is engineered to knock down ssDNA, for example viral ssDNA. In another embodiment, Cas13 is engineered to knock down RNA. The system can be devised such that the knockdown is dependent on a target DNA present in the cell or in vitro system, or triggered by the addition of a target nucleic acid to the system or cell.

[0497] In an embodiment, the Cas13 system is engineered to non-specifically cleave RNA in a subset of cells distinguishable by the presence of an aberrant DNA sequence, for instance where cleavage of the aberrant DNA might be incomplete or ineffectual. In one non-limiting example, a DNA translocation that is present in a cancer cell and drives cell transformation is targeted. Whereas a subpopulation of cells that undergoes chromosomal DNA and repair may survive, non-specific collateral ribonuclease activity advantageously leads to cell death of potential survivors.

[0498] Collateral activity was recently leveraged for a highly sensitive and specific nucleic acid detection platform termed SHERLOCK that is useful for many clinical diagnoses (Gootenberg, J. S. et al. Nucleic acid detection with CRISPR-Cas13a/C2c2. Science 356, 438-442 (2017)).

[0499] According to the invention, engineered Cas13 systems are optimized for DNA or RNA endonuclease activity and can be expressed in mammalian cells and targeted to effectively knock down reporter molecules or transcripts in cells.

[0500] The collateral effect of engineered Cas13 with isothermal amplification provides a CRISPR-based diagnostic providing rapid DNA or RNA detection with high sensitivity and single-base mismatch specificity. The Cas13-based molecular detection platform is used to detect specific strains of virus, distinguish pathogenic bacteria, genotype human DNA, and identify cell-free tumor DNA mutations. Furthermore, reaction reagents can be lyophilized for cold-chain independence and long-term storage, and readily reconstituted on paper for field applications.

[0501] The ability to rapidly detect nucleic acids with high sensitivity and single-base specificity on a portable platform may aid in disease diagnosis and monitoring, epidemiology, and general laboratory tasks. Although methods exist for detecting nucleic acids, they have trade-offs among sensitivity, specificity, simplicity, cost, and speed.

[0502] This collateral activity allows the Type VI CRISPR-Cas systems disclosed herein to detect the presence of a specific RNA or DNA in vivo by triggering programmed cell death or by nonspecific degradation of labelled RNA or ssDNA. Thus, embodiments disclosed herein include nucleic acid detection systems with high sensitivity based on nucleic acid amplification and CRISPR-Cas-mediated collateral cleavage of a labelled detection oligonucleotide, allowing for real-time detection of the target. Conservation of non-specific single stranded DNA and RNA directed proteins will inevitably lead to further and, potentially, improved CRISPR proteins that demonstrate collateral cleavage and may be used for detection and offer greater breadth for multiplexed detection of nucleic acid targets in amplified and highly sensitive, especially SHERLOCK, diagnostic systems.

[0503] In certain example embodiments, a detection system comprises a Type VI Cas protein disclosed herein and guide molecule comprising a guide sequence configured to directed binding of the CRISPR-Cas complex to a target molecule and a labeled detection molecule (“RNA-based masking construct”). Type VI and Type V Cas proteins are known to possess different cutting motif preferences. See Gootenberg et al. “Multiplexed and portable nucleic acid detection platform with Cas13b, Cas12a, and Csm6.” Science. Apr. 27, 2018, 360:439-444; International Publication WO 2019/051318. Thus, embodiments disclosed herein may further comprised multiplex embodiments comprising two or more Type VI Cas proteins with different cutting preferences, or one or more Type VI Cas proteins and one or more Type V Cas proteins. Accordingly, in such embodiments, detection molecules are configured such that each class of detection molecule is only cleaved according the cleavage preferences of one of the Type VI or Type V Cas proteins, and thus only generate a detectable signal when cleaved by the corresponding ortholog. Each ortholog is matched with a guide to a different target RNA and thus collateral activity for that ortholog is only activated when it binds its cognate target RNA and the corresponding cognate detection molecule is cleaved only when the target is bound. In this way, multiple target RNA molecules may be detected.

[0504] For ease of reference, the following section describes different RNA-based masking constructs that may be used. However, the single strand DNA equivalent for use with Type VI Cas proteins is also contemplated. In certain example embodiments, a detection construct suppresses generation of a detectable positive signal, or the RNA-based masking construct suppresses generation of a detectable positive signal by masking the detectable positive signal, or generating a detectable negative signal instead, or the RNA-based masking construct comprises a silencing RNA that suppresses generation of a gene product encoded by a reporting construct, wherein the gene product generates the detectable positive signal when expressed.

[0505] In another example embodiment, a detection construct is a ribozyme that generates a negative detectable signal, and wherein the positive detectable signal is generated when the ribozyme is deactivated. In one example embodiment, the ribozyme converts a substrate to a first color and wherein the substrate converts to a second color when the ribozyme is deactivated. In another example embodiment, the RNA-based masking agent is an aptamer that sequesters an enzyme, wherein the enzyme generates a detectable signal upon release from the aptamer by acting upon a substrate, or the aptamer sequesters a pair of agents that when released from the aptamers combine to generate a detectable signal.

[0506] In another example embodiment, the RNA-based masking construct comprises an RNA oligonucleotide to which are attached a detectable ligand oligonucleotide and a masking component. In certain example embodiments, the detectable ligand is a fluorophore and the masking component is a quencher molecule.

[0507] In another aspect, the invention provides a method for detecting target nucleic acid (e.g.,) RNAs in samples, comprising: distributing a sample or set of samples into one or more individual discrete volumes, the individual discrete volumes comprising a CRISPR system comprising an effector protein, one or more guide RNAs, an RNA-based masking construct; incubating the sample or set of samples under conditions sufficient to allow binding of the one or more guide RNAs to one or more target molecules; activating the CRISPR effector protein via binding of the one or more guide RNAs to the one or more target molecules, wherein activating the CRISPR effector protein results in modification of the RNA-based masking construct such that a detectable positive signal is produced; and detecting the detectable positive signal, wherein detection of the detectable positive signal indicates a presence of one or more target molecules in the sample.

[0508] In some embodiments, the method for detecting a target nucleic acid in a sample comprising: contacting a sample with: an engineered CRISPR-Cas protein; at least one guide polynucleotide comprising a guide sequence capable of binding to the target nucleic acid and designed to form a complex with the engineered CRISPR-Cas; and a RNA-based masking construct comprising a non-target sequence; wherein the engineered CRISPR-Cas protein exhibits collateral RNase activity and cleaves the non-target sequence of the detection construct; and detecting a signal from cleavage of the non-target sequence, thereby detecting the target nucleic acid in the sample. In some embodiments, the method further comprises contacting the sample with reagents for amplifying the target nucleic acid. In some embodiments, the reagents for amplifying comprises isothermal amplification reaction reagents. In some embodiments, the isothermal amplification reagents comprise nucleic-acid sequence-based amplification, recombinase polymerase amplification, loop-mediated isothermal amplification, strand displacement amplification, helicase-dependent amplification, or nicking enzyme amplification reagents.

[0509] In some embodiments, the target nucleic acid is DNA molecule and the method further comprises contacting the target DNA molecule with a primer comprising an RNA polymerase site and RNA polymerase.

[0510] In some embodiments, the masking construct comprises: a. a silencing RNA that suppresses generation of a gene product encoded by a reporting construct, wherein the gene product generates the detectable positive signal when expressed; b. a ribozyme that generates the negative detectable signal, and wherein the positive detectable signal is generated when the ribozyme is deactivated; or c. a ribozyme that converts a substrate to a first color and wherein the substrate converts to a second color when the ribozyme is deactivated; d. an aptamer and/or comprises a polynucleotide-tethered inhibitor; e. a polynucleotide to which a detectable ligand and a masking component are attached; f a nanoparticle held in aggregate by bridge molecules, wherein at least a portion of the bridge molecules comprises a polynucleotide, and wherein the solution undergoes a color shift when the nanoparticle is disbursed in solution; g. a quantum dot or fluorophore linked to one or more quencher molecules by a linking molecule, wherein at least a portion of the linking molecule comprises a polynucleotide; h. a polynucleotide in complex with an intercalating agent, wherein the intercalating agent changes absorbance upon cleavage of the polynucleotide; or 1. two fluorophores tethered by a polynucleotide that undergo a shift in fluorescence when released from the polynucleotide.

[0511] In some embodiments, the aptamer a. comprises a polynucleotide-tethered inhibitor that sequesters an enzyme, wherein the enzyme generates a detectable signal upon release from the aptamer or polynucleotide-tethered inhibitor by acting upon a substrate; or b. is an inhibitory aptamer that inhibits an enzyme and prevents the enzyme from catalyzing generation of a detectable signal from a substrate or wherein the polynucleotide-tethered inhibitor inhibits an enzyme and prevents the enzyme from catalyzing generation of a detectable signal from a substrate; or c. sequesters a pair of agents that when released from the aptamers combine to generate a detectable signal.

[0512] In another aspect, the invention provides systems, compositions and methods for detecting polypeptides or polynucleotides in samples (e.g., one or more in vitro samples). Such systems or compositions may comprise a Cas protein herein; one or more detection aptamers, each designed to bind to one of the one or more target polypeptides, each detection aptamer comprising a masked promoter binding site or masked primer binding site and a trigger sequence template; and an oligonucleotide-based masking construct comprising a non-target sequence. The trigger sequence template may be used to synthesize a trigger RNA. The trigger sequence may bind to the guide molecules to activate a CRISPR system. In certain examples, the systems or compositions comprise a Cas protein herein; at least one guide polynucleotide comprising a guide sequence designed to have a degree of complementarity (e.g., at least 60%, at least 70%, at least 80%, at least 90%, at least 95%, at least 99%, or 100%) with the one or more target sequences, and designed to form a complex with the Cas protein; and an oligonucleotide-based masking construct comprising a non-target sequence, wherein the Cas protein exhibits collateral nuclease activity and cleaves the non-target sequence of the oligo-nucleotide based masking construct once activated by the one or more target sequences.

[0513] The methods may comprise: distributing a sample or set of samples into a set of individual discrete volumes, the individual discrete volumes comprising peptide detection aptamers, a CRISPR system comprising an effector protein, one or more guide RNAs, an RNA-based masking construct, wherein the peptide detection aptamers comprising a masked RNA polymerase site and configured to bind one or more target molecules; incubating the sample or set of samples under conditions sufficient to allow binding of the peptide detection aptamers to the one or more target molecules, wherein binding of the aptamer to a corresponding target molecule exposes the RNA polymerase binding site resulting in RNA synthesis of a trigger RNA; activating the CRISPR effector protein via binding of the one or more guide RNAs to the trigger RNA, wherein activating the CRISPR effector protein results in modification of the RNA-based masking construct such that a detectable positive signal is produced; and detecting the detectable positive signal, wherein detection of the detectable positive signal indicates a presence of one or more target molecules in a sample.

[0514] In certain example embodiments, the one or more guide RNAs are designed to bind to one or more target molecules that are diagnostic for a disease state. In certain other example embodiments, the disease state is an infection, an organ disease, a blood disease, an immune system disease, a cancer, a brain and nervous system disease, an endocrine disease, a pregnancy or childbirth-related disease, an inherited disease, or an environmentally-acquired disease, cancer, or a fungal infection, a bacterial infection, a parasite infection, or a viral infection.

[0515] In certain example embodiments, the RNA-based masking construct suppresses generation of a detectable positive signal, or the RNA-based masking construct suppresses generation of a detectable positive signal by masking the detectable positive signal, or generating a detectable negative signal instead, or the RNA-based masking construct comprises a silencing RNA that suppresses generation of a gene product encoded by a reporting construct, wherein the gene product generates the detectable positive signal when expressed, or the RNA-based masking construct is a ribozyme that generates the negative detectable signal, and wherein the positive detectable signal is generated when the ribozyme is inactivated. In other example embodiments, the ribozyme converts a substrate to a first state and wherein the substrate converts to a second state when the ribozyme is inactivated, or the RNA-based masking agent is an aptamer, or the aptamer sequesters an enzyme, wherein the enzyme generates a detectable signal upon release from the aptamer by acting upon a substrate, or the aptamer sequesters a pair of agents that when released from the aptamers combine to generate a detectable signal. In still further embodiments, the RNA-based masking construct comprises an RNA oligonucleotide with a detectable ligand on a first end of the RNA oligonucleotide and a masking component on a second end of the RNA oligonucleotide, or the detectable ligand is a fluorophore and the masking component is a quencher molecule.

[0516] Such systems may be further combined with amplification reagents, including isothermal amplification reagents to amplify the target DNA or RNA that when combined with the collateral effect provides assays of increased sensitivity. See Gootenberg, J. S. et al. Nucleic acid detection with CRISPR-Cas13a/C2c2. Science 356, 438-442 (2017). Isothermal amplification reagents may comprise helicase isothermal based amplification reagents (See International Application WO 2020/006036), transposase isothermal based amplification reagents (International Application WO 2020/006049) or nickase isothermal based amplification reagents (See International Publication WO 2020/006067). In an aspect, the isothermal amplification reagents may be utilized with a thermostable CRISPR-Cas protein. The combination of thermostable protein and isothermal amplification reagents may be utilized to further improve reaction times for detection and diagnostics.

[0517] Thus, the Type VI proteins, including the specific examples provided below, and CRISPR-Cas complexes disclosed herein may be further combined with a detection construct, the cleavage of which generates a detectable signal indicating detection of a target RNA by the CRISPR-Cas complex.

[0518] The ability to rapidly detect nucleic acids with high sensitivity and single-base specificity on a portable platform may aid in disease diagnosis and monitoring, epidemiology, and general laboratory tasks. Although methods exist for detecting nucleic acids, they have trade-offs among sensitivity, specificity, simplicity, cost, and speed. Further specific examples are provided below.

[0519] In another aspect, the present disclosure provides a non-naturally occurring or engineered composition comprising the Cas protein that is linked to an inactive first portion of an enzyme or reporter moiety. The enzyme or reporter moiety is reconstituted when contacted with a complementary portion of the enzyme or reporter moiety. The enzyme or reporter moiety comprises a proteolytic enzyme. In some examples, the Cas protein comprises a first Cas protein and a second Cas protein linked to the complementary portion of the enzyme or reporter moiety. Such compositions may further comprise i) a first guide capable of forming a complex with the first Cas protein and hybridizing to a first target sequence of a target nucleic acid; and ii) a second guide capable of forming a complex with the second Cas protein, and hybridizing to a second target sequence of the target nucleic acid.

### Polynucleotides and Vectors

[0520] The systems herein may comprise one or more polynucleotides. The polynucleotide(s) may comprise coding sequences of Cas protein(s), guide sequences, or any combination thereof. The present disclosure further provides vectors or vector systems comprising one or more polynucleotides herein. The vectors or vector systems include those described in the delivery sections herein.

[0521] The terms “polynucleotide”, “nucleotide”, “nucleotide sequence”, “nucleic acid” and “oligonucleotide” are used interchangeably. They refer to a polymeric form of nucleotides of any length, either deoxyribonucleotides or ribonucleotides, or analogs thereof. Polynucleotides may have any three dimensional structure, and may perform any function, known or unknown. The following are non-limiting examples of polynucleotides: coding or non-coding regions of a gene or gene fragment, loci (locus) defined from linkage analysis, exons, introns, messenger RNA (mRNA), transfer RNA, ribosomal RNA, short interfering RNA (siRNA), short-hairpin RNA (shRNA), micro-RNA (miRNA), ribozymes, cDNA, recombinant polynucleotides, branched polynucleotides, plasmids, vectors, isolated DNA of any sequence, isolated RNA of any sequence, nucleic acid probes, and primers. The term also encompasses nucleic-acid-like structures with synthetic backbones, see, e.g., Eckstein, 1991; Baserga et al., 1992; Milligan, 1993; WO 97/03211; WO 96/39154; Mata, 1997; Strauss-Soukup, 1997; and Samstag, 1996. A polynucleotide may comprise one or more modified nucleotides, such as methylated nucleotides and nucleotide analogs. If present, modifications to the nucleotide structure may be imparted before or after assembly of the polymer. The sequence of nucleotides may be interrupted by non-nucleotide components. A polynucleotide may be further modified after polymerization, such as by conjugation with a labeling component. As used herein the term “wild type” is a term of the art understood by skilled persons and means the typical form of an organism, strain, gene or characteristic as it occurs in nature as distinguished from mutant or variant forms. A “wild type” can be a base line. As used herein the term “variant” should be taken to mean the exhibition of qualities that have a pattern that deviates from what occurs in nature. The terms “non-naturally occurring” or “engineered” are used interchangeably and indicate the involvement of the hand of man. The terms, when referring to nucleic acid molecules or polypeptides mean that the nucleic acid molecule or the polypeptide is at least substantially free from at least one other component with which they are naturally associated in nature and as found in nature. “Complementarity” refers to the ability of a nucleic acid to form hydrogen bond(s) with another nucleic acid sequence by either traditional Watson-Crick base pairing or other non-traditional types. A percent complementarity indicates the percentage of residues in a nucleic acid molecule which can form hydrogen bonds (e.g., Watson-Crick base pairing) with a second nucleic acid sequence (e.g., 5, 6, 7, 8, 9, 10 out of 10 being 50%, 60%, 70%, 80%, 90%, and 100% complementary). “Perfectly complementary” means that all the contiguous residues of a nucleic acid sequence will hydrogen bond with the same number of contiguous residues in a second nucleic acid sequence. “Substantially complementary” as used herein refers to a degree of complementarity that is at least 60%, 65%, 70%, 75%, 80%, 85%, 90%, 95%, 97%, 98%, 99%, or 100% over a region of 8, 9, 10, 11, 12, 13, 14, 15, 16, 17, 18, 19, 20, 21, 22, 23, 24, 25, 30, 35, 40, 45, 50, or more nucleotides, or refers to two nucleic acids that hybridize under stringent conditions. As used herein, “stringent conditions” for hybridization refer to conditions under which a nucleic acid having complementarity to a target sequence predominantly hybridizes with the target sequence, and substantially does not hybridize to non-target sequences. Stringent conditions are generally sequence-dependent, and vary depending on a number of factors. In general, the longer the sequence, the higher the temperature at which the sequence specifically hybridizes to its target sequence. Non-limiting examples of stringent conditions are described in detail in Tijssen (1993), Laboratory Techniques In Biochemistry And Molecular Biology-Hybridization With Nucleic Acid Probes Part I, Second Chapter “Overview of principles of hybridization and the strategy of nucleic acid probe assay”, Elsevier, N.Y. Where reference is made to a polynucleotide sequence, then complementary or partially complementary sequences are also envisaged. These are preferably capable of hybridizing to the reference sequence under highly stringent conditions. Generally, in order to maximize the hybridization rate, relatively low-stringency hybridization conditions are selected: about 20 to 25° C. lower than the thermal melting point (Tm). The Tm is the temperature at which 50% of specific target sequence hybridizes to a perfectly complementary probe in solution at a defined ionic strength and pH. Generally, in order to require at least about 85% nucleotide complementarity of hybridized sequences, highly stringent washing conditions are selected to be about 5 to 15° C. lower than the Tm. A sequence capable of hybridizing with a given sequence is referred to as the “complement” of the given sequence.

[0522] As used herein, the term “genomic locus” or “locus” (plural loci) is the specific location of a gene or DNA sequence on a chromosome. A “gene” refers to stretches of DNA or RNA that encode a polypeptide or an RNA chain that has functional role to play in an organism and hence is the molecular unit of heredity in living organisms. For the purpose of this invention, it may be considered that genes include regions which regulate the production of the gene product, whether or not such regulatory sequences are adjacent to coding and/or transcribed sequences. Accordingly, a gene includes, but is not necessarily limited to, promoter sequences, terminators, translational regulatory sequences such as ribosome binding sites and internal ribosome entry sites, enhancers, silencers, insulators, boundary elements, replication origins, matrix attachment sites and locus control regions. As used herein, “expression of a genomic locus” or “gene expression” is the process by which information from a gene is used in the synthesis of a functional gene product. The products of gene expression are often proteins, but in non-protein coding genes such as rRNA genes or tRNA genes, the product is functional RNA. The process of gene expression is used by all known life—eukaryotes (including multicellular organisms), prokaryotes (bacteria and archaea) and viruses to generate functional products to survive. As used herein “expression” of a gene or nucleic acid encompasses not only cellular gene expression, but also the transcription and translation of nucleic acid(s) in cloning systems and in any other context. As used herein, “expression” also refers to the process by which a polynucleotide is transcribed from a DNA template (such as into and mRNA or other RNA transcript) and/or the process by which a transcribed mRNA is subsequently translated into peptides, polypeptides, or proteins. Transcripts and encoded polypeptides may be collectively referred to as “gene product.” If the polynucleotide is derived from genomic DNA, expression may include splicing of the mRNA in a eukaryotic cell. The terms “polypeptide”, “peptide” and “protein” are used interchangeably herein to refer to polymers of amino acids of any length. The polymer may be linear or branched, it may comprise modified amino acids, and it may be interrupted by non-amino acids. The terms also encompass an amino acid polymer that has been modified; for example, disulfide bond formation, glycosylation, lipidation, acetylation, phosphorylation, or any other manipulation, such as conjugation with a labeling component. As used herein the term “amino acid” includes natural and/or unnatural or synthetic amino acids, including glycine and both the D or L optical isomers, and amino acid analogs and peptidomimetics. As used herein, the term “domain” or “protein domain” refers to a part of a protein sequence that may exist and function independently of the rest of the protein chain. As described in aspects of the invention, sequence identity is related to sequence homology. Homology comparisons may be conducted by eye, or more usually, with the aid of readily available sequence comparison programs. These commercially available computer programs may calculate percent (%) homology between two or more sequences and may also calculate the sequence identity shared by two or more amino acid or nucleic acid sequences.

[0523] In certain embodiments, the polynucleotide sequence is recombinant DNA. In further embodiments, the polynucleotide sequence further comprises additional sequences as described elsewhere herein. In certain embodiments, the nucleic acid sequence is synthesized in vitro.

[0524] Aspects of the invention relate to polynucleotide molecules that encode one or more components of the CRISPR-Cas system or Cas protein as referred to in any embodiment herein. In certain embodiments, the polynucleotide molecules may comprise further regulatory sequences. By means of guidance and not limitation, the polynucleotide sequence can be part of an expression plasmid, a minicircle, a lentiviral vector, a retroviral vector, an adenoviral or adeno-associated viral vector, a piggyback vector, or a tol2 vector. In certain embodiments, the polynucleotide sequence may be a bicistronic expression construct. In further embodiments, the isolated polynucleotide sequence may be incorporated in a cellular genome. In yet further embodiments, the isolated polynucleotide sequence may be part of a cellular genome. In further embodiments, the isolated polynucleotide sequence may be comprised in an artificial chromosome. In certain embodiments, the 5′ and/or 3′ end of the isolated polynucleotide sequence may be modified to improve the stability of the sequence of actively avoid degradation. In certain embodiments, the isolated polynucleotide sequence may be comprised in a bacteriophage. In other embodiments, the isolated polynucleotide sequence may be contained in agrobacterium species. In certain embodiments, the isolated polynucleotide sequence is lyophilized.

### Codon Optimization

[0525] Aspects of the invention relate to polynucleotide molecules that encode one or more components of one or more CRISPR-Cas systems as described in any of the embodiments herein, wherein at least one or more regions of the polynucleotide molecule may be codon optimized for expression in a eukaryotic cell. In certain embodiments, the polynucleotide molecules that encode one or more components of one or more CRISPR-Cas systems as described in any of the embodiments herein are optimized for expression in a mammalian cell or a plant cell.

[0526] An example of a codon optimized sequence, is in this instance a sequence optimized for expression in a eukaryote, e.g., humans (i.e. being optimized for expression in humans), or for another eukaryote, animal or mammal as herein discussed; see, e.g., SaCas9 human codon optimized sequence in International Patent Publication No. WO 2014/093622 (PCT/US2013/074667) as an example of a codon optimized sequence (from knowledge in the art and this disclosure, codon optimizing coding nucleic acid molecule(s), especially as to effector protein is within the ambit of the skilled artisan). Whilst this is preferred, it will be appreciated that other examples are possible and codon optimization for a host species other than human, or for codon optimization for specific organs is known. In some embodiments, an enzyme coding sequence encoding a DNA/RNA-targeting Cas protein is codon optimized for expression in particular cells, such as eukaryotic cells. The eukaryotic cells may be those of or derived from a particular organism, such as a plant or a mammal, including but not limited to human, or non-human eukaryote or animal or mammal as herein discussed, e.g., mouse, rat, rabbit, dog, livestock, or non-human mammal or primate. In some embodiments, processes for modifying the germ line genetic identity of human beings and/or processes for modifying the genetic identity of animals which are likely to cause them suffering without any substantial medical benefit to man or animal, and also animals resulting from such processes, may be excluded. In general, codon optimization refers to a process of modifying a nucleic acid sequence for enhanced expression in the host cells of interest by replacing at least one codon (e.g., about or more than about 1, 2, 3, 4, 5, 10, 15, 20, 25, 50, or more codons) of the native sequence with codons that are more frequently or most frequently used in the genes of that host cell while maintaining the native amino acid sequence.

[0527] Various species exhibit particular bias for certain codons of a particular amino acid. Codon bias (differences in codon usage between organisms) often correlates with the efficiency of translation of messenger RNA (mRNA), which is in turn believed to be dependent on, among other things, the properties of the codons being translated and the availability of particular transfer RNA (tRNA) molecules. The predominance of selected tRNAs in a cell is generally a reflection of the codons used most frequently in peptide synthesis. Accordingly, genes can be tailored for optimal gene expression in a given organism based on codon optimization. Codon usage tables are readily available, for example, at the “Codon Usage Database” available at www.kazusa.orjp/codon/ and these tables can be adapted in a number of ways. See Nakamura, Y., et al. “Codon usage tabulated from the international DNA sequence databases: status for the year 2000” Nucl. Acids Res. 28:292 (2000). Computer algorithms for codon optimizing a particular sequence for expression in a particular host cell are also available, such as Gene Forge (Aptagen; Jacobus, Pa.), are also available. In some embodiments, one or more codons (e.g., 1, 2, 3, 4, 5, 10, 15, 20, 25, 50, or more, or all codons) in a sequence encoding a DNA/RNA-targeting Cas protein corresponds to the most frequently used codon for a particular amino acid.

### Base Editing

[0528] The present disclosure also provides for a base editing system. In general, such a system may comprise a deaminase (e.g., an adenosine deaminase or cytidine deaminase) fused with a Cas protein. The deaminase may be a full-length protein or a portion of a full-length protein that has a deaminase activity. In some examples, the Cas protein may be a mutated form of the protein of SEQ ID NOs 1-4092, 4102-5203, and 5260-5265 or nucleic acid encoding thereof. The Cas protein may be a dead Cas protein or a Cas nickase protein. In certain examples, the system comprises a mutated form of an adenosine deaminase fused with a dead CRISPR-Cas or CRISPR-Cas nickase. The mutated form of the adenosine deaminase may have both adenosine deaminase and cytidine deaminase activities.

[0529] In one aspect, the present disclosure provides an engineered adenosine deaminase. The engineered adenosine deaminase may comprise one or more mutations herein. In some embodiments, the engineered adenosine deaminase has cytidine deaminase activity. In certain examples, the engineered adenosine deaminase has both cytidine deaminase activity and adenosine deaminase. In some cases, the modifications by base editors herein may be used for targeting post-translational signaling or catalysis.

[0530] The present disclosure also provides for base editing systems. In general, such a system may comprise a deaminase (e.g., an adenosine deaminase or cytidine deaminase) fused with a nucleic acid-guided nuclease, e.g., Cas protein. The Cas protein may be a dead Cas protein or a Cas nickase protein. In certain examples, the system comprises a mutated form of an adenosine deaminase fused with a dead CRISPR-Cas or CRISPR-Cas nickase. The mutated form of the adenosine deaminase may have both adenosine deaminase and cytidine deaminase activities.

[0531] The based editing systems may be capable of modifying a single nucleotide in a target polynucleotide. The modification may repair or correct a G→A or C→T point mutation, a T→C or A→G point mutation, or a pathogenic SNP. Accordingly, the compositions and systems may remedy a disease caused by a G→A or C→T point mutation, a T→C or A→G point mutation, or a pathogenic SNP.

[0532] In one aspect, the present disclosure provides an engineered adenosine deaminase. The engineered adenosine deaminase may comprise one or more mutations herein. In some embodiments, the engineered adenosine deaminase has cytidine deaminase activity. In certain examples, the engineered adenosine deaminase has both cytidine deaminase activity and adenosine deaminase. In some cases, the modifications by base editors herein may be used for targeting post-translational signaling or catalysis. In some embodiments, compositions herein comprise nucleotide sequence comprising encoding sequences for one or more components of a base editing system. A base-editing system may comprise a deaminase (e.g., an adenosine deaminase or cytidine deaminase) fused with a Cas protein or a variant thereof.

[0533] In another aspect, the compositions and systems have a size allowing to be packaged in a delivery particle, e.g., a virus such as AAV virus. In some examples, the present disclosure provides one or more polynucleotides encoding the Cas protein, guide sequence(s), and one or more deaminase (e.g., adenosine deaminase and its variants) in a single particle, e.g., an AAV. In a particular example, the present disclosure provides an AAV particle comprising a single vector comprising coding sequences for: (i) a small Cas13 protein (e.g., dead small Cas13b), (ii) one or more guide sequences, (iii) an adenosine deaminase.

[0534] In some cases, the adenosine deaminase is double-stranded RNA-specific adenosine deaminase (ADAR). Examples of ADARs include those described Yiannis A Savva et al., The ADAR protein family, Genome Biol. 2012; 13(12): 252, which is incorporated by reference in its entirety. In some examples, the ADAR may be hADAR1. In certain examples, the ADAR may be hADAR2. The sequence of hADAR2 may be that described under Accession No. AF525422.1.

[0535] In some cases, the deaminase may be a deaminase domain, e.g., a deaminase domain of ADAR (“ADAR-D”). In one example, the deaminase may be the deaminase domain of hADAR2 (“hADAR2-D), e.g., as described in Phelps K J et al., Recognition of duplex RNA by the deaminase domain of the RNA editing enzyme ADAR2. Nucleic Acids Res. 2015 January; 43(2):1123-32, which is incorporated by reference herein in its entirety. In a particular example, the hADAR2-D has a sequence comprising amino acid 299-701 of hADAR2, e.g., amino acid 299-701 of the sequence under Accession No. AF525422.1.

[0536] In certain examples, the system comprises a mutated form of an adenosine deaminase fused with a dead CRISPR-Cas or CRISPR-Cas nickase. The mutated form of the adenosine deaminase may have both adenosine deaminase and cytidine deaminase activities. In some embodiments, the adenosine deaminase may comprise one or more of the mutations: E488Q based on amino acid sequence positions of hADAR2, and mutations in a homologous ADAR protein corresponding to the above. In some embodiments, the adenosine deaminase may comprise one or more of the mutations: E488Q, V351G, based on amino acid sequence positions of hADAR2, and mutations in a homologous ADAR protein corresponding to the above. In some embodiments, the adenosine deaminase may comprise one or more of the mutations: E488Q, V351G, S486A, based on amino acid sequence positions of hADAR2, and mutations in a homologous ADAR protein corresponding to the above. In some embodiments, the adenosine deaminase may comprise one or more of the mutations: E488Q, V351G, S486A, T375S, based on amino acid sequence positions of hADAR2, and mutations in a homologous ADAR protein corresponding to the above. In some embodiments, the adenosine deaminase may comprise one or more of the mutations: E488Q, V351G, S486A, T375S, S370C, based on amino acid sequence positions of hADAR2, and mutations in a homologous ADAR protein corresponding to the above. In some embodiments, the adenosine deaminase may comprise one or more of the mutations: E488Q, V351G, S486A, T375S, S370C, P462A, based on amino acid sequence positions of hADAR2, and mutations in a homologous ADAR protein corresponding to the above. In some embodiments, the adenosine deaminase may comprise one or more of the mutations: E488Q, V351G, S486A, T375S, S370C, P462A, N597I, based on amino acid sequence positions of hADAR2, and mutations in a homologous ADAR protein corresponding to the above. In some embodiments, the adenosine deaminase may comprise one or more of the mutations: E488Q, V351G, S486A, T375S, S370C, P462A, N597I, L332I, based on amino acid sequence positions of hADAR2, and mutations in a homologous ADAR protein corresponding to the above. In some embodiments, the adenosine deaminase may comprise one or more of the mutations: E488Q, V351G, S486A, T375S, S370C, P462A, N597I, L332I, I398V, based on amino acid sequence positions of hADAR2-D, and mutations in a homologous ADAR protein corresponding to the above. In some embodiments, the adenosine deaminase may comprise one or more of the mutations: E488Q, V351G, S486A, T375S, S370C, P462A, N597I, L332I, I398V, K350I, based on amino acid sequence positions of hADAR2, and mutations in a homologous ADAR protein corresponding to the above. In some embodiments, the adenosine deaminase may comprise one or more of the mutations: E488Q, V351G, S486A, T375S, S370C, P462A, N597I, L332I, I398V, K350I, M383L, based on amino acid sequence positions of hADAR2, and mutations in a homologous ADAR protein corresponding to the above. In some embodiments, the adenosine deaminase may comprise one or more of the mutations: E488Q, V351G, S486A, T375S, S370C, P462A, N597I, L332I, I398V, K350I, M383L, D619G, based on amino acid sequence positions of hADAR2, and mutations in a homologous ADAR protein corresponding to the above. In some embodiments, the adenosine deaminase may comprise one or more of the mutations: E488Q, V351G, S486A, T375S, S370C, P462A, N597I, L332I, I398V, K350I, M383L, D619G, S582T, based on amino acid sequence positions of hADAR2, and mutations in a homologous ADAR protein corresponding to the above. In some embodiments, the adenosine deaminase may comprise one or more of the mutations: E488Q, V351G, S486A, T375S, S370C, P462A, N597I, L332I, I398V, K350I, M383L, D619G, S582T, V440I based on amino acid sequence positions of hADAR2, and mutations in a homologous ADAR protein corresponding to the above. In some embodiments, the adenosine deaminase may comprise one or more of the mutations: E488Q, V351G, S486A, T375S, S370C, P462A, N597I, L332I, I398V, K350I, M383L, D619G, S582T, V440I, S495N based on amino acid sequence positions of hADAR2, and mutations in a homologous ADAR protein corresponding to the above. In some embodiments, the adenosine deaminase may comprise one or more of the mutations: E488Q, V351G, S486A, T375S, S370C, P462A, N597I, L332I, I398V, K350I, M383L, D619G, S582T, V440I, S495N, K418E based on amino acid sequence positions of hADAR2, and mutations in a homologous ADAR protein corresponding to the above. In some embodiments, the adenosine deaminase may comprise one or more of the mutations: E488Q, V351G, S486A, T375S, S370C, P462A, N597I, L332I, I398V, K350I, M383L, D619G, S582T, V440I, S495N, K418E, S661T based on amino acid sequence positions of hADAR2, and mutations in a homologous ADAR protein corresponding to the above. In some examples, provided herein includes a mutated adenosine deaminase e.g., an adenosine deaminase comprising one or more mutations of E488Q, V351G, S486A, T375S, S370C, P462A, N597I, L332I, I398V, K350I, M383L, D619G, S582T, V440I, S495N, K418E, S661T based on amino acid sequence positions of hADAR2, and mutations in a homologous ADAR protein corresponding to the above, fused with a dead CRISPR-Cas protein or CRISPR-Cas nickase. In some examples, provided herein includes a mutated adenosine deaminase e.g., an adenosine deaminase comprising E488Q, V351G, S486A, T375S, S370C, P462A, N597I, L332I, I398V, K350I, M383L, D619G, S582T, V440I, S495N, K418E, and S661T based on amino acid sequence positions of hADAR2, and mutations in a homologous ADAR protein corresponding to the above, fused with a dead CRISPR-Cas protein or a CRISPR-Cas nickase. In some examples, provided herein includes a mutated adenosine deaminase e.g., an adenosine deaminase comprising E488Q, V351G, S486A, T375S, S370C, P462A, N597I, L332I, I398V, K350I, M383L, D619G, S582T, V440I, S495N, K418E, S661T, and S375N based on amino acid sequence positions of hADAR2, and mutations in a homologous ADAR protein corresponding to the above, fused with a dead CRISPR-Cas protein or a CRISPR-Cas nickase. In some examples, provided herein includes a mutated adenosine deaminase e.g., an adenosine deaminase comprising E488Q, V351G, S486A, T375S, S370C, P462A, N597I, L332I, I398V, K350I, M383L, D619G, S582T, V440I, S495N, K418E, S661T, and S375A based on amino acid sequence positions of hADAR2, and mutations in a homologous ADAR protein corresponding to the above, fused with a dead CRISPR-Cas protein or a CRISPR-Cas nickase.

[0537] Some examples provided herein include a mutated adenosine deaminase e.g., an adenosine deaminase comprising E488Q and E620G based on amino acid sequence positions of hADAR2, and mutations in a homologous ADAR protein corresponding to the above, fused with a dead CRISPR-Cas protein or a CRISPR-Cas nickase.

[0538] Some examples provided herein include herein includes a mutated adenosine deaminase e.g., an adenosine deaminase comprising E488Q and Q696L based on amino acid sequence positions of hADAR2, and mutations in a homologous ADAR protein corresponding to the above, fused with a dead CRISPR-Cas protein or a CRISPR-Cas nickase.

[0539] Some examples provided herein include a mutated adenosine deaminase e.g., an adenosine deaminase comprising E488Q, E620G, and Q696L based on amino acid sequence positions of hADAR2, and mutations in a homologous ADAR protein corresponding to the above, fused with a dead CRISPR-Cas protein or a CRISPR-Cas nickase.

[0540] Some examples provided herein include a mutated adenosine deaminase e.g., an adenosine deaminase comprising E488Q and V505I based on amino acid sequence positions of hADAR2, and mutations in a homologous ADAR protein corresponding to the above, fused with a dead CRISPR-Cas protein or a CRISPR-Cas nickase.

[0541] In some embodiments, the adenosine deaminase may be a tRNA-specific adenosine deaminase or a variant thereof. In some embodiments, the adenosine deaminase may comprise one or more of the mutations: W23L, W23R, R26G, H36L, N37S, P48S, P48T, P48A, I49V, R51L, N72D, L84F, S97C, A106V, D108N, H123Y, G125A, A142N, S146C, D147Y, R152H, R152P, E155V, I156F, K157N, K161T, based on amino acid sequence positions of E. coli TadA, and mutations in a homologous deaminase protein corresponding to the above. In some embodiments, the adenosine deaminase may comprise one or more of the mutations: D108N based on amino acid sequence positions of E. coli TadA, and mutations in a homologous deaminase protein corresponding to the above. In some embodiments, the adenosine deaminase may comprise one or more of the mutations: A106V, D108N, based on amino acid sequence positions of E. coli TadA, and mutations in a homologous deaminase protein corresponding to the above. In some embodiments, the adenosine deaminase may comprise one or more of the mutations: A106V, D108N, D147Y, E155V, based on amino acid sequence positions of E. coli TadA, and mutations in a homologous deaminase protein corresponding to the above. In some embodiments, the adenosine deaminase may comprise one or more of the mutations: A106V, D108N, based on amino acid sequence positions of E. coli TadA, and mutations in a homologous deaminase protein corresponding to the above. In some embodiments, the adenosine deaminase may comprise one or more of the mutations: A106V, D108N, D147Y, E155V, L84F, H123Y, I156F, based on amino acid sequence positions of E. coli TadA, and mutations in a homologous deaminase protein corresponding to the above. In some embodiments, the adenosine deaminase may comprise one or more of the mutations: A106V, D108N, D147Y, E155V, L84F, H123Y, I156F, A142N, based on amino acid sequence positions of E. coli TadA, and mutations in a homologous deaminase protein corresponding to the above. In some embodiments, the adenosine deaminase may comprise one or more of the mutations: A106V, D108N, D147Y, E155V, L84F, H123Y, I156F, H36L, R51L, S146C, K157N, based on amino acid sequence positions of E. coli TadA, and mutations in a homologous deaminase protein corresponding to the above. In some embodiments, the adenosine deaminase may comprise one or more of the mutations: A106V, D108N, D147Y, E155V, L84F, H123Y, I156F, H36L, R51L, S146C, K157N, P48S, based on amino acid sequence positions of E. coli TadA, and mutations in a homologous deaminase protein corresponding to the above. In some embodiments, the adenosine deaminase may comprise one or more of the mutations: A106V, D108N, D147Y, E155V, L84F, H123Y, I156F, H36L, R51L, S146C, K157N, P48S, A142N, based on amino acid sequence positions of E. coli TadA, and mutations in a homologous deaminase protein corresponding to the above. In some embodiments, the adenosine deaminase may comprise one or more of the mutations: A106V, D108N, D147Y, E155V, L84F, H123Y, I156F, H36L, R51L, S146C, K157N, P48S, W23R, P48A, based on amino acid sequence positions of E. coli TadA, and mutations in a homologous deaminase protein corresponding to the above. In some embodiments, the adenosine deaminase may comprise one or more of the mutations: A106V, D108N, D147Y, E155V, L84F, H123Y, I156F, H36L, R51L, S146C, K157N, P48S, W23R, P48A, A142N, based on amino acid sequence positions of E. coli TadA, and mutations in a homologous deaminase protein corresponding to the above. In some embodiments, the adenosine deaminase may comprise one or more of the mutations: A106V, D108N, D147Y, E155V, L84F, H123Y, I156F, H36L, R51L, S146C, K157N, P48S, W23R, P48A, R152P, based on amino acid sequence positions of E. coli TadA, and mutations in a homologous deaminase protein corresponding to the above. In some embodiments, the adenosine deaminase may comprise one or more of the mutations: A106V, D108N, D147Y, E155V, L84F, H123Y, I156F, H36L, R51L, S146C, K157N, P48S, W23R, P48A, R152P, A142N, based on amino acid sequence positions of E. coli TadA, and mutations in a homologous deaminase protein corresponding to the above.

[0542] In some examples, the base editing systems may comprise an intein-mediated trans-splicing system that enables in vivo delivery of a base editor, e.g., a split-intein cytidine base editors (CBE) or adenine base editor (ABE) engineered to trans-splice. Examples of the such base editing systems include those described in Colin K. W. Lim et al., Treatment of a Mouse Model of ALS by In Vivo Base Editing, Mol Ther. 2020 Jan. 14. pii: S1525-0016(20)30011-3. doi: 10.1016/j.ymthe.2020.01.005; and Jonathan M. Levy et al., Cytosine and adenine base editing of the brain, liver, retina, heart and skeletal muscle of mice via adeno-associated viruses, Nature Biomedical Engineering volume 4, pages 97-110(2020), which are incorporated by reference herein in their entireties.

[0543] In some embodiments, the base editing may introduce C-to-G edits. In some examples, the base editing system may comprise a Cas protein and a cytidine deaminase. Such system may further comprise a uracil DNA N-glycosylase. In some cases, the Cas protein is a dead Cas protein e.g., a nickase. In certain cases, the cytidine deaminase is a APOBEC1 cytidine deaminase variant, e.g., a rat APOBEC1 cytidine deaminase with R33A mutation. In certain cases, the uracil DNA N-glycosylase is derived from E coli. Such base editing system may be used to induce C-to-G modifications, e.g., in AT-rich sequence contexts in a mammalian cell (e.g., human cell).

[0544] Examples of base editing systems include those described in International Patent Publication Nos. WO 2019/071048 (e.g. paragraphs [0933]-[0938]), WO 2019/084063 (e.g., paragraphs [0173]-[0186], [0323]-[0475], [0893]-[1094]), WO 2019/126716 (e.g., paragraphs [0290]-[0425], [1077]-[1084]), WO 2019/126709 (e.g., paragraphs [0294]-[0453]), WO 2019/126762 (e.g., paragraphs [0309]-[0438]), WO 2019/126774 (e.g., paragraphs [0511]-[0670]), Cox D B T, et al., RNA editing with CRISPR-Cas13, Science. 2017 Nov. 24; 358(6366):1019-1027; Abudayyeh 00, et al., A cytosine deaminase for programmable single-base RNA editing, Science 26 Jul. 2019: Vol. 365, Issue 6451, pp. 382-386; Gaudelli N M et al., Programmable base editing of AT to GC in genomic DNA without DNA cleavage, Nature volume 551, pages 464-471 (23 Nov. 2017); Komor A C, et al., Programmable editing of a target base in genomic DNA without double-stranded DNA cleavage. Nature. 2016 May 19; 533(7603):420-4; Jordan L. Doman et al., Evaluation and minimization of Cas9-independent off-target DNA editing by cytosine base editors, Nat Biotechnol (2020). doi.org/10.1038/s41587-020-0414-6; and Richter M F et al., Phage-assisted evolution of an adenine base editor with improved Cas domain compatibility and activity, Nat Biotechnol (2020). doi.org/10.1038/s41587-020-0453-z, Kurt, I. C., Zhou, R., Iyer, S. et al. CRISPR C-to-G base editors for inducing targeted DNA transversions in human cells. Nat Biotechnol (2020). https://doi.org/10.1038/s41587-020-0609-x, which are incorporated by reference herein in their entireties.

### Regulation of Post-Translational Modification of Gene Products

[0545] In some cases, base editing may be used for regulating post-translational modification of a gene products. In some cases, an amino acid residue that is a post-translational modification site may be mutated by base editing to an amino residue that cannot be modified. Examples of such post-translational modifications include disulfide bond formation, glycosylation, lipidation, acetylation, phosphorylation, methylation, ubiquitination, sumoylation, or any combinations thereof.

[0546] In some embodiments, the base editors herein may regulate Stat3/IRF-5 pathway, e.g., for reduction of inflammation. For example, phosphorylation on Tyr705 of Stat3, Thr10, Ser158, Ser309, Ser317, Ser451, and/or Ser462 of IRF-5 may be involved with interleukin signaling. Base editors herein may be used to mutate one or more of these procreation sites for regulating immunity, autoimmunity, and/or inflammation.

[0547] In some embodiments, the base editors herein may regulate insulin receptor substrate (IRS) pathway. For example, phosphorylation on Ser265, Ser302, Ser325, Ser336, Ser358, Ser407, and/or Ser408 may be involved in regulating (e.g., inhibit) ISR pathway. Alternatively or additionally, Serine 307 in mouse (or Serine 312 in human) may be mutated so the phosphorylation may be regulated. For example, Serine 307 phosphorylation may lead to degradation of IRS-1 and reduce MAPK signaling. Serine 307 phosphorylation may be induced under insulin insensitivity conditions, such as insulin overstimulation and/or TNFα treatment. In some examples, 5307F mutation may be generated for stabilizing the interaction between IRS-1 and other components in the pathway. Base editors herein may be used to mutate one or more of these procreation sites for regulating IRS pathway.

### Regulation of Stability of Gene Products

[0548] In some embodiments, base editing may be used for regulating the stability of gene products. For example, one or more amino acid residues that regulate protein degradation rates may be mutated by the base editors herein. In some cases, such amino acid residues may be in a degron. A degron may refer to a portion of a protein involved in regulating the degradation rate of the protein. Degrons may include short amino acid sequences, structural motifs, and exposed amino acids (e.g., lysine or arginine). Some protein may comprise multiple degrons. The degrons be ubiquitin-dependent (e.g., regulating protein degradation based on ubiquitination of the protein) or ubiquitin-independent.

[0549] In some cases, the based editing may be used to mutate one or more amino acid residues in a signal peptide for protein degradation. In some examples, the signal peptide may be a PEST sequence, which is a peptide sequence that is rich in proline (P), glutamic acid (E), serine (S), and threonine (T). For example, the stability of NANOG, which comprises a PEST sequence, may be increased, e.g., to promote embryonic stem cell pluripotency.

[0550] In some examples, the base editors may be used for mutating SMN2 (e.g., to generate S270A mutilation) to increase stability of the SMN2 protein, which is involved in spinal muscular atrophy. Other mutations in SMN2 that may be generated by based editors include those described in Cho S. et al., Genes Dev. 2010 Mar. 1; 24(5): 438-442. In certain examples, the base editors may be used for generating mutations on IκBα, as described in Fortmann K T et al., J Mol Biol. 2015 Aug. 28; 427(17): 2748-2756. Target sites in degrons may be identified by computational tools, e.g., the online tools provided on slim.ucd.ie/apc/index.php. Other targets include Cdc25A phosphatase.

Examples of Genes that can be Targeted by Base Editors

[0551] In some examples, the base editors may be used for modifying PCSK9. The base editors may introduce stop codons and/or disease-associated mutations that reduce PCSK9 activity. The base editing may introduce one or more of the following mutations in PCSK9: R46L, R46A, A53V, A53A, E57K, Y142X, L253F, R237W, H391N, N425S, A443T, I474V, I474A, Q554E, Q619P, E670G, E670A, C679X, H417Q, R469W, E482G, F515L, and/or H553R.

[0552] In some examples, the base editors may be used for modifying ApoE. The base editors may target ApoE in synthetic model and/or patient-derived neurons (e.g., those derived from iPSC). The targeting may be tested by sequencing.

[0553] In some examples, the base editors may be used for modifying Stat1/3. The base editor may target Y705 and/or S727 for reducing Stat1/3 activation. The base editing may be tested by luciferase-based promoter. Targeting Stat1/3 by base editing may block monocyte to macrophage differentiation, and inflammation in response to ox-LDL stimulation of macrophages.

[0554] In some examples, the base editors may be used for modifying TFEB (transcription factor for EB). The base editor may target one or more amino acid residues that regulate translocation of the TFEB. In some cases, the base editor may target one or more amino acid residues that regulate autophagy.

[0555] In some examples, the base editors may be used for modifying ornithine carbamoyl transferase (OTC). Such modification may be used for correct ornithine carbamoyl transferase deficiency. For example, base editing may correct Leu45Pro mutation by converting nucleotide 134C to U.

[0556] In some examples, the base editors may be used for modifying Lipin1. The base editor may target one or more serine's that can be phosphorylated by mTOR. Base editing of Lipin1 may regulate lipid accumulation. The base editors may target Lipin1 in 3T3L1 preadipocyte model. Effects of the base editing may be tested by measuring reduction of lipid accumulation (e.g., via oil red).

[0557] A nucleotide deaminase or other RNA modification enzyme may be linked to CRISPR-Cas or a dead CRISPR-Cas via one or more amino acids. In some cases, the nucleotide deaminase may be linked to the CRISPR-Cas or a dead CRISPR-Cas via one or more amino acids 411-429, 114-124, 197-241, and 607-624. The amino acid position may correspond to a CRISPR-Cas ortholog disclosed herein. In certain examples, the nucleotide deaminase may be is linked to the dead CRISPR-Cas via one or more amino acids corresponding to amino 411-429, 114-124, 197-241, and 607-624 of Prevotella buccae CRISPR-Cas.

### Delivery

[0558] The present disclosure also provides delivery systems for introducing components of the systems and compositions herein to cells, tissues, organs, or organisms. A delivery system may comprise one or more delivery vehicles and/or cargos. Exemplary delivery systems and methods include those described in paragraphs [00117] to [00278] of Feng Zhang et al., (WO2016106236A1), and pages 1241-1251 and Table 1 of Lino C A et al., Delivering CRISPR: a review of the challenges and approaches, DRUG DELIVERY, 2018, VOL. 25, NO. 1, 1234-1257, which are incorporated by reference herein in their entireties.

[0559] In some embodiments, the delivery systems may be used to introduce the components of the systems and compositions to plant cells. For example, the components may be delivered to plant using electroporation, microinjection, aerosol beam injection of plant cell protoplasts, biolistic methods, DNA particle bombardment, and/or Agrobacterium-mediated transformation. Examples of methods and delivery systems for plants include those described in Fu et al., Transgenic Res. 2000 February; 9(1):11-9; Klein R M, et al., Biotechnology. 1992; 24:384-6; Casas A M et al., Proc Natl Acad Sci USA. 1993 Dec. 1; 90(23): 11212-11216; and U.S. Pat. No. 5,563,055, Davey M R et al., Plant Mol Biol. 1989 September; 13(3):273-85, which are incorporated by reference herein in their entireties.

### Cargos

[0560] The delivery systems may comprise one or more cargos. The cargos may comprise one or more components of the systems and compositions herein. A cargo may comprise one or more of the following: i) a plasmid encoding one or more Cas proteins; ii) a plasmid encoding one or more guide RNAs, iii) mRNA of one or more Cas proteins; iv) one or more guide RNAs; v) one or more Cas proteins; vi) any combination thereof. In some examples, a cargo may comprise a plasmid encoding one or more Cas protein and one or more (e.g., a plurality of) guide RNAs. In some cases, the plasmid may also encode a recombination template (e.g., for HDR). In some embodiments, a cargo may comprise mRNA encoding one or more Cas proteins and one or more guide RNAs.

[0561] In some examples, a cargo may comprise one or more Cas proteins and one or more guide RNAs, e.g., in the form of ribonucleoprotein complexes (RNP). The ribonucleoprotein complexes may be delivered by methods and systems herein. In some cases, the ribonucleoprotein may be delivered by way of a polypeptide-based shuttle agent. In one example, the ribonucleoprotein may be delivered using synthetic peptides comprising an endosome leakage domain (ELD) operably linked to a cell penetrating domain (CPD), to a histidine-rich domain and a CPD, e.g., as describe in WO2016161516. RNP may also be used for delivering the compositions and systems to plant cells, e.g., as described in Wu J W, et al., Nat Biotechnol. 2015 November; 33(11):1162-4.

### Physical Delivery

[0562] In some embodiments, the cargos may be introduced to cells by physical delivery methods. Examples of physical methods include microinjection, electroporation, and hydrodynamic delivery. Both nucleic acid and proteins may be delivered using such methods. For example, Cas protein may be prepared in vitro, isolated, (refolded, purified if needed), and introduced to cells.

### Microinjection

[0563] Microinjection of the cargo directly to cells can achieve high efficiency, e.g., above 90% or about 100%. In some embodiments, microinjection may be performed using a microscope and a needle (e.g., with 0.5-5.0 μm in diameter) to pierce a cell membrane and deliver the cargo directly to a target site within the cell. Microinjection may be used for in vitro and ex vivo delivery.

[0564] Plasmids comprising coding sequences for Cas proteins and/or guide RNAs, mRNAs, and/or guide RNAs, may be microinjected. In some cases, microinjection may be used i) to deliver DNA directly to a cell nucleus, and/or ii) to deliver mRNA (e.g., in vitro transcribed) to a cell nucleus or cytoplasm. In certain examples, microinjection may be used to delivery sgRNA directly to the nucleus and Cas-encoding mRNA to the cytoplasm, e.g., facilitating translation and shuttling of Cas to the nucleus.

[0565] Microinjection may be used to generate genetically modified animals. For example, gene editing cargos may be injected into zygotes to allow for efficient germline modification. Such approach can yield normal embryos and full-term mouse pups harboring the desired modification(s). Microinjection can also be used to provide transiently up- or down-regulate a specific gene within the genome of a cell, e.g., using CRISPRa and CRISPRi.

### Electroporation

[0566] In some embodiments, the cargos and/or delivery vehicles may be delivered by electroporation. Electroporation may use pulsed high-voltage electrical currents to transiently open nanometer-sized pores within the cellular membrane of cells suspended in buffer, allowing for components with hydrodynamic diameters of tens of nanometers to flow into the cell. In some cases, electroporation may be used on various cell types and efficiently transfer cargo into cells. Electroporation may be used for in vitro and ex vivo delivery.

[0567] Electroporation may also be used to deliver the cargo to into the nuclei of mammalian cells by applying specific voltage and reagents, e.g., by nucleofection. Such approaches include those described in Wu Y, et al. (2015). Cell Res 25:67-79; Ye L, et al. (2014). Proc Natl Acad Sci USA 111:9591-6; Choi P S, Meyerson M. (2014). Nat Commun 5:3728; Wang J, Quake S R. (2014). Proc Natl Acad Sci 111:13157-62. Electroporation may also be used to deliver the cargo in vivo, e.g., with methods described in Zuckermann M, et al. (2015). Nat Commun 6:7391.

### Hydrodynamic Delivery

[0568] Hydrodynamic delivery may also be used for delivering the cargos, e.g., for in vivo delivery. In some examples, hydrodynamic delivery may be performed by rapidly pushing a large volume (8-10% body weight) solution containing the gene editing cargo into the bloodstream of a subject (e.g., an animal or human), e.g., for mice, via the tail vein. As blood is incompressible, the large bolus of liquid may result in an increase in hydrodynamic pressure that temporarily enhances permeability into endothelial and parenchymal cells, allowing for cargo not normally capable of crossing a cellular membrane to pass into cells. This approach may be used for delivering naked DNA plasmids and proteins. The delivered cargos may be enriched in liver, kidney, lung, muscle, and/or heart.

### Transfection

[0569] The cargos, e.g., nucleic acids, may be introduced to cells by transfection methods for introducing nucleic acids into cells. Examples of transfection methods include calcium phosphate-mediated transfection, cationic transfection, liposome transfection, dendrimer transfection, heat shock transfection, magnetofection, lipofection, impalefection, optical transfection, proprietary agent-enhanced uptake of nucleic acid.

### Delivery Vehicles

[0570] The delivery systems may comprise one or more delivery vehicles. The delivery vehicles may deliver the cargo into cells, tissues, organs, or organisms (e.g., animals or plants). The cargos may be packaged, carried, or otherwise associated with the delivery vehicles. The delivery vehicles may be selected based on the types of cargo to be delivered, and/or the delivery is in vitro and/or in vivo. Examples of delivery vehicles include vectors, viruses, non-viral vehicles, and other delivery reagents described herein.

[0571] The delivery vehicles in accordance with the present invention may have a greatest dimension (e.g. diameter) of less than 100 microns (μm). In some embodiments, the delivery vehicles have a greatest dimension of less than 10 μm. In some embodiments, the delivery vehicles may have a greatest dimension of less than 2000 nanometers (nm). In some embodiments, the delivery vehicles may have a greatest dimension of less than 1000 nanometers (nm). In some embodiments, the delivery vehicles may have a greatest dimension (e.g., diameter) of less than 900 nm, less than 800 nm, less than 700 nm, less than 600 nm, less than 500 nm, less than 400 nm, less than 300 nm, less than 200 nm, less than 150 nm, or less than 100 nm, less than 50 nm. In some embodiments, the delivery vehicles may have a greatest dimension ranging between 25 nm and 200 nm.

[0572] In some embodiments, the delivery vehicles may be or comprise particles. For example, the delivery vehicle may be or comprise nanoparticles (e.g., particles with a greatest dimension (e.g., diameter) no greater than 1000 nm. The particles may be provided in different forms, e.g., as solid particles (e.g., metal such as silver, gold, iron, titanium), non-metal, lipid-based solids, polymers), suspensions of particles, or combinations thereof. Metal, dielectric, and semiconductor particles may be prepared, as well as hybrid structures (e.g., core-shell particles). Nanoparticles may also be used to deliver the compositions and systems to plant cells, e.g., as described in International Patent Publication No. WO 2008042156, US Publication Application No. US 20130185823, and International Patent Publication No WO 2015/089419.

### Vectors

[0573] The systems, compositions, and/or delivery systems may comprise one or more vectors. The present disclosure also includes vector systems. A vector system may comprise one or more vectors. In some embodiments, a vector refers to a nucleic acid molecule capable of transporting another nucleic acid to which it has been linked. Vectors include nucleic acid molecules that are single-stranded, double-stranded, or partially double-stranded; nucleic acid molecules that comprise one or more free ends, no free ends (e.g., circular); nucleic acid molecules that comprise DNA, RNA, or both; and other varieties of polynucleotides known in the art. A vector may be a plasmid, e.g., a circular double stranded DNA loop into which additional DNA segments can be inserted, such as by standard molecular cloning techniques. Certain vectors may be capable of autonomous replication in a host cell into which they are introduced (e.g., bacterial vectors having a bacterial origin of replication and episomal mammalian vectors). Some vectors (e.g., non-episomal mammalian vectors) are integrated into the genome of a host cell upon introduction into the host cell, and thereby are replicated along with the host genome. In certain examples, vectors may be expression vectors, e.g., capable of directing the expression of genes to which they are operatively-linked. In some cases, the expression vectors may be for expression in eukaryotic cells. Common expression vectors of utility in recombinant DNA techniques are often in the form of plasmids.

[0574] Examples of vectors include pGEX, pMAL, pRIT5, E. coli expression vectors (e.g., pTrc, pET 11d, yeast expression vectors (e.g., pYepSec1, pMFa, pJRY88, pYES2, and picZ, Baculovirus vectors (e.g., for expression in insect cells such as SF9 cells) (e.g., pAc series and the pVL series), mammalian expression vectors (e.g., pCDM8 and pMT2PC.

[0575] A vector may comprise i) Cas encoding sequence(s), and/or ii) a single, or at least 2, at least 3, at least 4, at least 5, at least 6, at least 7, at least 8, at least 9, at least 10, at least 12, at least 14, at least 16, at least 32, at least 48, at least 50 guide RNA(s) encoding sequences. In a single vector there can be a promoter for each RNA coding sequence. Alternatively or additionally, in a single vector, there may be a promoter controlling (e.g., driving transcription and/or expression) multiple RNA encoding sequences.

[0576] Furthermore, that compositions or systems may be delivered via a vector, e.g., a separate vector or the same vector that is encoding the CRISPR complex. When provided by a separate vector, the CRISPR RNA that targets Cas expression can be administered sequentially or simultaneously. When administered sequentially, the CRISPR RNA that targets Cas expression is to be delivered after the CRISPR RNA that is intended for e.g. gene editing or gene engineering. This period may be a period of minutes (e.g. 5 minutes, 10 minutes, 20 minutes, 30 minutes, 45 minutes, 60 minutes). This period may be a period of hours (e.g. 2 hours, 4 hours, 6 hours, 8 hours, 12 hours, 24 hours). This period may be a period of days (e.g. 2 days, 3 days, 4 days, 7 days). This period may be a period of weeks (e.g. 2 weeks, 3 weeks, 4 weeks). This period may be a period of months (e.g. 2 months, 4 months, 8 months, 12 months). This period may be a period of years (2 years, 3 years, 4 years). In this fashion, the Cas enzyme associates with a first gRNA capable of hybridizing to a first target, such as a genomic locus or loci of interest and undertakes the function(s) desired of the CRISPR-Cas system (e.g., gene engineering); and subsequently the Cas enzyme may then associate with the second gRNA capable of hybridizing to the sequence comprising at least part of the Cas or CRISPR cassette. Where the guide RNA targets the sequences encoding expression of the Cas protein, the enzyme becomes impeded and the system becomes self-inactivating. In the same manner, CRISPR RNA that targets Cas expression applied via, for example liposome, lipofection, particles, microvesicles as explained herein, may be administered sequentially or simultaneously. Similarly, self-inactivation may be used for inactivation of one or more guide RNA used to target one or more targets.

### Regulatory Elements

[0577] A vector may comprise one or more regulatory elements. The regulatory element(s) may be operably linked to coding sequences of Cas proteins, accessary proteins, guide RNAs (e.g., a single guide RNA, crRNA, and/or tracrRNA), or combination thereof. The term “operably linked” is intended to mean that the nucleotide sequence of interest is linked to the regulatory element(s) in a manner that allows for expression of the nucleotide sequence (e.g. in an in vitro transcription/translation system or in a host cell when the vector is introduced into the host cell). In certain examples, a vector may comprise: a first regulatory element operably linked to a nucleotide sequence encoding a Cas protein, and a second regulatory element operably linked to a nucleotide sequence encoding a guide RNA.

[0578] Examples of regulatory elements include promoters, enhancers, internal ribosomal entry sites (IRES), and other expression control elements (e.g., transcription termination signals, such as polyadenylation signals and poly-U sequences). Such regulatory elements are described, for example, in Goeddel, GENE EXPRESSION TECHNOLOGY: METHODS IN ENZYMOLOGY 185, Academic Press, San Diego, Calif. (1990). Regulatory elements include those that direct constitutive expression of a nucleotide sequence in many types of host cell and those that direct expression of the nucleotide sequence only in certain host cells (e.g., tissue-specific regulatory sequences). A tissue-specific promoter may direct expression primarily in a desired tissue of interest, such as muscle, neuron, bone, skin, blood, specific organs (e.g., liver, pancreas), or particular cell types (e.g., lymphocytes). Regulatory elements may also direct expression in a temporal-dependent manner, such as in a cell-cycle dependent or developmental stage-dependent manner, which may or may not also be tissue or cell-type specific.

[0579] Examples of promoters include one or more pol III promoter (e.g., 1, 2, 3, 4, 5, or more pol III promoters), one or more pol II promoters (e.g., 1, 2, 3, 4, 5, or more pol II promoters), one or more pol I promoters (e.g., 1, 2, 3, 4, 5, or more pol I promoters), or combinations thereof. Examples of pol III promoters include, but are not limited to, U6 and H1 promoters. Examples of pol II promoters include, but are not limited to, the retroviral Rous sarcoma virus (RSV) LTR promoter (optionally with the RSV enhancer), the cytomegalovirus (CMV) promoter (optionally with the CMV enhancer), the SV40 promoter, the dihydrofolate reductase promoter, the (3-actin promoter, the phosphoglycerol kinase (PGK) promoter, and the EF1α promoter.

### Viral Vectors

[0580] The cargos may be delivered by viruses. In some embodiments, viral vectors are used. A viral vector may comprise virally-derived DNA or RNA sequences for packaging into a virus (e.g., retroviruses, replication defective retroviruses, adenoviruses, replication defective adenoviruses, and adeno-associated viruses). Viral vectors also include polynucleotides carried by a virus for transfection into a host cell. Viruses and viral vectors may be used for in vitro, ex vivo, and/or in vivo deliveries.

### Adeno Associated Virus (AAV)

[0581] The systems and compositions herein may be delivered by adeno associated virus (AAV). AAV vectors may be used for such delivery. AAV, of the Dependovirus genus and Parvoviridae family, is a single stranded DNA virus. In some embodiments, AAV may provide a persistent source of the provided DNA, as AAV delivered genomic material can exist indefinitely in cells, e.g., either as exogenous DNA or, with some modification, be directly integrated into the host DNA. In some embodiments, AAV do not cause or relate with any diseases in humans. The virus itself is able to efficiently infect cells while provoking little to no innate or adaptive immune response or associated toxicity.

[0582] Examples of AAV that can be used herein include AAV-1, AAV-2, AAV-3, AAV-4, AAV-5, AAV-6, AAV-8, and AAV-9. The type of AAV may be selected with regard to the cells to be targeted; e.g., one can select AAV serotypes 1, 2, 5 or a hybrid capsid AAV1, AAV2, AAV5 or any combination thereof for targeting brain or neuronal cells; and one can select AAV4 for targeting cardiac tissue. AAV8 is useful for delivery to the liver. AAV-2-based vectors were originally proposed for CFTR delivery to CF airways, other serotypes such as AAV-1, AAV-5, AAV-6, and AAV-9 exhibit improved gene transfer efficiency in a variety of models of the lung epithelium. Examples of cell types targeted by AAV are described in Grimm, D. et al, J. Virol. 82: 5887-5911 (2008)), and shown as follows:

TABLE 9

| | AAV- | AAV- | AAV- | AAV- | AAV- | AAV- | AAV- | AAV- |
|---|---|---|---|---|---|---|---|---|
| Cell Line | 1 | 2 | 3 | 4 | 5 | 6 | 8 | 9 |
| Huh-7 | 13 | 100 | 2.5 | 0.0 | 0.1 | 10 | 0.7 | 0.0 |
| HEK293 | 25 | 100 | 2.5 | 0.1 | 0.1 | 5 | 0.7 | 0.1 |
| HeLa | 3 | 100 | 2.0 | 0.1 | 6.7 | 1 | 0.2 | 0.1 |
| HepG2 | 3 | 100 | 16.7 | 0.3 | 1.7 | 5 | 0.3 | ND |
| Hep1A | 20 | 100 | 0.2 | 1.0 | 0.1 | 1 | 0.2 | 0.0 |
| 911 | 17 | 100 | 11 | 0.2 | 0.1 | 17 | 0.1 | ND |
| CHO | 100 | 100 | 14 | 1.4 | 333 | 50 | 10 | 1.0 |
| COS | 33 | 100 | 33 | 3.3 | 5.0 | 14 | 2.0 | 0.5 |
| MeWo | 10 | 100 | 20 | 0.3 | 6.7 | 10 | 1.0 | 0.2 |
| NIH3T3 | 10 | 100 | 2.9 | 2.9 | 0.3 | 10 | 0.3 | ND |
| A549 | 14 | 100 | 20 | ND | 0.5 | 10 | 0.5 | 0.1 |
| HIT1180 | 20 | 100 | 10 | 0.1 | 0.3 | 33 | 0.5 | 0.1 |
| Monocytes | 1111 | 100 | ND | ND | 125 | 1429 | ND | ND |
| Immature DC | 2500 | 100 | ND | ND | 222 | 2857 | ND | ND |
| Mature DC | 2222 | 100 | ND | ND | 333 | 3333 | ND | ND |

[0583] CRISPR-Cas AAV particles may be created in HEK 293 T cells. Once particles with specific tropism have been created, they are used to infect the target cell line much in the same way that native viral particles do. This may allow for persistent presence of CRISPR-Cas components in the infected cell type, and what makes this version of delivery particularly suited to cases where long-term expression is desirable. Examples of doses and formulations for AAV that can be used include those describe in U.S. Pat. Nos. 8,454,972 and 8,404,658.

[0584] Various strategies may be used for delivery the systems and compositions herein with AAVs. In some examples, coding sequences of Cas and gRNA may be packaged directly onto one DNA plasmid vector and delivered via one AAV particle. In some examples, AAVs may be used to deliver gRNAs into cells that have been previously engineered to express Cas. In some examples, coding sequences of Cas and gRNA may be made into two separate AAV particles, which are used for co-transfection of target cells. In some examples, markers, tags, and other sequences may be packaged in the same AAV particles as coding sequences of Cas and/or gRNAs.

### Lentiviruses

[0585] The systems and compositions herein may be delivered by lentiviruses. Lentiviral vectors may be used for such delivery. Lentiviruses are complex retroviruses that have the ability to infect and express their genes in both mitotic and post-mitotic cells.

[0586] Examples of lentiviruses include human immunodeficiency virus (HIV), which may use its envelope glycoproteins of other viruses to target a broad range of cell types; minimal non-primate lentiviral vectors based on the equine infectious anemia virus (EIAV), which may be used for ocular therapies. In certain embodiments, self-inactivating lentiviral vectors with an siRNA targeting a common exon shared by HIV tat/rev, a nucleolar-localizing TAR decoy, and an anti-CCR5-specific hammerhead ribozyme (see, e.g., DiGiusto et al. (2010) Sci Transl Med 2:36ra43) may be used/and or adapted to the nucleic acid-targeting system herein.

[0587] Lentiviruses may be pseudo-typed with other viral proteins, such as the G protein of vesicular stomatitis virus. In doing so, the cellular tropism of the lentiviruses can be altered to be as broad or narrow as desired. In some cases, to improve safety, second- and third-generation lentiviral systems may split essential genes across three plasmids, which may reduce the likelihood of accidental reconstitution of viable viral particles within cells.

[0588] In some examples, leveraging the integration ability, lentiviruses may be used to create libraries of cells comprising various genetic modifications, e.g., for screening and/or studying genes and signaling pathways.

### Adenoviruses

[0589] The systems and compositions herein may be delivered by adenoviruses. Adenoviral vectors may be used for such delivery. Adenoviruses include nonenveloped viruses with an icosahedral nucleocapsid containing a double stranded DNA genome. Adenoviruses may infect dividing and non-dividing cells. In some embodiments, adenoviruses do not integrate into the genome of host cells, which may be used for limiting off-target effects of CRISPR-Cas systems in gene editing applications.

### Viral Vehicles for Delivery to Plants

[0590] The systems and compositions may be delivered to plant cells using viral vehicles. In particular embodiments, the compositions and systems may be introduced in the plant cells using a plant viral vector (e.g., as described in Scholthof et al. 1996, Annu Rev Phytopathol. 1996; 34:299-323). Such viral vector may be a vector from a DNA virus, e.g., geminivirus (e.g., cabbage leaf curl virus, bean yellow dwarf virus, wheat dwarf virus, tomato leaf curl virus, maize streak virus, tobacco leaf curl virus, or tomato golden mosaic virus) or nanovirus (e.g., Faba bean necrotic yellow virus). The viral vector may be a vector from an RNA virus, e.g., tobravirus (e.g., tobacco rattle virus, tobacco mosaic virus), potexvirus (e.g., potato virus X), or hordeivirus (e.g., barley stripe mosaic virus). The replicating genomes of plant viruses may be non-integrative vectors.

### Non-Viral Vehicles

[0591] The delivery vehicles may comprise non-viral vehicles. In general, methods and vehicles capable of delivering nucleic acids and/or proteins may be used for delivering the systems compositions herein. Examples of non-viral vehicles include lipid nanoparticles, cell-penetrating peptides (CPPs), DNA nanoclews, gold nanoparticles, streptolysin O, multifunctional envelope-type nanodevices (MENDs), lipid-coated mesoporous silica particles, and other inorganic nanoparticles.

### Lipid Particles

[0592] The delivery vehicles may comprise lipid particles, e.g., lipid nanoparticles (LNPs) and liposomes.

### Lipid Nanoparticles (LNPs)

[0593] LNPs may encapsulate nucleic acids within cationic lipid particles (e.g., liposomes), and may be delivered to cells with relative ease. In some examples, lipid nanoparticles do not contain any viral components, which helps minimize safety and immunogenicity concerns. Lipid particles may be used for in vitro, ex vivo, and in vivo deliveries. Lipid particles may be used for various scales of cell populations.

[0594] In some examples. LNPs may be used for delivering DNA molecules (e.g., those comprising coding sequences of Cas and/or gRNA) and/or RNA molecules (e.g., mRNA of Cas, gRNAs). In certain cases, LNPs may be use for delivering RNP complexes of Cas/gRNA.

[0595] Components in LNPs may comprise cationic lipids 1,2-dilineoyl-3-dimethylammonium-propane (DLinDAP), 1,2-dilinoleyloxy-3-N,N-dimethylaminopropane (DLinDMA), 1,2-dilinoleyloxyketo-N,N-dimethyl-3-aminopropane (DLinK-DMA), 1,2-dilinoleyl-4-(2-dimethylaminoethyl)-[1,3]-dioxolane (DLinKC2-DMA), (3-o-[2″-(methoxypolyethyleneglycol 2000) succinoyl]-1,2-dimyristoyl-sn-glycol (PEG-S-DMG), R-3-[(ro-methoxy-poly(ethylene glycol)2000) carbamoyl]-1,2-dimyristyloxlpropyl-3-amine (PEG-C-DOMG, and any combination thereof. Preparation of LNPs and encapsulation may be adapted from Rosin et al, Molecular Therapy, vol. 19, no. 12, pages 1286-2200, December 2011).

### Liposomes

[0596] In some embodiments, a lipid particle may be liposome. Liposomes are spherical vesicle structures composed of a uni- or multilamellar lipid bilayer surrounding internal aqueous compartments and a relatively impermeable outer lipophilic phospholipid bilayer. In some embodiments, liposomes are biocompatible, nontoxic, can deliver both hydrophilic and lipophilic drug molecules, protect their cargo from degradation by plasma enzymes, and transport their load across biological membranes and the blood brain barrier (BBB).

[0597] Liposomes can be made from several different types of lipids, e.g., phospholipids. A liposome may comprise natural phospholipids and lipids such as 1,2-distearoryl-sn-glycero-3-phosphatidyl choline (DSPC), sphingomyelin, egg phosphatidylcholines, monosialoganglioside, or any combination thereof.

[0598] Several other additives may be added to liposomes in order to modify their structure and properties. For instance, liposomes may further comprise cholesterol, sphingomyelin, and/or 1,2-dioleoyl-sn-glycero-3-phosphoethanolamine (DOPE), e.g., to increase stability and/or to prevent the leakage of the liposomal inner cargo.

### Stable Nucleic-Acid-Lipid Particles (SNALPs)

[0599] In some embodiments, the lipid particles may be stable nucleic acid lipid particles (SNALPs). SNALPs may comprise an ionizable lipid (DLinDMA) (e.g., cationic at low pH), a neutral helper lipid, cholesterol, a diffusible polyethylene glycol (PEG)-lipid, or any combination thereof. In some examples, SNALPs may comprise synthetic cholesterol, dipalmitoylphosphatidylcholine, 3-N-[(w-methoxy polyethylene glycol)2000)carbamoyl]-1,2-dimyrestyloxypropylamine, and cationic 1,2-dilinoleyloxy-3-N,Ndimethylaminopropane. In some examples, SNALPs may comprise synthetic cholesterol, 1,2-distearoyl-sn-glycero-3-phosphocholine, PEG-cDMA, and 1,2-dilinoleyloxy-3-(N;N-dimethyl)aminopropane (DLinDMA)

### Other Lipids

[0600] The lipid particles may also comprise one or more other types of lipids, e.g., cationic lipids, such as amino lipid 2,2-dilinoleyl-4-dimethylaminoethyl[1,3]-dioxolane (DLin-KC2-DMA), DLin-KC2-DMA4, C12-200 and colipids disteroylphosphatidyl choline, cholesterol, and PEG-DMG.

### Lipoplexes/Polyplexes

[0601] In some embodiments, the delivery vehicles comprise lipoplexes and/or polyplexes. Lipoplexes may bind to negatively charged cell membrane and induce endocytosis into the cells. Examples of lipoplexes may be complexes comprising lipid(s) and non-lipid components. Examples of lipoplexes and polyplexes include FuGENE-6 reagent, a non-liposomal solution containing lipids and other components, zwitterionic amino lipids (ZALs), Ca2k (e.g., forming DNA/Ca²⁺ microcomplexes), polyethenimine (PEI) (e.g., branched PEI), and poly(L-lysine) (PLL).

### Cell Penetrating Peptides

[0602] In some embodiments, the delivery vehicles comprise cell penetrating peptides (CPPs). CPPs are short peptides that facilitate cellular uptake of various molecular cargo (e.g., from nanosized particles to small chemical molecules and large fragments of DNA).

[0603] CPPs may be of different sizes, amino acid sequences, and charges. In some examples, CPPs can translocate the plasma membrane and facilitate the delivery of various molecular cargoes to the cytoplasm or an organelle. CPPs may be introduced into cells via different mechanisms, e.g., direct penetration in the membrane, endocytosis-mediated entry, and translocation through the formation of a transitory structure.

[0604] CPPs may have an amino acid composition that either contains a high relative abundance of positively charged amino acids such as lysine or arginine or has sequences that contain an alternating pattern of polar/charged amino acids and non-polar, hydrophobic amino acids. These two types of structures are referred to as polycationic or amphipathic, respectively. A third class of CPPs are the hydrophobic peptides, containing only apolar residues, with low net charge or have hydrophobic amino acid groups that are crucial for cellular uptake. Another type of CPPs is the trans-activating transcriptional activator (Tat) from Human Immunodeficiency Virus 1 (HIV-1). Examples of CPPs include to Penetratin, Tat (48-60), Transportan, and (R-AhX-R4) (Ahx refers to aminohexanoyl), Kaposi fibroblast growth factor (FGF) signal peptide sequence, integrin (33 signal peptide sequence, polyarginine peptide Args sequence, Guanine rich-molecular transporters, and sweet arrow peptide. Examples of CPPs and related applications also include those described in U.S. Pat. No. 8,372,951.

[0605] CPPs can be used for in vitro and ex vivo work quite readily, and extensive optimization for each cargo and cell type is usually required. In some examples, CPPs may be covalently attached to the Cas protein directly, which is then complexed with the gRNA and delivered to cells. In some examples, separate delivery of CPP-Cas and CPP-gRNA to multiple cells may be performed. CPP may also be used to delivery RNPs.

[0606] CPPs may be used to deliver the compositions and systems to plants. In some examples, CPPs may be used to deliver the components to plant protoplasts, which are then regenerated to plant cells and further to plants.

### DNA Nanoclews

[0607] In some embodiments, the delivery vehicles comprise DNA nanoclews. A DNA nanoclew refers to a sphere-like structure of DNA (e.g., with a shape of a ball of yarn). The nanoclew may be synthesized by rolling circle amplification with palindromic sequences that aide in the self-assembly of the structure. The sphere may then be loaded with a payload. An example of DNA nanoclew is described in Sun W et al, J Am Chem Soc. 2014 Oct. 22; 136(42):14722-5; and Sun W et al, Angew Chem Int Ed Engl. 2015 Oct. 5; 54(41):12029-33. DNA nanoclew may have a palindromic sequence to be partially complementary to the gRNA within the Cas:gRNA ribonucleoprotein complex. A DNA nanoclew may be coated, e.g., coated with PEI to induce endosomal escape.

### Gold Nanoparticles

[0608] In some embodiments, the delivery vehicles comprise gold nanoparticles (also referred to AuNPs or colloidal gold). Gold nanoparticles may form complex with cargos, e.g., Cas:gRNA RNP. Gold nanoparticles may be coated, e.g., coated in a silicate and an endosomal disruptive polymer, PAsp(DET). Examples of gold nanoparticles include AuraSense Therapeutics' Spherical Nucleic Acid (SNA™) constructs, and those described in Mout R, et al. (2017). ACS Nano 11:2452-8; Lee K, et al. (2017). Nat Biomed Eng 1:889-901.

iTOP

[0609] In some embodiments, the delivery vehicles comprise iTOP. iTOP refers to a combination of small molecules drives the highly efficient intracellular delivery of native proteins, independent of any transduction peptide. iTOP may be used for induced transduction by osmocytosis and propanebetaine, using NaCl-mediated hyperosmolality together with a transduction compound (propanebetaine) to trigger macropinocytotic uptake into cells of extracellular macromolecules. Examples of iTOP methods and reagents include those described in D'Astolfo D S, Pagliero R J, Pras A, et al. (2015). Cell 161:674-690.

### Polymer-Based Particles

[0610] In some embodiments, the delivery vehicles may comprise polymer-based particles (e.g., nanoparticles). In some embodiments, the polymer-based particles may mimic a viral mechanism of membrane fusion. The polymer-based particles may be a synthetic copy of Influenza virus machinery and form transfection complexes with various types of nucleic acids ((siRNA, miRNA, plasmid DNA or shRNA, mRNA) that cells take up via the endocytosis pathway, a process that involves the formation of an acidic compartment. The low pH in late endosomes acts as a chemical switch that renders the particle surface hydrophobic and facilitates membrane crossing. Once in the cytosol, the particle releases its payload for cellular action. This Active Endosome Escape technology is safe and maximizes transfection efficiency as it is using a natural uptake pathway. In some embodiments, the polymer-based particles may comprise alkylated and carboxyalkylated branched polyethylenimine. In some examples, the polymer-based particles are VIROMER, e.g., VIROMER RNAi, VIROMER RED, VIROMER mRNA, VIROMER CRISPR. Example methods of delivering the systems and compositions herein include those described in Bawage S S et al., Synthetic mRNA expressed Cas13a mitigates RNA virus infections, www.biorxiv.org/content/10.1101/370460v1.full doi: doi.org/10.1101/370460, Viromer® RED, a powerful tool for transfection of keratinocytes. doi: 10.13140/RG.2.2.16993.61281, Viromer® Transfection—Factbook 2018: technology, product overview, users' data., doi:10.13140/RG.2.2.23912.16642.

### Streptolysin O (SLO)

[0611] The delivery vehicles may be streptolysin O (SLO). SLO is a toxin produced by Group A streptococci that works by creating pores in mammalian cell membranes. SLO may act in a reversible manner, which allows for the delivery of proteins (e.g., up to 100 kDa) to the cytosol of cells without compromising overall viability. Examples of SLO include those described in Sierig G, et al. (2003). Infect Immun 71:446-55; Walev I, et al. (2001). Proc Natl Acad Sci USA 98:3185-90; Teng K W, et al. (2017). Elife 6:e25460.

### Multifunctional Envelope-Type Nanodevice (MEND)

[0612] The delivery vehicles may comprise multifunctional envelope-type nanodevice (MENDs). MENDs may comprise condensed plasmid DNA, a PLL core, and a lipid film shell. A MEND may further comprise cell-penetrating peptide (e.g., stearyl octaarginine). The cell penetrating peptide may be in the lipid shell. The lipid envelope may be modified with one or more functional components, e.g., one or more of: polyethylene glycol (e.g., to increase vascular circulation time), ligands for targeting of specific tissues/cells, additional cell-penetrating peptides (e.g., for greater cellular delivery), lipids to enhance endosomal escape, and nuclear delivery tags. In some examples, the MEND may be a tetra-lamellar MEND (T-MEND), which may target the cellular nucleus and mitochondria. In certain examples, a MEND may be a PEG-peptide-DOPE-conjugated MEND (PPD-MEND), which may target bladder cancer cells. Examples of MENDs include those described in Kogure K, et al. (2004). J Control Release 98:317-23; Nakamura T, et al. (2012). Acc Chem Res 45:1113-21.

### Lipid-Coated Mesoporous Silica Particles

[0613] The delivery vehicles may comprise lipid-coated mesoporous silica particles. Lipid-coated mesoporous silica particles may comprise a mesoporous silica nanoparticle core and a lipid membrane shell. The silica core may have a large internal surface area, leading to high cargo loading capacities. In some embodiments, pore sizes, pore chemistry, and overall particle sizes may be modified for loading different types of cargos. The lipid coating of the particle may also be modified to maximize cargo loading, increase circulation times, and provide precise targeting and cargo release. Examples of lipid-coated mesoporous silica particles include those described in Du X, et al. (2014). Biomaterials 35:5580-90; Durfee P N, et al. (2016). ACS Nano 10:8325-45.

### Inorganic Nanoparticles

[0614] The delivery vehicles may comprise inorganic nanoparticles. Examples of inorganic nanoparticles include carbon nanotubes (CNTs) (e.g., as described in Bates K and Kostarelos K. (2013). Adv Drug Deliv Rev 65:2023-33.), bare mesoporous silica nanoparticles (MSNPs) (e.g., as described in Luo G F, et al. (2014). Sci Rep 4:6064), and dense silica nanoparticles (SiNPs) (as described in Luo D and Saltzman W M. (2000). Nat Biotechnol 18:893-5).

### Exosomes

[0615] The delivery vehicles may comprise exosomes. Exosomes include membrane bound extracellular vesicles, which can be used to contain and delivery various types of biomolecules, such as proteins, carbohydrates, lipids, and nucleic acids, and complexes thereof (e.g., RNPs). Examples of exosomes include those described in Schroeder A, et al., J Intern Med. 2010 January; 267(1):9-21; El-Andaloussi S, et al., Nat Protoc. 2012 December; 7(12):2112-26; Uno Y, et al., Hum Gene Ther. 2011 June; 22(6):711-9; Zou W, et al., Hum Gene Ther. 2011 April; 22(4):465-75.

[0616] In some examples, the exosome may form a complex (e.g., by binding directly or indirectly) to one or more components of the cargo. In certain examples, a molecule of an exosome may be fused with first adapter protein and a component of the cargo may be fused with a second adapter protein. The first and the second adapter protein may specifically bind each other, thus associating the cargo with the exosome. Examples of such exosomes include those described in Ye Y, et al., Biomater Sci. 2020 Apr. 28. doi: 10.1039/d0bm00427h.

### Optimized Functional RNA Targeting Systems

[0617] In an aspect the invention thus provides a system for specific delivery of functional components to the RNA environment. This can be ensured using the CRISPR systems comprising the RNA targeting effector proteins of the present invention which allow specific targeting of different components to RNA. More particularly such components include activators or repressors, such as activators or repressors of RNA translation, degradation, etc. CRISPR-Cas13 knockdown allows for temporary reduction of gene expression through the use of artificial transcription factors, e.g., via mutating residues in cleavage domain(s) of the Cas13 protein results in the generation of a catalytically inactive Cas13 protein. A catalytically inactive Cas13 complexes with a guide RNA or crRNA and localizes to the RNA sequence specified by that guide RNA's or crRNA's targeting domain, however, it does not cleave the target. Fusion of the inactive Cas13 protein to an effector domain, e.g., a transcription repression domain, enables recruitment of the effector to any site specified by the guide RNA.

[0618] According to one aspect the invention provides non-naturally occurring or engineered composition comprising a guide RNA or crRNA comprising a guide sequence capable of hybridizing to a target sequence of interest in a cell, wherein the guide RNA or crRNA is modified by the insertion of one or more distinct RNA sequence(s) that bind an adaptor protein. In particular embodiments, the RNA sequences may bind to two or more adaptor proteins (e.g. aptamers), and wherein each adaptor protein is associated with one or more functional domains. When there is more than one functional domain, the functional domains can be same or different, e.g., two of the same or two different activators or repressors. In an aspect the invention provides a herein-discussed composition, wherein the one or more functional domains are attached to the RNA targeting enzyme so that upon binding to the target RNA the functional domain is in a spatial orientation allowing for the functional domain to function in its attributed function; In an aspect the invention provides a herein-discussed composition, wherein the composition comprises a CRISPR-Cas13 complex having at least three functional domains, at least one of which is associated with the RNA targeting enzyme and at least two of which are associated with the gRNA or crRNA.

### Genetically Modified Cells and Organisms

[0619] The present disclosure further provides cells comprising one or more components of the systems herein, e.g., the Cas protein and/or guide molecule(s). Also provided include cells modified by the systems and methods herein, and cell cultures, tissues, organs, organism comprising such cells or progeny thereof. The invention in some embodiments comprehends a method of modifying an cell or organism. The cell may be a prokaryotic cell or a eukaryotic cell. The cell may be a mammalian cell. The mammalian cell many be a non-human primate, bovine, porcine, rodent or mouse cell. The cell may be a non-mammalian eukaryotic cell such as poultry, fish or shrimp. The cell may be a therapeutic T cell or antibody-producing B-cell. The cell may also be a plant cell. The plant cell may be of a crop plant such as cassava, corn, sorghum, wheat, or rice. The plant cell may also be of an algae, tree or vegetable. The modification introduced to the cell by the present invention may be such that the cell and progeny of the cell are altered for improved production of biologic products such as an antibody, starch, alcohol or other desired cellular output. The modification introduced to the cell by the present invention may be such that the cell and progeny of the cell include an alteration that changes the biologic product produced.

[0620] In some embodiments, one or more polynucleotide molecules, vectors, or vector systems driving expression of one or more elements of a nucleic acid-targeting system or delivery systems comprising one or more elements of the nucleic acid-targeting system are introduced into a host cell such that expression of the elements of the nucleic acid-targeting system direct formation of a nucleic acid-targeting complex at one or more target sites. In certain embodiments of the invention the host cell may be a eukaryotic cell, a prokaryotic cell, or a plant cell.

[0621] In particular embodiments, the host cell is a cell of a cell line. Cell lines are available from a variety of sources known to those with skill in the art (see, e.g., the American Type Culture Collection (ATCC) (Manassas, Va.)). In some embodiments, a cell transfected with one or more vectors described herein is used to establish a new cell line comprising one or more vector-derived sequences. In some embodiments, a cell transiently transfected with the components of a CRISPR system as described herein (such as by transient transfection of one or more vectors, or transfection with RNA), and modified through the activity of a CRISPR complex, is used to establish a new cell line comprising cells containing the modification but lacking any other exogenous sequence. In some embodiments, cells transiently or non-transiently transfected with one or more vectors described herein, or cell lines derived from such cells are used in assessing one or more test compounds.

[0622] Further intended are isolated human cells or tissues, plants or non-human animals comprising one or more of the polynucleotide molecules, vectors, vector systems, or cells described in any of the embodiments herein. In an aspect, host cells and cell lines modified by or comprising the compositions, systems or modified enzymes of present invention are provided, including (isolated) stem cells, and progeny thereof.

[0623] In certain embodiments, the plants or non-human animals comprise at least one of the CRISPR system components, polynucleotide molecules, vectors, vector systems, or cells described in any of the embodiments herein at least one tissue type of the plant or non-human animal. In certain embodiments, non-human animals comprise at least one of the CRISPR system components, polynucleotide molecules, vectors, vector systems, or cells described in any of the embodiments herein in at least one tissue type. In certain embodiments, the presence of the CRISPR system components is transient, in that they are degraded over time. In certain embodiments, expression of the CRISPR-Cas systems or Cas proteins described in any of the embodiments comprised in polynucleotide molecules, vectors, vector systems, or cells is limited to certain tissue types or regions in the plant or non-human animal. In certain embodiments, the expression of the CRISPR-Cas systems or Cas proteins described in any of the embodiments comprised in polynucleotide molecules, vectors, vector systems, or cells is dependent of a physiological cue. In certain embodiments, expression of the CRISPR-Cas systems or Cas proteins described in any of the embodiments comprised in polynucleotide molecules, vectors, vector systems, or cells may be triggered by an exogenous molecule. In certain embodiments, expression of the CRISPR-Cas systems or Cas proteins described in any of the embodiments comprised in polynucleotide molecules, vectors, vector systems, or cells is dependent on the expression of a non-cas molecule in the plant or non-human animal.

### Methods of Use in General

[0624] In another aspect, the present disclosure discloses methods of using the compositions and systems herein. In general, the methods include modifying a target nucleic acid by introducing in a cell or organism that comprises the target nucleic acid the engineered Cas protein, polynucleotide(s) encoding engineered Cas protein, the CRISPR-Cas system, or the vector or vector system comprising the polynucleotide(s), such that the engineered CRISPR-Cas protein modifies the target nucleic acid in the cell or organism. The engineered CRISPR-Cas protein or system may be introduced via delivery by liposomes, nanoparticles, exosomes, microvesicles, nucleic acid nanoassemblies, a gene gun, an implantable device, or the vector system herein. The cell or organisms may be a eukaryotic cell or organism. The cell or organisms is an animal cell or organism. The cell or organisms is a plant cell or organism. Examples of nucleic acid nanoassemblies include DNA origami and RNA origami, e.g., those described in U.S. Pat. No. 8,554,489, US20160103951, WO2017189914, and WO2017189870, which are incorporated by reference in their entireties. A gene gun may include a biolistic particle delivery system, which is a device for delivering exogenous DNA (transgenes) to cells. The payload may be an elemental particle of a heavy metal coated with DNA (typically plasmid DNA). An example of delivery components in CRISPR-Cas systems is described in Svitashev et al., Nat Commun. 2016; 7: 13274.

[0625] In some embodiments, the target nucleic acid comprises a genomic locus, and the engineered CRISPR-Cas protein modifies gene product encoded at the genomic locus or expression of the gene product. The target nucleic acid is DNA or RNA and wherein one or more nucleotides in the target nucleic acid may be base edited. The target nucleic acid may be DNA or RNA and wherein the target nucleic acid is cleaved. The engineered CRISPR-Cas protein may further cleave non-target nucleic acid.

### Non-Homologous End-Joining

[0626] In certain embodiments, nuclease-induced non-homologous end-joining (NHEJ) can be used to target gene-specific knockouts. Nuclease-induced NHEJ can also be used to remove (e.g., delete) sequence in a gene of interest. Generally, NHEJ repairs a double-strand break in the DNA by joining together the two ends; however, generally, the original sequence is restored only if two compatible ends, exactly as they were formed by the double-strand break, are perfectly ligated. The DNA ends of the double-strand break are frequently the subject of enzymatic processing, resulting in the addition or removal of nucleotides, at one or both strands, prior to rejoining of the ends. This results in the presence of insertion and/or deletion (indel) mutations in the DNA sequence at the site of the NHEJ repair. Two-thirds of these mutations typically alter the reading frame and, therefore, produce a non-functional protein. Additionally, mutations that maintain the reading frame, but which insert or delete a significant amount of sequence, can destroy functionality of the protein. This is locus dependent as mutations in critical functional domains are likely less tolerable than mutations in non-critical regions of the protein. The indel mutations generated by NHEJ are unpredictable in nature; however, at a given break site certain indel sequences are favored and are over represented in the population, likely due to small regions of microhomology. The lengths of deletions can vary widely; most commonly in the 1-50 bp range, but they can easily be greater than 50 bp, e.g., they can easily reach greater than about 100-200 bp. Insertions tend to be shorter and often include short duplications of the sequence immediately surrounding the break site. However, it is possible to obtain large insertions, and in these cases, the inserted sequence has often been traced to other regions of the genome or to plasmid DNA present in the cells.

[0627] Because NHEJ is a mutagenic process, it may also be used to delete small sequence motifs as long as the generation of a specific final sequence is not required. If a double-strand break is targeted near to a short target sequence, the deletion mutations caused by the NHEJ repair often span, and therefore remove, the unwanted nucleotides. For the deletion of larger DNA segments, introducing two double-strand breaks, one on each side of the sequence, can result in NHEJ between the ends with removal of the entire intervening sequence. Both of these approaches can be used to delete specific DNA sequences; however, the error-prone nature of NHEJ may still produce indel mutations at the site of repair.

[0628] Both double strand cleaving Cas proteins, or an ortholog or homolog thereof, and single strand, or nickase, Cas proteins, or an ortholog or homolog thereof, molecules can be used in the methods and compositions described herein to generate NHEJ-mediated indels. NHEJ-mediated indels targeted to the gene, e.g., a coding region, e.g., an early coding region of a gene of interest can be used to knockout (i.e., eliminate expression of) a gene of interest. For example, early coding region of a gene of interest includes sequence immediately following a transcription start site, within a first exon of the coding sequence, or within 500 bp of the transcription start site (e.g., less than 500, 450, 400, 350, 300, 250, 200, 150, 100 or 50 bp).

[0629] In an embodiment, in which a guide RNA and Cas protein, or an ortholog or homolog thereof, generate a double strand break for the purpose of inducing NHEJ-mediated indels, a guide RNA may be configured to position one double-strand break in close proximity to a nucleotide of the target position. In an embodiment, the cleavage site may be between 0-500 bp away from the target position (e.g., less than 500, 400, 300, 200, 100, 50, 40, 30, 25, 20, 15, 10, 9, 8, 7, 6, 5, 4, 3, 2 or 1 bp from the target position).

[0630] In an embodiment, in which two guide RNAs complexing with Cas proteins, or an ortholog or homolog thereof, preferably Cas nickases induce two single strand breaks for the purpose of inducing NHEJ-mediated indels, two guide RNAs may be configured to position two single-strand breaks to provide for NHEJ repair a nucleotide of the target position.

[0631] In some examples, the systems herein may introduce one or more indels via NHEJ pathway and insert sequence from a combination template via HDR.

### Diagnostic Uses

[0632] In some embodiments, the methods may further comprise visualizing activity and, optionally, using a detectable label. The method may also comprise detecting binding of one or more components of the CRISPR-Cas system to the target nucleic acid.

[0633] In another aspect the methods of use include detecting a target nucleic acid in a sample. In some embodiments, the methods include contacting a sample with: an engineered CRISPR-Cas protein herein; at least one guide polynucleotide comprising a guide sequence capable of binding to the target nucleic acid and designed to form a complex with the engineered CRISPR-Cas; and a RNA-based masking construct comprising a non-target sequence; wherein the engineered CRISPR-Cas protein exhibits collateral RNase activity and cleaves the non-target sequence of the detection construct; and detecting a signal from cleavage of the non-target sequence, thereby detecting the target nucleic acid in the sample. The methods may further comprise contacting the sample with reagents for amplifying the target nucleic acid. The reagents for amplifying may comprise isothermal amplification reaction reagents. The isothermal amplification reagents may comprise nucleic-acid sequence-based amplification, recombinase polymerase amplification, loop-mediated isothermal amplification, strand displacement amplification, helicase-dependent amplification, or nicking enzyme amplification reagents. The target nucleic acid is DNA molecule and the method may further comprise contacting the target DNA molecule with a primer comprising an RNA polymerase site and RNA polymerase.

[0634] Detection can comprise two or more detection systems utilizing RNA targeting Cas effector proteins; DNA targeting Cas effector proteins, or a combination thereof. The RNA-targeting effector proteins may be a Cas13 protein, such as Cas13a, Cas13b, or Cas13c. The DNA-targeting effector protein may be a Type VI protein, e.g. Cas12 protein such as Cpf1 and C2c1. Multiplexing systems can be designed such that different Cas proteins with different sequence specificities or other motif cutting preferences can be used. See International Publication WO 2019/126577. Multiplex approaches and selection of Cas effector proteins can be as described in International Publication WO 2019/126577 at [0415]-[0416] and Examples 1-10, incorporated herein by reference.

[0635] The masking construct: suppresses generation of a detectable positive signal until the masking construct cleaved or deactivated, or masks a detectable positive signal or generates a detectable negative signal until the masking construct cleaved or deactivated. The masking construct may comprise: a silencing RNA that suppresses generation of a gene product encoded by a reporting construct, wherein the gene product generates the detectable positive signal when expressed; a ribozyme that generates the negative detectable signal, and wherein the positive detectable signal is generated when the ribozyme is deactivated; or a ribozyme that converts a substrate to a first color and wherein the substrate converts to a second color when the ribozyme is deactivated; an aptamer and/or comprises a polynucleotide-tethered inhibitor; a polynucleotide to which a detectable ligand and a masking component are attached; a nanoparticle held in aggregate by bridge molecules, wherein at least a portion of the bridge molecules comprises a polynucleotide, and wherein the solution undergoes a color shift when the nanoparticle is disbursed in solution; a quantum dot or fluorophore linked to one or more quencher molecules by a linking molecule, wherein at least a portion of the linking molecule comprises a polynucleotide; a polynucleotide in complex with an intercalating agent, wherein the intercalating agent changes absorbance upon cleavage of the polynucleotide; or two fluorophores tethered by a polynucleotide that undergo a shift in fluorescence when released from the polynucleotide.

[0636] The aptamer may comprise a polynucleotide-tethered inhibitor that sequesters an enzyme, wherein the enzyme generates a detectable signal upon release from the aptamer or polynucleotide-tethered inhibitor by acting upon a substrate; or may be an inhibitory aptamer that inhibits an enzyme and prevents the enzyme from catalyzing generation of a detectable signal from a substrate or wherein the polynucleotide-tethered inhibitor inhibits an enzyme and prevents the enzyme from catalyzing generation of a detectable signal from a substrate; or sequesters a pair of agents that when released from the aptamers combine to generate a detectable signal.

[0637] The nanoparticle may be a colloidal metal. The colloidal metal material may include water-insoluble metal particles or metallic compounds dispersed in a liquid, a hydrosol, or a metal sol. The colloidal metal may be selected from the metals in groups IA, IB, IIB and IIIB of the periodic table, as well as the transition metals, especially those of group VIII. Preferred metals include gold, silver, aluminum, ruthenium, zinc, iron, nickel and calcium. Other suitable metals also include the following in all of their various oxidation states: lithium, sodium, magnesium, potassium, scandium, titanium, vanadium, chromium, manganese, cobalt, copper, gallium, strontium, niobium, molybdenum, palladium, indium, tin, tungsten, rhenium, platinum, and gadolinium. The metals are preferably provided in ionic form, derived from an appropriate metal compound, for example the Al³⁺, Ru³⁺, Zn²⁺, Fe³⁺, Ni²⁺ and Ca²⁺ ions.

[0638] When the RNA bridge is cut by the activated CRISPR effector, the beforementioned color shift is observed. In certain example embodiments the particles are colloidal metals. In certain other example embodiments, the colloidal metal is a colloidal gold. In certain example embodiments, the colloidal nanoparticles are 15 nm gold nanoparticles (AuNPs). Due to the unique surface properties of colloidal gold nanoparticles, maximal absorbance is observed at 520 nm when fully dispersed in solution and appear red in color to the naked eye. Upon aggregation of AuNPs, they exhibit a red-shift in maximal absorbance and appear darker in color, eventually precipitating from solution as a dark purple aggregate.

[0639] In some embodiments, at least one guide polynucleotide comprises a mismatch. The mismatch may be up- or downstream of a single nucleotide variation on the one or more guide sequences. In certain embodiments, modulations of cleavage efficiency can be exploited by introduction of mismatches, e.g. 1 or more mismatches, such as 1 or 2 mismatches between spacer sequence and target sequence, including the position of the mismatch along the spacer/target. The more central (i.e. not 3′ or 5′) for instance a double mismatch is, the more cleavage efficiency is affected. Accordingly, by choosing mismatch position along the spacer, cleavage efficiency can be modulated. By means of example, if less than 100% cleavage of targets is desired (e.g. in a cell population), 1 or more, such as preferably 2 mismatches between spacer and target sequence may be introduced in the spacer sequences. The more central along the spacer of the mismatch position, the lower the cleavage percentage. In certain example embodiments, the cleavage efficiency may be exploited to design single guides that can distinguish two or more targets that vary by a single nucleotide, such as a single nucleotide polymorphism (SNP), variation, or (point) mutation. The CRISPR effector may have reduced sensitivity to SNPs (or other single nucleotide variations) and continue to cleave SNP targets with a certain level of efficiency. Thus, for two targets, or a set of targets, a guide RNA may be designed with a nucleotide sequence that is complementary to one of the targets i.e. the on-target SNP. The guide RNA is further designed to have a synthetic mismatch. As used herein a “synthetic mismatch” refers to a non-naturally occurring mismatch that is introduced upstream or downstream of the naturally occurring SNP, such as at most 5 nucleotides upstream or downstream, for instance 4, 3, 2, or 1 nucleotide upstream or downstream, preferably at most 3 nucleotides upstream or downstream, more preferably at most 2 nucleotides upstream or downstream, most preferably 1 nucleotide upstream or downstream (i.e. adjacent the SNP). When the CRISPR effector binds to the on-target SNP, only a single mismatch will be formed with the synthetic mismatch and the CRISPR effector will continue to be activated and a detectable signal produced. When the guide RNA hybridizes to an off-target SNP, two mismatches will be formed, the mismatch from the SNP and the synthetic mismatch, and no detectable signal generated. Thus, the systems disclosed herein may be designed to distinguish SNPs within a population. For, example the systems may be used to distinguish pathogenic strains that differ by a single SNP or detect certain disease specific SNPs, such as but not limited to, disease associated SNPs, such as without limitation cancer associated SNPs.

[0640] In certain embodiments, the guide RNA is designed such that the SNP is located on position 1, 2, 3, 4, 5, 6, 7, 8, 9, 10, 11, 12, 13, 14, 15, 16, 17, 18, 19, 20, 21, 22, 23, 24, 25, 26, 27, 28, 29, or 30 of the spacer sequence (starting at the 5′ end). In certain embodiments, the guide RNA is designed such that the SNP is located on position 1, 2, 3, 4, 5, 6, 7, 8, or 9 of the spacer sequence (starting at the 5′ end). In certain embodiments, the guide RNA is designed such that the SNP is located on position 2, 3, 4, 5, 6, or 7 of the spacer sequence (starting at the 5′ end). In certain embodiments, the guide RNA is designed such that the SNP is located on position 3, 4, 5, or 6 of the spacer sequence (starting at the 5′ end). In certain embodiments, the guide RNA is designed such that the SNP is located on position 3 of the spacer sequence (starting at the 5′ end).

[0641] In certain embodiments, the guide RNA is designed such that the mismatch (e.g. The synthetic mismatch, i.e. an additional mutation besides a SNP) is located on position 1, 2, 3, 4, 5, 6, 7, 8, 9, 10, 11, 12, 13, 14, 15, 16, 17, 18, 19, 20, 21, 22, 23, 24, 25, 26, 27, 28, 29, or 30 of the spacer sequence (starting at the 5′ end). In certain embodiments, the guide RNA is designed such that the mismatch is located on position 1, 2, 3, 4, 5, 6, 7, 8, or 9 of the spacer sequence (starting at the 5′ end). In certain embodiments, the guide RNA is designed such that the mismatch is located on position 4, 5, 6, or 7 of the spacer sequence (starting at the 5′ end. In certain embodiments, the guide RNA is designed such that the mismatch is located on position 5 of the spacer sequence (starting at the 5′ end).

[0642] In certain embodiments, the guide RNA is designed such that the mismatch is located 2 nucleotides upstream of the SNP (i.e. one intervening nucleotide). In certain embodiments, the guide RNA is designed such that the mismatch is located 2 nucleotides downstream of the SNP (i.e. one intervening nucleotide). In certain embodiments, the guide RNA is designed such that the mismatch is located on position 5 of the spacer sequence (starting at the 5′ end) and the SNP is located on position 3 of the spacer sequence (starting at the 5′ end).

### Microbe Detection and Diagnostics

[0643] In an aspect, methods of diagnostics and/or detection comprise detecting the presence of one or more viruses or viral infections. Design of kits and systems for use in the diagnostic and detection methods are also provided. The virus may be a DNA virus, a RNA virus, or a retrovirus, or a combination thereof. Methods of viral detection are described in International Patent Publication No. WO 2018/170340. Particular viral applications include viruses as described in International Publication WO 2018/170340 at [0347]-[0354], and Tables 8 and 9, incorporated herein by reference. Viral diagnostics platforms can be developed utilizing the methods as described in Myrhvold et al., “Field Deployable viral diagnostics using CRISPR-Cas13” Science 360, 444-448 (2018). Clinical samples such as urine, plasma, saliva, whole blood, or serum can be used for sensitive detection of viral infections. Such methods can also be utilized with Cas proteins alone or in conjunction with Cas13 proteins, as described elsewhere herein.

[0644] Systems and methods can be designed for the detection and diagnosis of microbes, including bacterial, fungi and viral microbes. In an aspect, the systems may comprise multiplex detection of multiple variants of viral infections, including coronavirus, different viruses which may be related coronaviruses or respiratory viruses, or a combination thereof. In embodiments, assays can be performed for a variety of viruses and viral infections, including acute respiratory infections using the disclosure detailed herein. The systems can comprise two or more CRISPR Cas systems to multiplex, as described elsewhere herein, to detect a plurality of respiratory infections or viral infections, including coronavirus. The coronavirus is a positive-sense single stranded RNA family of viruses, infecting a variety of animals and humans. In one aspect, the detection systems are utilized to identify patients infected with a coronavirus, e.g., the 2019-nCoV, or a related coronavirus, for example, a coronavirus comprising at least 80%, 85%, 90%, 95%, 96%, 97%, 98% or 99% identity to the 2019-nCoV, GISAID deposit accession no. EPI_ISL_402124 and EPI_ISL_402127-402130, and described in DOI: 10.1101/2020.01.22.914952, or EP_ISL 402119-402121 and EP_ISL 402123-402124; see also GenBank Accession No. MN908947.3.

[0645] Examples of microbes (and infection thereof) that can be detected and/or diagnosed with the compositions, systems, and methods herein include those described in paragraphs [00288]-[00298] of Zhang et al., WO2019148206A1, which is incorporated by reference herein in its entirety.

### Transcript Tracking

[0646] In another aspect, the present disclosure provides compositions and methods for transcript tracking. In some embodiments, transcript tracking allows researchers to visualize transcripts in cells, tissues, organs or animals, providing important spatio-temporal information regarding RNA dynamics and function.

[0647] In some embodiments, the compositions may be a CRISPR-Cas protein herein with one or more labels, or a CRISPR-Cas system comprising such labeled CRISPR-Cas protein. The CRISPR-Cas protein or system may bind to one or more transcripts such that the transcripts may be detected (e.g., visualized) using the label on the CRISPR-Cas protein.

[0648] In some embodiments, the present disclosure includes a system for expressing a CRISPR-Cas protein with one or more polypeptides or polynucleotide labels. The system may comprise polynucleotides encoding the CRISPR-Cas protein and/or the labels. The system may further include vector systems comprising such polynucleotides. For example, a CRISPR-Cas protein may be fused with a fluorescent protein or a fragment thereof. Examples of fluorescent proteins include GFP proteins, EGFP, Azami-Green, Kaede, ZsGreen1 and CopGFP; CFP proteins, such as Cerulean, mCFP, AmCyan1, MiCy, and CyPet; BFP proteins such as EBFP; YFP proteins such as EYFP, YPet, Venus, ZsYellow, and mCitrine; OFP proteins such as cOFP, mKO, and mOrange; red fluorescent protein, or RFP; red or far-red fluorescent proteins from any other species, such as Heteractis reef coral and Actinia or Entacmaea sea anemone, as well as variants thereof. RFPs include, for example, Discosomavariants, such as mRFP1, mCherry, tdTomato, mStrawberry, mTangerine, DsRed2, and DsRed-T1, Anthomedusa J-Red and Anemonia AsRed2. Far-red fluorescent proteins include, for example, Actinia AQ143, Entacmaea eqFP611, Discosoma variants such as mPlum and mRasberry, and Heteractis HcRed1 and t-HcRed.

[0649] In some cases, the systems for expressing the labeled CRISPR-Cas protein may be inducible. For example, the systems may comprise polynucleotides encoding the CRISPR-Cas protein and/or labels under control of a regulatory element herein, e.g., inducible promoters. Such systems may allow spatial and/or temporal control of the expression of the labels, thus enabling spatial and/or temporal control of transcript tracking.

[0650] In certain cases, the CRISPR-Cas may be labeled with a detectable tag. The labeling may be performed in cells. Alternatively or additionally, the labeling may be performed first and the labeled CRISPR-Cas protein is then delivered into cells, tissues, organs, or organs.

[0651] The detectable tags may be detected (e.g., visualized by imaging, ultrasound, or MRI). Examples of such detectable tags include detectable oligonucleotide tags may be, but are not limited to, oligonucleotides comprising unique nucleotide sequences, oligonucleotides comprising detectable moieties, and oligonucleotides comprising both unique nucleotide sequences and detectable moieties. In some cases, the detectable tag comprises a labeling substance, which is detectable by spectroscopic, photochemical, biochemical, immunochemical, electrical, optical or chemical means. Such tags include biotin for staining with labeled streptavidin conjugate, magnetic beads (e.g., Dynabeads®), fluorescent dyes (e.g., fluorescein, texas red, rhodamine, green fluorescent protein, and the like), radiolabels (e.g., ³H, ¹²⁵H, ³⁵S, ¹⁴C or ³²P), enzymes (e.g., horse radish peroxidase, alkaline phosphatase and others commonly used in an ELISA), and calorimetric labels such as colloidal gold or colored glass or plastic (e.g., polystyrene, polypropylene, latex, etc.) beads. Detectable tags may be detected by many methods. For example, radiolabels may be detected using photographic film or scintillation counters, fluorescent markers may be detected using a photodetector to detect emitted light. Enzymatic labels are typically detected by providing the enzyme with a substrate and detecting, the reaction product produced by the action of the enzyme on the substrate, and colorimetric labels are detected by simply visualizing the colored label. Examples of the labeling substance which may be employed include labeling substances known to those skilled in the art, such as fluorescent dyes, enzymes, coenzymes, chemiluminescent substances, and radioactive substances. Specific examples include radioisotopes (e.g., ³²P, ¹⁴C, ¹²⁵I, ³H, and ¹³¹I) fluorescein, rhodamine, dansyl chloride, umbelliferone, luciferase, peroxidase, alkaline phosphatase, β-galactosidase, β-glucosidase, horseradish peroxidase, glucoamylase, lysozyme, saccharide oxidase, microperoxidase, biotin, and ruthenium. In the case where biotin is employed as a labeling substance, preferably, after addition of a biotin-labeled antibody, streptavidin bound to an enzyme (e.g., peroxidase) is further added. Advantageously, the label is a fluorescent label. Examples of fluorescent labels include, but are not limited to, Atto dyes, 4-acetamido-4′-isothiocyanatostilbene-2,2′disulfonic acid; acridine and derivatives: acridine, acridine isothiocyanate; 5-(2′-aminoethyl)aminonaphthalene-1-sulfonic acid (EDANS); 4-amino-N-[3-vinylsulfonyl)phenyl]naphthalimide-3,5 di sulfonate; N-(4-anilino-1-naphthyl)maleimide; anthranilamide; BODIPY; Brilliant Yellow; coumarin and derivatives; coumarin, 7-amino-4-methylcoumarin (AMC, Coumarin 120), 7-amino-4-trifluoromethylcouluarin (Coumaran 151); cyanine dyes; cyanosine; 4′,6-diaminidino-2-phenylindole (DAPI); 5′5″-dibromopyrogallol-sulfonaphthalein (Bromopyrogallol Red); 7-diethylamino-3-(4′-isothiocyanatophenyl)-4-methylcoumarin; diethylenetriamine pentaacetate; 4,4′-diisothiocyanatodihydro-stilbene-2,2′-disulfonic acid; 4,4′-diisothiocyanatostilbene-2,2′-di sulfonic acid; 5-[dimethylamino]naphthalene-1-sulfonyl chloride (DNS, dansylchloride); 4-dimethylaminophenylazophenyl-4′-isothiocyanate (DABITC); eosin and derivatives; eosin, eosin isothiocyanate, erythrosin and derivatives; erythrosin B, erythrosin, isothiocyanate; ethidium; fluorescein and derivatives; 5-carboxyfluorescein (FAM), 5-(4,6-dichlorotriazin-2-yl)aminofluorescein (DTAF), 2′,7′-dimethoxy-4′5′-dichloro-6-carboxyfluorescein, fluorescein, fluorescein isothiocyanate, QFITC, (XRITC); fluorescamine; IR144; IR1446; Malachite Green isothiocyanate; 4-methylumbelliferoneortho cresolphthalein; nitrotyrosine; pararosaniline; Phenol Red; B-phycoerythrin; o-phthaldialdehyde; pyrene and derivatives: pyrene, pyrene butyrate, succinimidyl 1-pyrene; butyrate quantum dots; Reactive Red 4 (Cibacron™ Brilliant Red 3B-A) rhodamine and derivatives: 6-carboxy-X-rhodamine (ROX), 6-carboxyrhodamine (R6G), lissamine rhodamine B sulfonyl chloride rhodamine (Rhod), rhodamine B, rhodamine 123, rhodamine X isothiocyanate, sulforhodamine B, sulforhodamine 101, sulfonyl chloride derivative of sulforhodamine 101 (Texas Red); N,N,N′,N′ tetramethyl-6-carboxyrhodamine (TAMRA); tetramethyl rhodamine; tetramethyl rhodamine isothiocyanate (TRITC); riboflavin; rosolic acid; terbium chelate derivatives; Cy3; Cy5; Cy5.5; Cy7; IRD 700; IRD 800; La Jolta Blue; phthalo cyanine; and naphthalo cyanine. A fluorescent label may be a fluorescent protein, such as blue fluorescent protein, cyan fluorescent protein, green fluorescent protein, red fluorescent protein, yellow fluorescent protein or any photoconvertible protein. Colorimetric labeling, bioluminescent labeling and/or chemiluminescent labeling may further accomplish labeling. Labeling further may include energy transfer between molecules in the hybridization complex by perturbation analysis, quenching, or electron transport between donor and acceptor molecules, the latter of which may be facilitated by double stranded match hybridization complexes. The fluorescent label may be a perylene or a terrylen. In the alternative, the fluorescent label may be a fluorescent bar code. Advantageously, the label may be light sensitive, wherein the label is light-activated and/or light cleaves the one or more linkers to release the molecular cargo. The light-activated molecular cargo may be a major light-harvesting complex (LHCII). In another embodiment, the fluorescent label may induce free radical formation. In some embodiments, the detectable moieties may be quantum dots.

[0652] In some embodiments, the present disclosure provides for a system for delivery the labeled CRISPR-Cas proteins or labeled CRISPR-Cas systems. The delivery system may comprise any delivery vehicles, e.g., those described herein such as RNP, liposomes, nanoparticles, exosomes, microvesicles, nucleic acid nanoassemblies, a gene gun, an implantable device, or the vector systems herein.

### Nucleic Acid Targeting

[0653] In certain embodiments, the CRISPR-Cas effector protein of the invention is, or in, or comprises, or consists essentially of, or consists of, or involves or relates to such a protein from or as set forth herein, wherein one or more amino acids are mutated, as described herein elsewhere. Thus, in some embodiments, the effector protein may be a RNA-binding protein, such as a dead-Cas type effector protein, which may be optionally functionalized as described herein for instance with an transcriptional activator or repressor domain, NLS or other functional domain. In some embodiments, the effector protein may be a RNA-binding protein that cleaves a single strand of RNA. If the RNA bound is ssRNA, then the ssRNA is fully cleaved. In some embodiments, the effector protein may be a RNA-binding protein that cleaves a double strand of RNA, for example if it comprises two RNase domains. If the RNA bound is dsRNA, then the dsRNA is fully cleaved. In some embodiments, the effector protein may be a RNA-binding protein that has nickase activity, i.e. it binds dsRNA, but only cleaves one of the RNA strands.

[0654] RNase function in CRISPR systems is known, for example mRNA targeting has been reported for certain type III CRISPR-Cas systems (Hale et al., 2014, Genes Dev, vol. 28, 2432-2443; Hale et al., 2009, Cell, vol. 139, 945-956; Peng et al., 2015, Nucleic acids research, vol. 43, 406-417) and provides significant advantages. A CRISPR-Cas system, composition or method targeting RNA via the present effector proteins is thus provided.

[0655] The target RNA, i.e. the RNA of interest, is the RNA to be targeted by the present invention leading to the recruitment to, and the binding of the effector protein at, the target site of interest on the target RNA. The target RNA may be any suitable form of RNA. This may include, in some embodiments, mRNA. In other embodiments, the target RNA may include tRNA or rRNA.

### Self-Inactivating Systems

[0656] Once all copies of RNA in a cell have been edited, continued a CRISPR-Cas effector protein expression or activity in that cell is no longer necessary. A Self-Inactivating system that relies on the use of RNA as to the CRISPR-Cas or crRNA as the guide target sequence can shut down the system by preventing expression of CRISPR-Cas or complex formation.

### Examples of Target RNAs

[0657] The compositions and systems herein may be used for modifying various types of target RNAs. In some embodiments, the compositions and systems may be used to modify the target RNAs in a sequence-specific manner. For example, the target RNAs comprise target sequences for the guide sequences. Alternatively or additionally, in some embodiments, the compositions and systems may be used to modify the target RNAs in a non-sequence-specific manner. For example, the target RNAs may be modified or cleaved by the collateral activity of the Cas protein in the compositions and systems. Examples of target RNAs include those described below.

Interfering RNA (RNAi) and microRNA (miRNA)

[0658] In other embodiments, the target RNA may include interfering RNA, i.e. RNA involved in an RNA interference pathway, such as shRNA, siRNA and so forth. In other embodiments, the target RNA may include microRNA (miRNA). Control over interfering RNA or miRNA may help reduce off-target effects (OTE) seen with those approaches by reducing the longevity of the interfering RNA or miRNA in vivo or in vitro.

[0659] If the effector protein and suitable guide are selectively expressed (for example spatially or temporally under the control of a suitable promoter, for example a tissue- or cell cycle-specific promoter and/or enhancer) then this could be used to ‘protect’ the cells or systems (in vivo or in vitro) from RNAi in those cells. This may be useful in neighboring tissues or cells where RNAi is not required or for the purposes of comparison of the cells or tissues where the effector protein and suitable guide are and are not expressed (i.e. where the RNAi is not controlled and where it is, respectively). The effector protein may be used to control or bind to molecules comprising or consisting of RNA, such as ribozymes, ribosomes or riboswitches. In embodiments of the invention, the RNA guide can recruit the effector protein to these molecules so that the effector protein is able to bind to them.

Ribosomal RNA (rRNA)

[0660] For example, azalide antibiotics such as azithromycin, are well known. They target and disrupt the 50S ribosomal subunit. The present effector protein, together with a suitable guide RNA to target the 50S ribosomal subunit, may be, in some embodiments, recruited to and bind to the 50S ribosomal subunit. Thus, the present effector protein in concert with a suitable guide directed at a ribosomal (especially the 50s ribosomal subunit) target is provided. Use of this use effector protein in concert with the suitable guide directed at the ribosomal (especially the 50s ribosomal subunit) target may include antibiotic use. In particular, the antibiotic use is analogous to the action of azalide antibiotics, such as azithromycin. In some embodiments, prokaryotic ribosomal subunits, such as the 70S subunit in prokaryotes, the 50S subunit mentioned above, the 30S subunit, as well as the 16S and 5S subunits may be targeted. In other embodiments, eukaryotic ribosomal subunits, such as the 80S subunit in eukaryotes, the 60S subunit, the 40S subunit, as well as the 28S, 18S. 5.8S and 5S subunits may be targeted.

[0661] The effector protein may be a RNA-binding protein, optionally functionalized, as described herein. In some embodiments, the effector protein may be a RNA-binding protein that cleaves a single strand of RNA. In either case, but particularly where the RNA-binding protein cleaves a single strand of RNA, then ribosomal function may be modulated and, in particular, reduced or destroyed. This may apply to any ribosomal RNA and any ribosomal subunit and the sequences of rRNA are well known.

[0662] Control of ribosomal activity is thus envisaged through use of the present effector protein in concert with a suitable guide to the ribosomal target. This may be through cleavage of, or binding to, the ribosome. In particular, reduction of ribosomal activity is envisaged. This may be useful in assaying ribosomal function in vivo or in vitro, but also as a means of controlling therapies based on ribosomal activity, in vivo or in vitro. Furthermore, control (i.e. reduction) of protein synthesis in an in vivo or in vitro system is envisaged, such control including antibiotic and research and diagnostic use.

### Riboswitches

[0663] A riboswitch (also known as an aptozyme) is a regulatory segment of a messenger RNA molecule that binds a small molecule. This typically results in a change in production of the proteins encoded by the mRNA. Thus, control of riboswitch activity is thus envisaged through use of the present effector protein in concert with a suitable guide to the riboswitch target. This may be through cleavage of, or binding to, the riboswitch. In particular, reduction of riboswitch activity is envisaged. This may be useful in assaying riboswitch function in vivo or in vitro, but also as a means of controlling therapies based on riboswitch activity, in vivo or in vitro. Furthermore, control (i.e. reduction) of protein synthesis in an in vivo or in vitro system is envisaged. This control, as for rRNA may include antibiotic and research and diagnostic use.

### Ribozymes

[0664] Ribozymes are RNA molecules having catalytic properties, analogous to enzymes (which are of course proteins). As ribozymes, both naturally occurring and engineered, comprise or consist of RNA, they may also be targeted by the present RNA-binding effector protein. In some embodiments, the effector protein may be a RNA-binding protein cleaves the ribozyme to thereby disable it. Control of ribozymal activity is thus envisaged through use of the present effector protein in concert with a suitable guide to the ribozymal target. This may be through cleavage of, or binding to, the ribozyme. In particular, reduction of ribozymal activity is envisaged. This may be useful in assaying ribozymal function in vivo or in vitro, but also as a means of controlling therapies based on ribozymal activity, in vivo or in vitro.

### RNA-Targeting Applications

### Gene Expression, Including RNA Processing

[0665] The effector protein may also be used, together with a suitable guide, to target gene expression, including via control of RNA processing. The control of RNA processing may include RNA processing reactions such as RNA splicing, including alternative splicing, via targeting of RNApol; viral replication (in particular of satellite viruses, bacteriophages and retroviruses, such as HBV, HBC and HIV and others listed herein) including virioids in plants; and tRNA biosynthesis. The effector protein and suitable guide may also be used to control RNA activation (RNAa). RNAa leads to the promotion of gene expression, so control of gene expression may be achieved that way through disruption or reduction of RNAa and thus less promotion of gene expression.

### RNAi Screens

[0666] Identifying gene products whose knockdown is associated with phenotypic changes, biological pathways can be interrogated and the constituent parts identified, via RNAi screens. Control may also be exerted over or during these screens by use of the effector protein and suitable guide to remove or reduce the activity of the RNAi in the screen and thus reinstate the activity of the (previously interfered with) gene product (by removing or reducing the interference/repression).

[0667] Satellite RNAs (satRNAs) and satellite viruses may also be treated.

[0668] Control herein with reference to RNase activity generally means reduction, negative disruption or known-down or knock out.

### In Vivo RNA Applications

### Inhibition of Gene Expression

[0669] The target-specific RNases provided herein allow for very specific cutting of a target RNA. The interference at RNA level allows for modulation both spatially and temporally and in a non-invasive way, as the genome is not modified.

[0670] A number of diseases have been demonstrated to be treatable by mRNA targeting. While most of these studies relate to administration of siRNA, it is clear that the RNA targeting effector proteins provided herein can be applied in a similar way.

[0671] Examples of mRNA targets (and corresponding disease treatments) are VEGF, VEGF-R1 and RTP801 (in the treatment of AMD and/or DME), Caspase 2 (in the treatment of Naion)ADRB2 (in the treatment of intraocular pressure), TRPVI (in the treatment of Dry eye syndrome, Syk kinase (in the treatment of asthma), Apo B (in the treatment of hypercholesterolemia), PLK1, KSP and VEGF (in the treatment of solid tumors), Ber-Abl (in the treatment of CML)(Burnett and Rossi Chem Biol. 2012, 19(1): 60-71)). Similarly, RNA targeting has been demonstrated to be effective in the treatment of RNA-virus mediated diseases such as HIV (targeting of HIV Tet and Rev), RSV (targeting of RSV nucleocapsid) and HCV (targeting of miR-122) (Burnett and Rossi Chem Biol. 2012, 19(1): 60-71).

[0672] It is further envisaged that the RNA targeting effector protein of the invention can be used for mutation specific or allele specific knockdown. Guide RNA's can be designed that specifically target a sequence in the transcribed mRNA comprising a mutation or an allele-specific sequence. Such specific knockdown is particularly suitable for therapeutic applications relating to disorders associated with mutated or allele-specific gene products. For example, most cases of familial hypobetalipoproteinemia (FHBL) are caused by mutations in the ApoB gene. This gene encodes two versions of the apolipoprotein B protein: a short version (ApoB-48) and a longer version (ApoB-100). Several ApoB gene mutations that lead to FHBL cause both versions of ApoB to be abnormally short. Specifically targeting and knockdown of mutated ApoB mRNA transcripts with an RNA targeting effector protein of the invention may be beneficial in treatment of FHBL. As another example, Huntington's disease (HD) is caused by an expansion of CAG triplet repeats in the gene coding for the Huntingtin protein, which results in an abnormal protein. Specifically targeting and knockdown of mutated or allele-specific mRNA transcripts encoding the Huntingtin protein with an RNA targeting effector protein of the invention may be beneficial in treatment of HD.

### Modulation of Gene Expression Through Modulation of RNA Function

[0673] Apart from a direct effect on gene expression through cleavage of the mRNA, RNA targeting can also be used to impact specific aspects of the RNA processing within the cell, which may allow a more subtle modulation of gene expression. Generally, modulation can for instance be mediated by interfering with binding of proteins to the RNA, such as for instance blocking binding of proteins, or recruiting RNA binding proteins. Indeed, modulations can be ensured at different levels such as splicing, transport, localization, translation and turnover of the mRNA. Similarly in the context of therapy, it can be envisaged to address (pathogenic) malfunctioning at each of these levels by using RNA-specific targeting molecules. In these embodiments it is in many cases preferred that the RNA targeting protein is a “dead” CRISPR-Cas that has lost the ability to cut the RNA target but maintains its ability to bind thereto, such as the mutated forms of CRISPR-Cas described herein.

### a) Alternative Splicing

[0674] Many of the human genes express multiple mRNAs as a result of alternative splicing. Different diseases have been shown to be linked to aberrant splicing leading to loss of function or gain of function of the expressed gene. While some of these diseases are caused by mutations that cause splicing defects, a number of these are not. One therapeutic option is to target the splicing mechanism directly. The RNA targeting effector proteins described herein can for instance be used to block or promote slicing, include or exclude exons and influence the expression of specific isoforms and/or stimulate the expression of alternative protein products. Such applications are described in more detail below.

[0675] A RNA targeting effector protein binding to a target RNA can sterically block access of splicing factors to the RNA sequence. The RNA targeting effector protein targeted to a splice site may block splicing at the site, optionally redirecting splicing to an adjacent site. For instance a RNA targeting effector protein binding to the 5′ splice site binding can block the recruitment of the U1 component of the spliceosome, favoring the skipping of that exon. Alternatively, a RNA targeting effector protein targeted to a splicing enhancer or silencer can prevent binding of transacting regulatory splicing factors at the target site and effectively block or promote splicing. Exon exclusion can further be achieved by recruitment of ILF2/3 to precursor mRNA near an exon by an RNA targeting effector protein as described herein. As yet another example, a glycine rich domain can be attached for recruitment of hnRNP A1 and exon exclusion (Del Gatto-Konczak et al. Mol Cell Biol. 1999 January; 19(1):251-60).

[0676] In certain embodiments, through appropriate selection of gRNA, specific splice variants may be targeted, while other splice variants will not be targeted

[0677] In some cases the RNA targeting effector protein can be used to promote slicing (e.g. where splicing is defective). For instance a RNA targeting effector protein can be associated with an effector capable of stabilizing a splicing regulatory stem-loop in order to further splicing. The RNA targeting effector protein can be linked to a consensus binding site sequence for a specific splicing factor in order to recruit the protein to the target DNA.

[0678] Examples of diseases which have been associated with aberrant splicing include, but are not limited to Paraneoplastic Opsoclonus Myoclonus Ataxia (or POMA), resulting from a loss of Nova proteins which regulate splicing of proteins that function in the synapse, and Cystic Fibrosis, which is caused by defective splicing of a cystic fibrosis transmembrane conductance regulator, resulting in the production of nonfunctional chloride channels. In other diseases aberrant RNA splicing results in gain-of-function. This is the case for instance in myotonic dystrophy which is caused by a CUG triplet-repeat expansion (from 50 to >1500 repeats) in the 3′UTR of an mRNA, causing splicing defects.

[0679] The RNA targeting effector protein can be used to include an exon by recruiting a splicing factor (such as U1) to a 5′splicing site to promote excision of introns around a desired exon. Such recruitment could be mediated trough a fusion with an arginine/serine rich domain, which functions as splicing activator (Gravely B R and Maniatis T, Mol Cell. 1998 (5):765-71).

[0680] It is envisaged that the RNA targeting effector protein can be used to block the splicing machinery at a desired locus, resulting in preventing exon recognition and the expression of a different protein product. An example of a disorder that may treated is Duchenne muscular dystrophy (DMD), which is caused by mutations in the gene encoding for the dystrophin protein. Almost all DMD mutations lead to frameshifts, resulting in impaired dystrophin translation. The RNA targeting effector protein can be paired with splice junctions or exonic splicing enhancers (ESEs) thereby preventing exon recognition, resulting in the translation of a partially functional protein. This converts the lethal Duchenne phenotype into the less severe Becker phenotype.

### b) RNA Modification

[0681] RNA editing is a natural process whereby the diversity of gene products of a given sequence is increased by minor modification in the RNA. Typically, the modification involves the conversion of adenosine (A) to inosine (I), resulting in an RNA sequence which is different from that encoded by the genome. RNA modification is generally ensured by the ADAR enzyme, whereby the pre-RNA target forms an imperfect duplex RNA by base-pairing between the exon that contains the adenosine to be edited and an intronic non-coding element. A classic example of A-I editing is the glutamate receptor GluR-B mRNA, whereby the change results in modified conductance properties of the channel (Higuchi M, et al. Cell. 1993; 75:1361-70).

[0682] In humans, a heterozygous functional-null mutation in the ADAR1 gene leads to a skin disease, human pigmentary genodermatosis (Miyamura Y, et al. Am J Hum Genet. 2003; 73:693-9). It is envisaged that the RNA targeting effector proteins of the present invention can be used to correct malfunctioning RNA modification.

### c) Polyadenylation

[0683] Polyadenylation of an mRNA is important for nuclear transport, translation efficiency and stability of the mRNA, and all of these, as well as the process of polyadenylation, depend on specific RBPs. Most eukaryotic mRNAs receive a 3′ poly(A) tail of about 200 nucleotides after transcription. Polyadenylation involves different RNA-binding protein complexes which stimulate the activity of a poly(A)polymerase (Minvielle-Sebastia L et al. Curr Opin Cell Biol. 1999; 11:352-7). It is envisaged that the RNA-targeting effector proteins provided herein can be used to interfere with or promote the interaction between the RNA-binding proteins and RNA.

[0684] Examples of diseases which have been linked to defective proteins involved in polyadenylation are oculopharyngeal muscular dystrophy (OPMD) (Brais B, et al. Nat Genet. 1998; 18:164-7).

### d) RNA Export

[0685] After pre-mRNA processing, the mRNA is exported from the nucleus to the cytoplasm. This is ensured by a cellular mechanism which involves the generation of a carrier complex, which is then translocated through the nuclear pore and releases the mRNA in the cytoplasm, with subsequent recycling of the carrier.

[0686] Overexpression of proteins (such as TAP) which play a role in the export of RNA has been found to increase export of transcripts that are otherwise inefficiently exported in Xenopus (Katahira J, et al. EMBO J. 1999; 18:2593-609).

e) mRNA Localization

[0687] mRNA localization ensures spatially regulated protein production. Localization of transcripts to a specific region of the cell can be ensured by localization elements. In particular embodiments, it is envisaged that the effector proteins described herein can be used to target localization elements to the RNA of interest. The effector proteins can be designed to bind the target transcript and shuttle them to a location in the cell determined by its peptide signal tag. More particularly for instance, a RNA targeting effector protein fused to a nuclear localization signal (NLS) can be used to alter RNA localization.

[0688] Further examples of localization signals include the zipcode binding protein (ZBP1) which ensures localization of β-actin to the cytoplasm in several asymmetric cell types, KDEL retention sequence (localization to endoplasmic reticulum), nuclear export signal (localization to cytoplasm), mitochondrial targeting signal (localization to mitochondria), peroxisomal targeting signal (localization to peroxisome) and m6A marking/YTHDF2 (localization to p-bodies). Other approaches that are envisaged are fusion of the RNA targeting effector protein with proteins of known localization (for instance membrane, synapse).

[0689] Alternatively, the effector protein according to the invention may for instance be used in localization-dependent knockdown. By fusing the effector protein to an appropriate localization signal, the effector is targeted to a particular cellular compartment. Only target RNAs residing in this compartment will effectively be targeted, whereas otherwise identical targets, but residing in a different cellular compartment will not be targeted, such that a localization dependent knockdown can be established.

### f) Translation

[0690] The RNA targeting effector proteins described herein can be used to enhance or repress translation. It is envisaged that upregulating translation is a very robust way to control cellular circuits. Further, for functional studies a protein translation screen can be favorable over transcriptional upregulation screens, which have the shortcoming that upregulation of transcript does not translate into increased protein production.

[0691] It is envisaged that the RNA targeting effector proteins described herein can be used to bring translation initiation factors, such as EIF4G in the vicinity of the 5′ untranslated repeat (5′UTR) of a messenger RNA of interest to drive translation (as described in De Gregorio et al. EMBO J. 1999; 18(17):4865-74 for a non-reprogrammable RNA binding protein). As another example GLD2, a cytoplasmic poly(A) polymerase, can be recruited to the target mRNA by an RNA targeting effector protein. This would allow for directed polyadenylation of the target mRNA thereby stimulating translation.

[0692] Similarly, the RNA targeting effector proteins envisaged herein can be used to block translational repressors of mRNA, such as ZBP1 (Huttelmaier S, et al. Nature. 2005; 438:512-5). By binding to translation initiation site of a target RNA, translation can be directly affected.

[0693] In addition, fusing the RNA targeting effector proteins to a protein that stabilizes mRNAs, e.g. by preventing degradation thereof such as RNase inhibitors, it is possible to increase protein production from the transcripts of interest.

[0694] It is envisaged that the RNA targeting effector proteins described herein can be used to repress translation by binding in the 5′ UTR regions of a RNA transcript and preventing the ribosome from forming and beginning translation.

[0695] Further, the RNA targeting effector protein can be used to recruit Caf1, a component of the CCR4—NOT deadenylase complex, to the target mRNA, resulting in deadenylation or the target transcript and inhibition of protein translation.

[0696] For instance, the RNA targeting effector protein of the invention can be used to increase or decrease translation of therapeutically relevant proteins. Examples of therapeutic applications wherein the RNA targeting effector protein can be used to downregulate or upregulate translation are in amyotrophic lateral sclerosis (ALS) and cardiovascular disorders. Reduced levels of the glial glutamate transporter EAAT2 have been reported in ALS motor cortex and spinal cord, as well as multiple abnormal EAAT2 mRNA transcripts in ALS brain tissue. Loss of the EAAT2 protein and function thought to be the main cause of excitotoxicity in ALS. Restoration of EAAT2 protein levels and function may provide therapeutic benefit. Hence, the RNA targeting effector protein can be beneficially used to upregulate the expression of EAAT2 protein, e.g. by blocking translational repressors or stabilizing mRNA as described above. Apolipoprotein A1 is the major protein component of high density lipoprotein (HDL) and ApoA1 and HDL are generally considered as atheroprotective. It is envisaged that the RNA targeting effector protein can be beneficially used to upregulate the expression of ApoA1, e.g. by blocking translational repressors or stabilizing mRNA as described above.

g) mRNA Turnover

[0697] Translation is tightly coupled to mRNA turnover and regulated mRNA stability. Specific proteins have been described to be involved in the stability of transcripts (such as the ELAV/Hu proteins in neurons, Keene J D, 1999, Proc Natl Acad Sci USA. 96:5-7) and tristetraprolin (TTP). These proteins stabilize target mRNAs by protecting the messages from degradation in the cytoplasm (Peng S S et al., 1988, EMBO J. 17:3461-70).

[0698] It can be envisaged that the RNA-targeting effector proteins of the present invention can be used to interfere with or to promote the activity of proteins acting to stabilize mRNA transcripts, such that mRNA turnover is affected. For instance, recruitment of human TTP to the target RNA using the RNA targeting effector protein would allow for adenylate-uridylate-rich element (AU-rich element) mediated translational repression and target degradation. AU-rich elements are found in the 3′ UTR of many mRNAs that code for proto-oncogenes, nuclear transcription factors, and cytokines and promote RNA stability. As another example, the RNA targeting effector protein can be fused to HuR, another mRNA stabilization protein (Hinman M N and Lou H, Cell Mol Life Sci 2008; 65:3168-81), and recruit it to a target transcript to prolong its lifetime or stabilize short-lived mRNA.

[0699] It is further envisaged that the RNA-targeting effector proteins described herein can be used to promote degradation of target transcripts. For instance, m6A methyltransferase can be recruited to the target transcript to localize the transcript to P-bodies leading to degradation of the target.

[0700] As yet another example, an RNA targeting effector protein as described herein can be fused to the non-specific endonuclease domain PilT N-terminus (PIN), to recruit it to a target transcript and allow degradation thereof.

[0701] Patients with paraneoplastic neurological disorder (PND)-associated encephalomyelitis and neuropathy are patients who develop autoantibodies against Hu-proteins in tumors outside of the central nervous system (Szabo A et al. 1991, Cell.; 67:325-33 which then cross the blood-brain barrier. It can be envisaged that the RNA-targeting effector proteins of the present invention can be used to interfere with the binding of auto-antibodies to mRNA transcripts.

[0702] Patients with dystrophy type 1 (DM1), caused by the expansion of (CUG)n in the 3′ UTR of dystrophia myotonica-protein kinase (DMPK) gene, are characterized by the accumulation of such transcripts in the nucleus. It is envisaged that the RNA targeting effector proteins of the invention fused with an endonuclease targeted to the (CUG)n repeats could inhibit such accumulation of aberrant transcripts.

h) Interaction with Multi-Functional Proteins

[0703] Some RNA-binding proteins bind to multiple sites on numerous RNAs to function in diverse processes. For instance, the hnRNP A1 protein has been found to bind exonic splicing silencer sequences, antagonizing the splicing factors, associate with telomere ends (thereby stimulating telomere activity) and bind miRNA to facilitate Drosha-mediated processing thereby affecting maturation. It is envisaged that the RNA-binding effector proteins of the present invention can interfere with the binding of RNA-binding proteins at one or more locations.

### i) RNA Folding

[0704] RNA adopts a defined structure in order to perform its biological activities. Transitions in conformation among alternative tertiary structures are critical to most RNA-mediated processes. However, RNA folding can be associated with several problems. For instance, RNA may have a tendency to fold into, and be upheld in, improper alternative conformations and/or the correct tertiary structure may not be sufficiently thermodynamically favored over alternative structures. The RNA targeting effector protein, in particular a cleavage-deficient or dead RNA targeting protein, of the invention may be used to direct folding of (m)RNA and/or capture the correct tertiary structure thereof.

### Modulation of Cellular Status

[0705] In certain embodiments CRISPR-Cas in a complex with crRNA is activated upon binding to target RNA and subsequently cleaves any nearby ssRNA targets (i.e. “collateral” or “bystander” effects). CRISPR-Cas, once primed by the cognate target, can cleave other (non-complementary) RNA molecules. Such promiscuous RNA cleavage could potentially cause cellular toxicity, or otherwise affect cellular physiology or cell status.

[0706] Accordingly, in certain embodiments, the non-naturally occurring or engineered composition, vector system, or delivery systems as described herein are used for or are for use in induction of cell dormancy. In certain embodiments, the non-naturally occurring or engineered composition, vector system, or delivery systems as described herein are used for or are for use in induction of cell cycle arrest. In certain embodiments, the non-naturally occurring or engineered composition, vector system, or delivery systems as described herein are used for or are for use in reduction of cell growth and/or cell proliferation, In certain embodiments, the non-naturally occurring or engineered composition, vector system, or delivery systems as described herein are used for or are for use in induction of cell anergy. In certain embodiments, the non-naturally occurring or engineered composition, vector system, or delivery systems as described herein are used for or are for use in induction of cell apoptosis. In certain embodiments, the non-naturally occurring or engineered composition, vector system, or delivery systems as described herein are used for or are for use in induction of cell necrosis. In certain embodiments, the non-naturally occurring or engineered composition, vector system, or delivery systems as described herein are used for or are for use in induction of cell death. In certain embodiments, the non-naturally occurring or engineered composition, vector system, or delivery systems as described herein are used for or are for use in induction of programmed cell death.

[0707] In certain embodiments, the invention relates to a method for induction of cell dormancy comprising introducing or inducing the non-naturally occurring or engineered composition, vector system, or delivery systems as described herein. In certain embodiments, the invention relates to a method for induction of cell cycle arrest comprising introducing or inducing the non-naturally occurring or engineered composition, vector system, or delivery systems as described herein. In certain embodiments, the invention relates to a method for reduction of cell growth and/or cell proliferation comprising introducing or inducing the non-naturally occurring or engineered composition, vector system, or delivery systems as described herein. In certain embodiments, the invention relates to a method for induction of cell anergy comprising introducing or inducing the non-naturally occurring or engineered composition, vector system, or delivery systems as described herein. In certain embodiments, the invention relates to a method for induction of cell apoptosis comprising introducing or inducing the non-naturally occurring or engineered composition, vector system, or delivery systems as described herein. In certain embodiments, the invention relates to a method for induction of cell necrosis comprising introducing or inducing the non-naturally occurring or engineered composition, vector system, or delivery systems as described herein. In certain embodiments, the invention relates to a method for induction of cell death comprising introducing or inducing the non-naturally occurring or engineered composition, vector system, or delivery systems as described herein. In certain embodiments, the invention relates to a method for induction of programmed cell death comprising introducing or inducing the non-naturally occurring or engineered composition, vector system, or delivery systems as described herein.

[0708] The methods and uses as described herein may be therapeutic or prophylactic and may target particular cells, cell (sub)populations, or cell/tissue types. In particular, the methods and uses as described herein may be therapeutic or prophylactic and may target particular cells, cell (sub)populations, or cell/tissue types expressing one or more target sequences, such as one or more particular target RNA (e.g. ss RNA). Without limitation, target cells may for instance be cancer cells expressing a particular transcript, e.g. neurons of a given class, (immune) cells causing e.g. autoimmunity, or cells infected by a specific (e.g. viral) pathogen, etc.

[0709] Accordingly, in certain embodiments, the invention relates to a method for treating a pathological condition characterized by the presence of undesirable cells (host cells), comprising introducing or inducing the non-naturally occurring or engineered composition, vector system, or delivery systems as described herein. In certain embodiments, the invention relates the use of the non-naturally occurring or engineered composition, vector system, or delivery systems as described herein for treating a pathological condition characterized by the presence of undesirable cells (host cells). In certain embodiments, the invention relates the non-naturally occurring or engineered composition, vector system, or delivery systems as described herein for use in treating a pathological condition characterized by the presence of undesirable cells (host cells). It is to be understood that preferably the CRISPR-Cas system targets a target specific for the undesirable cells. In certain embodiments, the invention relates to the use of the non-naturally occurring or engineered composition, vector system, or delivery systems as described herein for treating, preventing, or alleviating cancer. In certain embodiments, the invention relates to the non-naturally occurring or engineered composition, vector system, or delivery systems as described herein for use in treating, preventing, or alleviating cancer. In certain embodiments, the invention relates to a method for treating, preventing, or alleviating cancer comprising introducing or inducing the non-naturally occurring or engineered composition, vector system, or delivery systems as described herein. It is to be understood that preferably the CRISPR-Cas system targets a target specific for the cancer cells. In certain embodiments, the invention relates to the use of the non-naturally occurring or engineered composition, vector system, or delivery systems as described herein for treating, preventing, or alleviating infection of cells by a pathogen. In certain embodiments, the invention relates to the non-naturally occurring or engineered composition, vector system, or delivery systems as described herein for use in treating, preventing, or alleviating infection of cells by a pathogen. In certain embodiments, the invention relates to a method for treating, preventing, or alleviating infection of cells by a pathogen comprising introducing or inducing the non-naturally occurring or engineered composition, vector system, or delivery systems as described herein. It is to be understood that preferably the CRISPR-Cas system targets a target specific for the cells infected by the pathogen (e.g. a pathogen derived target). In certain embodiments, the invention relates to the use of the non-naturally occurring or engineered composition, vector system, or delivery systems as described herein for treating, preventing, or alleviating an autoimmune disorder. In certain embodiments, the invention relates to the non-naturally occurring or engineered composition, vector system, or delivery systems as described herein for use in treating, preventing, or alleviating an autoimmune disorder. In certain embodiments, the invention relates to a method for treating, preventing, or alleviating an autoimmune disorder comprising introducing or inducing the non-naturally occurring or engineered composition, vector system, or delivery systems as described herein. It is to be understood that preferably the CRISPR-Cas system targets a target specific for the cells responsible for the autoimmune disorder (e.g. specific immune cells).

### RNA Detection

[0710] It is further envisaged that the RNA targeting effector protein can be used in Northern blot assays. Northern blotting involves the use of electrophoresis to separate RNA samples by size. The RNA targeting effector protein can be used to specifically bind and detect the target RNA sequence.

[0711] A RNA targeting effector protein can be fused to a fluorescent protein (such as GFP) and used to track RNA localization in living cells. More particularly, the RNA targeting effector protein can be inactivated in that it no longer cleaves RNA. In particular embodiments, it is envisaged that a split RNA targeting effector protein can be used, whereby the signal is dependent on the binding of both subproteins, in order to ensure a more precise visualization. Alternatively, a split fluorescent protein can be used that is reconstituted when multiple RNA targeting effector protein complexes bind to the target transcript. It is further envisaged that a transcript is targeted at multiple binding sites along the mRNA so the fluorescent signal can amplify the true signal and allow for focal identification. As yet another alternative, the fluorescent protein can be reconstituted form a split intein.

[0712] RNA targeting effector proteins are for instance suitably used to determine the localization of the RNA or specific splice variants, the level of mRNA transcript, up- or down-regulation of transcripts and disease-specific diagnosis. The RNA targeting effector proteins can be used for visualization of RNA in (living) cells using e.g. fluorescent microscopy or flow cytometry, such as fluorescence-activated cell sorting (FACS) which allows for high-throughput screening of cells and recovery of living cells following cell sorting. Further, expression levels of different transcripts can be assessed simultaneously under stress, e.g. inhibition of cancer growth using molecular inhibitors or hypoxic conditions on cells. Another application would be to track localization of transcripts to synaptic connections during a neural stimulus using two photon microscopy.

[0713] In certain embodiments, the components or complexes according to the invention as described herein can be used in multiplexed error-robust fluorescence in situ hybridization (MERFISH; Chen et al. Science; 2015; 348(6233)), such as for instance with (fluorescently) labeled CRISPR-Cas effectors.

### In Vitro Apex Labeling

[0714] Cellular processes depend on a network of molecular interactions among protein, RNA, and DNA. Accurate detection of protein-DNA and protein-RNA interactions is key to understanding such processes. In vitro proximity labeling technology employs an affinity tag combined with e.g. a photoactivatable probe to label polypeptides and RNAs in the vicinity of a protein or RNA of interest in vitro. After UV irradiation the photoactivatable group reacts with proteins and other molecules that are in close proximity to the tagged molecule, thereby labelling them. Labelled interacting molecules can subsequently be recovered and identified. The RNA targeting effector protein of the invention can for instance be used to target a probe to a selected RNA sequence.

[0715] These applications could also be applied in animal models for in vivo imaging of disease relevant applications or difficult-to culture cell types.

### RNA Origami/In Vitro Assembly Lines—Combinatorics

[0716] RNA origami refers to nanoscale folded structures for creating two-dimensional or three-dimensional structures using RNA as integrated template. The folded structure is encoded in the RNA and the shape of the resulting RNA is thus determined by the synthesized RNA sequence (Geary, et al. 2014. Science, 345 (6198). pp. 799-804). The RNA origami may act as scaffold for arranging other components, such as proteins, into complexes. The RNA targeting effector protein of the invention can for instance be used to target proteins of interest to the RNA origami using a suitable guide RNA.

[0717] These applications could also be applied in animal models for in vivo imaging of disease relevant applications or difficult-to culture cell types.

### RNA Isolation or Purification, Enrichment or Depletion

[0718] It is further envisaging that the RNA targeting effector protein when complexed to RNA can be used to isolate and/or purify the RNA. The RNA targeting effector protein can for instance be fused to an affinity tag that can be used to isolate and/or purify the RNA-RNA targeting effector protein complex. Such applications are for instance useful in the analysis of gene expression profiles in cells.

[0719] In particular embodiments, it can be envisaged that the RNA targeting effector proteins can be used to target a specific noncoding RNA (ncRNA) thereby blocking its activity, providing a useful functional probe. In certain embodiments, the effector protein as described herein may be used to specifically enrich for a particular RNA (including but not limited to increasing stability, etc.), or alternatively to specifically deplete a particular RNA (such as without limitation for instance particular splice variants, isoforms, etc.).

Interrogation of lincRNA Function and Other Nuclear RNAs

[0720] Current RNA knockdown strategies such as siRNA have the disadvantage that they are mostly limited to targeting cytosolic transcripts since the protein machinery is cytosolic. The advantage of a RNA targeting effector protein of the present invention, an exogenous system that is not essential to cell function, is that it can be used in any compartment in the cell. By fusing a NLS signal to the RNA targeting effector protein, it can be guided to the nucleus, allowing nuclear RNAs to be targeted. It is for instance envisaged to probe the function of lincRNAs. Long intergenic non-coding RNAs (lincRNAs) are a vastly underexplored area of research. Most lincRNAs have as of yet unknown functions which could be studies using the RNA targeting effector protein of the invention.

### Identification of RNA Binding Proteins

[0721] Identifying proteins bound to specific RNAs can be useful for understanding the roles of many RNAs. For instance, many lincRNAs associate with transcriptional and epigenetic regulators to control transcription. Understanding what proteins bind to a given lincRNA can help elucidate the components in a given regulatory pathway. A RNA targeting effector protein of the invention can be designed to recruit a biotin ligase to a specific transcript in order to label locally bound proteins with biotin. The proteins can then be pulled down and analyzed by mass spectrometry to identify them.

### Assembly of Complexes on RNA and Substrate Shuttling

[0722] RNA targeting effector proteins of the invention can further be used to assemble complexes on RNA. This can be achieved by functionalizing the RNA targeting effector protein with multiple related proteins (e.g. components of a particular synthesis pathway). Alternatively, multiple RNA targeting effector proteins can be functionalized with such different related proteins and targeted to the same or adjacent target RNA. Useful application of assembling complexes on RNA are for instance facilitating substrate shuttling between proteins.

### Synthetic Biology

[0723] The development of biological systems has a wide utility, including in clinical applications. It is envisaged that the programmable RNA targeting effector proteins of the invention can be used fused to split proteins of toxic domains for targeted cell death, for instance using cancer-linked RNA as target transcript. Further, pathways involving protein-protein interaction can be influenced in synthetic biological systems with e.g. fusion complexes with the appropriate effectors such as kinases or other enzymes.

### Protein Splicing: Inteins

[0724] Protein splicing is a post-translational process in which an intervening polypeptide, referred to as an intein, catalyzes its own excision from the polypeptides flacking it, referred to as exteins, as well as subsequent ligation of the exteins. The assembly of two or more RNA targeting effector proteins as described herein on a target transcript could be used to direct the release of a split intein (Topilina and Mills Mob DNA. 2014 Feb. 4; 5(1):5), thereby allowing for direct computation of the existence of a mRNA transcript and subsequent release of a protein product, such as a metabolic enzyme or a transcription factor (for downstream actuation of transcription pathways). This application may have significant relevance in synthetic biology (see above) or large-scale bioproduction (only produce product under certain conditions).

### Inducible, Dosed and Self-Inactivating Systems

[0725] In one embodiment, fusion complexes comprising an RNA targeting effector protein of the invention and an effector component are designed to be inducible, for instance light inducible or chemically inducible. Such inducibility allows for activation of the effector component at a desired moment in time.

[0726] Light inducibility is for instance achieved by designing a fusion complex wherein CRY2 PHR/CIBN pairing is used for fusion. This system is particularly useful for light induction of protein interactions in living cells (Konermann S, et al. Nature. 2013; 500:472-476).

[0727] Chemical inducibility is for instance provided for by designing a fusion complex wherein FKBP/FRB (FK506 binding protein/FKBP rapamycin binding) pairing is used for fusion. Using this system rapamycin is required for binding of proteins (Zetsche et al. Nat Biotechnol. 2015; 33(2):139-42 describes the use of this system for Cas9).

[0728] Further, when introduced in the cell as DNA, the RNA targeting effector protein of the inventions can be modulated by inducible promoters, such as tetracycline or doxycycline controlled transcriptional activation (Tet-On and Tet-Off expression system), hormone inducible gene expression system such as for instance an ecdysone inducible gene expression system and an arabinose-inducible gene expression system. When delivered as RNA, expression of the RNA targeting effector protein can be modulated via a riboswitch, which can sense a small molecule like tetracycline (as described in Goldfless et al. Nucleic Acids Res. 2012; 40(9):e64).

[0729] In one embodiment, the delivery of the RNA targeting effector protein of the invention can be modulated to change the amount of protein or crRNA in the cell, thereby changing the magnitude of the desired effect or any undesired off-target effects.

[0730] In one embodiment, the RNA targeting effector proteins described herein can be designed to be self-inactivating. When delivered to a cell as RNA, either mRNA or as a replication RNA therapeutic (Wrobleska et al Nat Biotechnol. 2015 August; 33(8): 839-841), they can self-inactivate expression and subsequent effects by destroying the own RNA, thereby reducing residency and potential undesirable effects.

[0731] For further in vivo applications of RNA targeting effector proteins as described herein, reference is made to Mackay J P et al (Nat Struct Mol Biol. 2011 March; 18(3):256-61), Nelles et al (Bioessays. 2015 July; 37(7):732-9) and Abil Z and Zhao H (Mol Biosyst. 2015 October; 11(10):2658-65), which are incorporated herein by reference. In particular, the following applications are envisaged in certain embodiments of the invention, preferably in certain embodiments by using catalytically inactive CRISPR-Cas: enhancing translation (e.g. CRISPR-Cas—translation promotion factor fusions (e.g. eIF4 fusions)); repressing translation (e.g. gRNA targeting ribosome binding sites); exon skipping (e.g. gRNAs targeting splice donor and/or acceptor sites); exon inclusion (e.g. gRNA targeting a particular exon splice donor and/or acceptor site to be included or CRISPR-Cas fused to or recruiting spliceosome components (e.g. U1 snRNA)); accessing RNA localization (e.g. CRISPR-Cas—marker fusions (e.g. EGFP fusions)); altering RNA localization (e.g. CRISPR-Cas—localization signal fusions (e.g. NLS or NES fusions)); RNA degradation (in this case no catalytically inactive CRISPR-Cas is to be used if relied on the activity of CRISPR-Cas, alternatively and for increased specificity, a split CRISPR-Cas may be used); inhibition of non-coding RNA function (e.g. miRNA), such as by degradation or binding of gRNA to functional sites (possibly titrating out at specific sites by relocalization by CRISPR-Cas-signal sequence fusions).

[0732] As described herein before and demonstrated in the Examples, CRISPR-Cas function is robust to 5′ or 3′ extensions of the crRNA and to extension of the crRNA loop. It is therefore envisaging that MS2 loops and other recruitment domains can be added to the crRNA without affecting complex formation and binding to target transcripts. Such modifications to the crRNA for recruitment of various effector domains are applicable in the uses of a RNA targeted effector proteins described above.

[0733] CRISPR-Cas is capable of mediating resistance to RNA phages. It is therefore envisaged that CRISPR-Cas can be used to immunize, e.g. animals, humans and plants, against RNA-only pathogens, including but not limited to Ebola virus and Zika virus.

[0734] In certain embodiments, CRISPR-Cas can process (cleave) its own array. This applies to both the wildtype CRISPR-Cas protein and the mutated CRISPR-Cas protein containing one or more mutated amino acid residues as herein-discussed. It is therefore envisaged that multiple crRNAs designed for different target transcripts and/or applications can be delivered as a single pre-crRNA or as a single transcript driven by one promotor. Such method of delivery has the advantages that it is substantially more compact, easier to synthesize and easier to delivery in viral systems. It will be understood that exact amino acid positions may vary for orthologs of a herein CRISPR-Cas can be adequately determined by protein alignment, as is known in the art, and as described herein elsewhere. Aspects of the invention also encompass methods and uses of the compositions and systems described herein in genome engineering, e.g. for altering or manipulating the expression of one or more genes or the one or more gene products, in prokaryotic or eukaryotic cells, in vitro, in vivo or ex vivo.

[0735] In an aspect, the invention provides methods and compositions for modulating, e.g., reducing, expression of a target RNA in cells. In the subject methods, a CRISPR-Cas system of the invention is provided that interferes with transcription, stability, and/or translation of an RNA.

[0736] In certain embodiments, an effective amount of CRISPR-Cas system is used to cleave RNA or otherwise inhibit RNA expression. In this regard, the system has uses similar to siRNA and shRNA, thus can also be substituted for such methods. The method includes, without limitation, use of a CRISPR-Cas system as a substitute for e.g., an interfering ribonucleic acid (such as an siRNA or shRNA) or a transcription template thereof, e.g., a DNA encoding an shRNA. The CRISPR-Cas system is introduced into a target cell, e.g., by being administered to a mammal that includes the target cell.

[0737] Advantageously, a CRISPR-Cas system of the invention is specific. For example, whereas interfering ribonucleic acid (such as an siRNA or shRNA) polynucleotide systems are plagued by design and stability issues and off-target binding, a CRISPR-Cas system of the invention can be designed with high specificity.

[0738] In an aspect of the invention, novel RNA targeting systems also referred to as RNA- or RNA-targeting CRISPR systems of the present application are based on herein-identified CRISPR-Cas proteins which do not require the generation of customized proteins to target specific RNA sequences but rather a single enzyme can be programmed by a RNA molecule to recognize a specific RNA target, in other words the enzyme can be recruited to a specific RNA target using said RNA molecule.

[0739] In some embodiments, one or more elements of a nucleic acid-targeting system is derived from a particular organism comprising an endogenous CRISPR RNA-targeting system. In certain embodiments, the CRISPR RNA-targeting system is found in Eubacterium and Ruminococcus. In certain embodiments, the effector protein comprises targeted and collateral ssRNA cleavage activity. In certain embodiments, the effector protein comprises dual HEPN domains. In certain embodiments, the effector protein lacks a counterpart to the Helical-1 domain of Cas13a. In certain embodiments, the effector protein is smaller than previously characterized class 2 CRISPR effectors, with a median size of 928 aa. This median size is 190 aa (17%) less than that of Cas13c, more than 200 aa (18%) less than that of Cas13b, and more than 300 aa (26%) less than that of Cas13a. In certain embodiments, the effector protein has no requirement for a flanking sequence (e.g., PFS, PAM).

[0740] In certain embodiments, the effector protein locus structures include a WYL domain containing accessory protein (so denoted after three amino acids that were conserved in the originally identified group of these domains; see, e.g., WYL domain IPRO26881). In certain embodiments, the WYL domain accessory protein comprises at least one helix-turn-helix (HTH) or ribbon-helix-helix (RHH) DNA-binding domain. In certain embodiments, the WYL domain containing accessory protein increases both the targeted and the collateral ssRNA cleavage activity of the RNA-targeting effector protein. In certain embodiments, the WYL domain containing accessory protein comprises an N-terminal RHH domain, as well as a pattern of primarily hydrophobic conserved residues, including an invariant tyrosine-leucine doublet corresponding to the original WYL motif. In certain embodiments, the WYL domain containing accessory protein is WYL1. WYL1 is a single WYL-domain protein associated primarily with Ruminococcus.

[0741] In other example embodiments, the Type VI RNA-targeting Cas enzyme is Cas 13d. In certain embodiments, Cas13d is Eubacterium siraeum DSM 15702 (EsCas13d) or Ruminococcus sp. N15.MGS-57 (RspCas13d) (see, e.g., Yan et al., Cas13d Is a Compact RNA-Targeting Type VI CRISPR Effector Positively Modulated by a WYL-Domain-Containing Accessory Protein, Molecular Cell (2018), doi.org/10.1016/j.molcel.2018.02.028). RspCas13d and EsCas13d have no flanking sequence requirements (e.g., PFS, PAM).

### Application of the Cas Proteins in Optimized Functional RNA Targeting Systems

[0742] In an aspect the invention provides a system for specific delivery of functional components to the RNA environment. This can be ensured using the CRISPR systems comprising the RNA targeting effector proteins of the present invention which allow specific targeting of different components to RNA. More particularly such components include activators or repressors, such as activators or repressors of RNA translation, degradation, etc. Applications of this system are described elsewhere herein.

[0743] According to one aspect the invention provides non-naturally occurring or engineered composition comprising a guide RNA comprising a guide sequence capable of hybridizing to a target sequence in a genomic locus of interest in a cell, wherein the guide RNA is modified by the insertion of one or more distinct RNA sequence(s) that bind an adaptor protein. In particular embodiments, the RNA sequences may bind to two or more adaptor proteins (e.g. aptamers), and wherein each adaptor protein is associated with one or more functional domains. The guide RNAs of the CRISPR-Cas enzymes described herein are shown to be amenable to modification of the guide sequence. In particular embodiments, the guide RNA is modified by the insertion of distinct RNA sequence(s) 5′ of the direct repeat, within the direct repeat, or 3′ of the guide sequence. When there is more than one functional domain, the functional domains can be same or different, e.g., two of the same or two different activators or repressors. In an aspect the invention provides a herein-discussed composition, wherein the one or more functional domains are attached to the RNA targeting enzyme so that upon binding to the target RNA the functional domain is in a spatial orientation allowing for the functional domain to function in its attributed function; In an aspect the invention provides a herein-discussed composition, wherein the composition comprises a CRISPR-Cas complex having at least three functional domains, at least one of which is associated with the RNA targeting enzyme and at least two of which are associated with the gRNA.

[0744] Accordingly, in an aspect the invention provides non-naturally occurring or engineered CRISPR-Cas complex composition comprising the guide RNA as herein-discussed and a CRISPR-Cas which is an RNA targeting enzyme, wherein optionally the RNA targeting enzyme comprises at least one mutation, such that the RNA targeting enzyme has no more than 5% of the nuclease activity of the enzyme not having the at least one mutation, and optionally one or more comprising at least one or more nuclear localization sequences. In particular embodiments, the guide RNA is additionally or alternatively modified so as to still ensure binding of the RNA targeting enzyme but to prevent cleavage by the RNA targeting enzyme (as detailed elsewhere herein).

[0745] In particular embodiments, the RNA targeting enzyme is a CRISPR-Cas protein which has a diminished nuclease activity of at least 97%, or 100% as compared with the CRISPR-Cas enzyme not having the at least one mutation. In an aspect the invention provides a herein-discussed composition, wherein the CRISPR-Cas enzyme comprises two or more mutations as otherwise herein-discussed.

[0746] In particular embodiments, an RNA targeting system is provided as described herein above comprising two or more functional domains. In particular embodiments, the two or more functional domains are heterologous functional domain. In particular embodiments, the system comprises an adaptor protein which is a fusion protein comprising a functional domain, the fusion protein optionally comprising a linker between the adaptor protein and the functional domain. In particular embodiments, the linker includes a GlySer linker. Additionally or alternatively, one or more functional domains are attached to the RNA effector protein by way of a linker, optionally a GlySer linker. In particular embodiments, the one or more functional domains are attached to the RNA targeting enzyme through one or both of the HEPN domains.

[0747] In an aspect the invention provides a herein-discussed composition, wherein the one or more functional domains associated with the adaptor protein or the RNA targeting enzyme is a domain capable of activating or repressing RNA translation. In an aspect the invention provides a herein-discussed composition, wherein at least one of the one or more functional domains associated with the adaptor protein have one or more activities comprising methylase activity, demethylase activity, transcription activation activity, transcription repression activity, transcription release factor activity, histone modification activity, DNA integration activity RNA cleavage activity, DNA cleavage activity or nucleic acid binding activity, or molecular switch activity or chemical inducibility or light inducibility.

[0748] In an aspect the invention provides a herein-discussed composition comprising an aptamer sequence. In particular embodiments, the aptamer sequence is two or more aptamer sequences specific to the same adaptor protein. In an aspect the invention provides a herein-discussed composition, wherein the aptamer sequence is two or more aptamer sequences specific to different adaptor protein. In an aspect the invention provides a herein-discussed composition, wherein the adaptor protein comprises MS2, PP7, Qβ, F2, GA, fr, JP501, M12, R17, BZ13, JP34, JP500, KU1, M11, MX1, TW18, VK, SP, FI, ID2, NL95, TW19, AP205, ϕCb5, ϕCb8r, ϕCb12r, ϕCb23r, 7s, PRR1.Accordingly, in particular embodiments, the aptamer is selected from a binding protein specifically binding any one of the adaptor proteins listed above. In an aspect the invention provides a herein-discussed composition, wherein the cell is a eukaryotic cell. In an aspect the invention provides a herein-discussed composition, wherein the eukaryotic cell is a mammalian cell, a plant cell or a yeast cell, whereby the mammalian cell is optionally a mouse cell. In an aspect the invention provides a herein-discussed composition, wherein the mammalian cell is a human cell.

[0749] In an aspect the invention provides a herein above-discussed composition wherein there is more than one guide RNA or gRNA or crRNA, and these target different sequences whereby when the composition is employed, there is multiplexing. In an aspect the invention provides a composition wherein there is more than one guide RNA or gRNA or crRNA modified by the insertion of distinct RNA sequence(s) that bind to one or more adaptor proteins.

[0750] In an aspect the invention provides a herein-discussed composition wherein one or more adaptor proteins associated with one or more functional domains is present and bound to the distinct RNA sequence(s) inserted into the guide RNA(s).

[0751] In an aspect the invention provides a herein-discussed composition wherein the guide RNA is modified to have at least one non-coding functional loop; e.g., wherein the at least one non-coding functional loop is repressive; for instance, wherein at least one non-coding functional loop comprises Alu.

[0752] In an aspect the invention provides a method for modifying gene expression comprising the administration to a host or expression in a host in vivo of one or more of the compositions as herein-discussed.

[0753] In an aspect the invention provides a herein-discussed method comprising the delivery of the composition or nucleic acid molecule(s) coding therefor, wherein said nucleic acid molecule(s) are operatively linked to regulatory sequence(s) and expressed in vivo. In an aspect the invention provides a herein-discussed method wherein the expression in vivo is via a lentivirus, an adenovirus, or an AAV.

[0754] In an aspect the invention provides a mammalian cell line of cells as herein-discussed, wherein the cell line is, optionally, a human cell line or a mouse cell line. In an aspect the invention provides a transgenic mammalian model, optionally a mouse, wherein the model has been transformed with a herein-discussed composition or is a progeny of said transformant.

[0755] In an aspect the invention provides a nucleic acid molecule(s) encoding guide RNA or the RNA targeting CRISPR-Cas complex or the composition as herein-discussed. In an aspect the invention provides a vector comprising: a nucleic acid molecule encoding a guide RNA (gRNA) or crRNA comprising a guide sequence capable of hybridizing to an RNA target sequence in a cell, wherein the direct repeat of the gRNA or crRNA is modified by the insertion of distinct RNA sequence(s) that bind(s) to two or more adaptor proteins, and wherein each adaptor protein is associated with one or more functional domains; or, wherein the gRNA is modified to have at least one non-coding functional loop. In an aspect the invention provides vector(s) comprising nucleic acid molecule(s) encoding: non-naturally occurring or engineered CRISPR-Cas complex composition comprising the gRNA or crRNA herein-discussed, and an RNA targeting enzyme, wherein optionally the RNA targeting enzyme comprises at least one mutation, such that the RNA targeting enzyme has no more than 5% of the nuclease activity of the RNA targeting enzyme not having the at least one mutation, and optionally one or more comprising at least one or more nuclear localization sequences. In an aspect a vector can further comprise regulatory element(s) operable in a eukaryotic cell operably linked to the nucleic acid molecule encoding the guide RNA (gRNA) or crRNA and/or the nucleic acid molecule encoding the RNA targeting enzyme and/or the optional nuclear localization sequence(s).

[0756] In one aspect, the invention provides a kit comprising one or more of the components described herein. In some embodiments, the kit comprises a vector system as described herein and instructions for using the kit.

[0757] In an aspect the invention provides a method of screening for gain of function (GOF) or loss of function (LOF) or for screening non-coding RNAs or potential regulatory regions (e.g. enhancers, repressors) comprising the cell line of as herein-discussed or cells of the model herein-discussed containing or expressing the RNA targeting enzyme and introducing a composition as herein-discussed into cells of the cell line or model, whereby the gRNA or crRNA includes either an activator or a repressor, and monitoring for GOF or LOF respectively as to those cells as to which the introduced gRNA or crRNA includes an activator or as to those cells as to which the introduced gRNA or crRNA includes a repressor.

[0758] In an aspect the invention provides a library of non-naturally occurring or engineered compositions, each comprising a RNA targeting CRISPR guide RNA (gRNA) or crRNA comprising a guide sequence capable of hybridizing to a target RNA sequence of interest in a cell, an RNA targeting enzyme, wherein the RNA targeting enzyme comprises at least one mutation, such that the RNA targeting enzyme has no more than 5% of the nuclease activity of the RNA targeting enzyme not having the at least one mutation, wherein the gRNA or crRNA is modified by the insertion of distinct RNA sequence(s) that bind to one or more adaptor proteins, and wherein the adaptor protein is associated with one or more functional domains, wherein the composition comprises one or more or two or more adaptor proteins, wherein the each protein is associated with one or more functional domains, and wherein the gRNAs or crRNAs comprise a genome wide library comprising a plurality of RNA targeting guide RNAs (gRNAs) or crRNAs. In an aspect the invention provides a library as herein-discussed, wherein the RNA targeting RNA targeting enzyme has a diminished nuclease activity of at least 97%, or 100% as compare with the RNA targeting enzyme not having the at least one mutation. In an aspect the invention provides a library as herein-discussed, wherein the adaptor protein is a fusion protein comprising the functional domain. In an aspect the invention provides a library as herein discussed, wherein the gRNA or crRNA is not modified by the insertion of distinct RNA sequence(s) that bind to the one or two or more adaptor proteins. In an aspect the invention provides a library as herein discussed, wherein the one or two or more functional domains are associated with the RNA targeting enzyme. In an aspect the invention provides a library as herein discussed, wherein the cell population of cells is a population of eukaryotic cells. In an aspect the invention provides a library as herein discussed, wherein the eukaryotic cell is a mammalian cell, a plant cell or a yeast cell. In an aspect the invention provides a library as herein discussed, wherein the mammalian cell is a human cell. In an aspect the invention provides a library as herein discussed, wherein the population of cells is a population of embryonic stem (ES) cells.

[0759] In an aspect the invention provides a library as herein discussed, wherein the targeting is of about 100 or more RNA sequences. In an aspect the invention provides a library as herein discussed, wherein the targeting is of about 1000 or more RNA sequences. In an aspect the invention provides a library as herein discussed, wherein the targeting is of about 20,000 or more sequences. In an aspect the invention provides a library as herein discussed, wherein the targeting is of the entire transcriptome. In an aspect the invention provides a library as herein discussed, wherein the targeting is of a panel of target sequences focused on a relevant or desirable pathway. In an aspect the invention provides a library as herein discussed, wherein the pathway is an immune pathway. In an aspect the invention provides a library as herein discussed, wherein the pathway is a cell division pathway.

[0760] In one aspect, the invention provides a method of generating a model eukaryotic cell comprising a gene with modified expression. In some embodiments, a disease gene is any gene associated an increase in the risk of having or developing a disease. In some embodiments, the method comprises (a) introducing one or more vectors encoding the components of the system described herein above into a eukaryotic cell, and (b) allowing a CRISPR complex to bind to a target polynucleotide so as to modify expression of a gene, thereby generating a model eukaryotic cell comprising modified gene expression.

[0761] The structural information provided herein allows for interrogation of guide RNA or crRNA interaction with the target RNA and the RNA targeting enzyme permitting engineering or alteration of guide RNA structure to optimize functionality of the entire RNA targeting CRISPR-Cas system. For example, the guide RNA or crRNA may be extended, without colliding with the RNA targeting protein by the insertion of adaptor proteins that can bind to RNA. These adaptor proteins can further recruit effector proteins or fusions which comprise one or more functional domains.

[0762] An aspect of the invention is that the above elements are comprised in a single composition or comprised in individual compositions. These compositions may advantageously be applied to a host to elicit a functional effect on the genomic level.

[0763] The skilled person will understand that modifications to the guide RNA or crRNA which allow for binding of the adapter+functional domain but not proper positioning of the adapter+functional domain (e.g. due to steric hindrance within the three dimension structure of the CRISPR-Cas complex) are modifications which are not intended. The one or more modified guide RNA or crRNA may be modified, by introduction of a distinct RNA sequence(s) 5′ of the direct repeat, within the direct repeat, or 3′ of the guide sequence.

[0764] The modified guide RNA or crRNA, the inactivated RNA targeting enzyme (with or without functional domains), and the binding protein with one or more functional domains, may each individually be comprised in a composition and administered to a host individually or collectively. Alternatively, these components may be provided in a single composition for administration to a host. Administration to a host may be performed via viral vectors known to the skilled person or described herein for delivery to a host (e.g. lentiviral vector, adenoviral vector, AAV vector). As explained herein, use of different selection markers (e.g. for lentiviral gRNA or crRNA selection) and concentration of gRNA or crRNA (e.g. dependent on whether multiple gRNAs or crRNAs are used) may be advantageous for eliciting an improved effect.

[0765] Using the provided compositions, the person skilled in the art can advantageously and specifically target single or multiple loci with the same or different functional domains to elicit one or more genomic events. The compositions may be applied in a wide variety of methods for screening in libraries in cells and functional modeling in vivo (e.g. gene activation of lincRNA and identification of function; gain-of-function modeling; loss-of-function modeling; the use the compositions of the invention to establish cell lines and transgenic animals for optimization and screening purposes).

[0766] The current invention comprehends the use of the compositions of the current invention to establish and utilize conditional or inducible CRISPR-Cas RNA targeting events. (See, e.g., Platt et al., Cell (2014), dx.doi.org/10.1016/j.cell.2014.09.014, or PCT patent publications cited herein, such as WO 2014/093622 (PCT/US2013/074667), which are not believed prior to the present invention or application).

### Applications in Plants and Fungi

[0767] The compositions, systems, and methods described herein can be used to perform gene or genome interrogation or editing or manipulation in plants and fungi. For example, the applications include investigation and/or selection and/or interrogations and/or comparison and/or manipulations and/or transformation of plant genes or genomes; e.g., to create, identify, develop, optimize, or confer trait(s) or characteristic(s) to plant(s) or to transform a plant or fugus genome. There can accordingly be improved production of plants, new plants with new combinations of traits or characteristics or new plants with enhanced traits. The compositions, systems, and methods can be used with regard to plants in Site-Directed Integration (SDI) or Gene Editing (GE) or any Near Reverse Breeding (NRB) or Reverse Breeding (RB) techniques.

[0768] The compositions, systems, and methods herein may be used to confer desired traits (e.g., enhanced nutritional quality, increased resistance to diseases and resistance to biotic and abiotic stress, and increased production of commercially valuable plant products or heterologous compounds) on essentially any plants and fungi, and their cells and tissues. The compositions, systems, and methods may be used to modify endogenous genes or to modify their expression without the permanent introduction into the genome of any foreign gene.

[0769] In some embodiments, compositions, systems, and methods may be used in genome editing in plants or where RNAi or similar genome editing techniques have been used previously; see, e.g., Nekrasov, “Plant genome editing made easy: targeted mutagenesis in model and crop plants using the CRISPR-Cas system,” Plant Methods 2013, 9:39 (doi:10.1186/1746-4811-9-39); Brooks, “Efficient gene editing in tomato in the first generation using the CRISPR-Cas9 system,” Plant Physiology September 2014 pp 114.247577; Shan, “Targeted genome modification of crop plants using a CRISPR-Cas system,” Nature Biotechnology 31, 686-688 (2013); Feng, “Efficient genome editing in plants using a CRISPR/Cas system,” Cell Research (2013) 23:1229-1232. doi:10.1038/cr.2013.114; published online 20 Aug. 2013; Xie, “RNA-guided genome editing in plants using a CRISPR-Cas system,” Mol Plant. 2013 November; 6(6):1975-83. doi: 10.1093/mp/sst119. Epub 2013 Aug. 17; Xu, “Gene targeting using the Agrobacterium tumefaciens-mediated CRISPR-Cas system in rice,” Rice 2014, 7:5 (2014), Zhou et al., “Exploiting SNPs for biallelic CRISPR mutations in the outcrossing woody perennial Populus reveals 4-coumarate: CoA ligase specificity and Redundancy,” New Phytologist (2015) (Forum) 1-4 (available online only at www.newphytologist.com); Caliando et al, “Targeted DNA degradation using a CRISPR device stably carried in the host genome, NATURE COMMUNICATIONS 6:6989, DOI: 10.1038/ncomms7989, www.nature.com/naturecommunications DOI: 10.1038/ncomms7989; U.S. Pat. No. 6,603,061—Agrobacterium-Mediated Plant Transformation Method; U.S. Pat. No. 7,868,149—Plant Genome Sequences and Uses Thereof and US 2009/0100536—Transgenic Plants with Enhanced Agronomic Traits, Morrell et al “Crop genomics: advances and applications,” Nat Rev Genet. 2011 Dec. 29; 13(2):85-96, all the contents and disclosure of each of which are herein incorporated by reference in their entirety. Aspects of utilizing the compositions, systems, and methods may be analogous to the use of the CRISPR-Cas system in plants, and mention is made of the University of Arizona website “CRISPR-PLANT” (www.genome.arizona.edu/crispr/) (supported by Penn State and AGI).

[0770] The compositions, systems, and methods may also be used on protoplasts. A “protoplast” refers to a plant cell that has had its protective cell wall completely or partially removed using, for example, mechanical or enzymatic means resulting in an intact biochemical competent unit of living plant that can reform their cell wall, proliferate and regenerate grow into a whole plant under proper growing conditions.

[0771] The compositions, systems, and methods may be used for screening genes (e.g., endogenous, mutations) of interest. In some examples, genes of interest include those encoding enzymes involved in the production of a component of added nutritional value or generally genes affecting agronomic traits of interest, across species, phyla, and plant kingdom. By selectively targeting e.g. genes encoding enzymes of metabolic pathways, the genes responsible for certain nutritional aspects of a plant can be identified. Similarly, by selectively targeting genes which may affect a desirable agronomic trait, the relevant genes can be identified. Accordingly, the present invention encompasses screening methods for genes encoding enzymes involved in the production of compounds with a particular nutritional value and/or agronomic traits.

[0772] It is also understood that reference herein to animal cells may also apply, mutatis mutandis, to plant or fungal cells unless otherwise apparent; and, the enzymes herein having reduced off-target effects and systems employing such enzymes can be used in plant applications, including those mentioned herein.

[0773] In some cases, nucleic acids introduced to plants and fungi may be codon optimized for expression in the plants and fungi. Methods of codon optimization include those described in Kwon K C, et al., Codon Optimization to Enhance Expression Yields Insights into Chloroplast Translation, Plant Physiol. 2016 September; 172(1):62-77.

[0774] The components (e.g., Cas proteins) in the compositions and systems may further comprise one or more functional domains described herein. In some examples, the functional domains may be an exonuclease. Such exonuclease may increase the efficiency of the Cas proteins' function, e.g., mutagenesis efficiency. An example of the functional domain is Trex2, as described in Weiss T et al., www.biorxiv.org/content/10.1101/2020.04.11.037572v1, doi: doi.org/10.1101/2020.04.11.037572.

### Examples of Plants

[0775] The compositions, systems, and methods herein can be used to confer desired traits on essentially any plant. A wide variety of plants and plant cell systems may be engineered for the desired physiological and agronomic characteristics. In general, the term “plant” relates to any various photosynthetic, eukaryotic, unicellular or multicellular organism of the kingdom Plantae characteristically growing by cell division, containing chloroplasts, and having cell walls comprised of cellulose. The term plant encompasses monocotyledonous and dicotyledonous plants.

[0776] The compositions, systems, and methods may be used over a broad range of plants, such as for example with dicotyledonous plants belonging to the orders Magniolales, Laurales, Piperales, Aristochiales, Nymphaeales, Ranunculales, Papeverales, Sarraceniaceae, Trochodendrales, Hamamelidales, Eucomiales, Leitneriales, Myricales, Fagales, Casuarinales, Caryophyllales, Batales, Polygonales, Plumbaginales, Dilleniales, Theales, Malvales, Urticales, Lecythidales, Violales, Salicales, Capparales, Ericales, Diapensales, Ebenales, Primulales, Rosales, Fabales, Podostemales, Haloragales, Myrtales, Cornales, Proteales, San tales, Rafflesiales, Celastrales, Euphorbiales, Rhamnales, Sapindales, Juglandales, Geraniales, Polygalales, Umbellales, Gentianales, Polemoniales, Lamiales, Plantaginales, Scrophulariales, Campanulales, Rubiales, Dipsacales, and Asterales; monocotyledonous plants such as those belonging to the orders Alismatales, Hydrocharitales, Najadales, Triuridales, Commelinales, Eriocaulales, Restionales, Poales, Juncales, Cyperales, Typhales, Bromeliales, Zingiberales, Arecales, Cyclanthales, Pandanales, Arales, Lilliales, and Orchid ales, or with plants belonging to Gymnospermae, e.g., those belonging to the orders Pinales, Ginkgoales, Cycadales, Araucariales, Cupressales and Gnetales.

[0777] The compositions, systems, and methods herein can be used over a broad range of plant species, included in the non-limitative list of dicot, monocot or gymnosperm genera hereunder: Atropa, Alseodaphne, Anacardium, Arachis, Beilschmiedia, Brassica, Carthamus, Cocculus, Croton, Cucumis, Citrus, Citrullus, Capsicum, Catharanthus, Cocos, Coffea, Cucurbita, Daucus, Duguetia, Eschscholzia, Ficus, Fragaria, Glaucium, Glycine, Gossypium, Helianthus, Hevea, Hyoscyamus, Lactuca, Landolphia, Linum, Litsea, Lycopersicon, Lupinus, Manihot, Majorana, Malus, Medicago, Nicotiana, Olea, Parthenium, Papaver, Persea, Phaseolus, Pistacia, Pisum, Pyrus, Prunus, Raphanus, Ricinus, Senecio, Sinomenium, Stephania, Sinapis, Solanum, Theobroma, Trifolium, Trigonella, Vicia, Vinca, Vilis, and Vigna; and the genera Allium, Andropogon, Aragrostis, Asparagus, Avena, Cynodon, Elaeis, Festuca, Festulolium, Heterocallis, Hordeum, Lemna, Lolium, Musa, Oryza, Panicum, Pannesetum, Phleum, Poa, Secale, Sorghum, Triticum, Zea, Abies, Cunninghamia, Ephedra, Picea, Pinus, and Pseudotsuga.

[0778] In some embodiments, target plants and plant cells for engineering include those monocotyledonous and dicotyledonous plants, such as crops including grain crops (e.g., wheat, maize, rice, millet, barley), fruit crops (e.g., tomato, apple, pear, strawberry, orange), forage crops (e.g., alfalfa), root vegetable crops (e.g., carrot, potato, sugar beets, yam), leafy vegetable crops (e.g., lettuce, spinach); flowering plants (e.g., petunia, rose, chrysanthemum), conifers and pine trees (e.g., pine fir, spruce); plants used in phytoremediation (e.g., heavy metal accumulating plants); oil crops (e.g., sunflower, rape seed) and plants used for experimental purposes (e.g., Arabidopsis). Specifically, the plants are intended to comprise without limitation angiosperm and gymnosperm plants such as acacia, alfalfa, amaranth, apple, apricot, artichoke, ash tree, asparagus, avocado, banana, barley, beans, beet, birch, beech, blackberry, blueberry, broccoli, Brussel's sprouts, cabbage, canola, cantaloupe, carrot, cassava, cauliflower, cedar, a cereal, celery, chestnut, cherry, Chinese cabbage, citrus, clementine, clover, coffee, corn, cotton, cowpea, cucumber, cypress, eggplant, elm, endive, eucalyptus, fennel, figs, fir, geranium, grape, grapefruit, groundnuts, ground cherry, gum hemlock, hickory, kale, kiwifruit, kohlrabi, larch, lettuce, leek, lemon, lime, locust, pine, maidenhair, maize, mango, maple, melon, millet, mushroom, mustard, nuts, oak, oats, oil palm, okra, onion, orange, an ornamental plant or flower or tree, papaya, palm, parsley, parsnip, pea, peach, peanut, pear, peat, pepper, persimmon, pigeon pea, pine, pineapple, plantain, plum, pomegranate, potato, pumpkin, radicchio, radish, rapeseed, raspberry, rice, rye, sorghum, safflower, sallow, soybean, spinach, spruce, squash, strawberry, sugar beet, sugarcane, sunflower, sweet potato, sweet corn, tangerine, tea, tobacco, tomato, trees, triticale, turf grasses, turnips, vine, walnut, watercress, watermelon, wheat, yams, yew, and zucchini.

[0779] The term plant also encompasses Algae, which are mainly photoautotrophs unified primarily by their lack of roots, leaves and other organs that characterize higher plants. The compositions, systems, and methods can be used over a broad range of “algae” or “algae cells.” Examples of algae include eukaryotic phyla, including the Rhodophyta (red algae), Chlorophyta (green algae), Phaeophyta (brown algae), Bacillariophyta (diatoms), Eustigmatophyta and dinoflagellates as well as the prokaryotic phylum Cyanobacteria (blue-green algae). Examples of algae species include those of Amphora, Anabaena, Anikstrodesmis, Botryococcus, Chaetoceros, Chlamydomonas, Chlorella, Chlorococcum, Cyclotella, Cylindrotheca, Dunaliella, Emiliana, Euglena, Hematococcus, Isochrysis, Monochrysis, Monoraphidium, Nannochloris, Nannnochloropsis, Navicula, Nephrochloris, Nephroselmis, Nitzschia, Nodularia, Nostoc, Oochromonas, Oocystis, Oscillartoria, Pavlova, Phaeodactylum, Playtmonas, Pleurochrysis, Porhyra, Pseudoanabaena, Pyramimonas, Stichococcus, Synechococcus, Synechocystis, Tetraselmis, Thalassiosira, and Trichodesmium.

### Plant Promoters

[0780] In order to ensure appropriate expression in a plant cell, the components of the components and systems herein may be placed under control of a plant promoter. A plant promoter is a promoter operable in plant cells. A plant promoter is capable of initiating transcription in plant cells, whether or not its origin is a plant cell. The use of different types of promoters is envisaged.

[0781] In some examples, the plant promoter is a constitutive plant promoter, which is a promoter that is able to express the open reading frame (ORF) that it controls in all or nearly all of the plant tissues during all or nearly all developmental stages of the plant (referred to as “constitutive expression”). One example of a constitutive promoter is the cauliflower mosaic virus 35S promoter. In some examples, the plant promoter is a regulated promoter, which directs gene expression not constitutively, but in a temporally- and/or spatially-regulated manner, and includes tissue-specific, tissue-preferred and inducible promoters. Different promoters may direct the expression of a gene in different tissues or cell types, or at different stages of development, or in response to different environmental conditions. In some examples, the plant promoter is a tissue-preferred promoter, which can be utilized to target enhanced expression in certain cell types within a particular plant tissue, for instance vascular cells in leaves or roots or in specific cells of the seed.

[0782] Exemplary plant promoters include those obtained from plants, plant viruses, and bacteria such as Agrobacterium or Rhizobium which comprise genes expressed in plant cells. Additional examples of promoters include those described in Kawamata et al., (1997) Plant Cell Physiol 38:792-803; Yamamoto et al., (1997) Plant J 12:255-65; Hire et al, (1992) Plant Mol Biol 20:207-18, Kuster et al, (1995) Plant Mol Biol 29:759-72, and Capana et al., (1994) Plant Mol Biol 25:681-91.

[0783] In some examples, a plant promoter may be an inducible promoter, which is inducible and allows for spatiotemporal control of gene editing or gene expression may use a form of energy. The form of energy may include sound energy, electromagnetic radiation, chemical energy and/or thermal energy. Examples of inducible systems include tetracycline inducible promoters (Tet-On or Tet-Off), small molecule two-hybrid transcription activations systems (FKBP, ABA, etc.), or light inducible systems (Phytochrome, LOV domains, or cryptochrome), such as a Light Inducible Transcriptional Effector (LITE) that direct changes in transcriptional activity in a sequence-specific manner. In a particular example, of the components of a light inducible system include a Cas protein, a light-responsive cytochrome heterodimer (e.g. from Arabidopsis thaliana), and a transcriptional activation/repression domain.

[0784] In some examples, the promoter may be a chemical-regulated promotor (where the application of an exogenous chemical induces gene expression) or a chemical-repressible promoter (where application of the chemical represses gene expression). Examples of chemical-inducible promoters include maize ln2-2 promoter (activated by benzene sulfonamide herbicide safeners), the maize GST promoter (activated by hydrophobic electrophilic compounds used as pre-emergent herbicides), the tobacco PR-1 a promoter (activated by salicylic acid), promoters regulated by antibiotics (such as tetracycline-inducible and tetracycline-repressible promoters).

### Stable Integration in the Genome of Plants

[0785] In some embodiments, polynucleotides encoding the components of the compositions and systems may be introduced for stable integration into the genome of a plant cell. In some cases, vectors or expression systems may be used for such integration. The design of the vector or the expression system can be adjusted depending on for when, where and under what conditions the guide RNA and/or the Cas gene are expressed. In some cases, the polynucleotides may be integrated into an organelle of a plant, such as a plastid, mitochondrion or a chloroplast. The elements of the expression system may be on one or more expression constructs which are either circular such as a plasmid or transformation vector, or non-circular such as linear double stranded DNA.

[0786] In some embodiments, the method of integration generally comprises the steps of selecting a suitable host cell or host tissue, introducing the construct(s) into the host cell or host tissue, and regenerating plant cells or plants therefrom. In some examples, the expression system for stable integration into the genome of a plant cell may contain one or more of the following elements: a promoter element that can be used to express the RNA and/or Cas enzyme in a plant cell; a 5′ untranslated region to enhance expression; an intron element to further enhance expression in certain cells, such as monocot cells; a multiple-cloning site to provide convenient restriction sites for inserting the guide RNA and/or the Cas gene sequences and other desired elements; and a 3′ untranslated region to provide for efficient termination of the expressed transcript.

### Transient Expression in Plants

[0787] In some embodiments, the components of the compositions and systems may be transiently expressed in the plant cell. In some examples, the compositions and systems may modify a target nucleic acid only when both the guide RNA and the Cas protein are present in a cell, such that genomic modification can further be controlled. As the expression of the Cas protein is transient, plants regenerated from such plant cells typically contain no foreign DNA. In certain examples, the Cas protein is stably expressed and the guide sequence is transiently expressed.

[0788] DNA and/or RNA (e.g., mRNA) may be introduced to plant cells for transient expression. In such cases, the introduced nucleic acid may be provided in sufficient quantity to modify the cell but do not persist after a contemplated period of time has passed or after one or more cell divisions.

[0789] The transient expression may be achieved using suitable vectors. Exemplary vectors that may be used for transient expression include a pEAQ vector (may be tailored for Agrobacterium-mediated transient expression) and Cabbage Leaf Curl virus (CaLCuV), and vectors described in Sainsbury F. et al., Plant Biotechnol J. 2009 September; 7(7):682-93; and Yin K et al., Scientific Reports volume 5, Article number: 14926 (2015).

[0790] Combinations of the different methods described above are also envisaged.

Translocation to and/or Expression in Specific Plant Organelles

[0791] The compositions and systems herein may comprise elements for translocation to and/or expression in a specific plant organelle.

### Chloroplast Targeting

[0792] In some embodiments, it is envisaged that the compositions and systems are used to specifically modify chloroplast genes or to ensure expression in the chloroplast. The compositions and systems (e.g., Cas proteins, guide molecules, or their encoding polynucleotides) may be transformed, compartmentalized, and/or targeted to the chloroplast. In an example, the introduction of genetic modifications in the plastid genome can reduce biosafety issues such as gene flow through pollen.

[0793] Examples of methods of chloroplast transformation include Particle bombardment, PEG treatment, and microinjection, and the translocation of transformation cassettes from the nuclear genome to the plastid. In some examples, targeting of chloroplasts may be achieved by incorporating in chloroplast localization sequence, and/or the expression construct a sequence encoding a chloroplast transit peptide (CTP) or plastid transit peptide, operably linked to the 5′ region of the sequence encoding the components of the compositions and systems. Additional examples of transforming, targeting and localization of chloroplasts include those described in WO2010061186, Protein Transport into Chloroplasts, 2010, Annual Review of Plant Biology, Vol. 61: 157-180, and US 20040142476, which are incorporated by reference herein in their entireties.

### Exemplary Applications in Plants

[0794] The compositions, systems, and methods may be used to generate genetic variation(s) in a plant (e.g., crop) of interest. One or more, e.g., a library of, guide molecules targeting one or more locations in a genome may be provided and introduced into plant cells together with the Cas effector protein. For example, a collection of genome-scale point mutations and gene knock-outs can be generated. In some examples, the compositions, systems, and methods may be used to generate a plant part or plant from the cells so obtained and screening the cells for a trait of interest. The target genes may include both coding and non-coding regions. In some cases, the trait is stress tolerance and the method is a method for the generation of stress-tolerant crop varieties.

[0795] In some embodiments, the compositions, systems, and methods are used to modify endogenous genes or to modify their expression. The expression of the components may induce targeted modification of the genome, either by direct activity of the Cas nuclease and optionally introduction of recombination template DNA, or by modification of genes targeted. The different strategies described herein above allow Cas-mediated targeted genome editing without requiring the introduction of the components into the plant genome.

[0796] In some cases, the modification may be performed without the permanent introduction into the genome of the plant of any foreign gene, including those encoding CRISPR components, so as to avoid the presence of foreign DNA in the genome of the plant. This can be of interest as the regulatory requirements for non-transgenic plants are less rigorous. Components which are transiently introduced into the plant cell are typically removed upon crossing.

[0797] For example, the modification may be performed by transient expression of the components of the compositions and systems. The transient expression may be performed by delivering the components of the compositions and systems with viral vectors, delivery into protoplasts, with the aid of particulate molecules such as nanoparticles or CPPs.

Generation of Plants with Desired Traits

[0798] The compositions, systems, and methods herein may be used to introduce desired traits to plants. The approaches include introduction of one or more foreign genes to confer a trait of interest, editing or modulating endogenous genes to confer a trait of interest.

### Agronomic Traits

[0799] In some embodiments, crop plants can be improved by influencing specific plant traits. Examples of the traits include improved agronomic traits such as herbicide resistance, disease resistance, abiotic stress tolerance, high yield, and superior quality, pesticide-resistance, disease resistance, insect and nematode resistance, resistance against parasitic weeds, drought tolerance, nutritional value, stress tolerance, self-pollination voidance, forage digestibility biomass, and grain yield.

[0800] In some embodiments, genes that confer resistance to pests or diseases may be introduced to plants. In cases there are endogenous genes that confer such resistance in a plants, their expression and function may be enhanced (e.g., by introducing extra copies, modifications that enhance expression and/or activity).

[0801] Examples of genes that confer resistance include plant disease resistance genes (e.g., Cf-9, Pto, RSP2, S1DMR6-1), genes conferring resistance to a pest (e.g., those described in WO96/30517), Bacillus thuringiensis proteins, lectins, Vitamin-binding proteins (e.g., avidin), enzyme inhibitors (e.g., protease or proteinase inhibitors or amylase inhibitors), insect-specific hormones or pheromones (e.g., ecdysteroid or a juvenile hormone, variant thereof, a mimetic based thereon, or an antagonist or agonist thereof) or genes involved in the production and regulation of such hormone and pheromones, insect-specific peptides or neuropeptide, Insect-specific venom (e.g., produced by a snake, a wasp, etc., or analog thereof), Enzymes responsible for a hyperaccumulation of a monoterpene, a sesquiterpene, a steroid, hydroxamic acid, a phenylpropanoid derivative or another nonprotein molecule with insecticidal activity, Enzymes involved in the modification of biologically active molecule (e.g., a glycolytic enzyme, a proteolytic enzyme, a lipolytic enzyme, a nuclease, a cyclase, a transaminase, an esterase, a hydrolase, a phosphatase, a kinase, a phosphorylase, a polymerase, an elastase, a chitinase and a glucanase, whether natural or synthetic), molecules that stimulates signal transduction, Viral-invasive proteins or a complex toxin derived therefrom, Developmental-arrestive proteins produced in nature by a pathogen or a parasite, a developmental-arrestive protein produced in nature by a plant, or any combination thereof.

[0802] The compositions, systems, and methods may be used to identify, screen, introduce or remove mutations or sequences lead to genetic variability that give rise to susceptibility to certain pathogens, e.g., host specific pathogens. Such approach may generate plants that are non-host resistance, e.g., the host and pathogen are incompatible or there can be partial resistance against all races of a pathogen, typically controlled by many genes and/or also complete resistance to some races of a pathogen but not to other races.

[0803] In some embodiments, the compositions, systems, and methods may be used to modify genes involved in plant diseases. Such genes may be removed, inactivated, or otherwise regulated or modified. Examples of plant diseases include those described in [0045]-[0080] of US20140213619A1, which is incorporated by reference herein in its entirety.

[0804] In some embodiments, genes that confer resistance to herbicides may be introduced to plants. Examples of genes that confer resistance to herbicides include genes conferring resistance to herbicides that inhibit the growing point or meristem, such as an imidazolinone or a sulfonylurea, genes conferring glyphosate tolerance (e.g., resistance conferred by, e.g., mutant 5-enolpyruvylshikimate-3-phosphate synthase genes, aroA genes and glyphosate acetyl transferase (GAT) genes, respectively), or resistance to other phosphono compounds such as by glufosinate (phosphinothricin acetyl transferase (PAT) genes from Streptomyces species, including Streptomyces hygroscopicus and Streptomyces viridichromogenes), and to pyridinoxy or phenoxy proprionic acids and cyclohexones by ACCase inhibitor-encoding genes), genes conferring resistance to herbicides that inhibit photosynthesis (such as a triazine (psbA and gs+ genes) or a benzonitrile (nitrilase gene), and glutathione S-transferase), genes encoding enzymes detoxifying the herbicide or a mutant glutamine synthase enzyme that is resistant to inhibition, genes encoding a detoxifying enzyme is an enzyme encoding a phosphinothricin acetyltransferase (such as the bar or pat protein from Streptomyces species), genes encoding hydroxyphenylpyruvatedioxygenases (HPPD) inhibitors, e.g., naturally occurring HPPD resistant enzymes, and genes encoding a mutated or chimeric HPPD enzyme.

[0805] In some embodiments, genes involved in Abiotic stress tolerance may be introduced to plants. Examples of genes include those capable of reducing the expression and/or the activity of poly(ADP-ribose) polymerase (PARP) gene, transgenes capable of reducing the expression and/or the activity of the PARG encoding genes, genes coding for a plant-functional enzyme of the nicotineamide adenine dinucleotide salvage synthesis pathway including nicotinamidase, nicotinate phosphoribosyltransferase, nicotinic acid mononucleotide adenyl transferase, nicotinamide adenine dinucleotide synthetase or nicotine amide phosphorybosyltransferase, enzymes involved in carbohydrate biosynthesis, enzymes involved in the production of polyfructose (e.g., the inulin and levan-type), the production of alpha-1,6 branched alpha-1,4-glucans, the production of alternan, the production of hyaluronan.

[0806] In some embodiments, genes that improve drought resistance may be introduced to plants. Examples of genes Ubiquitin Protein Ligase protein (UPL) protein (UPL3), DR02, DR03, ABC transporter, and DREB1A.

### Nutritionally Improved Plants

[0807] In some embodiments, the compositions, systems, and methods may be used to produce nutritionally improved plants. In some examples, such plants may provide functional foods, e.g., a modified food or food ingredient that may provide a health benefit beyond the traditional nutrients it contains. In certain examples, such plants may provide nutraceuticals foods, e.g., substances that may be considered a food or part of a food and provides health benefits, including the prevention and treatment of disease. The nutraceutical foods may be useful in the prevention and/or treatment of diseases in animals and humans, e.g., cancers, diabetes, cardiovascular disease, and hypertension.

[0808] An improved plant may naturally produce one or more desired compounds and the modification may enhance the level or activity or quality of the compounds. In some cases, the improved plant may not naturally produce the compound(s), while the modification enables the plant to produce such compound(s). In some cases, the compositions, systems, and methods used to modify the endogenous synthesis of these compounds indirectly, e.g. by modifying one or more transcription factors that controls the metabolism of this compound.

[0809] Examples of nutritionally improved plants include plants comprising modified protein quality, content and/or amino acid composition, essential amino acid contents, oils and fatty acids, carbohydrates, vitamins and carotenoids, functional secondary metabolites, and minerals. In some examples, the improved plants may comprise or produce compounds with health benefits. Examples of nutritionally improved plants include those described in Newell-McGloughlin, Plant Physiology, July 2008, Vol. 147, pp. 939-953.

[0810] Examples of compounds that can be produced include carotenoids (e.g., α-Carotene or β-Carotene), lutein, lycopene, Zeaxanthin, Dietary fiber (e.g., insoluble fibers, β-Glucan, soluble fibers, fatty acids (e.g., ω-3 fatty acids, Conjugated linoleic acid, GLA), Flavonoids (e.g., Hydroxycinnamates, flavonols, catechins and tannins), Glucosinolates, indoles, isothiocyanates (e.g., Sulforaphane), Phenolics (e.g., stilbenes, caffeic acid and ferulic acid, epicatechin), Plant stanols/sterols, Fructans, inulins, fructo-oligosaccharides, Saponins, Soybean proteins, Phytoestrogens (e.g., isoflavones, lignans), Sulfides and thiols such as diallyl sulphide, Allyl methyl trisulfide, dithiolthiones, Tannins, such as proanthocyanidins, or any combination thereof.

[0811] The compositions, systems, and methods may also be used to modify protein/starch functionality, shelf life, taste/aesthetics, fiber quality, and allergen, antinutrient, and toxin reduction traits.

[0812] Examples of genes and nucleic acids that can be modified to introduce the traits include stearyl-ACP desaturase, DNA associated with the single allele which may be responsible for maize mutants characterized by low levels of phytic acid, Tf RAP2.2 and its interacting partner SINAT2, Tf Dof1, and DOF Tf AtDof1.1 (OBP2).

### Modification of Polyploid Plants

[0813] The compositions, systems, and methods may be used to modify polyploid plants. Polyploid plants carry duplicate copies of their genomes (e.g. as many as six, such as in wheat). In some cases, the compositions, systems, and methods may be can be multiplexed to affect all copies of a gene, or to target dozens of genes at once. For instance, the compositions, systems, and methods may be used to simultaneously ensure a loss of function mutation in different genes responsible for suppressing defenses against a disease. The modification may be simultaneous suppression the expression of the TaMLO-A1, TaMLO-B1 and TaMLO-D1 nucleic acid sequence in a wheat plant cell and regenerating a wheat plant therefrom, in order to ensure that the wheat plant is resistant to powdery mildew (e.g., as described in WO2015109752).

### Regulation of Fruit-Ripening

[0814] The compositions, systems, and methods may be used to regulate ripening of fruits. Ripening is a normal phase in the maturation process of fruits and vegetables. Only a few days after it starts it may render a fruit or vegetable inedible, which can bring significant losses to both farmers and consumers.

[0815] In some embodiments, the compositions, systems, and methods are used to reduce ethylene production. In some examples, the compositions, systems, and methods may be used to suppress the expression and/or activity of ACC synthase, insert a ACC deaminase gene or a functional fragment thereof, insert a SAM hydrolase gene or functional fragment thereof, suppress ACC oxidase gene expression

[0816] Alternatively or additionally, the compositions, systems, and methods may be used to modify ethylene receptors (e.g., suppressing ETR1) and/or Polygalacturonase (PG). Suppression of a gene may be achieved by introducing a mutation, an antisense sequence, and/or a truncated copy of the gene to the genome.

### Increasing Storage Life of Plants

[0817] In some embodiments, the compositions, systems, and methods are used to modify genes involved in the production of compounds which affect storage life of the plant or plant part. The modification may be in a gene that prevents the accumulation of reducing sugars in potato tubers. Upon high-temperature processing, these reducing sugars react with free amino acids, resulting in brown, bitter-tasting products and elevated levels of acrylamide, which is a potential carcinogen. In particular embodiments, the methods provided herein are used to reduce or inhibit expression of the vacuolar invertase gene (VInv), which encodes a protein that breaks down sucrose to glucose and fructose.

### Reducing Allergens in Plants

[0818] In some embodiments, the compositions, systems, and methods are used to generate plants with a reduced level of allergens, making them safer for consumers. To this end, the compositions, systems, and methods may be used to identify and modify (e.g., suppress) one or more genes responsible for the production of plant allergens. Examples of such genes include Lol p5, as well as those in peanuts, soybeans, lentils, peas, lupin, green beans, mung beans, such as those described in Nicolaou et al., Current Opinion in Allergy and Clinical Immunology 2011; 11(3):222), which is incorporated by reference herein in its entirety.

### Generation of Male Sterile Plants

[0819] The compositions, systems, and methods may be used to generate male sterile plants. Hybrid plants typically have advantageous agronomic traits compared to inbred plants. However, for self-pollinating plants, the generation of hybrids can be challenging. In different plant types (e.g., maize and rice), genes have been identified which are important for plant fertility, more particularly male fertility. Plants that are as such genetically altered can be used in hybrid breeding programs.

[0820] The compositions, systems, and methods may be used to modify genes involved male fertility, e.g., inactivating (such as by introducing mutations to) genes required for male fertility. Examples of the genes involved in male fertility include cytochrome P450-like gene (MS26) or the meganuclease gene (MS45), and those described in Wan X et al., Mol Plant. 2019 Mar. 4; 12(3):321-342; and Kim Y J, et al., Trends Plant Sci. 2018 January; 23(1):53-65.

### Increasing the Fertility Stage in Plants

[0821] In some embodiments, the compositions, systems, and methods may be used to prolong the fertility stage of a plant such as of a rice. For instance, a rice fertility stage gene such as Ehd3 can be targeted in order to generate a mutation in the gene and plantlets can be selected for a prolonged regeneration plant fertility stage.

### Production of Early Yield of Products

[0822] In some embodiments, the compositions, systems, and methods may be used to produce early yield of the product. For example, flowering process may be modulated, e.g., by mutating flowering repressor gene such as SP5G. Examples of such approaches include those described in Soyk S, et al., Nat Genet. 2017 January; 49(1):162-168.

### Oil and Biofuel Production

[0823] The compositions, systems, and methods may be used to generate plants for oil and biofuel production. Biofuels include fuels made from plant and plant-derived resources. Biofuels may be extracted from organic matter whose energy has been obtained through a process of carbon fixation or are made through the use or conversion of biomass. This biomass can be used directly for biofuels or can be converted to convenient energy containing substances by thermal conversion, chemical conversion, and biochemical conversion. This biomass conversion can result in fuel in solid, liquid, or gas form. Biofuels include bioethanol and biodiesel. Bioethanol can be produced by the sugar fermentation process of cellulose (starch), which may be derived from maize and sugar cane. Biodiesel can be produced from oil crops such as rapeseed, palm, and soybean. Biofuels can be used for transportation.

### Generation of Plants for Production of Vegetable Oils and Biofuels

[0824] The compositions, systems, and methods may be used to generate algae (e.g., diatom) and other plants (e.g., grapes) that express or overexpress high levels of oil or biofuels.

[0825] In some cases, the compositions, systems, and methods may be used to modify genes involved in the modification of the quantity of lipids and/or the quality of the lipids. Examples of such genes include those involved in the pathways of fatty acid synthesis, e.g., acetyl-CoA carboxylase, fatty acid synthase, 3-ketoacyl acyl-carrier protein synthase III, glycerol-3-phospate deshydrogenase (G3PDH), Enoyl-acyl carrier protein reductase (Enoyl-ACP-reductase), glycerol-3-phosphate acyltransferase, lysophosphatidic acyl transferase or diacylglycerol acyltransferase, phospholipid:diacylglycerol acyltransferase, phoshatidate phosphatase, fatty acid thioesterase such as palmitoyi protein thioesterase, or malic enzyme activities.

[0826] In further embodiments, it is envisaged to generate diatoms that have increased lipid accumulation. This can be achieved by targeting genes that decrease lipid catabolization. Examples of genes include those involved in the activation of triacylglycerol and free fatty acids, β-oxidation of fatty acids, such as genes of acyl-CoA synthetase, 3-ketoacyl-CoA thiolase, acyl-CoA oxidase activity and phosphoglucomutase.

[0827] In some examples, algae may be modified for production of oil and biofuels, including fatty acids (e.g., fatty esters such as acid methyl esters (FAME) and fatty acid ethyl esters (FAEE)). Examples of methods of modifying microalgae include those described in Stovicek et al. Metab. Eng. Comm., 2015; 2:1; U.S. Pat. No. 8,945,839; and International Patent Publication No. WO 2015/086795.

[0828] In some examples, one or more genes may be introduced (e.g., overexpressed) to the plants (e.g., algae) to produce oils and biofuels (e.g., fatty acids) from a carbon source (e.g., alcohol). Examples of the genes include genes encoding acyl-CoA synthases, ester synthases, thioesterases (e.g., tesA, ‘tesA, tesB, fatB, fatB2, fatB3, fatA1, or fatA), acyl-CoA synthases (e.g., fadD, JadK, BH3103, pfl-4354, EAV15023, fadD1, fadD2, RPC_4074, fadDD35, fadDD22, faa39), ester synthases (e.g., synthase/acyl-CoA:diacylglycerl acyltransferase from Simmondsia chinensis, Acinetobacter sp. ADP, Alcanivorax borkumensis, Pseudomonas aeruginosa, Fundibacter jadensis, Arabidopsis thaliana, or Alkaligenes eutrophus, or variants thereof).

[0829] Additionally or alternatively, one or more genes in the plants (e.g., algae) may be inactivated (e.g., expression of the genes is decreased). For examples, one or more mutations may be introduced to the genes. Examples of such genes include genes encoding acyl-CoA dehydrogenases (e.g., fade), outer membrane protein receptors, and transcriptional regulator (e.g., repressor) of fatty acid biosynthesis (e.g., fabR), pyruvate formate lyases (e.g., pflB), lactate dehydrogenases (e.g., IdhA).

### Organic Acid Production

[0830] In some embodiments, plants may be modified to produce organic acids such as lactic acid. The plants may produce organic acids using sugars, pentose or hexose sugars. To this end, one or more genes may be introduced (e.g., and overexpressed) in the plants. An example of such genes include LDH gene.

[0831] In some examples, one or more genes may be inactivated (e.g., expression of the genes is decreased). For examples, one or more mutations may be introduced to the genes. The genes may include those encoding proteins involved an endogenous metabolic pathway which produces a metabolite other than the organic acid of interest and/or wherein the endogenous metabolic pathway consumes the organic acid.

[0832] Examples of genes that can be modified or introduced include those encoding pyruvate decarboxylases (pdc), fumarate reductases, alcohol dehydrogenases (adh), acetaldehyde dehydrogenases, phosphoenolpyruvate carboxylases (ppc), D-lactate dehydrogenases (d-ldh), L-lactate dehydrogenases (l-ldh), lactate 2-monooxygenases, lactate dehydrogenase, cytochrome-dependent lactate dehydrogenases (e.g., cytochrome B2-dependent L-lactate dehydrogenases).

### Enhancing Plant Properties for Biofuel Production

[0833] In some embodiments, the compositions, systems, and methods are used to alter the properties of the cell wall of plants to facilitate access by key hydrolyzing agents for a more efficient release of sugars for fermentation. By reducing the proportion of lignin in a plant the proportion of cellulose can be increased. In particular embodiments, lignin biosynthesis may be downregulated in the plant so as to increase fermentable carbohydrates.

[0834] In some examples, one or more lignin biosynthesis genes may be down regulated. Examples of such genes include 4-coumarate 3-hydroxylases (C3H), phenylalanine ammonia-lyases (PAL), cinnamate 4-hydroxylases (C4H), hydroxycinnamoyl transferases (HCT), caffeic acid O-methyltransferases (COMT), caffeoyl CoA 3-O-methyltransferases (CCoAOMT), ferulate 5-hydroxylases (F5H), cinnamyl alcohol dehydrogenases (CAD), cinnamoyl CoA-reductases (CCR), 4-coumarate-CoA ligases (4CL), monolignol-lignin-specific glycosyltransferases, and aldehyde dehydrogenases (ALDH), and those described in WO 2008064289.

[0835] In some examples, plant mass that produces lower level of acetic acid during fermentation may be reduced. To this end, genes involved in polysaccharide acetylation (e.g., Cas1L and those described in WO 2010096488) may be inactivated.

### Other Microorganisms for Oils and Biofuel Production

[0836] In some embodiments, microorganisms other than plants may be used for production of oils and biofuels using the compositions, systems, and methods herein. Examples of the microorganisms include those of the genus of Escherichia, Bacillus, Lactobacillus, Rhodococcus, Synechococcus, Synechoystis, Pseudomonas, Aspergillus, Trichoderma, Neurospora, Fusarium, Humicola, Rhizomucor, Kluyveromyces, Pichia, Mucor, Myceliophtora, Penicillium, Phanerochaete, Pleurotus, Trametes, Chrysosporium, Saccharomyces, Stenotrophamonas, Schizosaccharomyces, Yarrowia, or Streptomyces.

### Plant Cultures and Regeneration

[0837] In some embodiments, the modified plants or plant cells may be cultured to regenerate a whole plant which possesses the transformed or modified genotype and thus the desired phenotype. Examples of regeneration techniques include those relying on manipulation of certain phytohormones in a tissue culture growth medium, relying on a biocide and/or herbicide marker which has been introduced together with the desired nucleotide sequences, obtaining from cultured protoplasts, plant callus, explants, organs, pollens, embryos or parts thereof.

### Detecting Modifications in the Plant Genome—Selectable Markers

[0838] When the compositions, systems, and methods are used to modify a plant, suitable methods may be used to confirm and detect the modification made in the plant. In some examples, when a variety of modifications are made, one or more desired modifications or traits resulting from the modifications may be selected and detected. The detection and confirmation may be performed by biochemical and molecular biology techniques such as Southern analysis, PCR, Northern blot, S1 RNase protection, primer-extension or reverse transcriptase-PCR, enzymatic assays, ribozyme activity, gel electrophoresis, Western blot, immunoprecipitation, enzyme-linked immunoassays, in situ hybridization, enzyme staining, and immunostaining.

[0839] In some cases, one or more markers, such as selectable and detectable markers, may be introduced to the plants. Such markers may be used for selecting, monitoring, isolating cells and plants with desired modifications and traits. A selectable marker can confer positive or negative selection and is conditional or non-conditional on the presence of external substrates. Examples of such markers include genes and proteins that confer resistance to antibiotics, such as hygromycin (hpt) and kanamycin (nptII), and genes that confer resistance to herbicides, such as phosphinothricin (bar) and chlorosulfuron (als), enzyme capable of producing or processing a colored substances (e.g., the β-glucuronidase, luciferase, B or C1 genes).

### Applications in Fungi

[0840] The compositions, systems, and methods described herein can be used to perform efficient and cost effective gene or genome interrogation or editing or manipulation in fungi or fungal cells, such as yeast. The approaches and applications in plants may be applied to fungi as well.

[0841] A fungal cell may be any type of eukaryotic cell within the kingdom of fungi, such as phyla of Ascomycota, Basidiomycota, Blastocladiomycota, Chytridiomycota, Glomeromycota, Microsporidia, and Neocallimastigomycota. Examples of fungi or fungal cells in include yeasts, molds, and filamentous fungi.

[0842] In some embodiments, the fungal cell is a yeast cell. A yeast cell refers to any fungal cell within the phyla Ascomycota and Basidiomycota. Examples of yeasts include budding yeast, fission yeast, and mold, S. cerervisiae, Kluyveromyces marxianus, Issatchenkia orientalis, Candida spp. (e.g., Candida albicans), Yarrowia spp. (e.g., Yarrowia lipolytica), Pichia spp. (e.g., Pichia pastoris), Kluyveromyces spp. (e.g., Kluyveromyces lactis and Kluyveromyces marxianus), Neurospora spp. (e.g., Neurospora crassa), Fusarium spp. (e.g., Fusarium oxysporum), and Issatchenkia spp. (e.g., Issatchenkia orientalis, Pichia kudriavzevii and Candida acidothermophilum).

[0843] In some embodiments, the fungal cell is a filamentous fungal cell, which grow in filaments, e.g., hyphae or mycelia. Examples of filamentous fungal cells include Aspergillus spp. (e.g., Aspergillus niger), Trichoderma spp. (e.g., Trichoderma reesei), Rhizopus spp. (e.g., Rhizopus oryzae), and Mortierella spp. (e.g., Mortierella isabellina).

[0844] In some embodiments, the fungal cell is of an industrial strain. Industrial strains include any strain of fungal cell used in or isolated from an industrial process, e.g., production of a product on a commercial or industrial scale. Industrial strain may refer to a fungal species that is typically used in an industrial process, or it may refer to an isolate of a fungal species that may be also used for non-industrial purposes (e.g., laboratory research). Examples of industrial processes include fermentation (e.g., in production of food or beverage products), distillation, biofuel production, production of a compound, and production of a polypeptide. Examples of industrial strains include, without limitation, JAY270 and ATCC4124.

[0845] In some embodiments, the fungal cell is a polyploid cell whose genome is present in more than one copy. Polyploid cells include cells naturally found in a polyploid state, and cells that has been induced to exist in a polyploid state (e.g., through specific regulation, alteration, inactivation, activation, or modification of meiosis, cytokinesis, or DNA replication). A polyploid cell may be a cell whose entire genome is polyploid, or a cell that is polyploid in a particular genomic locus of interest. In some examples, the abundance of guide RNA may more often be a rate-limiting component in genome engineering of polyploid cells than in haploid cells, and thus the methods using the CRISPR system described herein may take advantage of using certain fungal cell types.

[0846] In some embodiments, the fungal cell is a diploid cell, whose genome is present in two copies. Diploid cells include cells naturally found in a diploid state, and cells that have been induced to exist in a diploid state (e.g., through specific regulation, alteration, inactivation, activation, or modification of meiosis, cytokinesis, or DNA replication). A diploid cell may refer to a cell whose entire genome is diploid, or it may refer to a cell that is diploid in a particular genomic locus of interest.

[0847] In some embodiments, the fungal cell is a haploid cell, whose genome is present in one copy. Haploid cells include cells naturally found in a haploid state, or cells that have been induced to exist in a haploid state (e.g., through specific regulation, alteration, inactivation, activation, or modification of meiosis, cytokinesis, or DNA replication). A haploid cell may refer to a cell whose entire genome is haploid, or it may refer to a cell that is haploid in a particular genomic locus of interest.

[0848] The compositions and systems, and nucleic acid encoding thereof may be introduced to fungi cells using the delivery systems and methods herein. Examples of delivery systems include lithium acetate treatment, bombardment, electroporation, and those described in Kawai et al., 2010, Bioeng Bugs. 2010 November-December; 1(6): 395-403.

[0849] In some examples, a yeast expression vector (e.g., those with one or more regulatory elements) may be used. Examples of such vectors include a centromeric (CEN) sequence, an autonomous replication sequence (ARS), a promoter, such as an RNA Polymerase III promoter, operably linked to a sequence or gene of interest, a terminator such as an RNA polymerase III terminator, an origin of replication, and a marker gene (e.g., auxotrophic, antibiotic, or other selectable markers). Examples of expression vectors for use in yeast may include plasmids, yeast artificial chromosomes, 2μ plasmids, yeast integrative plasmids, yeast replicative plasmids, shuttle vectors, and episomal plasmids.

### Biofuel and Materials Production by Fungi

[0850] In some embodiments, the compositions, systems, and methods may be used for generating modified fungi for biofuel and material productions. For instance, the modified fungi for production of biofuel or biopolymers from fermentable sugars and optionally to be able to degrade plant-derived lignocellulose derived from agricultural waste as a source of fermentable sugars. Foreign genes required for biofuel production and synthesis may be introduced in to fungi In some examples, the genes may encode enzymes involved in the conversion of pyruvate to ethanol or another product of interest, degrade cellulose (e.g., cellulase), endogenous metabolic pathways which compete with the biofuel production pathway.

[0851] In some examples, the compositions, systems, and methods may be used for generating and/or selecting yeast strains with improved xylose or cellobiose utilization, isoprenoid biosynthesis, and/or lactic acid production. One or more genes involved in the metabolism and synthesis of these compounds may be modified and/or introduced to yeast cells. Examples of the methods and genes include lactate dehydrogenase, PDC1 and PDC5, and those described in Ha, S. J., et al. (2011) Proc. Natl. Acad. Sci. USA 108(2):504-9 and Galazka, J. M., et al. (2010) Science 330(6000):84-6; Jakočiūnas T et al., Metab Eng. 2015 March; 28:213-222; Stovicek V, et al., FEMS Yeast Res. 2017 Aug. 1; 17(5).

### Improved Plants and Yeast Cells

[0852] The present disclosure further provides improved plants and fungi. The improved and fungi may comprise one or more genes introduced, and/or one or more genes modified by the compositions, systems, and methods herein. The improved plants and fungi may have increased food or feed production (e.g., higher protein, carbohydrate, nutrient or vitamin levels), oil and biofuel production (e.g., methanol, ethanol), tolerance to pests, herbicides, drought, low or high temperatures, excessive water, etc.

[0853] The plants or fungi may have one or more parts that are improved, e.g., leaves, stems, roots, tubers, seeds, endosperm, ovule, and pollen. The parts may be viable, nonviable, regeneratable, and/or non-regeneratable.

[0854] The improved plants and fungi may include gametes, seeds, embryos, either zygotic or somatic, progeny and/or hybrids of improved plants and fungi. The progeny may be a clone of the produced plant or fungi, or may result from sexual reproduction by crossing with other individuals of the same species to introgress further desirable traits into their offspring. The cell may be in vivo or ex vivo in the cases of multicellular organisms, particularly plants.

### Further Applications of the CRISPR-Cas System in Plants

[0855] Further applications of the compositions, systems, and methods on plants and fungi include visualization of genetic element dynamics (e.g., as described in Chen B, et al., Cell. 2013 Dec. 19; 155(7):1479-91), targeted gene disruption positive-selection in vitro and in vivo (as described in Malina A et al., Genes Dev. 2013 Dec. 1; 27(23):2602-14), epigenetic modification such as using fusion of Cas and histone-modifying enzymes (e.g., as described in Rusk N, Nat Methods. 2014 January; 11(1):28), identifying transcription regulators (e.g., as described in Waldrip Z J, Epigenetics. 2014 September; 9(9):1207-11), anti-virus treatment for both RNA and DNA viruses (e.g., as described in Price A A, et al., Proc Natl Acad Sci USA. 2015 May 12; 112(19):6164-9; Ramanan V et al., Sci Rep. 2015 Jun. 2; 5:10833), alteration of genome complexity such as chromosome numbers (e.g., as described in Karimi-Ashtiyani R et al., Proc Natl Acad Sci USA. 2015 Sep. 8; 112(36):11211-6; Anton T, et al., Nucleus. 2014 March-April; 5(2):163-72), self-cleavage of the CRISPR system for controlled inactivation/activation (e.g., as described Sugano S S et al., Plant Cell Physiol. 2014 March; 55(3):475-81), multiplexed gene editing (as described in Kabadi A M et al., Nucleic Acids Res. 2014 Oct. 29; 42(19):e147), development of kits for multiplex genome editing (as described in Xing H L et al., BMC Plant Biol. 2014 Nov. 29; 14:327), starch production (as described in Hebelstrup K H et al., Front Plant Sci. 2015 Apr. 23; 6:247), targeting multiple genes in a family or pathway (e.g., as described in Ma X et al., Mol Plant. 2015 August; 8(8):1274-84), regulation of non-coding genes and sequences (e.g., as described in Lowder L G, et al., Plant Physiol. 2015 October; 169(2):971-85), editing genes in trees (e.g., as described in Belhaj K et al., Plant Methods. 2013 Oct. 11; 9(1):39; Harrison M M, et al., Genes Dev. 2014 Sep. 1; 28(17):1859-72; Zhou X et al., New Phytol. 2015 October; 208(2):298-301), introduction of mutations for resistance to host-specific pathogens and pests.

[0856] Additional examples of modifications of plants and fungi that may be performed using the compositions, systems, and methods include those described in International Patent Publication Nos. WO2016/099887, WO2016/025131, WO2016/073433, WO2017/066175, WO2017/100158, WO 2017/105991, WO2017/106414, WO2016/100272, WO2016/100571, WO 2016/100568, WO 2016/100562, and WO 2017/019867.

### Applications in Non-Human Animals

[0857] The compositions, systems, and methods may be used to study and modify non-human animals, e.g., introducing desirable traits and disease resilience, treating diseases, facilitating breeding, etc. In some embodiments, the compositions, systems, and methods may be used to improve breeding and introducing desired traits, e.g., increasing the frequency of trait-associated alleles, introgression of alleles from other breeds/species without linkage drag, and creation of de novo favorable alleles. Genes and other genetic elements that can be targeted may be screened and identified. Examples of application and approaches include those described in Tait-Burkard C, et al., Livestock 2.0—genome editing for fitter, healthier, and more productive farmed animals. Genome Biol. 2018 Nov. 26; 19(1):204; Lillico S, Agricultural applications of genome editing in farmed animals. Transgenic Res. 2019 August; 28(Suppl 2):57-60; Houston R D, et al., Harnessing genomics to fast-track genetic improvement in aquaculture. Nat Rev Genet. 2020 Apr. 16. doi: 10.1038/s41576-020-0227-y, which are incorporated herein by reference in their entireties. Applications described in other sections such as therapeutic, diagnostic, etc. can also be used on the animals herein.

[0858] The compositions, systems, and methods may be used on animals such as fish, amphibians, reptiles, mammals, and birds. The animals may be farm and agriculture animals, or pets. Examples of farm and agriculture animals include horses, goats, sheep, swine, cattle, llamas, alpacas, and birds, e.g., chickens, turkeys, ducks, and geese. The animals may be a non-human primate, e.g., baboons, capuchin monkeys, chimpanzees, lemurs, macaques, marmosets, tamarins, spider monkeys, squirrel monkeys, and vervet monkeys. Examples of pets include dogs, cats horses, wolfs, rabbits, ferrets, gerbils, hamsters, chinchillas, fancy rats, guinea pigs, canaries, parakeets, and parrots.

[0859] In some embodiments, one or more genes may be introduced (e.g., overexpressed) in the animals to obtain or enhance one or more desired traits. Growth hormones, insulin-like growth factors (IGF-1) may be introduced to increase the growth of the animals, e.g., pigs or salmon (such as described in Pursel V G et al., J Reprod Fertil Suppl. 1990; 40:235-45; Waltz E, Nature. 2017; 548:148). Fat-1 gene (e.g., from C elegans) may be introduced for production of larger ratio of n-3 to n-6 fatty acids may be induced, e.g. in pigs (such as described in Li M, et al., Genetics. 2018; 8:1747-54). Phytase (e.g., from E coli) xylanase (e.g., from Aspergillus niger), beta-glucanase (e.g., from bacillus lichenformis) may be introduced to reduce the environmental impact through phosphorous and nitrogen release reduction, e.g. in pigs (such as described in Golovan S P, et al., Nat Biotechnol. 2001; 19:741-5; Zhang X et al., elife. 2018). shRNA decoy may be introduced to induce avian influenza resilience e.g. in chicken (such as described in Lyall et al., Science. 2011; 331:223-6). Lysozyme or lysostaphin may be introduced to induce mastitis resilience e.g., in goat and cow (such as described in Maga E A et al., Foodborne Pathog Dis. 2006; 3:384-92; Wall R J, et al., Nat Biotechnol. 2005; 23:445-51). Histone deacetylase such as HDAC6 may be introduced to induce PRRSV resilience, e.g., in pig (such as described in Lu T., et al., PLoS One. 2017; 12:e0169317). CD163 may be modified (e.g., inactivated or removed) to introduce PRRSV resilience in pigs (such as described in Prather R S et al., Sci Rep. 2017 Oct. 17; 7(1):13371). Similar approaches may be used to inhibit or remove viruses and bacteria (e.g., Swine Influenza Virus (SIV) strains which include influenza C and the subtypes of influenza A known as H1N1, H1N2, H2N1, H3N1, H3N2, and H2N3, as well as pneumonia, meningitis and oedema) that may be transmitted from animals to humans.

[0860] In some embodiments, one or more genes may be modified or edited for disease resistance and production traits. Myostatin (e.g., GDF8) may be modified to increase muscle growth, e.g., in cow, sheep, goat, catfish, and pig (such as described in Crispo M et al., PLoS One. 2015; 10:e0136690; Wang X, et al., Anim Genet. 2018; 49:43-51; Khalil K, et al., Sci Rep. 2017; 7:7301; Kang J-D, et al., RSC Adv. 2017; 7:12541-9). Pc POLLED may be modified to induce horlessness, e.g., in cow (such as described in Carlson D F et al., Nat Biotechnol. 2016; 34:479-81). KISS1R may be modified to induce boretaint (hormone release during sexual maturity leading to undesired meat taste), e.g., in pigs. Dead end protein (dnd) may be modified to induce sterility, e.g., in salmon (such as described in Wargelius A, et al., Sci Rep. 2016; 6:21284). Nano2 and DDX may be modified to induce sterility (e.g., in surrogate hosts), e.g., in pigs and chicken (such as described Park K-E, et al., Sci Rep. 2017; 7:40176; Taylor L et al., Development. 2017; 144:928-34). CD163 may be modified to induce PRRSV resistance, e.g., in pigs (such as described in Whitworth K M, et al., Nat Biotechnol. 2015; 34:20-2) RELA may be modified to induce ASFV resilience, e.g., in pigs (such as described in Lillico S G, et al., Sci Rep. 2016; 6:21645). CD18 may be modified to induce Mannheimia (Pasteurella) haemolytica resilience, e.g., in cows (such as described in Shanthalingam S, et al., roc Natl Acad Sci USA. 2016; 113:13186-90). NRAMP1 may be modified to induce tuberculosis resilience, e.g., in cows (such as described in Gao Y et al., Genome Biol. 2017; 18:13). Endogenous retrovirus genes may be modified or removed for xenotransplantation such as described in Yang L, et al. Science. 2015; 350:1101-4; Niu D et al., Science. 2017; 357:1303-7). Negative regulators of muscle mass (e.g., Myostatin) may be modified (e.g., inactivated) to increase muscle mass, e.g., in dogs (as described in Zou Q et al., J Mol Cell Biol. 2015 December; 7(6):580-3).

[0861] Animals such as pigs with severe combined immunodeficiency (SCID) may generated (e.g., by modifying RAG2) to provide useful models for regenerative medicine, xenotransplantation (discussed also elsewhere herein), and tumor development. Examples of methods and approaches include those described Lee K, et al., Proc Natl Acad Sci USA. 2014 May 20; 111(20):7260-5; and Schomberg et al. FASEB Journal, April 2016; 30(1):Suppl 571.1.

[0862] SNPs in the animals may be modified. Examples of methods and approaches include those described Tan W. et al., Proc Natl Acad Sci USA. 2013 Oct. 8; 110(41):16526-31; Mali P, et al., Science. 2013 Feb. 15; 339(6121):823-6.

[0863] Stem cells (e.g., induced pluripotent stem cells) may be modified and differentiated into desired progeny cells, e.g., as described in Heo Y T et al., Stem Cells Dev. 2015 Feb. 1; 24(3):393-402.

[0864] Profile analysis (such as Igenity) may be performed on animals to screen and identify genetic variations related to economic traits. The genetic variations may be modified to introduce or improve the traits, such as carcass composition, carcass quality, maternal and reproductive traits and average daily gain.

### Therapeutic Uses and Methods of Treatment

[0865] Also provided herein are methods of diagnosing, prognosing, treating, and/or preventing a disease, state, or condition in or of a subject. Generally, the methods of diagnosing, prognosing, treating, and/or preventing a disease, state, or condition in or of a subject can include modifying a polynucleotide in a subject or cell thereof using a composition, system, or component thereof described herein and/or include detecting a diseased or healthy polynucleotide in a subject or cell thereof using a composition, system, or component thereof described herein. In some embodiments, the method of treatment or prevention can include using a composition, system, or component thereof to modify a polynucleotide of an infectious organism (e.g. bacterial or virus) within a subject or cell thereof. In some embodiments, the method of treatment or prevention can include using a composition, system, or component thereof to modify a polynucleotide of an infectious organism or symbiotic organism within a subject. The composition, system, and components thereof can be used to develop models of diseases, states, or conditions. The composition, system, and components thereof can be used to detect a disease state or correction thereof, such as by a method of treatment or prevention described herein. The composition, system, and components thereof can be used to screen and select cells that can be used, for example, as treatments or preventions described herein. The composition, system, and components thereof can be used to develop biologically active agents that can be used to modify one or more biologic functions or activities in a subject or a cell thereof.

[0866] In general, the method can include delivering a composition, system, and/or component thereof to a subject or cell thereof, or to an infectious or symbiotic organism by a suitable delivery technique and/or composition. Once administered the components can operate as described elsewhere herein to elicit a nucleic acid modification event. In some aspects, the nucleic acid modification event can occur at the genomic, epigenomic, and/or transcriptomic level. DNA and/or RNA cleavage, gene activation, and/or gene deactivation can occur. Additional features, uses, and advantages are described in greater detail below. On the basis of this concept, several variations are appropriate to elicit a genomic locus event, including DNA cleavage, gene activation, or gene deactivation. Using the provided compositions, the person skilled in the art can advantageously and specifically target single or multiple loci with the same or different functional domains to elicit one or more genomic locus events. In addition to treating and/or preventing a disease in a subject, the compositions may be applied in a wide variety of methods for screening in libraries in cells and functional modeling in vivo (e.g. gene activation of lincRNA and identification of function; gain-of-function modeling; loss-of-function modeling; the use the compositions of the invention to establish cell lines and transgenic animals for optimization and screening purposes).

[0867] The composition, system, and components thereof described elsewhere herein can be used to treat and/or prevent a disease, such as a genetic and/or epigenetic disease, in a subject. The composition, system, and components thereof described elsewhere herein can be used to treat and/or prevent genetic infectious diseases in a subject, such as bacterial infections, viral infections, fungal infections, parasite infections, and combinations thereof. The composition, system, and components thereof described elsewhere herein can be used to modify the composition or profile of a microbiome in a subject, which can in turn modify the health status of the subject. The composition, system, described herein can be used to modify cells ex vivo, which can then be administered to the subject whereby the modified cells can treat or prevent a disease or symptom thereof. This is also referred to in some contexts as adoptive therapy. The composition, system, described herein can be used to treat mitochondrial diseases, where the mitochondrial disease etiology involves a mutation in the mitochondrial DNA.

[0868] Also provided is a method of treating a subject, e.g., a subject in need thereof, comprising inducing gene editing by transforming the subject with the polynucleotide encoding one or more components of the composition, system, or complex or any of polynucleotides or vectors described herein and administering them to the subject. A suitable repair template may also be provided, for example delivered by a vector comprising said repair template. The repair template may be a recombination template herein. Also provided is a method of treating a subject, e.g., a subject in need thereof, comprising inducing transcriptional activation or repression of multiple target gene loci by transforming the subject with the polynucleotides or vectors described herein, wherein said polynucleotide or vector encodes or comprises one or more components of composition, system, complex or component thereof comprising multiple Cas effectors. Where any treatment is occurring ex vivo, for example in a cell culture, then it will be appreciated that the term ‘subject’ may be replaced by the phrase “cell or cell culture.”

[0869] Also provided is a method of treating a subject, e.g., a subject in need thereof, comprising inducing gene editing by transforming the subject with the Cas effector(s), advantageously encoding and expressing in vivo the remaining portions of the composition, system, (e.g., RNA, guides). A suitable repair template may also be provided, for example delivered by a vector comprising said repair template. Also provided is a method of treating a subject, e.g., a subject in need thereof, comprising inducing transcriptional activation or repression by transforming the subject with the Cas effector(s) advantageously encoding and expressing in vivo the remaining portions of the composition, system, (e.g., RNA, guides); advantageously in some embodiments the CRISPR enzyme is a catalytically inactive Cas effector and includes one or more associated functional domains. Where any treatment is occurring ex vivo, for example in a cell culture, then it will be appreciated that the term ‘subject’ may be replaced by the phrase “cell or cell culture.”

[0870] One or more components of the composition and system described herein can be included in a composition, such as a pharmaceutical composition, and administered to a host individually or collectively. Alternatively, these components may be provided in a single composition for administration to a host. Administration to a host may be performed via viral vectors known to the skilled person or described herein for delivery to a host (e.g. lentiviral vector, adenoviral vector, AAV vector). As explained herein, use of different selection markers (e.g. for lentiviral gRNA selection) and concentration of gRNA (e.g. dependent on whether multiple gRNAs are used) may be advantageous for eliciting an improved effect.

[0871] Thus, also described herein are methods of inducing one or more polynucleotide modifications in a eukaryotic or prokaryotic cell or component thereof (e.g. a mitochondria) of a subject, infectious organism, and/or organism of the microbiome of the subject. The modification can include the introduction, deletion, or substitution of one or more nucleotides at a target sequence of a polynucleotide of one or more cell(s). The modification can occur in vitro, ex vivo, in situ, or in vivo.

[0872] In some embodiments, the method of treating or inhibiting a condition or a disease caused by one or more mutations in a genomic locus in a eukaryotic organism or a non-human organism can include manipulation of a target sequence within a coding, non-coding or regulatory element of said genomic locus in a target sequence in a subject or a non-human subject in need thereof comprising modifying the subject or a non-human subject by manipulation of the target sequence and wherein the condition or disease is susceptible to treatment or inhibition by manipulation of the target sequence including providing treatment comprising delivering a composition comprising the particle delivery system or the delivery system or the virus particle of any one of the above embodiments or the cell of any one of the above embodiments.

[0873] Also provided herein is the use of the particle delivery system or the delivery system or the virus particle of any one of the above embodiments or the cell of any one of the above embodiment in ex vivo or in vivo gene or genome editing; or for use in in vitro, ex vivo or in vivo gene therapy. Also provided herein are particle delivery systems, non-viral delivery systems, and/or the virus particle of any one of the above embodiments or the cell of any one of the above embodiments used in the manufacture of a medicament for in vitro, ex vivo or in vivo gene or genome editing or for use in in vitro, ex vivo or in vivo gene therapy or for use in a method of modifying an organism or a non-human organism by manipulation of a target sequence in a genomic locus associated with a disease or in a method of treating or inhibiting a condition or disease caused by one or more mutations in a genomic locus in a eukaryotic organism or a non-human organism.

[0874] In some embodiments, polynucleotide modification can include the introduction, deletion, or substitution of 1-75 nucleotides at each target sequence of said polynucleotide of said cell(s). The modification can include the introduction, deletion, or substitution of at least 1, 5, 10, 11, 12, 13, 14, 15, 16, 17, 18, 19, 20, 21, 22, 23, 24, 25, 26, 27, 28, 29, 30, 35, 40, 45, 50, or 75 nucleotides at each target sequence. The modification can include the introduction, deletion, or substitution of at least 5, 10, 11, 12, 13, 14, 15, 16, 17, 18, 19, 20, 21, 22, 23, 24, 25, 26, 27, 28, 29, 30, 35, 40, 45, 50, or 75 nucleotides at each target sequence of said cell(s). The modification can include the introduction, deletion, or substitution of at least 10, 11, 12, 13, 14, 15, 16, 17, 18, 19, 20, 21, 22, 23, 24, 25, 26, 27, 28, 29, 30, 35, 40, 45, 50, or 75 nucleotides at each target sequence of said cell(s). The modification can include the introduction, deletion, or substitution of at least 20, 21, 22, 23, 24, 25, 26, 27, 28, 29, 30, 35, 40, 45, 50, or 75 nucleotides at each target sequence of said cell(s). The modification can include the introduction, deletion, or substitution of at least 40, 45, 50, 75, 100, 200, 300, 400 or 500 nucleotides at each target sequence of said cell(s). The modification can include the introduction, deletion, or substitution of at least 500, 600, 700, 800, 900, 1000, 1100, 1200, 1300, 1400, 1500, 1600, 1700, 1800, 1900, 2000, 2100, 2200, 2300, 2400, 2500, 2600, 2700, 2800, 2900, 3000, 3100, 3200, 3300, 3400, 3500, 3600, 3700, 3800, 3900, 4000, 4100, 4200, 4300, 4400, 4500, 4600, 4700, 4800, 4900, 5000, 5100, 5200, 5300, 5400, 5500, 5600, 5700, 5800, 5900, 6000, 6100, 6200, 6300, 6400, 6500, 6600, 6700, 6800, 6900, 7000, 7100, 7200, 7300, 7400, 7500, 7600, 7700, 7800, 7900, 8000, 8100, 8200, 8300, 8400, 8500, 8600, 8700, 8800, 8900, 9000, 9100, 9200, 9300, 9400, 9500, 9600, 9700, 9800, or 9900 to 10000 nucleotides at each target sequence of said cell(s).

[0875] In some embodiments, the modifications can include the introduction, deletion, or substitution of nucleotides at each target sequence of said cell(s) via nucleic acid components (e.g. guide(s) RNA(s) or sgRNA(s)), such as those mediated by a composition, system, or a component thereof described elsewhere herein. In some embodiments, the modifications can include the introduction, deletion, or substitution of nucleotides at a target or random sequence of said cell(s) via a composition, system, or technique.

[0876] In some embodiments, the composition, system, or component thereof can promote Non-Homologous End-Joining (NHEJ). In some embodiments, modification of a polynucleotide by a composition, system, or a component thereof, such as a diseased polynucleotide, can include NHEJ. In some embodiments, promotion of this repair pathway by the composition, system, or a component thereof can be used to target gene or polynucleotide specific knock-outs and/or knock-ins. In some embodiments, promotion of this repair pathway by the composition, system, or a component thereof can be used to generate NHEJ-mediated indels. Nuclease-induced NHEJ can also be used to remove (e.g., delete) sequence in a gene of interest. Generally, NHEJ repairs a double-strand break in the DNA by joining together the two ends; however, generally, the original sequence is restored only if two compatible ends, exactly as they were formed by the double-strand break, are perfectly ligated. The DNA ends of the double-strand break are frequently the subject of enzymatic processing, resulting in the addition or removal of nucleotides, at one or both strands, prior to rejoining of the ends. This results in the presence of insertion and/or deletion (indel) mutations in the DNA sequence at the site of the NHEJ repair. The indel can range in size from 1-50 or more base pairs. In some embodiments the indel can be 1, 2, 3, 4, 5, 6, 7, 8, 9, 10, 11, 12, 13, 14, 15, 16, 17, 18, 19, 20, 21, 22, 23, 24, 25, 26, 27, 28, 29, 30, 31, 32, 33, 34, 35, 36, 37, 38, 39, 40, 41, 42, 43, 44, 45, 46, 47, 48, 49, 50, 51, 52, 53, 54, 55, 56, 57, 58, 59, 60, 61, 62, 63, 64, 65, 66, 67, 68, 69, 70, 71, 72, 73, 74, 75, 76, 77, 78, 79, 80, 81, 82, 83, 84, 85, 86, 87, 88, 89, 90, 91, 92, 93, 94, 95, 96, 97, 98, 99, 100, 101, 102, 103, 104, 105, 106, 107, 108, 109, 110, 111, 112, 113, 114, 115, 116, 117, 118, 119, 120, 121, 122, 123, 124, 125, 126, 127, 128, 129, 130, 131, 132, 133, 134, 135, 136, 137, 138, 139, 140, 141, 142, 143, 144, 145, 146, 147, 148, 149, 150, 151, 152, 153, 154, 155, 156, 157, 158, 159, 160, 161, 162, 163, 164, 165, 166, 167, 168, 169, 170, 171, 172, 173, 174, 175, 176, 177, 178, 179, 180, 181, 182, 183, 184, 185, 186, 187, 188, 189, 190, 191, 192, 193, 194, 195, 196, 197, 198, 199, 200, 201, 202, 203, 204, 205, 206, 207, 208, 209, 210, 211, 212, 213, 214, 215, 216, 217, 218, 219, 220, 221, 222, 223, 224, 225, 226, 227, 228, 229, 230, 231, 232, 233, 234, 235, 236, 237, 238, 239, 240, 241, 242, 243, 244, 245, 246, 247, 248, 249, 250, 251, 252, 253, 254, 255, 256, 257, 258, 259, 260, 261, 262, 263, 264, 265, 266, 267, 268, 269, 270, 271, 272, 273, 274, 275, 276, 277, 278, 279, 280, 281, 282, 283, 284, 285, 286, 287, 288, 289, 290, 291, 292, 293, 294, 295, 296, 297, 298, 299, 300, 301, 302, 303, 304, 305, 306, 307, 308, 309, 310, 311, 312, 313, 314, 315, 316, 317, 318, 319, 320, 321, 322, 323, 324, 325, 326, 327, 328, 329, 330, 331, 332, 333, 334, 335, 336, 337, 338, 339, 340, 341, 342, 343, 344, 345, 346, 347, 348, 349, 350, 351, 352, 353, 354, 355, 356, 357, 358, 359, 360, 361, 362, 363, 364, 365, 366, 367, 368, 369, 370, 371, 372, 373, 374, 375, 376, 377, 378, 379, 380, 381, 382, 383, 384, 385, 386, 387, 388, 389, 390, 391, 392, 393, 394, 395, 396, 397, 398, 399, 400, 401, 402, 403, 404, 405, 406, 407, 408, 409, 410, 411, 412, 413, 414, 415, 416, 417, 418, 419, 420, 421, 422, 423, 424, 425, 426, 427, 428, 429, 430, 431, 432, 433, 434, 435, 436, 437, 438, 439, 440, 441, 442, 443, 444, 445, 446, 447, 448, 449, 450, 451, 452, 453, 454, 455, 456, 457, 458, 459, 460, 461, 462, 463, 464, 465, 466, 467, 468, 469, 470, 471, 472, 473, 474, 475, 476, 477, 478, 479, 480, 481, 482, 483, 484, 485, 486, 487, 488, 489, 490, 491, 492, 493, 494, 495, 496, 497, 498, 499, or 500 base pairs or more. If a double-strand break is targeted near to a short target sequence, the deletion mutations caused by the NHEJ repair often span, and therefore remove, the unwanted nucleotides. For the deletion of larger DNA segments, introducing two double-strand breaks, one on each side of the sequence, can result in NHEJ between the ends with removal of the entire intervening sequence. Both of these approaches can be used to delete specific DNA sequences.

[0877] In some embodiments, composition, system, mediated NHEJ can be used in the method to delete small sequence motifs. In some embodiments, composition, system, mediated NHEJ can be used in the method to generate NHEJ-mediate indels that can be targeted to the gene, e.g., a coding region, e.g., an early coding region of a gene of interest can be used to knockout (i.e., eliminate expression of) a gene of interest. For example, early coding region of a gene of interest includes sequence immediately following a transcription start site, within a first exon of the coding sequence, or within 500 bp of the transcription start site (e.g., less than 500, 450, 400, 350, 300, 250, 200, 150, 100 or 50 bp). In an embodiment, in which a guide RNA and Cas effector generate a double strand break for the purpose of inducing NHEJ-mediated indels, a guide RNA may be configured to position one double-strand break in close proximity to a nucleotide of the target position. In an embodiment, the cleavage site may be between 0-500 bp away from the target position (e.g., less than 500, 400, 300, 200, 100, 50, 40, 30, 25, 20, 15, 10, 9, 8, 7, 6, 5, 4, 3, 2 or 1 bp from the target position). In an embodiment, in which two guide RNAs complexing with one or more Cas nickases induce two single strand breaks for the purpose of inducing NHEJ-mediated indels, two guide RNAs may be configured to position two single-strand breaks to provide for NHEJ repair a nucleotide of the target position.

[0878] For minimization of toxicity and off-target effect, it may be important to control the concentration of Cas mRNA and guide RNA delivered. Optimal concentrations of Cas mRNA and guide RNA can be determined by testing different concentrations in a cellular or non-human eukaryote animal model and using deep sequencing the analyze the extent of modification at potential off-target genomic loci. Alternatively, to minimize the level of toxicity and off-target effect, Cas nickase mRNA (for example S. pyogenes Cas9 with the D10A mutation) can be delivered with a pair of guide RNAs targeting a site of interest. Guide sequences and strategies to minimize toxicity and off-target effects can be as in International Patent Publication No. WO 2014/093622 (PCT/US2013/074667); or, via mutation. Others are as described elsewhere herein.

[0879] Typically, in the context of an endogenous CRISPR or system, formation of a CRISPR or complex (comprising a guide sequence hybridized to a target sequence and complexed with one or more Cas proteins) results in cleavage, nicking, and/or another modification of one or both strands in or near (e.g. within 1, 2, 3, 4, 5, 6, 7, 8, 9, 10, 20, 50, or more base pairs from) the target sequence. In some embodiments, the tracr sequence, which may comprise or consist of all or a portion of a wild-type tracr sequence (e.g. about or more than about 20, 26, 32, 45, 48, 54, 63, 67, 85, or more nucleotides of a wild-type tracr sequence), can also form part of a CRISPR complex, such as by hybridization along at least a portion of the tracr sequence to all or a portion of a tracr mate sequence that is operably linked to the guide sequence.

[0880] In some embodiments, a method of modifying a target polynucleotide in a cell to treat or prevent a disease can include allowing a composition, system, or component thereof to bind to the target polynucleotide, e.g., to effect cleavage, nicking, or other modification as the composition, system is capable of said target polynucleotide, thereby modifying the target polynucleotide, wherein the composition, system, or component thereof, complex with a guide sequence, and hybridize said guide sequence to a target sequence within the target polynucleotide, wherein said guide sequence is optionally linked to a tracr mate sequence, which in turn can hybridize to a tracr sequence. In some of these embodiments, the composition, system, or component thereof can be or include a CRISPR-Cas effector complexed with a guide sequence. In some embodiments, modification can include cleaving or nicking one or two strands at the location of the target sequence by one or more components of the composition, system, or component thereof.

[0881] The cleavage, nicking, or other modification capable of being performed by the composition, system, can modify transcription of a target polynucleotide. In some embodiments, modification of transcription can include decreasing transcription of a target polynucleotide. In some embodiments, modification can include increasing transcription of a target polynucleotide. In some embodiments, the method includes repairing said cleaved target polynucleotide by homologous recombination with an recombination template polynucleotide, wherein said repair results in a modification such as, but not limited to, an insertion, deletion, or substitution of one or more nucleotides of said target polynucleotide. In some embodiments, said modification results in one or more amino acid changes in a protein expressed from a gene comprising the target sequence. In some embodiments, the modification imparted by the composition, system, or component thereof provides a transcript and/or protein that can correct a disease or a symptom thereof, including but not limited to, any of those described in greater detail elsewhere herein.

[0882] In some embodiments, the method of treating or preventing a disease can include delivering one or more vectors or vector systems to a cell, such as a eukaryotic or prokaryotic cell, wherein one or more vectors or vector systems include the composition, system, or component thereof. In some embodiments, the vector(s) or vector system(s) can be a viral vector or vector system, such as an AAV or lentiviral vector system, which are described in greater detail elsewhere herein. In some embodiments, the method of treating or preventing a disease can include delivering one or more viral particles, such as an AAV or lentiviral particle, containing the composition, system, or component thereof. In some embodiments, the viral particle has a tissue specific tropism. In some embodiments, the viral particle has a liver, muscle, eye, heart, pancreas, kidney, neuron, epithelial cell, endothelial cell, astrocyte, glial cell, immune cell, or red blood cell specific tropism.

[0883] It will be understood that the composition and system, according to the invention as described herein, such as the composition and system, for use in the methods according to the invention as described herein, may be suitably used for any type of application known for composition, system, preferably in eukaryotes. In certain aspects, the application is therapeutic, preferably therapeutic in a eukaryote organism, such as including but not limited to animals (including human), plants, algae, fungi (including yeasts), etc. Alternatively, or in addition, in certain aspects, the application may involve accomplishing or inducing one or more particular traits or characteristics, such as genotypic and/or phenotypic traits or characteristics, as also described elsewhere herein.

### Treating Diseases of the Circulatory System

[0884] In some embodiments, the composition, system, and/or component thereof described herein can be used to treat and/or prevent a circulatory system disease. Exemplary disease is provided, for example. In some embodiments the plasma exosomes of Wahlgren et al. (Nucleic Acids Research, 2012, Vol. 40, No. 17 e130) can be used to deliver the composition, system, and/or component thereof described herein to the blood. In some embodiments, the circulatory system disease can be treated by using a lentivirus to deliver the composition, system, described herein to modify hematopoietic stem cells (HSCs) in vivo or ex vivo (see e.g. Drakopoulou, “Review Article, The Ongoing Challenge of Hematopoietic Stem Cell-Based Gene Therapy for β-Thalassemia,” Stem Cells International, Volume 2011, Article ID 987980, 10 pages, doi:10.4061/2011/987980, which can be adapted for use with the composition, system, herein in view of the description herein). In some embodiments, the circulatory system disorder can be treated by correcting HSCs as to the disease using a composition, system, herein or a component thereof, wherein the composition, system, optionally includes a suitable HDR repair template (see e.g. Cavazzana, “Outcomes of Gene Therapy for β-Thalassemia Major via Transplantation of Autologous Hematopoietic Stem Cells Transduced Ex Vivo with a Lentiviral βA-T87Q-Globin Vector.”; Cavazzana-Calvo, “Transfusion independence and HMGA2 activation after gene therapy of human β-thalassaemia”, Nature 467, 318-322 (16 Sep. 2010) doi:10.1038/nature09328; Nienhuis, “Development of Gene Therapy for Thalassemia, Cold Spring Harbor Perspectives in Medicine, doi: 10.1101/cshperspect.a011833 (2012), LentiGlobin BB305, a lentiviral vector containing an engineered β-globin gene (βA-T87Q); and Xie et al., “Seamless gene correction of β-thalassaemia mutations in patient-specific iPSCs using CRISPR/Cas9 and piggyback” Genome Research gr.173427.114 (2014) www.genome.org/cgi/doi/10.1101/gr.173427.114 (Cold Spring Harbor Laboratory Press; Watts, “Hematopoietic Stem Cell Expansion and Gene Therapy” Cytotherapy 13(10):1164-1171. doi:10.3109/14653249.2011.620748 (2011), which can be adapted for use with the composition, system, herein in view of the description herein). In some embodiments, iPSCs can be modified using a composition, system, described herein to correct a disease polynucleotide associated with a circulatory disease. In this regard, the teachings of Xu et al. (Sci Rep. 2015 Jul. 9; 5:12065. doi: 10.1038/srep12065) and Song et al. (Stem Cells Dev. 2015 May 1; 24(9):1053-65. doi: 10.1089/scd.2014.0347. Epub 2015 Feb. 5) with respect to modifying iPSCs can be adapted for use in view of the description herein with the composition, system, described herein.

[0885] The term “Hematopoietic Stem Cell” or “HSC” refers broadly those cells considered to be an HSC, e.g., blood cells that give rise to all the other blood cells and are derived from mesoderm; located in the red bone marrow, which is contained in the core of most bones. HSCs of the invention include cells having a phenotype of hematopoietic stem cells, identified by small size, lack of lineage (lin) markers, and markers that belong to the cluster of differentiation series, like: CD34, CD38, CD90, CD133, CD105, CD45, and also c-kit, —the receptor for stem cell factor. Hematopoietic stem cells are negative for the markers that are used for detection of lineage commitment, and are, thus, called Lin−; and, during their purification by FACS, a number of up to 14 different mature blood-lineage markers, e.g., CD13 & CD33 for myeloid, CD71 for erythroid, CD19 for B cells, CD61 for megakaryocytic, etc. for humans; and, B220 (murine CD45) for B cells, Mac-1 (CD11b/CD18) for monocytes, Gr-1 for Granulocytes, Ter119 for erythroid cells, Il7Ra, CD3, CD4, CD5, CD8 for T cells, etc. Mouse HSC markers: CD34lo/−, SCA-1+, Thy1.1+/lo, CD38+, C-kit+, lin−, and Human HSC markers: CD34+, CD59+, Thy1/CD90+, CD38lo/−, C-kit/CD117+, and lin−. HSCs are identified by markers. Hence in embodiments discussed herein, the HSCs can be CD34+ cells. HSCs can also be hematopoietic stem cells that are CD34−/CD38−. Stem cells that may lack c-kit on the cell surface that are considered in the art as HSCs are within the ambit of the invention, as well as CD133+ cells likewise considered HSCs in the art.

[0886] In some embodiments, the treatment or prevention for treating a circulatory system or blood disease can include modifying a human cord blood cell with any modification described herein. In some embodiments, the treatment or prevention for treating a circulatory system or blood disease can include modifying a granulocyte colony-stimulating factor-mobilized peripheral blood cell (mPB) with any modification described herein. In some embodiments, the human cord blood cell or mPB can be CD34+. In some embodiments, the cord blood cell(s) or mPB cell(s) modified can be autologous. In some embodiments, the cord blood cell(s) or mPB cell(s) can be allogenic. In addition to the modification of the disease gene(s), allogenic cells can be further modified using the composition, system, described herein to reduce the immunogenicity of the cells when delivered to the recipient. Such techniques are described elsewhere herein and e.g. Cartier, “MINI-SYMPOSIUM: X-Linked Adrenoleukodystrophypa, Hematopoietic Stem Cell Transplantation and Hematopoietic Stem Cell Gene Therapy in X-Linked Adrenoleukodystrophy,” Brain Pathology 20 (2010) 857-862, which can be adapted for use with the composition, system, herein. The modified cord blood cell(s) or mPB cell(s) can be optionally expanded in vitro. The modified cord blood cell(s) or mPB cell(s) can be derived to a subject in need thereof using any suitable delivery technique.

[0887] The CRISPR-Cas (system may be engineered to target genetic locus or loci in HSCs. In some embodiments, the Cas effector(s) can be codon-optimized for a eukaryotic cell and especially a mammalian cell, e.g., a human cell, for instance, HSC, or iPSC and sgRNA targeting a locus or loci in HSC, such as circulatory disease, can be prepared. These may be delivered via particles. The particles may be formed by the Cas effector protein and the gRNA being admixed. The gRNA and Cas effector protein mixture can be, for example, admixed with a mixture comprising or consisting essentially of or consisting of surfactant, phospholipid, biodegradable polymer, lipoprotein and alcohol, whereby particles containing the gRNA and Cas effector protein may be formed. The invention comprehends so making particles and particles from such a method as well as uses thereof. Particles suitable delivery of the CRISRP-Cas systems in the context of blood or circulatory system or HSC delivery to the blood or circulatory system are described in greater detail elsewhere herein.

[0888] In some embodiments, after ex vivo modification the HSCs or iPCS can be expanded prior to administration to the subject. Expansion of HSCs can be via any suitable method such as that described by, Lee, “Improved ex vivo expansion of adult hematopoietic stem cells by overcoming CUL4-mediated degradation of HOXB4.” Blood. 2013 May 16; 121(20):4082-9. doi: 10.1182/blood-2012-09-455204. Epub 2013 Mar. 21.

[0889] In some embodiments, the HSCs or iPSCs modified can be autologous. In some embodiments, the HSCs or iPSCs can be allogenic. In addition to the modification of the disease gene(s), allogenic cells can be further modified using the composition, system, described herein to reduce the immunogenicity of the cells when delivered to the recipient. Such techniques are described elsewhere herein and e.g. Cartier, “MINI-SYMPOSIUM: X-Linked Adrenoleukodystrophypa, Hematopoietic Stem Cell Transplantation and Hematopoietic Stem Cell Gene Therapy in X-Linked Adrenoleukodystrophy,” Brain Pathology 20 (2010) 857-862, which can be adapted for use with the composition, system, herein.

### Treating Neurological Diseases

[0890] In some embodiments, the compositions, systems, described herein can be used to treat diseases of the brain and CNS. Delivery options for the brain include encapsulation of CRISPR enzyme and guide RNA in the form of either DNA or RNA into liposomes and conjugating to molecular Trojan horses for trans-blood brain barrier (BBB) delivery. Molecular Trojan horses have been shown to be effective for delivery of B-gal expression vectors into the brain of non-human primates. The same approach can be used to delivery vectors containing CRISPR enzyme and guide RNA. For instance, Xia C F and Boado R J, Pardridge W M (“Antibody-mediated targeting of siRNA via the human insulin receptor using avidin-biotin technology.” Mol Pharm. 2009 May-June; 6(3):747-51. doi: 10.1021/mp800194) describes how delivery of short interfering RNA (siRNA) to cells in culture, and in vivo, is possible with combined use of a receptor-specific monoclonal antibody (mAb) and avidin-biotin technology. The authors also report that because the bond between the targeting mAb and the siRNA is stable with avidin-biotin technology, and RNAi effects at distant sites such as brain are observed in vivo following an intravenous administration of the targeted siRNA, the teachings of which can be adapted for use with the compositions, systems, herein. In other embodiments, an artificial virus can be generated for CNS and/or brain delivery. See e.g. Zhang et al. (Mol Ther. 2003 January; 7(1):11-8.)), the teachings of which can be adapted for use with the compositions, systems, herein.

### Treating Hearing Diseases

[0891] In some embodiments the composition and system described herein can be used to treat a hearing disease or hearing loss in one or both ears. Deafness is often caused by lost or damaged hair cells that cannot relay signals to auditory neurons. In such cases, cochlear implants may be used to respond to sound and transmit electrical signals to the nerve cells. But these neurons often degenerate and retract from the cochlea as fewer growth factors are released by impaired hair cells.

[0892] In some embodiments, the composition, system, or modified cells can be delivered to one or both ears for treating or preventing hearing disease or loss by any suitable method or technique. Suitable methods and techniques include, but are not limited to those set forth in US Patent Publication No. 20120328580 describes injection of a pharmaceutical composition into the ear (e.g., auricular administration), such as into the luminae of the cochlea (e.g., the Scala media, Sc vestibulae, and Sc tympani), e.g., using a syringe, e.g., a single-dose syringe. For example, one or more of the compounds described herein can be administered by intratympanic injection (e.g., into the middle ear), and/or injections into the outer, middle, and/or inner ear; administration in situ, via a catheter or pump (see e.g. McKenna et al., (U.S. Patent Publication No. 2006/0030837) and Jacobsen et al., (U.S. Pat. No. 7,206,639); administration in combination with a mechanical device such as a cochlear implant or a hearing aid, which is worn in the outer ear (see e.g. U.S. Patent Publication No. 2007/0093878, which provides an exemplary cochlear implant suitable for delivery of the compositions, systems, described herein to the ear). Such methods are routinely used in the art, for example, for the administration of steroids and antibiotics into human ears. Injection can be, for example, through the round window of the ear or through the cochlear capsule. Other inner ear administration methods are known in the art (see, e.g., Salt and Plontke, Drug Discovery Today, 10:1299-1306, 2005). In some embodiments, a catheter or pump can be positioned, e.g., in the ear (e.g., the outer, middle, and/or inner ear) of a patient during a surgical procedure. In some embodiments, a catheter or pump can be positioned, e.g., in the ear (e.g., the outer, middle, and/or inner ear) of a patient without the need for a surgical procedure.

[0893] In general, the cell therapy methods described in US Patent Publication No. 20120328580 can be used to promote complete or partial differentiation of a cell to or towards a mature cell type of the inner ear (e.g., a hair cell) in vitro. Cells resulting from such methods can then be transplanted or implanted into a patient in need of such treatment. The cell culture methods required to practice these methods, including methods for identifying and selecting suitable cell types, methods for promoting complete or partial differentiation of selected cells, methods for identifying complete or partially differentiated cell types, and methods for implanting complete or partially differentiated cells are described below.

[0894] Cells suitable for use in the present invention include, but are not limited to, cells that are capable of differentiating completely or partially into a mature cell of the inner ear, e.g., a hair cell (e.g., an inner and/or outer hair cell), when contacted, e.g., in vitro, with one or more of the compounds described herein. Exemplary cells that are capable of differentiating into a hair cell include, but are not limited to stem cells (e.g., inner ear stem cells, adult stem cells, bone marrow derived stem cells, embryonic stem cells, mesenchymal stem cells, skin stem cells, iPS cells, and fat derived stem cells), progenitor cells (e.g., inner ear progenitor cells), support cells (e.g., Deiters' cells, pillar cells, inner phalangeal cells, tectal cells and Hensen's cells), and/or germ cells. The use of stem cells for the replacement of inner ear sensory cells is described in Li et al., (U.S. Patent Publication No. 2005/0287127) and Li et al., (U.S. patent application Ser. No. 11/953,797). The use of bone marrow derived stem cells for the replacement of inner ear sensory cells is described in Edge et al., PCT/US2007/084654. iPS cells are described, e.g., at Takahashi et al., Cell, Volume 131, Issue 5, Pages 861-872 (2007); Takahashi and Yamanaka, Cell 126, 663-76 (2006); Okita et al., Nature 448, 260-262 (2007); Yu, J. et al., Science 318(5858):1917-1920 (2007); Nakagawa et al., Nat. Biotechnol. 26:101-106 (2008); and Zaehres and Scholer, Cell 131(5):834-835 (2007). Such suitable cells can be identified by analyzing (e.g., qualitatively or quantitatively) the presence of one or more tissue specific genes. For example, gene expression can be detected by detecting the protein product of one or more tissue-specific genes. Protein detection techniques involve staining proteins (e.g., using cell extracts or whole cells) using antibodies against the appropriate antigen. In this case, the appropriate antigen is the protein product of the tissue-specific gene expression. Although, in principle, a first antibody (i.e., the antibody that binds the antigen) can be labeled, it is more common (and improves the visualization) to use a second antibody directed against the first (e.g., an anti-IgG). This second antibody is conjugated either with fluorochromes, or appropriate enzymes for colorimetric reactions, or gold beads (for electron microscopy), or with the biotin-avidin system, so that the location of the primary antibody, and thus the antigen, can be recognized.

[0895] The composition and system may be delivered to the ear by direct application of pharmaceutical composition to the outer ear, with compositions modified from US Patent Publication No. 20110142917. In some embodiments the pharmaceutical composition is applied to the ear canal. Delivery to the ear may also be referred to as aural or otic delivery.

[0896] In some embodiments, the compositions, systems, or components thereof and/or vectors or vector systems can be delivered to ear via a transfection to the inner ear through the intact round window by a novel proteidic delivery technology which may be applied to the nucleic acid-targeting system of the present invention (see, e.g., Qi et al., Gene Therapy (2013), 1-9). About 40 μl of 10 mM RNA may be contemplated as the dosage for administration to the ear.

[0897] According to Rejali et al. (Hear Res. 2007 June; 228(1-2):180-7), cochlear implant function can be improved by good preservation of the spiral ganglion neurons, which are the target of electrical stimulation by the implant and brain derived neurotrophic factor (BDNF) has previously been shown to enhance spiral ganglion survival in experimentally deafened ears. Rejali et al. tested a modified design of the cochlear implant electrode that includes a coating of fibroblast cells transduced by a viral vector with a BDNF gene insert. To accomplish this type of ex vivo gene transfer, Rejali et al. transduced guinea pig fibroblasts with an adenovirus with a BDNF gene cassette insert, and determined that these cells secreted BDNF and then attached BDNF-secreting cells to the cochlear implant electrode via an agarose gel, and implanted the electrode in the scala tympani. Rejali et al. determined that the BDNF expressing electrodes were able to preserve significantly more spiral ganglion neurons in the basal turns of the cochlea after 48 days of implantation when compared to control electrodes and demonstrated the feasibility of combining cochlear implant therapy with ex vivo gene transfer for enhancing spiral ganglion neuron survival. Such a system may be applied to the nucleic acid-targeting system of the present invention for delivery to the ear.

[0898] In some embodiments, the system set forth in Mukherjea et al. (Antioxidants & Redox Signaling, Volume 13, Number 5, 2010) can be adapted for transtympanic administration of the composition, system, or component thereof to the ear. In some embodiments, a dosage of about 2 mg to about 4 mg of CRISPR Cas for administration to a human.

[0899] In some embodiments, the system set forth in [Jung et al. (Molecular Therapy, vol. 21 no. 4, 834-841 April 2013) can be adapted for vestibular epithelial delivery of the composition, system, or component thereof to the ear. In some embodiments, a dosage of about 1 to about 30 mg of CRISPR Cas for administration to a human.

### Treating Diseases in Non-Dividing Cells

[0900] In some embodiments, the gene or transcript to be corrected is in a non-dividing cell. Exemplary non-dividing cells are muscle cells or neurons. Non-dividing (especially non-dividing, fully differentiated) cell types present issues for gene targeting or genome engineering, for example because homologous recombination (HR) is generally suppressed in the G1 cell-cycle phase. However, while studying the mechanisms by which cells control normal DNA repair systems, Durocher discovered a previously unknown switch that keeps HR “off” in non-dividing cells and devised a strategy to toggle this switch back on. Orthwein et al. (Daniel Durocher's lab at the Mount Sinai Hospital in Ottawa, Canada) recently reported (Nature 16142, published online 9 Dec. 2015) have shown that the suppression of HR can be lifted and gene targeting successfully concluded in both kidney (293T) and osteosarcoma (U20S) cells. Tumor suppressors, BRCA1, PALB2 and BRAC2 are known to promote DNA DSB repair by HR. They found that formation of a complex of BRCA1 with PALB2-BRAC2 is governed by a ubiquitin site on PALB2, such that action on the site by an E3 ubiquitin ligase. This E3 ubiquitin ligase is composed of KEAP1 (a PALB2-interacting protein) in complex with cullin-3 (CUL3)—RBX1. PALB2 ubiquitylation suppresses its interaction with BRCA1 and is counteracted by the deubiquitylase USP11, which is itself under cell cycle control. Restoration of the BRCA1—PALB2 interaction combined with the activation of DNA-end resection is sufficient to induce homologous recombination in G1, as measured by a number of methods including a CRISPR-Cas-based gene-targeting assay directed at USP11 or KEAP1 (expressed from a pX459 vector). However, when the BRCA1—PALB2 interaction was restored in resection-competent G1 cells using either KEAP1 depletion or expression of the PALB2-KR mutant, a robust increase in gene-targeting events was detected. These teachings can be adapted for and/or applied to the Cas compositions, systems, described herein.

[0901] Thus, reactivation of HR in cells, especially non-dividing, fully differentiated cell types is preferred, in some embodiments. In some embodiments, promotion of the BRCA1-PALB2 interaction is preferred in some embodiments. In some embodiments, the target ell is a non-dividing cell. In some embodiments, the target cell is a neuron or muscle cell. In some embodiments, the target cell is targeted in vivo. In some embodiments, the cell is in G1 and HR is suppressed. In some embodiments, use of KEAP1 depletion, for example inhibition of expression of KEAP1 activity, is preferred. KEAP1 depletion may be achieved through siRNA, for example as shown in Orthwein et al. Alternatively, expression of the PALB2-KR mutant (lacking all eight Lys residues in the BRCA1-interaction domain is preferred, either in combination with KEAP1 depletion or alone. PALB2-KR interacts with BRCA1 irrespective of cell cycle position. Thus, promotion or restoration of the BRCA1-PALB2 interaction, especially in G1 cells, is preferred in some embodiments, especially where the target cells are non-dividing, or where removal and return (ex vivo gene targeting) is problematic, for example neuron or muscle cells. KEAP1 siRNA is available from ThermoFischer. In some embodiments, a BRCA1—PALB2 complex may be delivered to the G1 cell. In some embodiments, PALB2 deubiquitylation may be promoted for example by increased expression of the deubiquitylase USP11, so it is envisaged that a construct may be provided to promote or up-regulate expression or activity of the deubiquitylase USP11.

### Treating Diseases of the Eye

[0902] In some embodiments, the disease to be treated is a disease that affects the eyes. Thus, in some embodiments, the composition, system, or component thereof described herein is delivered to one or both eyes.

[0903] The composition, system, can be used to correct ocular defects that arise from several genetic mutations further described in Genetic Diseases of the Eye, Second Edition, edited by Elias I. Traboulsi, Oxford University Press, 2012.

[0904] In some embodiments, the condition to be treated or targeted is an eye disorder. In some embodiments, the eye disorder may include glaucoma. In some embodiments, the eye disorder includes a retinal degenerative disease. In some embodiments, the retinal degenerative disease is selected from Stargardt disease, Bardet-Biedl Syndrome, Best disease, Blue Cone Monochromacy, Choroidermia, Cone-rod dystrophy, Congenital Stationary Night Blindness, Enhanced S-Cone Syndrome, Juvenile X-Linked Retinoschisis, Leber Congenital Amaurosis, Malattia Leventinesse, Norrie Disease or X-linked Familial Exudative Vitreoretinopathy, Pattern Dystrophy, Sorsby Dystrophy, Usher Syndrome, Retinitis Pigmentosa, Achromatopsia or Macular dystrophies or degeneration, Retinitis Pigmentosa, Achromatopsia, and age related macular degeneration. In some embodiments, the retinal degenerative disease is Leber Congenital Amaurosis (LCA) or Retinitis Pigmentosa. Other exemplary eye diseases are described in greater detail elsewhere herein.

[0905] In some embodiments, the composition, system, is delivered to the eye, optionally via intravitreal injection or subretinal injection. Intraocular injections may be performed with the aid of an operating microscope. For subretinal and intravitreal injections, eyes may be prolapsed by gentle digital pressure and fundi visualized using a contact lens system consisting of a drop of a coupling medium solution on the cornea covered with a glass microscope slide coverslip. For subretinal injections, the tip of a 10-mm 34-gauge needle, mounted on a 5-μl Hamilton syringe may be advanced under direct visualization through the superior equatorial sclera tangentially towards the posterior pole until the aperture of the needle was visible in the subretinal space. Then, 2 μl of vector suspension may be injected to produce a superior bullous retinal detachment, thus confirming subretinal vector administration. This approach creates a self-sealing sclerotomy allowing the vector suspension to be retained in the subretinal space until it is absorbed by the RPE, usually within 48 h of the procedure. This procedure may be repeated in the inferior hemisphere to produce an inferior retinal detachment. This technique results in the exposure of approximately 70% of neurosensory retina and RPE to the vector suspension. For intravitreal injections, the needle tip may be advanced through the sclera 1 mm posterior to the corneoscleral limbus and 2 μl of vector suspension injected into the vitreous cavity. For intracameral injections, the needle tip may be advanced through a corneoscleral limbal paracentesis, directed towards the central cornea, and 2 μl of vector suspension may be injected. For intracameral injections, the needle tip may be advanced through a corneoscleral limbal paracentesis, directed towards the central cornea, and 2 μl of vector suspension may be injected. These vectors may be injected at titers of either 1.0-1.4×10¹⁰ or 1.0-1.4×10⁹ transducing units (TU)/ml.

[0906] In some embodiments, for administration to the eye, lentiviral vectors. In some embodiments, the lentiviral vector is an equine infectious anemia virus (EIAV) vector. Exemplary EIAV vectors for eye delivery are described in Balagaan, J Gene Med 2006; 8: 275-285, Published online 21 Nov. 2005 in Wiley InterScience (www.interscience.wiley.com). DOI: 10.1002/jgm.845; Binley et al., HUMAN GENE THERAPY 23:980-991 (September 2012), which can be adapted for use with the composition, system, described herein. In some embodiments, the dosage can be 1.1×10⁵ transducing units per eye (TU/eye) in a total volume of 100 μl.

[0907] Other viral vectors can also be used for delivery to the eye, such as AAV vectors, such as those described in Campochiaro et al., Human Gene Therapy 17:167-176 (February 2006), Millington-Ward et al. (Molecular Therapy, vol. 19 no. 4, 642-649 April 2011; Dalkara et al. (Sci Transl Med 5, 189ra76 (2013)), which can be adapted for use with the composition, system, described herein. In some embodiments, the dose can range from about 10⁶ to 10^{9.5} particle units. In the context of the Millington-Ward AAV vectors, a dose of about 2×10¹¹ to about 6×10¹³ virus particles can be administered. In the context of Dalkara vectors, a dose of about 1×10¹⁵ to about 1×10¹⁶ vg/ml administered to a human.

[0908] In some embodiments, the sd-rxRNA® system of R×i Pharmaceuticals may be used/and or adapted for delivering composition, system, to the eye. In this system, a single intravitreal administration of 3 μg of sd-rxRNA results in sequence-specific reduction of PPIB mRNA levels for 14 days. The sd-rxRNA® system may be applied to the nucleic acid-targeting system of the present invention, contemplating a dose of about 3 to 20 mg of CRISPR administered to a human.

[0909] In other embodiments, the methods of US Patent Publication No. 20130183282, which is directed to methods of cleaving a target sequence from the human rhodopsin gene, may also be modified to the nucleic acid-targeting system of the present invention.

[0910] In other embodiments, the methods of US Patent Publication No. 20130202678 for treating retinopathies and sight-threatening ophthalmologic disorders relating to delivering of the Puf-A gene (which is expressed in retinal ganglion and pigmented cells of eye tissues and displays a unique anti-apoptotic activity) to the sub-retinal or intravitreal space in the eye may be used or adapted. In particular, desirable targets are zgc:193933, prdm1a, spata2, tex10, rbb4, ddx3, zp2.2, Blimp-1 and HtrA2, all of which may be targeted by the composition, system, of the present invention.

[0911] Wu (Cell Stem Cell, 13:659-62, 2013) designed a guide RNA that led Cas9 to a single base pair mutation that causes cataracts in mice, where it induced DNA cleavage. Then using either the other wild-type allele or oligos given to the zygotes repair mechanisms corrected the sequence of the broken allele and corrected the cataract-causing genetic defect in mutant mouse. This approach can be adapted to and/or applied to the compositions, systems, described herein.

[0912] US Patent Publication No. 20120159653, describes use of zinc finger nucleases to genetically modify cells, animals and proteins associated with macular degeneration (MD), the teachings of which can be applied to and/or adapted for the compositions, systems, described herein.

[0913] One aspect of US Patent Publication No. 20120159653 relates to editing of any chromosomal sequences that encode proteins associated with MD which may be applied to the nucleic acid-targeting system of the present invention.

### Treating Muscle Diseases and Cardiovascular Diseases

[0914] In some embodiments, the composition, system can be used to treat and/or prevent a muscle disease and associated circulatory or cardiovascular disease or disorder. The present invention also contemplates delivering the composition, system, described herein, e.g. Cas effector protein systems, to the heart. For the heart, a myocardium tropic adeno-associated virus (AAVM) is preferred, in particular AAVM41 which showed preferential gene transfer in the heart (see, e.g., Lin-Yanga et al., PNAS, Mar. 10, 2009, vol. 106, no. 10). Administration may be systemic or local. A dosage of about 1-10×10¹⁴ vector genomes are contemplated for systemic administration. See also, e.g., Eulalio et al. (2012) Nature 492: 376 and Somasuntharam et al. (2013) Biomaterials 34: 7790, the teachings of which can be adapted for and/or applied to the compositions, systems, described herein.

[0915] For example, US Patent Publication No. 20110023139, the teachings of which can be adapted for and/or applied to the compositions, systems, described herein describes use of zinc finger nucleases to genetically modify cells, animals and proteins associated with cardiovascular disease. Cardiovascular diseases generally include high blood pressure, heart attacks, heart failure, and stroke and TIA. Any chromosomal sequence involved in cardiovascular disease or the protein encoded by any chromosomal sequence involved in cardiovascular disease may be utilized in the methods described in this disclosure. The cardiovascular-related proteins are typically selected based on an experimental association of the cardiovascular-related protein to the development of cardiovascular disease. For example, the production rate or circulating concentration of a cardiovascular-related protein may be elevated or depressed in a population having a cardiovascular disorder relative to a population lacking the cardiovascular disorder. Differences in protein levels may be assessed using proteomic techniques including but not limited to Western blot, immunohistochemical staining, enzyme linked immunosorbent assay (ELISA), and mass spectrometry. Alternatively, the cardiovascular-related proteins may be identified by obtaining gene expression profiles of the genes encoding the proteins using genomic techniques including but not limited to DNA microarray analysis, serial analysis of gene expression (SAGE), and quantitative real-time polymerase chain reaction (Q-PCR).

[0916] The compositions, systems, herein can be used for treating diseases of the muscular system. The present invention also contemplates delivering the composition, system, described herein, effector protein systems, to muscle(s).

[0917] In some embodiments, the muscle disease to be treated is a muscle dystrophy such as DMD. In some embodiments, the composition, system, such as a system capable of RNA modification, described herein can be used to achieve exon skipping to achieve correction of the diseased gene. As used herein, the term “exon skipping” refers to the modification of pre-mRNA splicing by the targeting of splice donor and/or acceptor sites within a pre-mRNA with one or more complementary antisense oligonucleotide(s) (AONs). By blocking access of a spliceosome to one or more splice donor or acceptor site, an AON may prevent a splicing reaction thereby causing the deletion of one or more exons from a fully-processed mRNA. Exon skipping may be achieved in the nucleus during the maturation process of pre-mRNAs. In some examples, exon skipping may include the masking of key sequences involved in the splicing of targeted exons by using a composition, system, described herein capable of RNA modification. In some embodiments, exon skipping can be achieved in dystrophin mRNA. In some embodiments, the composition, system, can induce exon skipping at exon 1, 2, 3, 4, 5, 6, 7, 8, 10, 11, 12, 13, 14, 15, 16, 17, 18, 19, 20, 21, 22, 23, 24, 25, 26, 27, 28, 29, 30, 31, 32, 33, 34, 45, 36, 37, 38, 39, 40, 41, 42, 43, 44, 45, 46, 47, 48, 49, 50, 51, 52, 53, 54, 55, 56, 57, 58, 59, 60, 61, 62, 63, 64, 65, 66, 67, 68, 69, 70, 71, 72, 73, 74, 75, 76, 77, 78, 79, or any combination thereof of the dystrophin mRNA. In some embodiments, the composition, system, can induce exon skipping at exon 43, 44, 50, 51, 52, 55, or any combination thereof of the dystrophin mRNA. Mutations in these exons, can also be corrected using non-exon skipping polynucleotide modification methods.

[0918] In some embodiments, for treatment of a muscle disease, the method of Bortolanza et al. Molecular Therapy vol. 19 no. 11, 2055-264 November 2011) may be applied to an AAV expressing CRISPR Cas and injected into humans at a dosage of about 2×10¹⁵ or 2×10¹⁶ vg of vector. The teachings of Bortolanza et al., can be adapted for and/or applied to the compositions, systems, described herein.

[0919] In some embodiments, the method of Dumonceaux et al. (Molecular Therapy vol. 18 no. 5, 881-887 May 2010) may be applied to an AAV expressing CRISPR Cas and injected into humans, for example, at a dosage of about 10¹⁴ to about 10¹⁵ vg of vector. The teachings of Dumonceaux described herein can be adapted for and/or applied to the compositions, systems, described herein.

[0920] In some embodiments, the method of Kinouchi et al. (Gene Therapy (2008) 15, 1126-1130) may be applied to CRISPR Cas systems described herein and injected into a human, for example, at a dosage of about 500 to 1000 ml of a 40 μM solution into the muscle.

[0921] In some embodiments, the method of Hagstrom et al. (Molecular Therapy Vol. 10, No. 2, August 2004) can be adapted for and/or applied to the compositions, systems, herein and injected at a dose of about 15 to about 50 mg into the great saphenous vein of a human.

[0922] In some embodiments, the method comprises treating a sickle cell related disease, e.g., sickle cell trait, sickle cell disease such as sickle cell anemia, β-thalassaemia. For example, the method and system may be used to modify the genome of the sickle cell, e.g., by correcting one or more mutations of the β-globin gene. In the case of β-thalassaemia, sickle cell anemia can be corrected by modifying HSCs with the systems. The system allows the specific editing of the cell's genome by cutting its DNA and then letting it repair itself. The Cas protein is inserted and directed by a RNA guide to the mutated point and then it cuts the DNA at that point. Simultaneously, a healthy version of the sequence is inserted. This sequence is used by the cell's own repair system to fix the induced cut. In this way, the CRISPR-Cas allows the correction of the mutation in the previously obtained stem cells. The methods and systems may be used to correct HSCs as to sickle cell anemia using a systems that targets and corrects the mutation (e.g., with a suitable HDR template that delivers a coding sequence for β-globin, advantageously non-sickling β-globin); specifically, the guide RNA can target mutation that give rise to sickle cell anemia, and the HDR can provide coding for proper expression of β-globin. An guide RNA that targets the mutation-and-Cas protein containing particle is contacted with HSCs carrying the mutation. The particle also can contain a suitable HDR template to correct the mutation for proper expression of β-globin; or the HSC can be contacted with a second particle or a vector that contains or delivers the HDR template. The so contacted cells can be administered; and optionally treated/expanded; cf. Cartier. The HDR template can provide for the HSC to express an engineered β-globin gene (e.g., βA-T87Q), or β-globin.

### Treating Diseases of the Liver and Kidney

[0923] In some embodiments, the composition, system, or component thereof described herein can be used to treat a disease of the kidney or liver. Thus, in some embodiments, delivery of the CRISRP-Cas system or component thereof described herein is to the liver or kidney.

[0924] Delivery strategies to induce cellular uptake of the therapeutic nucleic acid include physical force or vector systems such as viral-, lipid- or complex-based delivery, or nanocarriers. From the initial applications with less possible clinical relevance, when nucleic acids were addressed to renal cells with hydrodynamic high-pressure injection systemically, a wide range of gene therapeutic viral and non-viral carriers have been applied already to target posttranscriptional events in different animal kidney disease models in vivo (Csaba Révész and Peter Hamar (2011). Delivery Methods to Target RNAs in the Kidney, Gene Therapy Applications, Prof. Chunsheng Kang (Ed.), ISBN: 978-953-307-541-9, InTech, Available from: www.intechopen.com/books/gene-therapy-applications/delivery-methods-to-target-rnas-inthe-kidney). Delivery methods to the kidney may include those in Yuan et al. (Am J Physiol Renal Physiol 295: F605-F617, 2008). The method of Yuang et al. may be applied to the CRISPR Cas system of the present invention contemplating a 1-2 g subcutaneous injection of CRISPR Cas conjugated with cholesterol to a human for delivery to the kidneys. In some embodiments, the method of Molitoris et al. (J Am Soc Nephrol 20: 1754-1764, 2009) can be adapted to the CRISRP-Cas system of the present invention and a cumulative dose of 12-20 mg/kg to a human can be used for delivery to the proximal tubule cells of the kidneys. In some embodiments, the methods of Thompson et al. (Nucleic Acid Therapeutics, Volume 22, Number 4, 2012) can be adapted to the CRISRP-Cas system of the present invention and a dose of up to 25 mg/kg can be delivered via i.v. administration. In some embodiments, the method of Shimizu et al. (J Am Soc Nephrol 21: 622-633, 2010) can be adapted to the CRISRP-Cas system of the present invention and a dose of about of 10-20 μmol CRISPR Cas complexed with nanocarriers in about 1-2 liters of a physiologic fluid for i.p. administration can be used.

[0925] Other various delivery vehicles can be used to deliver the composition, system to the kidney such as viral, hydrodynamic, lipid, polymer nanoparticles, aptamers and various combinations thereof (see e.g. Larson et al., Surgery, (August 2007), Vol. 142, No. 2, pp. (262-269); Hamar et al., Proc Natl Acad Sci, (October 2004), Vol. 101, No. 41, pp. (14883-14888); Zheng et al., Am J Pathol, (October 2008), Vol. 173, No. 4, pp. (973-980); Feng et al., Transplantation, (May 2009), Vol. 87, No. 9, pp. (1283-1289); Q. Zhang et al., PloS ONE, (July 2010), Vol. 5, No. 7, e11709, pp. (1-13); Kushibikia et al., J Controlled Release, (July 2005), Vol. 105, No. 3, pp. (318-331); Wang et al., Gene Therapy, (July 2006), Vol. 13, No. 14, pp. (1097-1103); Kobayashi et al., Journal of Pharmacology and Experimental Therapeutics, (February 2004), Vol. 308, No. 2, pp. (688-693); Wolfrum et al., Nature Biotechnology, (September 2007), Vol. 25, No. 10, pp. (1149-1157); Molitoris et al., J Am Soc Nephrol, (August 2009), Vol. 20, No. 8 pp. (1754-1764); Mikhaylova et al., Cancer Gene Therapy, (March 2011), Vol. 16, No. 3, pp. (217-226); Y. Zhang et al., J Am Soc Nephrol, (April 2006), Vol. 17, No. 4, pp. (1090-1101); Singhal et al., Cancer Res, (May 2009), Vol. 69, No. 10, pp. (4244-4251); Malek et al., Toxicology and Applied Pharmacology, (April 2009), Vol. 236, No. 1, pp. (97-108); Shimizu et al., J Am Soc Nephrology, (April 2010), Vol. 21, No. 4, pp. (622-633); Jiang et al., Molecular Pharmaceutics, (May-June 2009), Vol. 6, No. 3, pp. (727-737); Cao et al, J Controlled Release, (June 2010), Vol. 144, No. 2, pp. (203-212); Ninichuk et al., Am J Pathol, (March 2008), Vol. 172, No. 3, pp. (628-637); Purschke et al., Proc Natl Acad Sci, (March 2006), Vol. 103, No. 13, pp. (5173-5178).

[0926] In some embodiments, delivery is to liver cells. In some embodiments, the liver cell is a hepatocyte. Delivery of the composition and system herein may be via viral vectors, especially AAV (and in particular AAV2/6) vectors. These can be administered by intravenous injection. A preferred target for the liver, whether in vitro or in vivo, is the albumin gene. This is a so-called ‘safe harbor” as albumin is expressed at very high levels and so some reduction in the production of albumin following successful gene editing is tolerated. It is also preferred as the high levels of expression seen from the albumin promoter/enhancer allows for useful levels of correct or transgene production (from the inserted recombination template) to be achieved even if only a small fraction of hepatocytes are edited. See sites identified by Wechsler et al. (reported at the 57th Annual Meeting and Exposition of the American Society of Hematology—abstract available online at ash.confex.com/ash/2015/webprogram/Paper86495.html and presented on 6th December 2015) which can be adapted for use with the compositions, systems, herein.

[0927] Exemplary liver and kidney diseases that can be treated and/or prevented are described elsewhere herein.

### Treating Epithelial and Lung Diseases

[0928] In some embodiments, the disease treated or prevented by the composition and system described herein can be a lung or epithelial disease. The compositions and systems described herein can be used for treating epithelial and/or lung diseases. The present invention also contemplates delivering the composition, system, described herein, to one or both lungs.

[0929] In some embodiments, as viral vector can be used to deliver the composition, system, or component thereof to the lungs. In some embodiments, the AAV is an AAV-1, AAV-2, AAV-5, AAV-6, and/or AAV-9 for delivery to the lungs. (see, e.g., Li et al., Molecular Therapy, vol. 17 no. 12, 2067-277 December 2009). In some embodiments, the MOI can vary from 1×10³ to 4×10⁵ vector genomes/cell. In some embodiments, the delivery vector can be an RSV vector as in Zamora et al. (Am J Respir Crit Care Med Vol 183. pp 531-538, 2011. The method of Zamora et al. may be applied to the nucleic acid-targeting system of the present invention and an aerosolized CRISPR Cas, for example with a dosage of 0.6 mg/kg, may be contemplated for the present invention.

[0930] Subjects treated for a lung disease may for example receive pharmaceutically effective amount of aerosolized AAV vector system per lung endobronchially delivered while spontaneously breathing. As such, aerosolized delivery is preferred for AAV delivery in general. An adenovirus or an AAV particle may be used for delivery. Suitable gene constructs, each operably linked to one or more regulatory sequences, may be cloned into the delivery vector. In this instance, the following constructs are provided as examples: Cbh or EF1a promoter for Cas, U6 or H1 promoter for guide RNA), A preferred arrangement is to use a CFTRdelta508 targeting guide, a repair template for deltaF508 mutation and a codon optimized Cas enzyme, with optionally one or more nuclear localization signal or sequence(s) (NLS(s)), e.g., two (2) NLSs.

### Treating Diseases of the Skin

[0931] The compositions and systems described herein can be used for the treatment of skin diseases. The present invention also contemplates delivering the composition and system, described herein, to the skin.

[0932] In some embodiments, delivery to the skin (intradermal delivery) of the composition, system, or component thereof can be via one or more microneedles or microneedle containing device. For example, in some embodiments the device and methods of Hickerson et al. (Molecular Therapy—Nucleic Acids (2013) 2, e129) can be used and/or adapted to deliver the composition, system, described herein, for example, at a dosage of up to 300 μl of 0.1 mg/ml CRISPR-Cas system to the skin.

[0933] In some embodiments, the methods and techniques of Leachman et al. (Molecular Therapy, vol. 18 no. 2, 442-446 February 2010) can be used and/or adapted for delivery of a CIRPSR-Cas system described herein to the skin.

[0934] In some embodiments, the methods and techniques of Zheng et al. (PNAS, Jul. 24, 2012, vol. 109, no. 30, 11975-11980) can be used and/or adapted for nanoparticle delivery of a CIRPSR-Cas system described herein to the skin. In some embodiments, as dosage of about 25 nM applied in a single application can achieve gene knockdown in the skin.

### Treating Cancer

[0935] The compositions, systems, described herein can be used for the treatment of cancer. The present invention also contemplates delivering the composition, system, described herein, to a cancer cell. Also, as is described elsewhere herein the compositions, systems, can be used to modify an immune cell, such as a CAR or CAR T cell, which can then in turn be used to treat and/or prevent cancer. This is also described in International Patent Publication No. WO 2015/161276, the disclosure of which is hereby incorporated by reference and described herein below.

[0936] Target genes suitable for the treatment or prophylaxis of cancer can include those set forth in Tables 10 and 11. In some embodiments, target genes for cancer treatment and prevention can also include those described in International Patent Publication No. WO 2015/048577 the disclosure of which is hereby incorporated by reference and can be adapted for and/or applied to the composition, system, described herein.

### Adoptive Cell Therapy

[0937] The compositions, systems, and components thereof described herein can be used to modify cells for an adoptive cell therapy. In an aspect of the invention, methods and compositions which involve editing a target nucleic acid sequence, or modulating expression of a target nucleic acid sequence, and applications thereof in connection with cancer immunotherapy are comprehended by adapting the composition, system, of the present invention. In some examples, the compositions, systems, and methods may be used to modify a stem cell (e.g., induced pluripotent cell) to derive modified natural killer cells, gamma delta T cells, and alpha beta T cells, which can be used for the adoptive cell therapy. In certain examples, the compositions, systems, and methods may be used to modify modified natural killer cells, gamma delta T cells, and alpha beta T cells.

[0938] As used herein, “ACT”, “adoptive cell therapy” and “adoptive cell transfer” may be used interchangeably. In certain embodiments, Adoptive cell therapy (ACT) can refer to the transfer of cells to a patient with the goal of transferring the functionality and characteristics into the new host by engraftment of the cells (see, e.g., Mettananda et al., Editing an α-globin enhancer in primary human hematopoietic stem cells as a treatment for β-thalassemia, Nat Commun. 2017 Sep. 4; 8(1):424). As used herein, the term “engraft” or “engraftment” refers to the process of cell incorporation into a tissue of interest in vivo through contact with existing cells of the tissue. Adoptive cell therapy (ACT) can refer to the transfer of cells, most commonly immune-derived cells, back into the same patient or into a new recipient host with the goal of transferring the immunologic functionality and characteristics into the new host. If possible, use of autologous cells helps the recipient by minimizing GVHD issues. The adoptive transfer of autologous tumor infiltrating lymphocytes (TIL) (Zacharakis et al., (2018) Nat Med. 2018 June; 24(6):724-730; Besser et al., (2010) Clin. Cancer Res 16 (9) 2646-55; Dudley et al., (2002) Science 298 (5594): 850-4; and Dudley et al., (2005) Journal of Clinical Oncology 23 (10): 2346-57.) or genetically re-directed peripheral blood mononuclear cells (Johnson et al., (2009) Blood 114 (3): 535-46; and Morgan et al., (2006) Science 314(5796) 126-9) has been used to successfully treat patients with advanced solid tumors, including melanoma, metastatic breast cancer and colorectal carcinoma, as well as patients with CD19-expressing hematologic malignancies (Kalos et al., (2011) Science Translational Medicine 3 (95): 95ra73). In certain embodiments, allogenic cells immune cells are transferred (see, e.g., Ren et al., (2017) Clin Cancer Res 23 (9) 2255-2266). As described further herein, allogenic cells can be edited to reduce alloreactivity and prevent graft-versus-host disease. Thus, use of allogenic cells allows for cells to be obtained from healthy donors and prepared for use in patients as opposed to preparing autologous cells from a patient after diagnosis.

[0939] Aspects of the invention involve the adoptive transfer of immune system cells, such as T cells, specific for selected antigens, such as tumor associated antigens or tumor specific neoantigens (see, e.g., Maus et al., 2014, Adoptive Immunotherapy for Cancer or Viruses, Annual Review of Immunology, Vol. 32: 189-225; Rosenberg and Restifo, 2015, Adoptive cell transfer as personalized immunotherapy for human cancer, Science Vol. 348 no. 6230 pp. 62-68; Restifo et al., 2015, Adoptive immunotherapy for cancer: harnessing the T cell response. Nat. Rev. Immunol. 12(4): 269-281; and Jenson and Riddell, 2014, Design and implementation of adoptive therapy with chimeric antigen receptor-modified T cells. Immunol Rev. 257(1): 127-144; and Rajasagi et al., 2014, Systematic identification of personal tumor-specific neoantigens in chronic lymphocytic leukemia. Blood. 2014 Jul. 17; 124(3):453-62).

[0940] In certain embodiments, an antigen (such as a tumor antigen) to be targeted in adoptive cell therapy (such as particularly CAR or TCR T-cell therapy) of a disease (such as particularly of tumor or cancer) may be selected from a group consisting of: MR1 (see, e.g., Crowther, et al., 2020, Genome-wide CRISPR—Cas9 screening reveals ubiquitous T cell cancer targeting via the monomorphic MHC class I-related protein MR1, Nature Immunology volume 21, pages 178-185), B cell maturation antigen (BCMA) (see, e.g., Friedman et al., Effective Targeting of Multiple BCMA-Expressing Hematological Malignancies by Anti-BCMA CAR T Cells, Hum Gene Ther. 2018 Mar. 8; Berdeja J G, et al. Durable clinical responses in heavily pretreated patients with relapsed/refractory multiple myeloma: updated results from a multicenter study of bb2121 anti-Bcma CAR T cell therapy. Blood. 2017; 130:740; and Mouhieddine and Ghobrial, Immunotherapy in Multiple Myeloma: The Era of CAR T Cell Therapy, Hematologist, May-June 2018, Volume 15, issue 3); PSA (prostate-specific antigen); prostate-specific membrane antigen (PSMA); PSCA (Prostate stem cell antigen); Tyrosine-protein kinase transmembrane receptor ROR1; fibroblast activation protein (FAP); Tumor-associated glycoprotein 72 (TAG72); Carcinoembryonic antigen (CEA); Epithelial cell adhesion molecule (EPCAM); Mesothelin; Human Epidermal growth factor Receptor 2 (ERBB2 (Her2/neu)); Prostate; Prostatic acid phosphatase (PAP); elongation factor 2 mutant (ELF2M); Insulin-like growth factor 1 receptor (IGF-1R); gp100; BCR-ABL (breakpoint cluster region-Abelson); tyrosinase; New York esophageal squamous cell carcinoma 1 (NY-ESO-1); κ-light chain, LAGE (L antigen); MAGE (melanoma antigen); Melanoma-associated antigen 1 (MAGE-A1); MAGE A3; MAGE A6; legumain; Human papillomavirus (HPV) E6; HPV E7; prostein; survivin; PCTA1 (Galectin 8); Melan-A/MART-1; Ras mutant; TRP-1 (tyrosinase related protein 1, or gp75); Tyrosinase-related Protein 2 (TRP2); TRP-2/INT2 (TRP-2/intron 2); RAGE (renal antigen); receptor for advanced glycation end products 1 (RAGE1); Renal ubiquitous 1, 2 (RU1, RU2); intestinal carboxyl esterase (iCE); Heat shock protein 70-2 (HSP70-2) mutant; thyroid stimulating hormone receptor (TSHR); CD123; CD171; CD19; CD20; CD22; CD26; CD30; CD33; CD44v7/8 (cluster of differentiation 44, exons 7/8); CD53; CD92; CD100; CD148; CD150; CD200; CD261; CD262; CD362; CS-1 (CD2 subset 1, CRACC, SLAMF7, CD319, and 19A24); C-type lectin-like molecule-1 (CLL-1); ganglioside GD3 (aNeu5Ac(2-8)aNeu5Ac(2-3)bDGalp(1-4)bDG1cp(1-1)Cer); Tn antigen (Tn Ag); Fms-Like Tyrosine Kinase 3 (FLT3); CD38; CD138; CD44v6; B7H3 (CD276); KIT (CD117); Interleukin-13 receptor subunit alpha-2 (IL-13Ra2); Interleukin 11 receptor alpha (IL-11Ra); prostate stem cell antigen (PSCA); Protease Serine 21 (PRSS21); vascular endothelial growth factor receptor 2 (VEGFR2); Lewis(Y) antigen; CD24; Platelet-derived growth factor receptor beta (PDGFR-beta); stage-specific embryonic antigen-4 (SSEA-4); Mucin 1, cell surface associated (MUC1); mucin 16 (MUC16); epidermal growth factor receptor (EGFR); epidermal growth factor receptor variant III (EGFRvIII); neural cell adhesion molecule (NCAM); carbonic anhydrase IX (CAIX); Proteasome (Prosome, Macropain) Subunit, Beta Type, 9 (LMP2); ephrin type-A receptor 2 (EphA2); Ephrin B2; Fucosyl GM1; sialyl Lewis adhesion molecule (sLe); ganglioside GM3 (aNeu5Ac(2-3)bDGalp(1-4)bDG1cp(1-1)Cer); TGSS; high molecular weight-melanoma-associated antigen (HMWMAA); o-acetyl-GD2 ganglioside (OAcGD2); Folate receptor alpha; Folate receptor beta; tumor endothelial marker 1 (TEM1/CD248); tumor endothelial marker 7-related (TEM7R); claudin 6 (CLDN6); G protein-coupled receptor class C group 5, member D (GPRC5D); chromosome X open reading frame 61 (CXORF61); CD97; CD179a; anaplastic lymphoma kinase (ALK); Polysialic acid; placenta-specific 1 (PLAC1); hexasaccharide portion of globoH glycoceramide (GloboH); mammary gland differentiation antigen (NY-BR-1); uroplakin 2 (UPK2); Hepatitis A virus cellular receptor 1 (HAVCR1); adrenoceptor beta 3 (ADRB3); pannexin 3 (PANX3); G protein-coupled receptor 20 (GPR20); lymphocyte antigen 6 complex, locus K 9 (LY6K); Olfactory receptor 51E2 (OR51E2); TCR Gamma Alternate Reading Frame Protein (TARP); Wilms tumor protein (WT1); ETS translocation-variant gene 6, located on chromosome 12p (ETV6-AML); sperm protein 17 (SPA17); X Antigen Family, Member 1A (XAGE1); angiopoietin-binding cell surface receptor 2 (Tie 2); CT (cancer/testis (antigen)); melanoma cancer testis antigen-1 (MAD-CT-1); melanoma cancer testis antigen-2 (MAD-CT-2); Fos-related antigen 1; p53; p53 mutant; human Telomerase reverse transcriptase (hTERT); sarcoma translocation breakpoints; melanoma inhibitor of apoptosis (ML-IAP); ERG (transmembrane protease, serine 2 (TMPRSS2) ETS fusion gene); N-Acetyl glucosaminyl-transferase V (NA17); paired box protein Pax-3 (PAX3); Androgen receptor; Cyclin B1; Cyclin D1; v-myc avian myelocytomatosis viral oncogene neuroblastoma derived homolog (MYCN); Ras Homolog Family Member C (RhoC); Cytochrome P450 1B1 (CYP1B1); CCCTC-Binding Factor (Zinc Finger Protein)-Like (BORIS); Squamous Cell Carcinoma Antigen Recognized By T Cells-1 or 3 (SART1, SART3); Paired box protein Pax-5 (PAX5); proacrosin binding protein sp32 (OY-TES1); lymphocyte-specific protein tyrosine kinase (LCK); A kinase anchor protein 4 (AKAP-4); synovial sarcoma, X breakpoint-1, -2, -3 or -4 (SSX1, SSX2, SSX3, SSX4); CD79a; CD79b; CD72; Leukocyte-associated immunoglobulin-like receptor 1 (LAIR1); Fc fragment of IgA receptor (FCAR); Leukocyte immunoglobulin-like receptor subfamily A member 2 (LILRA2); CD300 molecule-like family member f (CD300LF); C-type lectin domain family 12 member A (CLEC12A); bone marrow stromal cell antigen 2 (BST2); EGF-like module-containing mucin-like hormone receptor-like 2 (EMR2); lymphocyte antigen 75 (LY75); Glypican-3 (GPC3); Fc receptor-like 5 (FCRL5); mouse double minute 2 homolog (MDM2); livin; alphafetoprotein (AFP); transmembrane activator and CAML Interactor (TACI); B-cell activating factor receptor (BAFF-R); V-Ki-ras2 Kirsten rat sarcoma viral oncogene homolog (KRAS); immunoglobulin lambda-like polypeptide 1 (IGLL1); 707-AP (707 alanine proline); ART-4 (adenocarcinoma antigen recognized by T4 cells); BAGE (B antigen; b-catenin/m, b-catenin/mutated); CAMEL (CTL-recognized antigen on melanoma); CAP1 (carcinoembryonic antigen peptide 1); CASP-8 (caspase-8); CDC27m (cell-division cycle 27 mutated); CDK4/m (cycline-dependent kinase 4 mutated); Cyp-B (cyclophilin B); DAM (differentiation antigen melanoma); EGP-2 (epithelial glycoprotein 2); EGP-40 (epithelial glycoprotein 40); Erbb2, 3, 4 (erythroblastic leukemia viral oncogene homolog-2, -3, 4); FBP (folate binding protein); fAchR (Fetal acetylcholine receptor); G250 (glycoprotein 250); GAGE (G antigen); GnT-V (N-acetylglucosaminyltransferase V); HAGE (helicose antigen); ULA-A (human leukocyte antigen-A); HST2 (human signet ring tumor 2); KIAA0205; KDR (kinase insert domain receptor); LDLR/FUT (low density lipid receptor/GDP L-fucose: b-D-galactosidase 2-a-L fucosyltransferase); L1CAM (L1 cell adhesion molecule); MC1R (melanocortin 1 receptor); Myosin/m (myosin mutated); MUM-1, -2, -3 (melanoma ubiquitous mutated 1, 2, 3); NA88-A (NA cDNA clone of patient M88); KG2D (Natural killer group 2, member D) ligands; oncofetal antigen (h5T4); p190 minor bcr-abl (protein of 190KD bcr-abl); Pml/RARa (promyelocytic leukemia/retinoic acid receptor a); PRAME (preferentially expressed antigen of melanoma); SAGE (sarcoma antigen); TEL/AML1 (translocation Ets-family leukemia/acute myeloid leukemia 1); TPI/m (triosephosphate isomerase mutated); CD70; and any combination thereof.

[0941] In certain embodiments, an antigen to be targeted in adoptive cell therapy (such as particularly CAR or TCR T-cell therapy) of a disease (such as particularly of tumor or cancer) is a tumor-specific antigen (TSA).

[0942] In certain embodiments, an antigen to be targeted in adoptive cell therapy (such as particularly CAR or TCR T-cell therapy) of a disease (such as particularly of tumor or cancer) is a neoantigen.

[0943] In certain embodiments, an antigen to be targeted in adoptive cell therapy (such as particularly CAR or TCR T-cell therapy) of a disease (such as particularly of tumor or cancer) is a tumor-associated antigen (TAA).

[0944] In certain embodiments, an antigen to be targeted in adoptive cell therapy (such as particularly CAR or TCR T-cell therapy) of a disease (such as particularly of tumor or cancer) is a universal tumor antigen. In certain preferred embodiments, the universal tumor antigen is selected from the group consisting of: a human telomerase reverse transcriptase (hTERT), survivin, mouse double minute 2 homolog (MDM2), cytochrome P450 1B 1 (CYP1B), HER2/neu, Wilms' tumor gene 1 (WT1), livin, alphafetoprotein (AFP), carcinoembryonic antigen (CEA), mucin 16 (MUC16), MUC1, prostate-specific membrane antigen (PSMA), p53, cyclin (Dl), and any combinations thereof.

[0945] In certain embodiments, an antigen (such as a tumor antigen) to be targeted in adoptive cell therapy (such as particularly CAR or TCR T-cell therapy) of a disease (such as particularly of tumor or cancer) may be selected from a group consisting of: CD19, BCMA, CD70, CLL-1, MAGE A3, MAGE A6, HPV E6, HPV E7, WT1, CD22, CD171, ROR1, MUC16, and SSX2. In certain preferred embodiments, the antigen may be CD19. For example, CD19 may be targeted in hematologic malignancies, such as in lymphomas, more particularly in B-cell lymphomas, such as without limitation in diffuse large B-cell lymphoma, primary mediastinal b-cell lymphoma, transformed follicular lymphoma, marginal zone lymphoma, mantle cell lymphoma, acute lymphoblastic leukemia including adult and pediatric ALL, non-Hodgkin lymphoma, indolent non-Hodgkin lymphoma, or chronic lymphocytic leukemia. For example, BCMA may be targeted in multiple myeloma or plasma cell leukemia (see, e.g., 2018 American Association for Cancer Research (AACR) Annual meeting Poster: Allogeneic Chimeric Antigen Receptor T Cells Targeting B Cell Maturation Antigen). For example, CLL1 may be targeted in acute myeloid leukemia. For example, MAGE A3, MAGE A6, SSX2, and/or KRAS may be targeted in solid tumors. For example, HPV E6 and/or HPV E7 may be targeted in cervical cancer or head and neck cancer. For example, WT1 may be targeted in acute myeloid leukemia (AML), myelodysplastic syndromes (MDS), chronic myeloid leukemia (CIVIL), non-small cell lung cancer, breast, pancreatic, ovarian or colorectal cancers, or mesothelioma. For example, CD22 may be targeted in B cell malignancies, including non-Hodgkin lymphoma, diffuse large B-cell lymphoma, or acute lymphoblastic leukemia. For example, CD171 may be targeted in neuroblastoma, glioblastoma, or lung, pancreatic, or ovarian cancers. For example, ROR1 may be targeted in ROR1+malignancies, including non-small cell lung cancer, triple negative breast cancer, pancreatic cancer, prostate cancer, ALL, chronic lymphocytic leukemia, or mantle cell lymphoma. For example, MUC16 may be targeted in MUC16ecto+epithelial ovarian, fallopian tube or primary peritoneal cancer. For example, CD70 may be targeted in both hematologic malignancies as well as in solid cancers such as renal cell carcinoma (RCC), gliomas (e.g., GBM), and head and neck cancers (HNSCC). CD70 is expressed in both hematologic malignancies as well as in solid cancers, while its expression in normal tissues is restricted to a subset of lymphoid cell types (see, e.g., 2018 American Association for Cancer Research (AACR) Annual meeting Poster: Allogeneic CRISPR Engineered Anti-CD70 CAR-T Cells Demonstrate Potent Preclinical Activity Against Both Solid and Hematological Cancer Cells).

[0946] Various strategies may for example be employed to genetically modify T cells by altering the specificity of the T cell receptor (TCR) for example by introducing new TCR a and β chains with selected peptide specificity (see U.S. Pat. No. 8,697,854; PCT Patent Publications: WO2003020763, WO2004033685, WO2004044004, WO2005114215, WO2006000830, WO2008038002, WO2008039818, WO2004074322, WO2005113595, WO2006125962, WO2013166321, WO2013039889, WO2014018863, WO2014083173; U.S. Pat. No. 8,088,379).

[0947] As an alternative to, or addition to, TCR modifications, chimeric antigen receptors (CARs) may be used in order to generate immunoresponsive cells, such as T cells, specific for selected targets, such as malignant cells, with a wide variety of receptor chimera constructs having been described (see U.S. Pat. Nos. 5,843,728; 5,851,828; 5,912,170; 6,004,811; 6,284,240; 6,392,013; 6,410,014; 6,753,162; 8,211,422; and, PCT Publication WO 9215322).

[0948] In general, CARs are comprised of an extracellular domain, a transmembrane domain, and an intracellular domain, wherein the extracellular domain comprises an antigen-binding domain that is specific for a predetermined target. While the antigen-binding domain of a CAR is often an antibody or antibody fragment (e.g., a single chain variable fragment, scFv), the binding domain is not particularly limited so long as it results in specific recognition of a target. For example, in some embodiments, the antigen-binding domain may comprise a receptor, such that the CAR is capable of binding to the ligand of the receptor. Alternatively, the antigen-binding domain may comprise a ligand, such that the CAR is capable of binding the endogenous receptor of that ligand.

[0949] The antigen-binding domain of a CAR is generally separated from the transmembrane domain by a hinge or spacer. The spacer is also not particularly limited, and it is designed to provide the CAR with flexibility. For example, a spacer domain may comprise a portion of a human Fc domain, including a portion of the CH3 domain, or the hinge region of any immunoglobulin, such as IgA, IgD, IgE, IgG, or IgM, or variants thereof. Furthermore, the hinge region may be modified so as to prevent off-target binding by FcRs or other potential interfering objects. For example, the hinge may comprise an IgG4 Fc domain with or without a S228P, L235E, and/or N297Q mutation (according to Kabat numbering) in order to decrease binding to FcRs. Additional spacers/hinges include, but are not limited to, CD4, CD8, and CD28 hinge regions.

[0950] The transmembrane domain of a CAR may be derived either from a natural or from a synthetic source. Where the source is natural, the domain may be derived from any membrane bound or transmembrane protein. Transmembrane regions of particular use in this disclosure may be derived from CD8, CD28, CD3, CD45, CD4, CD5, CDS, CD9, CD 16, CD22, CD33, CD37, CD64, CD80, CD86, CD 134, CD137, CD 154, TCR. Alternatively, the transmembrane domain may be synthetic, in which case it will comprise predominantly hydrophobic residues such as leucine and valine. Preferably a triplet of phenylalanine, tryptophan and valine will be found at each end of a synthetic transmembrane domain. Optionally, a short oligo- or polypeptide linker, preferably between 2 and 10 amino acids in length may form the linkage between the transmembrane domain and the cytoplasmic signaling domain of the CAR. A glycine-serine doublet provides a particularly suitable linker.

[0951] Alternative CAR constructs may be characterized as belonging to successive generations. First-generation CARs typically consist of a single-chain variable fragment of an antibody specific for an antigen, for example comprising a VL linked to a VH of a specific antibody, linked by a flexible linker, for example by a CD8α hinge domain and a CD8α transmembrane domain, to the transmembrane and intracellular signaling domains of either CD3ζ or FcRγ (scFv-CD3ζ or scFv-FcRγ; see U.S. Pat. Nos. 7,741,465; 5,912,172; 5,906,936). Second-generation CARs incorporate the intracellular domains of one or more costimulatory molecules, such as CD28, OX40 (CD134), or 4-1BB (CD137) within the endodomain (for example scFv-CD28/OX40/4-1BB-CD3ζ; see U.S. Pat. Nos. 8,911,993; 8,916,381; 8,975,071; 9,101,584; 9,102,760; 9,102,761). Third-generation CARs include a combination of costimulatory endodomains, such a CD3ζ-chain, CD97, GDI 1a-CD18, CD2, ICOS, CD27, CD154, CDS, OX40, 4-1BB, CD2, CD7, LIGHT, LFA-1, NKG2C, B7-H3, CD30, CD40, PD-1, or CD28 signaling domains (for example scFv-CD28-4-1BB-CD3t or scFv-CD28-OX40-CD3; see U.S. Pat. Nos. 8,906,682; 8,399,645; 5,686,281; PCT Publication No. WO 2014/134165; PCT Publication No. WO 2012/079000). In certain embodiments, the primary signaling domain comprises a functional signaling domain of a protein selected from the group consisting of CD3 zeta, CD3 gamma, CD3 delta, CD3 epsilon, common FcR gamma (FCERIG), FcR beta (Fc Epsilon R1b), CD79a, CD79b, Fc gamma RIIa, DAP10, and DAP12. In certain preferred embodiments, the primary signaling domain comprises a functional signaling domain of CD3ζ or FcRγ. In certain embodiments, the one or more costimulatory signaling domains comprise a functional signaling domain of a protein selected, each independently, from the group consisting of: CD27, CD28, 4-1BB (CD137), OX40, CD30, CD40, PD-1, ICOS, lymphocyte function-associated antigen-1 (LFA-1), CD2, CD7, LIGHT, NKG2C, B7-H3, a ligand that specifically binds with CD83, CDS, ICAM-1, GITR, BAFFR, HVEM (LIGHTR), SLAMF7, NKp80 (KLRF1), CD160, CD19, CD4, CD8 alpha, CD8 beta, IL2R beta, IL2R gamma, IL7R alpha, ITGA4, VLA1, CD49a, ITGA4, IA4, CD49D, ITGA6, VLA-6, CD49f, ITGAD, CD11d, ITGAE, CD103, ITGAL, CD11a, LFA-1, ITGAM, CD11b, ITGAX, CD11c, ITGB1, CD29, ITGB2, CD18, ITGB7, TNFR2, TRANCE/RANKL, DNAM1 (CD226), SLAMF4 (CD244, 2B4), CD84, CD96 (Tactile), CEACAM1, CRTAM, Ly9 (CD229), CD160 (BY55), PSGL1, CD100 (SEMA4D), CD69, SLAMF6 (NTB-A, Ly108), SLAM (SLAMF1, CD150, IPO-3), BLAME (SLAMF8), SELPLG (CD162), LTBR, LAT, GADS, SLP-76, PAG/Cbp, NKp44, NKp30, NKp46, and NKG2D. In certain embodiments, the one or more costimulatory signaling domains comprise a functional signaling domain of a protein selected, each independently, from the group consisting of: 4-1BB, CD27, and CD28. In certain embodiments, a chimeric antigen receptor may have the design as described in U.S. Pat. No. 7,446,190, comprising an intracellular domain of CD3 chain (such as amino acid residues 52-163 of the human CD3 zeta chain, as shown in SEQ ID NO: 14 of U.S. Pat. No. 7,446,190), a signaling region from CD28 and an antigen-binding element (or portion or domain; such as scFv). The CD28 portion, when between the zeta chain portion and the antigen-binding element, may suitably include the transmembrane and signaling domains of CD28 (such as amino acid residues 114-220 of SEQ ID NO: 10, full sequence shown in SEQ ID NO: 6 of U.S. Pat. No. 7,446,190; these can include the following portion of CD28 as set forth in Genbank identifier NM 006139. Alternatively, when the zeta sequence lies between the CD28 sequence and the antigen-binding element, intracellular domain of CD28 can be used alone (such as amino sequence set forth in SEQ ID NO: 9 of U.S. Pat. No. 7,446,190). Hence, certain embodiments employ a CAR comprising (a) a zeta chain portion comprising the intracellular domain of human CD3t chain, (b) a costimulatory signaling region, and (c) an antigen-binding element (or portion or domain), wherein the costimulatory signaling region comprises the amino acid sequence encoded by SEQ ID NO: 6 of U.S. Pat. No. 7,446,190.

[0952] Alternatively, costimulation may be orchestrated by expressing CARs in antigen-specific T cells, chosen so as to be activated and expanded following engagement of their native aβTCR, for example by antigen on professional antigen-presenting cells, with attendant costimulation. In addition, additional engineered receptors may be provided on the immunoresponsive cells, for example to improve targeting of a T-cell attack and/or minimize side effects

[0953] By means of an example and without limitation, Kochenderfer et al., (2009) J Immunother. 32 (7): 689-702 described anti-CD19 chimeric antigen receptors (CAR). FMC63-28Z CAR contained a single chain variable region moiety (scFv) recognizing CD19 derived from the FMC63 mouse hybridoma (described in Nicholson et al., (1997) Molecular Immunology 34: 1157-1165), a portion of the human CD28 molecule, and the intracellular component of the human TCR-ζ molecule. FMC63-CD828BBZ CAR contained the FMC63 scFv, the hinge and transmembrane regions of the CD8 molecule, the cytoplasmic portions of CD28 and 4-1BB, and the cytoplasmic component of the TCR-ζ molecule. The exact sequence of the CD28 molecule included in the FMC63-28Z CAR corresponded to Genbank identifier NM_006139; the sequence included all amino acids starting with the amino acid sequence IEVMYPPPY (SEQ ID NO: 5246) and continuing all the way to the carboxy-terminus of the protein. To encode the anti-CD19 scFv component of the vector, the authors designed a DNA sequence which was based on a portion of a previously published CAR (Cooper et al., (2003) Blood 101: 1637-1644). This sequence encoded the following components in frame from the 5′ end to the 3′ end: an XhoI site, the human granulocyte-macrophage colony-stimulating factor (GM-CSF) receptor α-chain signal sequence, the FMC63 light chain variable region (as in Nicholson et al., supra), a linker peptide (as in Cooper et al., supra), the FMC63 heavy chain variable region (as in Nicholson et al., supra), and a NotI site. A plasmid encoding this sequence was digested with XhoI and NotI. To form the MSGV-FMC63-28Z retroviral vector, the XhoI and NotI-digested fragment encoding the FMC63 scFv was ligated into a second XhoI and NotI-digested fragment that encoded the MSGV retroviral backbone (as in Hughes et al., (2005) Human Gene Therapy 16: 457-472) as well as part of the extracellular portion of human CD28, the entire transmembrane and cytoplasmic portion of human CD28, and the cytoplasmic portion of the human TCR-t molecule (as in Maher et al., 2002) Nature Biotechnology 20: 70-75). The FMC63-28Z CAR is included in the KTE-C19 (axicabtagene ciloleucel) anti-CD19 CAR-T therapy product in development by Kite Pharma, Inc. for the treatment of inter alia patients with relapsed/refractory aggressive B-cell non-Hodgkin lymphoma (NHL). Accordingly, in certain embodiments, cells intended for adoptive cell therapies, more particularly immunoresponsive cells such as T cells, may express the FMC63-28Z CAR as described by Kochenderfer et al. (supra). Hence, in certain embodiments, cells intended for adoptive cell therapies, more particularly immunoresponsive cells such as T cells, may comprise a CAR comprising an extracellular antigen-binding element (or portion or domain; such as scFv) that specifically binds to an antigen, an intracellular signaling domain comprising an intracellular domain of a CD3 chain, and a costimulatory signaling region comprising a signaling domain of CD28. Preferably, the CD28 amino acid sequence is as set forth in Genbank identifier NM_006139 (sequence version 1, 2 or 3) starting with the amino acid sequence IEVMYPPPY (SEQ ID NO: 5246) and continuing all the way to the carboxy-terminus of the protein. Preferably, the antigen is CD19, more preferably the antigen-binding element is an anti-CD19 scFv, even more preferably the anti-CD19 scFv as described by Kochenderfer et al. (supra).

[0954] Additional anti-CD19 CARs are further described in International Patent Publication No. WO 2015/187528. More particularly Example 1 and Table 1 of WO2015187528, incorporated by reference herein, demonstrate the generation of anti-CD19 CARs based on a fully human anti-CD19 monoclonal antibody (47G4, as described in US20100104509) and murine anti-CD19 monoclonal antibody (as described in Nicholson et al. and explained above). Various combinations of a signal sequence (human CD8-alpha or GM-CSF receptor), extracellular and transmembrane regions (human CD8-alpha) and intracellular T-cell signaling domains (CD28-CD3ζ; 4-1BB-CD3ζ; CD27-CD3ζ; CD28-CD27-CD3ζ, 4-1BB-CD27-CD3ζ; CD27-4-1BB-CD3ζ; CD28-CD27-FcεRI gamma chain; or CD28-FcεRI gamma chain) were disclosed. Hence, in certain embodiments, cells intended for adoptive cell therapies, more particularly immunoresponsive cells such as T cells, may comprise a CAR comprising an extracellular antigen-binding element that specifically binds to an antigen, an extracellular and transmembrane region as set forth in Table 1 of WO2015187528 and an intracellular T-cell signaling domain as set forth in Table 1 of No. WO 2015/187528. Preferably, the antigen is CD19, more preferably the antigen-binding element is an anti-CD19 scFv, even more preferably the mouse or human anti-CD19 scFv as described in Example 1 of. WO 2015/187528. In certain embodiments, the CAR comprises, consists essentially of or consists of an amino acid sequence of SEQ ID NO: 1, SEQ ID NO: 2, SEQ ID NO: 3, SEQ ID NO: 4, SEQ ID NO: 5, SEQ ID NO: 6, SEQ ID NO: 7, SEQ ID NO: 8, SEQ ID NO: 9, SEQ ID NO: 10, SEQ ID NO: 11, SEQ ID NO: 12, or SEQ ID NO: 13 as set forth in Table 1 of WO2015187528.

[0955] By means of an example and without limitation, a chimeric antigen receptor that recognizes the CD70 antigen is described in WO2012058460A2 (see also, Park et al., CD70 as a target for chimeric antigen receptor T cells in head and neck squamous cell carcinoma, Oral Oncol. 2018 March; 78:145-150; and Jin et al., CD70, a novel target of CAR T-cell therapy for gliomas, Neuro Oncol. 2018 Jan. 10; 20(1):55-65). CD70 is expressed by diffuse large B-cell and follicular lymphoma and also by the malignant cells of Hodgkins lymphoma, Waldenstrom's macroglobulinemia and multiple myeloma, and by HTLV-1- and EBV-associated malignancies. (Agathanggelou et al. Am. J. Pathol. 1995; 147: 1152-1160; Hunter et al., Blood 2004; 104:4881. 26; Lens et al., J Immunol. 2005; 174:6212-6219; Baba et al., J Virol. 2008; 82:3843-3852.) In addition, CD70 is expressed by non-hematological malignancies such as renal cell carcinoma and glioblastoma. (Junker et al., J Urol. 2005; 173:2150-2153; Chahlavi et al., Cancer Res 2005; 65:5428-5438) Physiologically, CD70 expression is transient and restricted to a subset of highly activated T, B, and dendritic cells.

[0956] By means of an example and without limitation, chimeric antigen receptor that recognizes BCMA has been described (see, e.g., US20160046724A1; WO2016014789A2; WO2017211900A1; WO2015158671A1; US20180085444A1; WO2018028647A1; US20170283504A1; and WO2013154760A1).

[0957] In certain embodiments, the immune cell may, in addition to a CAR or exogenous TCR as described herein, further comprise a chimeric inhibitory receptor (inhibitory CAR) that specifically binds to a second target antigen and is capable of inducing an inhibitory or immunosuppressive or repressive signal to the cell upon recognition of the second target antigen. In certain embodiments, the chimeric inhibitory receptor comprises an extracellular antigen-binding element (or portion or domain) configured to specifically bind to a target antigen, a transmembrane domain, and an intracellular immunosuppressive or repressive signaling domain. In certain embodiments, the second target antigen is an antigen that is not expressed on the surface of a cancer cell or infected cell or the expression of which is downregulated on a cancer cell or an infected cell. In certain embodiments, the second target antigen is an MHC-class I molecule. In certain embodiments, the intracellular signaling domain comprises a functional signaling portion of an immune checkpoint molecule, such as for example PD-1 or CTLA4. Advantageously, the inclusion of such inhibitory CAR reduces the chance of the engineered immune cells attacking non-target (e.g., non-cancer) tissues.

[0958] Alternatively, T-cells expressing CARs may be further modified to reduce or eliminate expression of endogenous TCRs in order to reduce off-target effects. Reduction or elimination of endogenous TCRs can reduce off-target effects and increase the effectiveness of the T cells (U.S. Pat. No. 9,181,527). T cells stably lacking expression of a functional TCR may be produced using a variety of approaches. T cells internalize, sort, and degrade the entire T cell receptor as a complex, with a half-life of about 10 hours in resting T cells and 3 hours in stimulated T cells (von Essen, M. et al. 2004. J. Immunol. 173:384-393). Proper functioning of the TCR complex requires the proper stoichiometric ratio of the proteins that compose the TCR complex. TCR function also requires two functioning TCR zeta proteins with ITAM motifs. The activation of the TCR upon engagement of its MHC-peptide ligand requires the engagement of several TCRs on the same T cell, which all must signal properly. Thus, if a TCR complex is destabilized with proteins that do not associate properly or cannot signal optimally, the T cell will not become activated sufficiently to begin a cellular response.

[0959] Accordingly, in some embodiments, TCR expression may eliminated using RNA interference (e.g., shRNA, siRNA, miRNA, etc.), CRISPR, or other methods that target the nucleic acids encoding specific TCRs (e.g., TCR-α and TCR-β) and/or CD3 chains in primary T cells. By blocking expression of one or more of these proteins, the T cell will no longer produce one or more of the key components of the TCR complex, thereby destabilizing the TCR complex and preventing cell surface expression of a functional TCR.

[0960] In some instances, CAR may also comprise a switch mechanism for controlling expression and/or activation of the CAR. For example, a CAR may comprise an extracellular, transmembrane, and intracellular domain, in which the extracellular domain comprises a target-specific binding element that comprises a label, binding domain, or tag that is specific for a molecule other than the target antigen that is expressed on or by a target cell. In such embodiments, the specificity of the CAR is provided by a second construct that comprises a target antigen binding domain (e.g., an scFv or a bispecific antibody that is specific for both the target antigen and the label or tag on the CAR) and a domain that is recognized by or binds to the label, binding domain, or tag on the CAR. See, e.g., WO 2013/044225, WO 2016/000304, WO 2015/057834, WO 2015/057852, WO 2016/070061, U.S. Pat. No. 9,233,125, US 2016/0129109. In this way, a T-cell that expresses the CAR can be administered to a subject, but the CAR cannot bind its target antigen until the second composition comprising an antigen-specific binding domain is administered.

[0961] Alternative switch mechanisms include CARs that require multimerization in order to activate their signaling function (see, e.g., US Patent Publication Nos. US 2015/0368342, US 2016/0175359, US 2015/0368360) and/or an exogenous signal, such as a small molecule drug (US 2016/0166613, Yung et al., Science, 2015), in order to elicit a T-cell response. Some CARs may also comprise a “suicide switch” to induce cell death of the CAR T-cells following treatment (Buddee et al., PLoS One, 2013) or to downregulate expression of the CAR following binding to the target antigen (International Patent Publication No. WO 2016/011210).

[0962] Alternative techniques may be used to transform target immunoresponsive cells, such as protoplast fusion, lipofection, transfection or electroporation. A wide variety of vectors may be used, such as retroviral vectors, lentiviral vectors, adenoviral vectors, adeno-associated viral vectors, plasmids or transposons, such as a Sleeping Beauty transposon (see U.S. Pat. Nos. 6,489,458; 7,148,203; 7,160,682; 7,985,739; 8,227,432), may be used to introduce CARs, for example using 2nd generation antigen-specific CARs signaling through CD3ζ and either CD28 or CD137. Viral vectors may for example include vectors based on HIV, SV40, EBV, HSV or BPV.

[0963] Cells that are targeted for transformation may for example include T cells, Natural Killer (NK) cells, cytotoxic T lymphocytes (CTL), regulatory T cells, human embryonic stem cells, tumor-infiltrating lymphocytes (TIL) or a pluripotent stem cell from which lymphoid cells may be differentiated. T cells expressing a desired CAR may for example be selected through co-culture with γ-irradiated activating and propagating cells (AaPC), which co-express the cancer antigen and co-stimulatory molecules. The engineered CAR T-cells may be expanded, for example by co-culture on AaPC in presence of soluble factors, such as IL-2 and IL-21. This expansion may for example be carried out so as to provide memory CAR+ T cells (which may for example be assayed by non-enzymatic digital array and/or multi-panel flow cytometry). In this way, CAR T cells may be provided that have specific cytotoxic activity against antigen-bearing tumors (optionally in conjunction with production of desired chemokines such as interferon-γ). CAR T cells of this kind may for example be used in animal models, for example to treat tumor xenografts.

[0964] In certain embodiments, ACT includes co-transferring CD4+ Th1 cells and CD8+ CTLs to induce a synergistic antitumor response (see, e.g., Li et al., Adoptive cell therapy with CD4+ T helper 1 cells and CD8+ cytotoxic T cells enhances complete rejection of an established tumor, leading to generation of endogenous memory responses to non-targeted tumor epitopes. Clin Transl Immunology. 2017 October; 6(10): e160).

[0965] In certain embodiments, Th17 cells are transferred to a subject in need thereof. Th17 cells have been reported to directly eradicate melanoma tumors in mice to a greater extent than Th1 cells (Muranski P, et al., Tumor-specific Th17-polarized cells eradicate large established melanoma. Blood. 2008 Jul. 15; 112(2):362-73; and Martin-Orozco N, et al., T helper 17 cells promote cytotoxic T cell activation in tumor immunity. Immunity. 2009 Nov. 20; 31(5):787-98). Those studies involved an adoptive T cell transfer (ACT) therapy approach, which takes advantage of CD4+ T cells that express a TCR recognizing tyrosinase tumor antigen. Exploitation of the TCR leads to rapid expansion of Th17 populations to large numbers ex vivo for reinfusion into the autologous tumor-bearing hosts.

[0966] In certain embodiments, ACT may include autologous iPSC-based vaccines, such as irradiated iPSCs in autologous anti-tumor vaccines (see e.g., Kooreman, Nigel G. et al., Autologous iPSC-Based Vaccines Elicit Anti-tumor Responses In Vivo, Cell Stem Cell 22, 1-13, 2018, doi.org/10.1016/j.stem.2018.01.016).

[0967] Unlike T-cell receptors (TCRs) that are MHC restricted, CARs can potentially bind any cell surface-expressed antigen and can thus be more universally used to treat patients (see Irving et al., Engineering Chimeric Antigen Receptor T-Cells for Racing in Solid Tumors: Don't Forget the Fuel, Front. Immunol., 3 Apr. 2017, doi.org/10.3389/fimmu.2017.00267). In certain embodiments, in the absence of endogenous T-cell infiltrate (e.g., due to aberrant antigen processing and presentation), which precludes the use of TIL therapy and immune checkpoint blockade, the transfer of CAR T-cells may be used to treat patients (see, e.g., Hinrichs C S, Rosenberg S A. Exploiting the curative potential of adoptive T-cell therapy for cancer. Immunol Rev (2014) 257(1):56-71. doi:10.1111/imr.12132).

[0968] Approaches such as the foregoing may be adapted to provide methods of treating and/or increasing survival of a subject having a disease, such as a neoplasia, for example by administering an effective amount of an immunoresponsive cell comprising an antigen recognizing receptor that binds a selected antigen, wherein the binding activates the immunoresponsive cell, thereby treating or preventing the disease (such as a neoplasia, a pathogen infection, an autoimmune disorder, or an allogeneic transplant reaction).

[0969] In certain embodiments, the treatment can be administered after lymphodepleting pretreatment in the form of chemotherapy (typically a combination of cyclophosphamide and fludarabine) or radiation therapy. Initial studies in ACT had short lived responses and the transferred cells did not persist in vivo for very long (Houot et al., T-cell-based immunotherapy: adoptive cell transfer and checkpoint inhibition. Cancer Immunol Res (2015) 3(10):1115-22; and Kamta et al., Advancing Cancer Therapy with Present and Emerging Immuno-Oncology Approaches. Front. Oncol. (2017) 7:64). Immune suppressor cells like Tregs and MDSCs may attenuate the activity of transferred cells by outcompeting them for the necessary cytokines. Not being bound by a theory lymphodepleting pretreatment may eliminate the suppressor cells allowing the TILs to persist.

[0970] In one embodiment, the treatment can be administrated into patients undergoing an immunosuppressive treatment (e.g., glucocorticoid treatment). The cells or population of cells, may be made resistant to at least one immunosuppressive agent due to the inactivation of a gene encoding a receptor for such immunosuppressive agent. In certain embodiments, the immunosuppressive treatment provides for the selection and expansion of the immunoresponsive T cells within the patient.

[0971] In certain embodiments, the treatment can be administered before primary treatment (e.g., surgery or radiation therapy) to shrink a tumor before the primary treatment. In another embodiment, the treatment can be administered after primary treatment to remove any remaining cancer cells.

[0972] In certain embodiments, immunometabolic barriers can be targeted therapeutically prior to and/or during ACT to enhance responses to ACT or CAR T-cell therapy and to support endogenous immunity (see, e.g., Irving et al., Engineering Chimeric Antigen Receptor T-Cells for Racing in Solid Tumors: Don't Forget the Fuel, Front. Immunol., 3 Apr. 2017, doi.org/10.3389/fimmu.2017.00267).

[0973] The administration of cells or population of cells, such as immune system cells or cell populations, such as more particularly immunoresponsive cells or cell populations, as disclosed herein may be carried out in any convenient manner, including by aerosol inhalation, injection, ingestion, transfusion, implantation or transplantation. The cells or population of cells may be administered to a patient subcutaneously, intradermally, intratumorally, intranodally, intramedullary, intramuscularly, intrathecally, by intravenous or intralymphatic injection, or intraperitoneally. In some embodiments, the disclosed CARs may be delivered or administered into a cavity formed by the resection of tumor tissue (i.e. intracavity delivery) or directly into a tumor prior to resection (i.e. intratumoral delivery). In one embodiment, the cell compositions of the present invention are preferably administered by intravenous injection.

[0974] The administration of the cells or population of cells can consist of the administration of 104-109 cells per kg body weight, preferably 105 to 106 cells/kg body weight including all integer values of cell numbers within those ranges. Dosing in CART cell therapies may for example involve administration of from 106 to 109 cells/kg, with or without a course of lymphodepletion, for example with cyclophosphamide. The cells or population of cells can be administrated in one or more doses. In another embodiment, the effective amount of cells are administrated as a single dose. In another embodiment, the effective amount of cells are administrated as more than one dose over a period time. Timing of administration is within the judgment of managing physician and depends on the clinical condition of the patient. The cells or population of cells may be obtained from any source, such as a blood bank or a donor. While individual needs vary, determination of optimal ranges of effective amounts of a given cell type for a particular disease or conditions are within the skill of one in the art. An effective amount means an amount which provides a therapeutic or prophylactic benefit. The dosage administrated will be dependent upon the age, health and weight of the recipient, kind of concurrent treatment, if any, frequency of treatment and the nature of the effect desired.

[0975] In another embodiment, the effective amount of cells or composition comprising those cells are administrated parenterally. The administration can be an intravenous administration. The administration can be directly done by injection within a tumor.

[0976] To guard against possible adverse reactions, engineered immunoresponsive cells may be equipped with a transgenic safety switch, in the form of a transgene that renders the cells vulnerable to exposure to a specific signal. For example, the herpes simplex viral thymidine kinase (TK) gene may be used in this way, for example by introduction into allogeneic T lymphocytes used as donor lymphocyte infusions following stem cell transplantation (Greco, et al., Improving the safety of cell therapy with the TK-suicide gene. Front. Pharmacol. 2015; 6: 95). In such cells, administration of a nucleoside prodrug such as ganciclovir or acyclovir causes cell death. Alternative safety switch constructs include inducible caspase 9, for example triggered by administration of a small-molecule dimerizer that brings together two nonfunctional icasp9 molecules to form the active enzyme. A wide variety of alternative approaches to implementing cellular proliferation controls have been described (see U.S. Patent Publication No. 20130071414; International Patent Publication WO 2011/146862; International Patent Publication WO 2014/011987; International Patent Publication WO 2013/040371; Zhou et al. BLOOD, 2014, 123/25:3895-3905; Di Stasi et al., The New England Journal of Medicine 2011; 365:1673-1683; Sadelain M, The New England Journal of Medicine 2011; 365:1735-173; Ramos et al., Stem Cells 28(6):1107-15 (2010)).

[0977] In a further refinement of adoptive therapies, genome editing may be used to tailor immunoresponsive cells to alternative implementations, for example providing edited CAR T cells (see Poirot et al., 2015, Multiplex genome edited T-cell manufacturing platform for “off-the-shelf” adoptive T-cell immunotherapies, Cancer Res 75 (18): 3853; Ren et al., 2017, Multiplex genome editing to generate universal CAR T cells resistant to PD1 inhibition, Clin Cancer Res. 2017 May 1; 23(9):2255-2266. doi: 10.1158/1078-0432.CCR-16-1300. Epub 2016 Nov. 4; Qasim et al., 2017, Molecular remission of infant B-ALL after infusion of universal TALEN gene-edited CAR T cells, Sci Transl Med. 2017 Jan. 25; 9(374); Legut, et al., 2018, CRISPR-mediated TCR replacement generates superior anticancer transgenic T cells. Blood, 131(3), 311-322; and Georgiadis et al., Long Terminal Repeat CRISPR-CAR-Coupled “Universal” T Cells Mediate Potent Anti-leukemic Effects, Molecular Therapy, In Press, Corrected Proof, Available online 6 Mar. 2018). Cells may be edited using any CRISPR system and method of use thereof as described herein. The composition and systems may be delivered to an immune cell by any method described herein. In preferred embodiments, cells are edited ex vivo and transferred to a subject in need thereof. Immunoresponsive cells, CAR T cells or any cells used for adoptive cell transfer may be edited. Editing may be performed for example to insert or knock-in an exogenous gene, such as an exogenous gene encoding a CAR or a TCR, at a preselected locus in a cell (e.g. TRAC locus); to eliminate potential alloreactive T-cell receptors (TCR) or to prevent inappropriate pairing between endogenous and exogenous TCR chains, such as to knock-out or knock-down expression of an endogenous TCR in a cell; to disrupt the target of a chemotherapeutic agent in a cell; to block an immune checkpoint, such as to knock-out or knock-down expression of an immune checkpoint protein or receptor in a cell; to knock-out or knock-down expression of other gene or genes in a cell, the reduced expression or lack of expression of which can enhance the efficacy of adoptive therapies using the cell; to knock-out or knock-down expression of an endogenous gene in a cell, said endogenous gene encoding an antigen targeted by an exogenous CAR or TCR; to knock-out or knock-down expression of one or more MHC constituent proteins in a cell; to activate a T cell; to modulate cells such that the cells are resistant to exhaustion or dysfunction; and/or increase the differentiation and/or proliferation of functionally exhausted or dysfunctional CD8+ T-cells (see International Patent Publication Nos. WO 2013/176915, WO 2014/059173, WO 2014/172606, WO 2014/184744, and WO 2014/191128).

[0978] In certain embodiments, editing may result in inactivation of a gene. By inactivating a gene, it is intended that the gene of interest is not expressed in a functional protein form. In a particular embodiment, the system specifically catalyzes cleavage in one targeted gene thereby inactivating said targeted gene. The nucleic acid strand breaks caused are commonly repaired through the distinct mechanisms of homologous recombination or non-homologous end joining (NHEJ). However, NHEJ is an imperfect repair process that often results in changes to the DNA sequence at the site of the cleavage. Repair via non-homologous end joining (NHEJ) often results in small insertions or deletions (Indel) and can be used for the creation of specific gene knockouts. Cells in which a cleavage induced mutagenesis event has occurred can be identified and/or selected by well-known methods in the art. In certain embodiments, homology directed repair (HDR) is used to concurrently inactivate a gene (e.g., TRAC) and insert an endogenous TCR or CAR into the inactivated locus.

[0979] Hence, in certain embodiments, editing of cells, particularly cells intended for adoptive cell therapies, more particularly immunoresponsive cells such as T cells, may be performed to insert or knock-in an exogenous gene, such as an exogenous gene encoding a CAR or a TCR, at a preselected locus in a cell. Conventionally, nucleic acid molecules encoding CARs or TCRs are transfected or transduced to cells using randomly integrating vectors, which, depending on the site of integration, may lead to clonal expansion, oncogenic transformation, variegated transgene expression and/or transcriptional silencing of the transgene. Directing of transgene(s) to a specific locus in a cell can minimize or avoid such risks and advantageously provide for uniform expression of the transgene(s) by the cells. Without limitation, suitable ‘safe harbor’ loci for directed transgene integration include CCR5 or AAVS1. Homology-directed repair (HDR) strategies are known and described elsewhere in this specification allowing to insert transgenes into desired loci (e.g., TRAC locus).

[0980] Further suitable loci for insertion of transgenes, in particular CAR or exogenous TCR transgenes, include without limitation loci comprising genes coding for constituents of endogenous T-cell receptor, such as T-cell receptor alpha locus (TRA) or T-cell receptor beta locus (TRB), for example T-cell receptor alpha constant (TRAC) locus, T-cell receptor beta constant 1 (TRBC1) locus or T-cell receptor beta constant 2 (TRBC1) locus. Advantageously, insertion of a transgene into such locus can simultaneously achieve expression of the transgene, potentially controlled by the endogenous promoter, and knock-out expression of the endogenous TCR. This approach has been exemplified in Eyquem et al., (2017) Nature 543: 113-117, wherein the authors used CRISPR/Cas9 gene editing to knock-in a DNA molecule encoding a CD19-specific CAR into the TRAC locus downstream of the endogenous promoter; the CAR-T cells obtained by CRISPR were significantly superior in terms of reduced tonic CAR signaling and exhaustion.

[0981] T cell receptors (TCR) are cell surface receptors that participate in the activation of T cells in response to the presentation of antigen. The TCR is generally made from two chains, α and β, which assemble to form a heterodimer and associates with the CD3-transducing subunits to form the T cell receptor complex present on the cell surface. Each α and β chain of the TCR consists of an immunoglobulin-like N-terminal variable (V) and constant (C) region, a hydrophobic transmembrane domain, and a short cytoplasmic region. As for immunoglobulin molecules, the variable region of the α and β chains are generated by V(D)J recombination, creating a large diversity of antigen specificities within the population of T cells. However, in contrast to immunoglobulins that recognize intact antigen, T cells are activated by processed peptide fragments in association with an MHC molecule, introducing an extra dimension to antigen recognition by T cells, known as MHC restriction. Recognition of MHC disparities between the donor and recipient through the T cell receptor leads to T cell proliferation and the potential development of graft versus host disease (GVHD). The inactivation of TCRα or TCRβ can result in the elimination of the TCR from the surface of T cells preventing recognition of alloantigen and thus GVHD. However, TCR disruption generally results in the elimination of the CD3 signaling component and alters the means of further T cell expansion.

[0982] Hence, in certain embodiments, editing of cells, particularly cells intended for adoptive cell therapies, more particularly immunoresponsive cells such as T cells, may be performed to knock-out or knock-down expression of an endogenous TCR in a cell. For example, NHEJ-based or HDR-based gene editing approaches can be employed to disrupt the endogenous TCR alpha and/or beta chain genes. For example, gene editing system or systems, such as CRISPR/Cas system or systems, can be designed to target a sequence found within the TCR beta chain conserved between the beta 1 and beta 2 constant region genes (TRBC1 and TRBC2) and/or to target the constant region of the TCR alpha chain (TRAC) gene.

[0983] Allogeneic cells are rapidly rejected by the host immune system. It has been demonstrated that, allogeneic leukocytes present in non-irradiated blood products will persist for no more than 5 to 6 days (Boni, Muranski et al. 2008 Blood 1; 112(12):4746-54). Thus, to prevent rejection of allogeneic cells, the host's immune system usually has to be suppressed to some extent. However, in the case of adoptive cell transfer the use of immunosuppressive drugs also have a detrimental effect on the introduced therapeutic T cells. Therefore, to effectively use an adoptive immunotherapy approach in these conditions, the introduced cells would need to be resistant to the immunosuppressive treatment. Thus, in a particular embodiment, the present invention further comprises a step of modifying T cells to make them resistant to an immunosuppressive agent, preferably by inactivating at least one gene encoding a target for an immunosuppressive agent. An immunosuppressive agent is an agent that suppresses immune function by one of several mechanisms of action. An immunosuppressive agent can be, but is not limited to a calcineurin inhibitor, a target of rapamycin, an interleukin-2 receptor α-chain blocker, an inhibitor of inosine monophosphate dehydrogenase, an inhibitor of dihydrofolic acid reductase, a corticosteroid or an immunosuppressive antimetabolite. The present invention allows conferring immunosuppressive resistance to T cells for immunotherapy by inactivating the target of the immunosuppressive agent in T cells. As non-limiting examples, targets for an immunosuppressive agent can be a receptor for an immunosuppressive agent such as: CD52, glucocorticoid receptor (GR), a FKBP family gene member and a cyclophilin family gene member.

[0984] In certain embodiments, editing of cells, particularly cells intended for adoptive cell therapies, more particularly immunoresponsive cells such as T cells, may be performed to block an immune checkpoint, such as to knock-out or knock-down expression of an immune checkpoint protein or receptor in a cell. Immune checkpoints are inhibitory pathways that slow down or stop immune reactions and prevent excessive tissue damage from uncontrolled activity of immune cells. In certain embodiments, the immune checkpoint targeted is the programmed death-1 (PD-1 or CD279) gene (PDCD1). In other embodiments, the immune checkpoint targeted is cytotoxic T-lymphocyte-associated antigen (CTLA-4). In additional embodiments, the immune checkpoint targeted is another member of the CD28 and CTLA4 Ig superfamily such as BTLA, LAG3, ICOS, PDL1 or KIR. In further additional embodiments, the immune checkpoint targeted is a member of the TNFR superfamily such as CD40, OX40, CD137, GITR, CD27 or TIM-3.

[0985] Additional immune checkpoints include Src homology 2 domain-containing protein tyrosine phosphatase 1 (SHP-1) (Watson H A, et al., SHP-1: the next checkpoint target for cancer immunotherapy? Biochem Soc Trans. 2016 Apr. 15; 44(2):356-62). SHP-1 is a widely expressed inhibitory protein tyrosine phosphatase (PTP). In T-cells, it is a negative regulator of antigen-dependent activation and proliferation. It is a cytosolic protein, and therefore not amenable to antibody-mediated therapies, but its role in activation and proliferation makes it an attractive target for genetic manipulation in adoptive transfer strategies, such as chimeric antigen receptor (CAR) T cells. Immune checkpoints may also include T cell immunoreceptor with Ig and ITIM domains (TIGIT/Vstm3/WUCAM/VSIG9) and VISTA (Le Mercier I, et al., (2015) Beyond CTLA-4 and PD-1, the generation Z of negative checkpoint regulators. Front. Immunol. 6:418).

[0986] International Patent Publication No. WO 2014/172606 relates to the use of MT1 and/or MT2 inhibitors to increase proliferation and/or activity of exhausted CD8+ T-cells and to decrease CD8+ T-cell exhaustion (e.g., decrease functionally exhausted or unresponsive CD8+ immune cells). In certain embodiments, metallothioneins are targeted by gene editing in adoptively transferred T cells.

[0987] In certain embodiments, targets of gene editing may be at least one targeted locus involved in the expression of an immune checkpoint protein. Such targets may include, but are not limited to CTLA4, PPP2CA, PPP2CB, PTPN6, PTPN22, PDCD1, ICOS (CD278), PDL1, KIR, LAG3, HAVCR2, BTLA, CD160, TIGIT, CD96, CRTAM, LAIR1, SIGLEC7, SIGLEC9, CD244 (2B4), TNFRSF10B, TNFRSF10A, CASP8, CASP10, CASP3, CASP6, CASP7, FADD, FAS, TGFBRII, TGFRBRI, SMAD2, SMAD3, SMAD4, SMAD10, SKI, SKIL, TGIF1, IL10RA, IL10RB, HMOX2, IL6R, IL6ST, EIF2AK4, CSK, PAG1, SIT1, FOXP3, PRDM1, BATF, VISTA, GUCY1A2, GUCY1A3, GUCY1B2, GUCY1B3, MT1, MT2, CD40, OX40, CD137, GITR, CD27, SHP-1, TIM-3, CEACAM-1, CEACAM-3, or CEACAM-5. In preferred embodiments, the gene locus involved in the expression of PD-1 or CTLA-4 genes is targeted. In other preferred embodiments, combinations of genes are targeted, such as but not limited to PD-1 and TIGIT.

[0988] By means of an example and without limitation, International Patent Publication No. WO 2016/196388 concerns an engineered T cell comprising (a) a genetically engineered antigen receptor that specifically binds to an antigen, which receptor may be a CAR; and (b) a disrupted gene encoding a PD-L1, an agent for disruption of a gene encoding a PD-L1, and/or disruption of a gene encoding PD-L1, wherein the disruption of the gene may be mediated by a gene editing nuclease, a zinc finger nuclease (ZFN), CRISPR/Cas9 and/or TALEN. WO2015142675 relates to immune effector cells comprising a CAR in combination with an agent (such as the composition or system herein) that increases the efficacy of the immune effector cells in the treatment of cancer, wherein the agent may inhibit an immune inhibitory molecule, such as PD1, PD-L1, CTLA-4, TIM-3, LAG-3, VISTA, BTLA, TIGIT, LAIR1, CD160, 2B4, TGFR beta, CEACAM-1, CEACAM-3, or CEACAM-5. Ren et al., (2017) Clin Cancer Res 23 (9) 2255-2266 performed lentiviral delivery of CAR and electro-transfer of Cas9 mRNA and gRNAs targeting endogenous TCR, β-2 microglobulin (B2M) and PD1 simultaneously, to generate gene-disrupted allogeneic CAR T cells deficient of TCR, HLA class I molecule and PD1.

[0989] In certain embodiments, cells may be engineered to express a CAR, wherein expression and/or function of methylcytosine dioxygenase genes (TET1, TET2 and/or TET3) in the cells has been reduced or eliminated, (such as the composition or system herein) (for example, as described in WO201704916).

[0990] In certain embodiments, editing of cells, particularly cells intended for adoptive cell therapies, more particularly immunoresponsive cells such as T cells, may be performed to knock-out or knock-down expression of an endogenous gene in a cell, said endogenous gene encoding an antigen targeted by an exogenous CAR or TCR, thereby reducing the likelihood of targeting of the engineered cells. In certain embodiments, the targeted antigen may be one or more antigen selected from the group consisting of CD38, CD138, CS-1, CD33, CD26, CD30, CD53, CD92, CD100, CD148, CD150, CD200, CD261, CD262, CD362, human telomerase reverse transcriptase (hTERT), survivin, mouse double minute 2 homolog (MDM2), cytochrome P450 1B1 (CYP1B), HER2/neu, Wilms' tumor gene 1 (WT1), livin, alphafetoprotein (AFP), carcinoembryonic antigen (CEA), mucin 16 (MUC16), MUC1, prostate-specific membrane antigen (PSMA), p53, cyclin (D1), B cell maturation antigen (BCMA), transmembrane activator and CAML Interactor (TACI), and B-cell activating factor receptor (BAFF-R) (for example, as described in International Patent Publication Nos. WO 2016/011210 and WO 2017/011804).

[0991] In certain embodiments, editing of cells, particularly cells intended for adoptive cell therapies, more particularly immunoresponsive cells such as T cells, may be performed to knock-out or knock-down expression of one or more MHC constituent proteins, such as one or more HLA proteins and/or beta-2 microglobulin (B2M), in a cell, whereby rejection of non-autologous (e.g., allogeneic) cells by the recipient's immune system can be reduced or avoided. In preferred embodiments, one or more HLA class I proteins, such as HLA-A, B and/or C, and/or B2M may be knocked-out or knocked-down. Preferably, B2M may be knocked-out or knocked-down. By means of an example, Ren et al., (2017) Clin Cancer Res 23 (9) 2255-2266 performed lentiviral delivery of CAR and electro-transfer of Cas mRNA and gRNAs targeting endogenous TCR, β-2 microglobulin (B2M) and PD1 simultaneously, to generate gene-disrupted allogeneic CART cells deficient of TCR, HLA class I molecule and PD1.

[0992] In other embodiments, at least two genes are edited. Pairs of genes may include, but are not limited to PD1 and TCRα, PD1 and TCRβ, CTLA-4 and TCRα, CTLA-4 and TCRβ, LAG3 and TCRα, LAG3 and TCRβ, Tim3 and TCRα, Tim3 and TCRβ, BTLA and TCRα, BTLA and TCRβ, BY55 and TCRα, BY55 and TCRβ, TIGIT and TCRα, TIGIT and TCRβ, B7H5 and TCRα, B7H5 and TCRβ, LAIR1 and TCRα, LAIR1 and TCRβ, SIGLEC10 and TCRα, SIGLEC10 and TCRβ, 2B4 and TCRα, 2B4 and TCRβ, B2M and TCRα, B2M and TCRβ.

[0993] In certain embodiments, a cell may be multiplied edited (multiplex genome editing) as taught herein to (1) knock-out or knock-down expression of an endogenous TCR (for example, TRBC1, TRBC2 and/or TRAC), (2) knock-out or knock-down expression of an immune checkpoint protein or receptor (for example PD1, PD-L1 and/or CTLA4); and (3) knock-out or knock-down expression of one or more MHC constituent proteins (for example, HLA-A, B and/or C, and/or B2M, preferably B2M).

[0994] Whether prior to or after genetic modification of the T cells, the T cells can be activated and expanded generally using methods as described, for example, in U.S. Pat. Nos. 6,352,694; 6,534,055; 6,905,680; 5,858,358; 6,887,466; 6,905,681; 7,144,575; 7,232,566; 7,175,843; 5,883,223; 6,905,874; 6,797,514; 6,867,041; and 7,572,631. T cells can be expanded in vitro or in vivo.

[0995] Immune cells may be obtained using any method known in the art. In one embodiment, allogenic T cells may be obtained from healthy subjects. In one embodiment T cells that have infiltrated a tumor are isolated. T cells may be removed during surgery. T cells may be isolated after removal of tumor tissue by biopsy. T cells may be isolated by any means known in the art. In one embodiment, T cells are obtained by apheresis. In one embodiment, the method may comprise obtaining a bulk population of T cells from a tumor sample by any suitable method known in the art. For example, a bulk population of T cells can be obtained from a tumor sample by dissociating the tumor sample into a cell suspension from which specific cell populations can be selected. Suitable methods of obtaining a bulk population of T cells may include, but are not limited to, any one or more of mechanically dissociating (e.g., mincing) the tumor, enzymatically dissociating (e.g., digesting) the tumor, and aspiration (e.g., as with a needle).

[0996] The bulk population of T cells obtained from a tumor sample may comprise any suitable type of T cell. Preferably, the bulk population of T cells obtained from a tumor sample comprises tumor infiltrating lymphocytes (TILs).

[0997] The tumor sample may be obtained from any mammal. Unless stated otherwise, as used herein, the term “mammal” refers to any mammal including, but not limited to, mammals of the order Logomorpha, such as rabbits; the order Carnivora, including Felines (cats) and Canines (dogs); the order Artiodactyla, including Bovines (cows) and Swines (pigs); or of the order Perssodactyla, including Equines (horses). The mammals may be non-human primates, e.g., of the order Primates, Ceboids, or Simoids (monkeys) or of the order Anthropoids (humans and apes). In some embodiments, the mammal may be a mammal of the order Rodentia, such as mice and hamsters. Preferably, the mammal is a non-human primate or a human. An especially preferred mammal is the human.

[0998] T cells can be obtained from a number of sources, including peripheral blood mononuclear cells (PBMC), bone marrow, lymph node tissue, spleen tissue, and tumors. In certain embodiments of the present invention, T cells can be obtained from a unit of blood collected from a subject using any number of techniques known to the skilled artisan, such as Ficoll separation. In one preferred embodiment, cells from the circulating blood of an individual are obtained by apheresis or leukapheresis. The apheresis product typically contains lymphocytes, including T cells, monocytes, granulocytes, B cells, other nucleated white blood cells, red blood cells, and platelets. In one embodiment, the cells collected by apheresis may be washed to remove the plasma fraction and to place the cells in an appropriate buffer or media for subsequent processing steps. In one embodiment of the invention, the cells are washed with phosphate buffered saline (PBS). In an alternative embodiment, the wash solution lacks calcium and may lack magnesium or may lack many if not all divalent cations. Initial activation steps in the absence of calcium lead to magnified activation. As those of ordinary skill in the art would readily appreciate a washing step may be accomplished by methods known to those in the art, such as by using a semi-automated “flow-through” centrifuge (for example, the Cobe 2991 cell processor) according to the manufacturer's instructions. After washing, the cells may be resuspended in a variety of biocompatible buffers, such as, for example, Ca-free, Mg-free PBS. Alternatively, the undesirable components of the apheresis sample may be removed and the cells directly resuspended in culture media.

[0999] In another embodiment, T cells are isolated from peripheral blood lymphocytes by lysing the red blood cells and depleting the monocytes, for example, by centrifugation through a PERCOLL™ gradient. A specific subpopulation of T cells, such as CD28+, CD4+, CDC, CD45RA+, and CD45RO+ T cells, can be further isolated by positive or negative selection techniques. For example, in one preferred embodiment, T cells are isolated by incubation with anti-CD3/anti-CD28 (i.e., 3×28)-conjugated beads, such as DYNABEADS® M-450 CD3/CD28 T, or XCYTE DYNABEADS™ for a time period sufficient for positive selection of the desired T cells. In one embodiment, the time period is about 30 minutes. In a further embodiment, the time period ranges from 30 minutes to 36 hours or longer and all integer values there between. In a further embodiment, the time period is at least 1, 2, 3, 4, 5, or 6 hours. In yet another preferred embodiment, the time period is 10 to 24 hours. In one preferred embodiment, the incubation time period is 24 hours. For isolation of T cells from patients with leukemia, use of longer incubation times, such as 24 hours, can increase cell yield. Longer incubation times may be used to isolate T cells in any situation where there are few T cells as compared to other cell types, such in isolating tumor infiltrating lymphocytes (TIL) from tumor tissue or from immunocompromised individuals. Further, use of longer incubation times can increase the efficiency of capture of CD8+ T cells.

[1000] Enrichment of a T cell population by negative selection can be accomplished with a combination of antibodies directed to surface markers unique to the negatively selected cells. A preferred method is cell sorting and/or selection via negative magnetic immunoadherence or flow cytometry that uses a cocktail of monoclonal antibodies directed to cell surface markers present on the cells negatively selected. For example, to enrich for CD4+ cells by negative selection, a monoclonal antibody cocktail typically includes antibodies to CD14, CD20, CD11b, CD16, HLA-DR, and CD8.

[1001] Further, monocyte populations (e.g., CD14+ cells) may be depleted from blood preparations by a variety of methodologies, including anti-CD14 coated beads or columns, or utilization of the phagocytotic activity of these cells to facilitate removal. Accordingly, in one embodiment, the invention uses paramagnetic particles of a size sufficient to be engulfed by phagocytotic monocytes. In certain embodiments, the paramagnetic particles are commercially available beads, for example, those produced by Life Technologies under the trade name Dynabeads™. In one embodiment, other non-specific cells are removed by coating the paramagnetic particles with “irrelevant” proteins (e.g., serum proteins or antibodies). Irrelevant proteins and antibodies include those proteins and antibodies or fragments thereof that do not specifically target the T cells to be isolated. In certain embodiments, the irrelevant beads include beads coated with sheep anti-mouse antibodies, goat anti-mouse antibodies, and human serum albumin.

[1002] In brief, such depletion of monocytes is performed by preincubating T cells isolated from whole blood, apheresed peripheral blood, or tumors with one or more varieties of irrelevant or non-antibody coupled paramagnetic particles at any amount that allows for removal of monocytes (approximately a 20:1 bead:cell ratio) for about 30 minutes to 2 hours at 22 to 37 degrees C., followed by magnetic removal of cells which have attached to or engulfed the paramagnetic particles. Such separation can be performed using standard methods available in the art. For example, any magnetic separation methodology may be used including a variety of which are commercially available, (e.g., DYNAL® Magnetic Particle Concentrator (DYNAL MPC®)). Assurance of requisite depletion can be monitored by a variety of methodologies known to those of ordinary skill in the art, including flow cytometric analysis of CD14 positive cells, before and after depletion.

[1003] For isolation of a desired population of cells by positive or negative selection, the concentration of cells and surface (e.g., particles such as beads) can be varied. In certain embodiments, it may be desirable to significantly decrease the volume in which beads and cells are mixed together (i.e., increase the concentration of cells), to ensure maximum contact of cells and beads. For example, in one embodiment, a concentration of 2 billion cells/ml is used. In one embodiment, a concentration of 1 billion cells/ml is used. In a further embodiment, greater than 100 million cells/ml is used. In a further embodiment, a concentration of cells of 10, 15, 20, 25, 30, 35, 40, 45, or 50 million cells/ml is used. In yet another embodiment, a concentration of cells from 75, 80, 85, 90, 95, or 100 million cells/ml is used. In further embodiments, concentrations of 125 or 150 million cells/ml can be used. Using high concentrations can result in increased cell yield, cell activation, and cell expansion. Further, use of high cell concentrations allows more efficient capture of cells that may weakly express target antigens of interest, such as CD28-negative T cells, or from samples where there are many tumor cells present (i.e., leukemic blood, tumor tissue, etc). Such populations of cells may have therapeutic value and would be desirable to obtain. For example, using high concentration of cells allows more efficient selection of CD8+ T cells that normally have weaker CD28 expression.

[1004] In a related embodiment, it may be desirable to use lower concentrations of cells. By significantly diluting the mixture of T cells and surface (e.g., particles such as beads), interactions between the particles and cells is minimized. This selects for cells that express high amounts of desired antigens to be bound to the particles. For example, CD4+ T cells express higher levels of CD28 and are more efficiently captured than CD8+ T cells in dilute concentrations. In one embodiment, the concentration of cells used is 5×106/ml. In other embodiments, the concentration used can be from about 1×105/ml to 1×106/ml, and any integer value in between.

[1005] T cells can also be frozen. Wishing not to be bound by theory, the freeze and subsequent thaw step provides a more uniform product by removing granulocytes and to some extent monocytes in the cell population. After a washing step to remove plasma and platelets, the cells may be suspended in a freezing solution. While many freezing solutions and parameters are known in the art and will be useful in this context, one method involves using PBS containing 20% DMSO and 8% human serum albumin, or other suitable cell freezing media, the cells then are frozen to −80° C. at a rate of 1° per minute and stored in the vapor phase of a liquid nitrogen storage tank. Other methods of controlled freezing may be used as well as uncontrolled freezing immediately at −20° C. or in liquid nitrogen.

[1006] T cells for use in the present invention may also be antigen-specific T cells. For example, tumor-specific T cells can be used. In certain embodiments, antigen-specific T cells can be isolated from a patient of interest, such as a patient afflicted with a cancer or an infectious disease. In one embodiment, neoepitopes are determined for a subject and T cells specific to these antigens are isolated. Antigen-specific cells for use in expansion may also be generated in vitro using any number of methods known in the art, for example, as described in U.S. Patent Publication No. US 20040224402 entitled, Generation and Isolation of Antigen-Specific T Cells, or in U.S. Pat. No. 6,040,177. Antigen-specific cells for use in the present invention may also be generated using any number of methods known in the art, for example, as described in Current Protocols in Immunology, or Current Protocols in Cell Biology, both published by John Wiley & Sons, Inc., Boston, Mass.

[1007] In a related embodiment, it may be desirable to sort or otherwise positively select (e.g. via magnetic selection) the antigen specific cells prior to or following one or two rounds of expansion. Sorting or positively selecting antigen-specific cells can be carried out using peptide-MHC tetramers (Altman, et al., Science. 1996 Oct. 4; 274(5284):94-6). In another embodiment, the adaptable tetramer technology approach is used (Andersen et al., 2012 Nat Protoc. 7:891-902). Tetramers are limited by the need to utilize predicted binding peptides based on prior hypotheses, and the restriction to specific HLAs. Peptide-MHC tetramers can be generated using techniques known in the art and can be made with any MHC molecule of interest and any antigen of interest as described herein. Specific epitopes to be used in this context can be identified using numerous assays known in the art. For example, the ability of a polypeptide to bind to MHC class I may be evaluated indirectly by monitoring the ability to promote incorporation of 125I labeled β2-microglobulin (β2m) into MEW class I/β2m/peptide heterotrimeric complexes (see Parker et al., J. Immunol. 152:163, 1994).

[1008] In one embodiment, cells are directly labeled with an epitope-specific reagent for isolation by flow cytometry followed by characterization of phenotype and TCRs. In one embodiment, T cells are isolated by contacting with T cell specific antibodies. Sorting of antigen-specific T cells, or generally any cells of the present invention, can be carried out using any of a variety of commercially available cell sorters, including, but not limited to, MoFlo sorter (DakoCytomation, Fort Collins, Colo.), FACSAria™, FACSArray™, FACSVantage™, BD™ LSR II, and FACSCalibur™ (BD Biosciences, San Jose, Calif.).

[1009] In a preferred embodiment, the method comprises selecting cells that also express CD3. The method may comprise specifically selecting the cells in any suitable manner. Preferably, the selecting is carried out using flow cytometry. The flow cytometry may be carried out using any suitable method known in the art. The flow cytometry may employ any suitable antibodies and stains. Preferably, the antibody is chosen such that it specifically recognizes and binds to the particular biomarker being selected. For example, the specific selection of CD3, CD8, TIM-3, LAG-3, 4-1BB, or PD-1 may be carried out using anti-CD3, anti-CD8, anti-TIM-3, anti-LAG-3, anti-4-1BB, or anti-PD-1 antibodies, respectively. The antibody or antibodies may be conjugated to a bead (e.g., a magnetic bead) or to a fluorochrome. Preferably, the flow cytometry is fluorescence-activated cell sorting (FACS). TCRs expressed on T cells can be selected based on reactivity to autologous tumors. Additionally, T cells that are reactive to tumors can be selected for based on markers using the methods described in patent publication Nos. WO2014133567 and WO2014133568, herein incorporated by reference in their entirety. Additionally, activated T cells can be selected for based on surface expression of CD107a.

[1010] In one embodiment of the invention, the method further comprises expanding the numbers of T cells in the enriched cell population. Such methods are described in U.S. Pat. No. 8,637,307 and is herein incorporated by reference in its entirety. The numbers of T cells may be increased at least about 3-fold (or 4-, 5-, 6-, 7-, 8-, or 9-fold), more preferably at least about 10-fold (or 20-, 30-, 40-, 50-, 60-, 70-, 80-, or 90-fold), more preferably at least about 100-fold, more preferably at least about 1,000 fold, or most preferably at least about 100,000-fold. The numbers of T cells may be expanded using any suitable method known in the art. Exemplary methods of expanding the numbers of cells are described in patent publication No. WO 2003/057171, U.S. Pat. No. 8,034,334, and U.S. Patent Publication No. 2012/0244133, each of which is incorporated herein by reference.

[1011] In one embodiment, ex vivo T cell expansion can be performed by isolation of T cells and subsequent stimulation or activation followed by further expansion. In one embodiment of the invention, the T cells may be stimulated or activated by a single agent. In another embodiment, T cells are stimulated or activated with two agents, one that induces a primary signal and a second that is a co-stimulatory signal. Ligands useful for stimulating a single signal or stimulating a primary signal and an accessory molecule that stimulates a second signal may be used in soluble form. Ligands may be attached to the surface of a cell, to an Engineered Multivalent Signaling Platform (EMSP), or immobilized on a surface. In a preferred embodiment both primary and secondary agents are co-immobilized on a surface, for example a bead or a cell. In one embodiment, the molecule providing the primary activation signal may be a CD3 ligand, and the co-stimulatory molecule may be a CD28 ligand or 4-1BB ligand.

[1012] In certain embodiments, T cells comprising a CAR or an exogenous TCR, may be manufactured as described in International Patent Publication No. WO 2015/120096, by a method comprising enriching a population of lymphocytes obtained from a donor subject; stimulating the population of lymphocytes with one or more T-cell stimulating agents to produce a population of activated T cells, wherein the stimulation is performed in a closed system using serum-free culture medium; transducing the population of activated T cells with a viral vector comprising a nucleic acid molecule which encodes the CAR or TCR, using a single cycle transduction to produce a population of transduced T cells, wherein the transduction is performed in a closed system using serum-free culture medium; and expanding the population of transduced T cells for a predetermined time to produce a population of engineered T cells, wherein the expansion is performed in a closed system using serum-free culture medium. In certain embodiments, T cells comprising a CAR or an exogenous TCR, may be manufactured as described in WO 2015/120096, by a method comprising: obtaining a population of lymphocytes; stimulating the population of lymphocytes with one or more stimulating agents to produce a population of activated T cells, wherein the stimulation is performed in a closed system using serum-free culture medium; transducing the population of activated T cells with a viral vector comprising a nucleic acid molecule which encodes the CAR or TCR, using at least one cycle transduction to produce a population of transduced T cells, wherein the transduction is performed in a closed system using serum-free culture medium; and expanding the population of transduced T cells to produce a population of engineered T cells, wherein the expansion is performed in a closed system using serum-free culture medium. The predetermined time for expanding the population of transduced T cells may be 3 days. The time from enriching the population of lymphocytes to producing the engineered T cells may be 6 days. The closed system may be a closed bag system. Further provided is population of T cells comprising a CAR or an exogenous TCR obtainable or obtained by said method, and a pharmaceutical composition comprising such cells.

[1013] In certain embodiments, T cell maturation or differentiation in vitro may be delayed or inhibited by the method as described in International Patent Publication No. WO 2017/070395, comprising contacting one or more T cells from a subject in need of a T cell therapy with an AKT inhibitor (such as, e.g., one or a combination of two or more AKT inhibitors disclosed in claim 8 of WO2017070395) and at least one of exogenous Interleukin-7 (IL-7) and exogenous Interleukin-15 (IL-15), wherein the resulting T cells exhibit delayed maturation or differentiation, and/or wherein the resulting T cells exhibit improved T cell function (such as, e.g., increased T cell proliferation; increased cytokine production; and/or increased cytolytic activity) relative to a T cell function of a T cell cultured in the absence of an AKT inhibitor.

[1014] In certain embodiments, a patient in need of a T cell therapy may be conditioned by a method as described in International Patent Publication No. WO 2016/191756 comprising administering to the patient a dose of cyclophosphamide between 200 mg/m2/day and 2000 mg/m2/day and a dose of fludarabine between 20 mg/m2/day and 900 mg/m²/day.

### Diseases

[1015] Genetic Diseases and Diseases with a Genetic and/or Epigenetic Aspect

[1016] The compositions, systems, or components thereof can be used to treat and/or prevent a genetic disease or a disease with a genetic and/or epigenetic aspect. The genes and conditions exemplified herein are not exhaustive. In some embodiments, a method of treating and/or preventing a genetic disease can include administering a composition, system, and/or one or more components thereof to a subject, where the composition, system, and/or one or more components thereof is capable of modifying one or more copies of one or more genes associated with the genetic disease or a disease with a genetic and/or epigenetic aspect in one or more cells of the subject. In some embodiments, modifying one or more copies of one or more genes associated with a genetic disease or a disease with a genetic and/or epigenetic aspect in the subject can eliminate a genetic disease or a symptom thereof in the subject. In some embodiments, modifying one or more copies of one or more genes associated with a genetic disease or a disease with a genetic and/or epigenetic aspect in the subject can decrease the severity of a genetic disease or a symptom thereof in the subject. In some embodiments, the compositions, systems, or components thereof can modify one or more genes or polynucleotides associated with one or more diseases, including genetic diseases and/or those having a genetic aspect and/or epigenetic aspect, including but not limited to, any one or more set forth in Table 10. It will be appreciated that those diseases and associated genes listed herein are non-exhaustive and non-limiting. Further some genes play roles in the development of multiple diseases.

TABLE 10
Exemplary Genetic and Other Diseases and Associated Genes

| | Primary | | |
|---|---|---|---|
| | Tissues or | Additional | |
| | System | Tissues/Systems | |
| Disease Name | Affected | Affected | Genes |
| Achondroplasia | Bone and | | fibroblast growth factor receptor 3 |
| | Muscle | | (FGFR3) |
| Achromatopsia | eye | | CNGA3, CNGB3, GNAT2, PDE6C, |
| | | | PDE6H, ACHM2, ACHM3, |
| Acute Renal Injury | kidney | | NFkappaB, AATF, p85alpha, FAS, |
| | | | Apoptosis cascade elements (e.g. |
| | | | FASR, Caspase 2, 3, 4, 6, 7, 8, 9, 10, |
| | | | AKT, TNF alpha, IGF1, IGF1R, |
| | | | RIPK1), p53 |
| Age Related Macular | eye | | Abcr; CCL2; CC2; CP |
| Degeneration | | | (ceruloplasmin); Timp3; cathepsinD; |
| | | | VLDLR, CCR2 |
| AIDS | Immune System | | KIR3DL1, NKAT3, NKB1, AMB11, |
| | | | KIR3DS1, IFNG, CXCL12, SDF1 |
| Albinism (including | Skin, hair, eyes, | | TYR, OCA2, TYRP1, and SLC45A2, |
| oculocutaneous albinism (types | | | SLC24A5 and C10orf11 |
| 1-7) and ocular albinism) | | | |
| Alkaptonuria | Metabolism of | Tissues/organs | HGD |
| | amino acids | where | |
| | | homogentisic | |
| | | acid | |
| | | accumulates, | |
| | | particularly | |
| | | cartilage (joints), | |
| | | heart valves, | |
| | | kidneys | |
| alpha-1 antitrypsin deficiency | Lung | Liver, skin, | SERPINA1, those set forth in |
| (AATD or A1AD) | | vascular system, | WO2017165862, PiZ allele |
| | | kidneys, GI | |
| ALS | CNS | | SOD1; ALS2; ALS3; ALS5; |
| | | | ALS7; STEX; FUS; TARDBP; VEGF |
| | | | (VEGF-a; |
| | | | VEGF-b; VEGF-c); DPP6; NEFH, |
| | | | PTGS1, SLC1A2, TNFRSF10B, |
| | | | PRPH, HSP90AA1, CRIA2, IFNG, |
| | | | AMPA2 S100B, FGF2, AOX1, CS, |
| | | | TXN, RAPHJ1, MAP3K5, NBEAL1, |
| | | | GPX1, ICA1L, RAC1, MAPT, ITPR2, |
| | | | ALS2CR4, GLS, ALS2CR8, CNTFR, |
| | | | ALS2CR11, FOLH1, FAM117B, |
| | | | P4HB, CNTF, SQSTM1, STRADB, |
| | | | NAIP, NLR, YWHAQ, SLC33A1, |
| | | | TRAK2, SCA1, NIF3L1, NIF3, |
| | | | PARD3B, COX8A, CDK15, HECW1, |
| | | | HECT, C2, WW 15, NOS1, MET, |
| | | | SOD2, HSPB1, NEFL, CTSB, ANG, |
| | | | HSPA8, RNase A, VAPB, VAMP, |
| | | | SNCA, alpha HGF, CAT, ACTB, |
| | | | NEFM, TH, BCL2, FAS, CASP3, |
| | | | CLU, SMN1, G6PD, BAX, HSF1, |
| | | | RNF19A, JUN, ALS2CR12, HSPA5, |
| | | | MAPK14, APEX1, TXNRD1, NOS2, |
| | | | TIMP1, CASP9, XIAP, GLG1, EPO, |
| | | | VEGFA, ELN, GDNF, NFE2L2, |
| | | | SLC6A3, HSPA4, APOE, PSMB8, |
| | | | DCTN2, TIMP3, KIFAP3, SLC1A1, |
| | | | SMN2, CCNC, STUB1, ALS2, |
| | | | PRDX6, SYP, CABIN1, CASP1, |
| | | | GART, CDK5, ATXN3, RTN4, |
| | | | C1QB, VEGFC, HTT, PARK7, XDH, |
| | | | GFAP, MAP2, CYCS, FCGR3B, CCS, |
| | | | UBL5, MMP9m SLC18A3, TRPM7, |
| | | | HSPB2, AKT1, DEERL1, CCL2, |
| | | | NGRN, GSR, TPPP3, APAFI, |
| | | | BTBD10, GLUD1, CXCR4, S:C1A3, |
| | | | FLT1, PON1, AR, LIF, ERBB3, |
| | | | :GA:S1, CD44, TP53, TLR3, GRIA1, |
| | | | GAPDH, AMP A, GRIK1, DES, |
| | | | CHAT, FLT4, CHMP2B, BAG1, |
| | | | CHRNA4, GSS, BAK1, KDR, GSTP1, |
| | | | OGGI, IL6 |
| Alzheimer’s Disease | Brain | | E1; CHIP; UCH; UBB; Tan; LRP; |
| | | | PICALM; CLU; PS1; |
| | | | SORL1; CR1; VLDLR; UBA1; |
| | | | UBA3; CHIP28; AQP1; UCHL1; |
| | | | UCHL3; APP, AAA, CVAP, AD1, |
| | | | APOE, AD2, DCP1, ACE1, MPO, |
| | | | PACIP1, PAXIP1L, PTIP, A2M, |
| | | | BLMH, BMH, PSEN1, AD3, ALAS2, |
| | | | ABCA1, BIN1, BDNF, BTNL8, |
| | | | C1ORF49, CDH4, CHRNB2, |
| | | | CKLFSF2, CLEC4E, CR1L, CSF3R, |
| | | | CST3, CYP2C, DAPK1, ESR1, |
| | | | FCAR, FCGR3B, FFA2, FGA, GAB2, |
| | | | GALP, GAPDHS, GMPB, HP, HTR7, |
| | | | IDE, IF127, IFI6, IFIT2, IL1RN, IL- |
| | | | 1RA, IL8RA, IL8RB, JAG1, KCNJ15, |
| | | | LRP6, MAPT, MARK4, MPHOSPH1, |
| | | | MTHFR, NBN, NCSTN, NIACR2, |
| | | | NMNAT3, NTM, ORM1, P2RY13, |
| | | | PBEF1, PCK1, PICALM, PLAU, |
| | | | PLXNC1, PRNP, PSEN1, PSEN2, |
| | | | PTPRA, RALGPS2, RGSL2, |
| | | | SELENBP1, SLC25A37, SORL1, |
| | | | Mitoferrin-1, TF, TFAM, TNF, |
| | | | TNFRSF10C, UBE1C |
| Amyloidosis | | | APOA1, APP, AAA, CVAP, AD1, |
| | | | GSN, FGA, LYZ, TTR, PALB |
| Amyloid neuropathy | | | TTR, PALB |
| Anemia | Blood | | CDAN1, CDA1, RPS19, DBA, PKLR, |
| | | | PK1, NT5C3, UMPH1, PSN1, RHAG, |
| | | | RH50A, NRAMP2, SPTB, ALAS2, |
| | | | ANH1, ASB, ABCB7, ABC7, ASAT |
| Angelman Syndrome | Nervous system, | | UBE3A |
| | brain | | |
| Attention Deficit Hyperactivity | Brain | | PTCHD1 |
| Disorder (ADHD) | | | |
| Autoimmune lymphoproliferative | Immune system | | TNFRSF6, APT1, FAS, CD95, |
| syndrome | | | ALPS1A |
| Autism, Autism spectrum | Brain | | PTCHD1; Mecp2; BZRAP1; MDGA2; |
| disorders (ASDs), including | | | Sema5A; Neurexin 1; GLO1, RTT, |
| Asperger's and a general | | | PPMX, MRX16, RX79, NLGN3, |
| diagnostic category called | | | NLGN4, KIAA1260, AUTSX2, |
| Pervasive Developmental | | | FMR1, FMR2; FXR1; FXR2; |
| Disorders (PDDs) | | | MGLUR5, ATP10C, CDH10, GRM6, |
| | | | MGLUR6, CDH9, CNTN4, NLGN2, |
| | | | CNTNAP2, SEMA5A, DHCR7, |
| | | | NLGN4X, NLGN4Y, DPP6, NLGN5, |
| | | | EN2, NRCAM, MDGA2, NRXN1, |
| | | | FMR2, AFF2, FOXP2, OR4M2, |
| | | | OXTR, FXR1, FXR2, PAH, |
| | | | GABRA1, PTEN, GABRA5, PTPRZ1, |
| | | | GABRB3, GABRG1, HIRIP3, |
| | | | SEZ6L2, HOXA1, SHANK3, IL6, |
| | | | SHBZRAP1, LAMB1, SLC6A4, |
| | | | SERT, MAPK3, TAS2R1, MAZ, |
| | | | TSC1, MDGA2, TSC2, MECP2, |
| | | | UBE3A, WNT2, see also |
| | | | 20110023145 |
| autosomal dominant polycystic | kidney | liver | PKD1, PKD2 |
| kidney disease (ADPKD) - | | | |
| (includes diseases such as von | | | |
| Hippel-Lindau disease and | | | |
| tuberous sclerosis complex | | | |
| disease) | | | |
| Autosomal Recessive Polycystic | kidney | liver | PKDH1 |
| Kidney Disease (ARPKD) | | | |
| Ataxia-Telangiectasia (a.k.a | Nervous system, | various | ATM |
| Louis Bar syndrome) | immune system | | |
| B-Cell Non-Hodgkin Lymphoma | | | BCL7A, BCL7 |
| Bardet-Biedl syndrome | Eye, | Liver, ear, | ARL6, BBS1, BBS2, BBS4, BBS5, |
| | musculoskeletal | gastrointestinal | BBS7, BBS9, BBS10, BBS12, |
| | system, kidney, | system, brain | CEP290, INPP5E, LZTFL1, MKKS, |
| | reproductive | | MKS1, SDCCAG8, TRIM32, TTC8 |
| | organs | | |
| Bare Lymphocyte Syndrome | blood | | TAPBP, TPSN, TAP2, ABCB3, PSF2, |
| | | | RING11, MHC2TA, C2TA, RFX5, |
| | | | RFXAP, RFX5 |
| Bartter’s Syndrome (types I, II, | kidney | | SLC12A1 (type I), KCNJ1 (type II), |
| III, IVA and B, and V) | | | CLCNKB (type III), BSND (type IV |
| | | | A), or both the CLCNKA CLCNKB |
| | | | genes (type IV B), CASR (type V). |
| Becker muscular dystrophy | Muscle | | DMD, BMD, MYF6 |
| Best Disease (Vitelliform | eye | | VMD2 |
| Macular Dystrophy type 2) | | | |
| Bleeding Disorders | blood | | TBXA2R, P2RX1, P2X1 |
| Blue Cone Monochromacy | eye | | OPN1LW, OPN1MW, and LCR |
| Breast Cancer | Breast tissue | | BRCA1, BRCA2, COX-2 |
| Bruton's Disease (aka X-linked | Immune system, | | BTK |
| Agammglobulinemia) | specifically B | | |
| | cells | | |
| Cancers (e.g., lymphoma, chronic | Various | | FAS, BID, CTLA4, PDCD1, CBLB, |
| lymphocytic leukemia (CLL), B | | | PTPN6, TRAC, TRBC, those |
| cell acute lymphocytic leukemia | | | described in WO2015048577 |
| (B-ALL), acute lymphoblastic | | | |
| leukemia, acute myeloid | | | |
| leukemia, non-Hodgkin's | | | |
| lymphoma (NHL), diffuse large | | | |
| cell lymphoma (DLCL), multiple | | | |
| myeloma, renal cell carcinoma | | | |
| (RCC), neuroblastoma, colorectal | | | |
| cancer, breast cancer, ovarian | | | |
| cancer, melanoma, sarcoma, | | | |
| prostate cancer, lung cancer, | | | |
| esophageal cancer, hepatocellular | | | |
| carcinoma, pancreatic cancer, | | | |
| astrocytoma, mesothelioma, head | | | |
| and neck cancer, and | | | |
| medulloblastoma | | | |
| Cardiovascular Diseases | heart | Vascular system | IL1B, XDH, TP53, PTGS, MB, IL4, |
| | | | ANGPT1, ABCGu8, CTSK, PTGIR, |
| | | | KCNJ11, INS, CRP, PDGFRB, |
| | | | CCNA2, PDGFB, KCNJ5, KCNN3, |
| | | | CAPN10, ADRA2B, ABCG5, |
| | | | PRDX2, CPAN5, PARP14, MEX3C, |
| | | | ACE, RNF, IL6, TNF, STN, |
| | | | SERPINE1, ALB, ADIPOQ, APOB, |
| | | | APOE, LEP, MTHFR, APOA1, |
| | | | EDN1, NPPB, NOS3, PPARG, PLAT, |
| | | | PTGS2, CETP, AGTR1, HMGCR, |
| | | | IGF1, SELE, REN, PPARA, PON1, |
| | | | KNG1, CCL2, LPL, VWF, F2, |
| | | | ICAM1, TGFB, NPPA, IL10, EPO, |
| | | | SOD1, VCAM1, IFNG, LPA, MPO, |
| | | | ESR1, MAPK, HP, F3, CST3, COG2, |
| | | | MMP9, SERPINC1, F8, HMOX1, |
| | | | APOC3, IL8, PROL1, CBS, NOS2, |
| | | | TLR4, SELP, ABCA1, AGT, LDLR, |
| | | | GPT, VEGFA, NR3C2, IL18, NOS1, |
| | | | NR3C1, FGB, HGF, IL1A, AKT1, |
| | | | LIPC, HSPD1, MAPK14, SPP1, |
| | | | ITGB3, CAT, UTS2, THBD, F10, CP, |
| | | | TNFRSF11B, EGFR, MMP2, PLG, |
| | | | NPY, RHOD, MAPK8, MYC, FN1, |
| | | | CMA1, PLAU, GNB3, ADRB2, |
| | | | SOD2, F5, VDR, ALOX5, HLA- |
| | | | DRB1, PARP1, CD40LG, PON2, |
| | | | AGER, IRS1, PTGS1, ECE1, F7, |
| | | | IRMN, EPHX2, IGFBP1, MAPK10, |
| | | | FAS, ABCB1, JUN, IGFBP3, CD14, |
| | | | PDE5A, AGTR2, CD40, LCAT, |
| | | | CCR5, MMP1, TIMP1, ADM, |
| | | | DYT10, STAT3, MMP3, ELN, USF1, |
| | | | CFH, HSPA4, MMP12, MME, F2R, |
| | | | SELL, CTSB, ANXA5, ADRB1, |
| | | | CYBA, FGA, GGT1, LIPG, HIF1A, |
| | | | CXCR4, PROC, SCARB1, CD79A, |
| | | | PLTP, ADD1, FGG, SAA1, KCNH2, |
| | | | DPP4, NPR1, VTN, KIAA0101, FOS, |
| | | | TLR2, PPIG, IL1R1, AR, CYP1A1, |
| | | | SERPINA1, MTR, RBP4, APOA4, |
| | | | CDKN2A, FGF2, EDNRB, ITGA2, |
| | | | VLA-2, CABIN1, SHBG, HMGB1, |
| | | | HSP90B2P, CYP3A4, GJA1, CAV1, |
| | | | ESR2, LTA, GDF15, BDNF, |
| | | | CYP2D6, NGF, SP1, TGIF1, SRC, |
| | | | EGF, PIK3CG, HLA-A, KCNQ1, |
| | | | CNR1, FBN1, CHKA, BEST1, |
| | | | CTNNB1, IL2, CD36, PRKAB1, TPO, |
| | | | ALDH7A1, CX3CR1, TH, F9, CH1, |
| | | | TF, HFE, IL17A, PTEN, GSTM1, |
| | | | DMD, GATA4, F13A1, TTR, FABP4, |
| | | | PON3, APOC1, INSR, TNFRSF1B, |
| | | | HTR2A, CSF3, CYP2C9, TXN, |
| | | | CYP11B2, PTH, CSF2, KDR, |
| | | | PLA2G2A, THBS1, GCG, RHOA, |
| | | | ALDH2, TCF7L2, NFE2L2, |
| | | | NOTCH1, UGT1A1, IFNA1, PPARD, |
| | | | SIRT1, GNHR1, PAPPA, ARR3, |
| | | | NPPC, AHSP, PTK2, IL13, MTOR, |
| | | | ITGB2, GSTT1, IL6ST, CPB2, |
| | | | CYP1A2, HNF4A, SLC64A, |
| | | | PLA2G6, TNFSF11, SLC8A1, F2RL1, |
| | | | AKR1A1, ALDH9A1, BGLAP, |
| | | | MTTP, MTRR, SULT1A3, RAGE, |
| | | | C4B, P2RY12, RNLS, CREB1, |
| | | | POMC, RAC1, LMNA, CD59, |
| | | | SCM5A, CYP1B1, MIF, MMP13, |
| | | | TIMP2, CYP19A1, CUP21A2, |
| | | | PTPN22, MYH14, MBL2, SELPLG, |
| | | | AOC3, CTSL1, PCNA, IGF2, ITGB1, |
| | | | CAST, CXCL12, IGHE, KCNE1, |
| | | | TFRC, COL1A1, COL1A2, IL2RB, |
| | | | PLA2G10, ANGPT2, PROCR, NOX4, |
| | | | HAMP, PTPN11, SLCA1, IL2RA, |
| | | | CCL5, IRF1, CF:AR, CA:CA, EIF4E, |
| | | | GSTP1, JAK2, CYP3A5, HSPG2, |
| | | | CCL3, MYD88, VIP, SOAT1, |
| | | | ADRBK1, NR4A2, MMP8, NPR2, |
| | | | GCH1, EPRS, PPARGC1A, F12, |
| | | | PECAM1, CCL4, CERPINA34, |
| | | | CASR, FABP2, TTF2, PROS1, CTF1, |
| | | | SGCB, YME1L1, CAMP, ZC3H12A, |
| | | | AKR1B1, MMP7, AHR, CSF1, |
| | | | HDAC9, CTGF, KCNMA1, UGT1A, |
| | | | PRKCA, COMT, S100B, EGR1, PRL, |
| | | | IL15, DRD4, CAMK2G, SLC22A2, |
| | | | CCL11, PGF, THPO, GP6, TACR1, |
| | | | NTS, HNF1A, SST, KCDN1, |
| | | | LOC646627, TBXAS1, CUP2J2, |
| | | | TBXA2R, ADH1C, ALOX12, AHSG, |
| | | | BHMT, GJA4, SLC25A4, ACLY, |
| | | | ALOX5AP, NUMA1, CYP27B1, |
| | | | CYSLTR2, SOD3, LTC4S, UCN, |
| | | | GHRL, APOC2, CLEC4A, |
| | | | KBTBD10, TNC, TYMS, SHC1, |
| | | | LRP1, SOCS3, ADH1B, KLK3, |
| | | | HSD11B1, VKORC1, SERPINB2, |
| | | | TNS1, RNF19A, EPOR, ITGAM, |
| | | | PITX2, MAPK7, FCGR3A, LEEPR, |
| | | | ENG, GPX1, GOT2, HRH1, NR112, |
| | | | CRH, HTR1A, VDAC1, HPSE, |
| | | | SFTPD, TAP2, RMF123, PTK2Bm |
| | | | NTRK2, IL6R, ACHE, GLP1R, GHR, |
| | | | GSR, NQO1, NR5A1, GJB2, |
| | | | SLC9A1, MAOA, PCSK9, FCGR2A, |
| | | | SERPINF1, EDN3, UCP2, TFAP2A, |
| | | | C4BPA, SERPINF2, TYMP, ALPP, |
| | | | CXCR2, SLC3A3, ABCG2, ADA, |
| | | | JAK3, HSPA1A, FASN, FGF1, F11, |
| | | | ATP7A, CR1, GFPA, ROCK1, |
| | | | MECP2, MYLK, BCHE, LIPE, |
| | | | ADORA1, WRN, CXCR3, CD81, |
| | | | SMAD7, LAMC2, MAP3K5, CHGA, |
| | | | IAPP, RHO, ENPP1, PTHLH, NRG1, |
| | | | VEGFC, ENPEP, CEBPB, NAGLU,. |
| | | | F2RL3, CX3CL1, BDKRB1, |
| | | | ADAMTS13, ELANE, ENPP2, CISH, |
| | | | GAST, MYOC, ATP1A2, NF1, GJB1, |
| | | | MEF2A, VCL, BMPR2, TUBB, |
| | | | CDC42, KRT18, HSF1, MYB, |
| | | | PRKAA2, ROCK2, TFP1, PRKG1, |
| | | | BMP2, CTNND1, CTH, CTSS, |
| | | | VAV2, NPY2R, IGFBP2, CD28, |
| | | | GSTA1, PPIA, APOH, S100A8, IL11, |
| | | | ALOX15, FBLN1, NR1H3, SCD, GIP, |
| | | | CHGB, PRKCB, SRD5A1, HSD11B2, |
| | | | CALCRL, GALNT2, ANGPTL4, |
| | | | KCNN4, PIK3C2A, HBEGF, |
| | | | CYP7A1, HLA-DRB5, BNIP3, |
| | | | GCKR, S100A12, PADI4, HSPA14, |
| | | | CXCR1, H19, KRTAP19-3, IDDM2, |
| | | | RAC2, YRY1, CLOCK, NGFR, DBH, |
| | | | CHRNA4, CACNA1C, PRKAG2, |
| | | | CHAT, PTGDS, NR1H2, TEK, |
| | | | VEGFB, MEF2C, MAPKAPK2, |
| | | | TNFRSF11A, HSPA9, CYSLTR1, |
| | | | MAT1A, OPRL1, IMPA1, CLCN2, |
| | | | DLD, PSMA6, PSMB8, CHI3L1, |
| | | | ALDH1B1, PARP2, STAR, LBP, |
| | | | ABCC6, RGS2, EFNB2, GJB6, |
| | | | APOA2, AMPD1, DYSF, |
| | | | FDFT1, EMD2, CCR6, GJB3, IL1RL1, |
| | | | ENTPD1, BBS4, CELSR2, F11R, |
| | | | RAPGEF3, HYAL1, ZNF259, |
| | | | ATOX1, ATF6, KHK, SAT1, GGH, |
| | | | TIMP4, SLC4A4, PDE2A, PDE3B, |
| | | | FADS1, FADS2, TMSB4X, TXNIP, |
| | | | LIMS1, RHOB, LY96, FOXO1, |
| | | | PNPLA2, TRH, GJC1, S:C17A5, FTO, |
| | | | GJD2, PRSC1, CASP12, GPBAR1, |
| | | | PXK, IL33, TRIB1, PBX4, NUPR1, |
| | | | 15-SEP, CILP2, TERC, GGT2, |
| | | | MTCO1, UOX, AVP |
| Cataract | eye | | CRYAA, CRYA1, CRYBB2, CRYB2, |
| | | | PITX3, BFSP2, CP49, CP47, CRYAA, |
| | | | CRYA1, PAX6, AN2, MGDA, |
| | | | CRYBA1, CRYB1, CRYGC, CRYG3, |
| | | | CCL, LIM2, MP19, CRYGD, CRYG4, |
| | | | BFSP2, CP49, CP47, HSF4, CTM, |
| | | | HSF4, CTM, MIP, AQP0, CRYAB, |
| | | | CRYA2, CTPP2, CRYBB1, CRYGD, |
| | | | CRYG4, CRYBB2, CRYB2, CRYGC, |
| | | | CRYG3, CCL, CRYAA, CRYA1, |
| | | | GJA8, CX50, CAE1, GJA3, CX46, |
| | | | CZP3, CAE3, CCM1, CAM, KRIT1 |
| CDKL-5 Deficiencies or | Brain, CNS | | CDKL5 |
| Mediated Diseases | | | |
| Charcot-Marie-Tooth (CMT) | Nervous system | Muscles | PMP22 (CMT1A and E), MPZ |
| disease (Types 1, 2, 3, 4,) | | (dystrophy) | (CMT1B), LITAF (CMT1C), EGR2 |
| | | | (CMT1D), NEFL (CMT1F), GJB1 |
| | | | (CMT1X), MFN2 (CMT2A), KIF1B |
| | | | (CMT2A2B), RAB7A (CMT2B), |
| | | | TRPV4 (CMT2C), GARS (CMT2D), |
| | | | NEFL (CMT2E), GAPD1 (CMT2K), |
| | | | HSPB8 (CMT2L), DYNC1H1, |
| | | | CMT2O), LRSAM1 (CMT2P), |
| | | | IGHMBP2 (CMT2S), MORC2 |
| | | | (CMT2Z), GDAP1 (CMT4A), |
| | | | MTMR2 or SBF2/MTMR13 |
| | | | (CMT4B), SH3TC2 (CMT4C), |
| | | | NDRG1 (CMT4D), PRX (CMT4F), |
| | | | FIG4 (CMT4J), NT-3 |
| Chédiak-Higashi Syndrome | Immune system | Skin, hair, eyes, | LYST |
| | | neurons | |
| Choroidermia | | | CHM, REP1, |
| Chorioretinal atrophy | eye | | PRDM13, RGR, TEAD1 |
| Chronic Granulomatous Disease | Immune system | | CYBA, CYBB, NCF1, NCF2, NCF4 |
| Chronic Mucocutaneous | Immune system | | AIRE, CARD9, CLEC7A IL12B, |
| Candidiasis | | | IL12B1, IL1F, IL17RA, IL17RC, |
| | | | RORC, STAT1, STAT3, TRAF31P2 |
| Cirrhosis | liver | | KRT18, KRT8, CIRH1A, NAIC, |
| | | | TEX292, KIAA1988 |
| Colon cancer (Familial | Gastrointestinal | | FAP: APC HNPCC: |
| adenomatous polyposis (FAP) | | | MSH2, MLH1, PMS2, SH6, PMS1 |
| and hereditary nonpolyposis | | | |
| colon cancer (HNPCC)) | | | |
| Combined Immunodeficiency | Immune System | | IL2RG, SCIDX1, SCIDX, IMD4); |
| | | | HIV-1 (CCL5, SCYA5, D17S136E, |
| | | | TCP228 |
| Cone(-rod) dystrophy | eye | | AIPL1, CRX, GUA1A, GUCY2D, |
| | | | PITPM3, PROM1, PRPH2, RIMS1, |
| | | | SEMA4A, ABCA4, ADAM9, ATF6, |
| | | | C21ORF2, C8ORF37, CACNA2D4, |
| | | | CDHR1, CERKL, CNGA3, CNGB3, |
| | | | CNNM4, CNAT2, IFT81, KCNV2, |
| | | | PDE6C, PDE6H, POC1B, RAX2, |
| | | | RDH5, RPGRIP1, TTLL5, RetCG1, |
| | | | GUCY2E |
| Congenital Stationary Night | eye | | CABP4, CACNA1F, CACNA2D4, |
| Blindness | | | GNAT1, CPR179, GRK1, GRM6, |
| | | | LRIT3, NYX, PDE6B, RDH5, RHO, |
| | | | RLBP1, RPE65, SAG, SLC24A1, |
| | | | TRPM1, |
| Congenital Fructose Intolerance | Metabolism | | ALDOB |
| Cori's Disease (Glycogen Storage | Various- | | AGL |
| Disease Type III) | wherever | | |
| | glycogen | | |
| | accumulates, | | |
| | particularly | | |
| | liver, heart, | | |
| | skeletal muscle | | |
| Corneal clouding and dystrophy | eye | | APOA1, TGFBI, CSD2, CDGG1, |
| | | | CSD, BIGH3, CDG2, TACSTD2, |
| | | | TROP2, M1S1, VSX1, RINX, PPCD, |
| | | | PPD, KTCN, COL8A2, FECD, |
| | | | PPCD2, PIP5K3, CFD |
| Cornea plana congenital | | | KERA, CNA2 |
| Cri du chat Syndrome, also | | | Deletions involving only band 5p15.2 |
| known as 5p syndrome and cat | | | to the entire short arm of chromosome |
| cry syndrome | | | 5, e.g. CTNND2, TERT, |
| Cystic Fibrosis (CF) | Lungs and | Pancreas, liver, | CTFR, ABCC7, CF, MRP7, SCNN1A, |
| | respiratory | digestive | those described in WO2015157070 |
| | system | system, | |
| | | reproductive | |
| | | system, | |
| | | exocrine, glands, | |
| Diabetic nephropathy | kidney | | Gremlin, 12/15- lipoxygenase, TIM44, |
| Dent Disease (Types 1 and 2) | Kidney | | Type 1: CLCN5, Type 2: ORCL |
| Dentatorubro-Pallidoluysian | CNS, brain, | | Atrophin-1 and Atn1 |
| Atrophy (DRPLA) (aka Haw | muscle | | |
| River and Naito-Oyanagi | | | |
| Disease) | | | |
| Down Syndrome | various | | Chromosome 21 trisomy |
| Drug Addiction | Brain | | Prkce; Drd2; Drd4; ABAT; |
| | | | GRIA2; Grm5; Grin1; Htr1b; Grin2a; |
| | | | Drd3; Pdyn; Gria1 |
| Duane syndrome (Types 1, 2, and | eye | | CHN1, indels on chromosomes 4 and 8 |
| 3, including subgroups A, B and | | | |
| C). Other names for this | | | |
| condition include: Duane's | | | |
| Retraction Syndrome (or DR | | | |
| syndrome), Eye Retraction | | | |
| Syndrome, Retraction Syndrome, | | | |
| Congenital retraction syndrome | | | |
| and Stilling-Turk-Duane | | | |
| Syndrome | | | |
| Duchenne muscular dystrophy | muscle | Cardiovascular, | DMD, BMD, dystrophin gene, intron |
| (DMD) | | respiratory | flanking exon 51 of DMD gene, exon |
| | | | 51 mutations in DMD gene, see also |
| | | | WO2013163628 and US Pat. Pub. |
| | | | 20130145487 |
| Edward's Syndrome | | | Complete or partial trisomy of |
| (Trisomy 18) | | | chromosome 18 |
| Ehlers-Danlos Syndrome (Types | Various | | COL5A1, COL5A2, COL1A1, |
| I-VI) | depending on | | COL3A1, TNXB, PLOD1, COL1A2, |
| | type: including | | FKBP14 and ADAMTS2 |
| | musculoskeletal, | | |
| | eye, vasculature, | | |
| | immune, and | | |
| | skin | | |
| Emery-Dreifuss muscular | muscle | | LMNA, LMN1, EMD2, FPLD, |
| dystrophy | | | CMD1A, HGPS, LGMD1B, LMNA, |
| | | | LMN1, EMD2, FPLD, CMD1A |
| Enhanced S-Cone Syndrome | eye | | NR2E3, NRL |
| Fabry's Disease | Various - | | GLA |
| | including skin, | | |
| | eyes, and | | |
| | gastrointestinal | | |
| | system, kidney, | | |
| | heart, brain, | | |
| | nervous system | | |
| Facioscapulohumeral muscular | muscles | | FSHMD1A, FSHD1A, FRG1, |
| dystrophy | | | |
| Factor H and Factor H-like 1 | blood | | HF1, CFH, HUS |
| Factor V Leiden thrombophilia | blood | | Factor V (F5) |
| and Factor V deficiency | | | |
| Factor V and Factor VII | blood | | MCFD2 |
| deficiency | | | |
| Factor VII deficiency | blood | | F7 |
| Factor X deficiency | blood | | F10 |
| Factor XI deficiency | blood | | F11 |
| Factor XII deficiency | blood | | F12, HAF |
| Factor XIIIA deficiency | blood | | F13A1, F13A |
| Factor XIIIB deficiency | blood | | F13B |
| Familial Hypercholestereolemia | Cardiovascular | | APOB, LDLR, PCSK9 |
| | system | | |
| Familial Mediterranean Fever | Various- | Heart, kidney, | MEFV |
| (FMF) also called recurrent | organs/tissues | brain/CNS, | |
| polyserositis or familial | with serous or | reproductive | |
| paroxysmal polyserositis | synovial | organs | |
| | membranes, | | |
| | skin, joints | | |
| Fanconi Anemia | Various - blood | | FANCA, FACA, FA1, FA, FAA, |
| | (anemia), | | FAAP95, FAAP90, FLJ34064, |
| | immune system, | | FANCC, FANCG, RAD51, BRCA1, |
| | cognitive, | | BRCA2, BRIP1, BACH1, FANCJ, |
| | kidneys, eyes, | | FANCB, FANCD1, FANCD2, |
| | musculoskeletal | | FANCD, FAD, FANCE, FACE, |
| | | | FANCF, FANCI, ERCC4, FANCL, |
| | | | FANCM, PALB2, RAD51C, SLX4, |
| | | | UBE2T, FANCB, XRCC9, PHF9, |
| | | | KIAA1596 |
| Fanconi Syndrome Types I | kidneys | | FRTS1, GATM |
| (Childhood onset) and II (Adult | | | |
| Onset) | | | |
| Fragile X syndrome and related | brain | | FMR1, FMR2; FXR1; FXR2; |
| disorders | | | mGLUR5 |
| Fragile XE Mental Retardation | Brain, nervous | | FMR1 |
| (aka Martin Bell syndrome) | system | | |
| Friedreich Ataxia (FRDA) | Brain, nervous | heart | FXN/X25 |
| | system | | |
| Fuchs endothelial corneal | Eye | | TCF4; COL8A2 |
| dystrophy | | | |
| Galactosemia | Carbohydrate | Various-where | GALT, GALK1, and GALE |
| | metabolism | galactose | |
| | disorder | accumulates - | |
| | | liver, brain, eyes | |
| Gastrointestinal Epithelial | | | CISH |
| Cancer, GI cancer | | | |
| Gaucher Disease (Types 1, 2, and | Fat metabolism | Various-liver, | GBA |
| 3, as well as other unusual forms | disorder | spleen, blood, | |
| that may not fit into these types) | | CNS, skeletal | |
| | | system | |
| Griscelli syndrome | | | |
| Glaucoma | eye | | MYOC, TIGR, GLC1A, JOAG, |
| | | | GPOA, OPTN, GLC1E, FIP2, HYPL, |
| | | | NRP, CYP1B1, GLC3A, OPA1, NTG, |
| | | | NPG, CYP1B1, GLC3A, those |
| | | | described in WO2015153780 |
| Glomerulo sclerosis | kidney | | CC chemokine ligand 2 |
| Glycogen Storage Diseases | Metabolism | | SLC2A2, GLUT2, G6PC, G6PT, |
| Types I-VI -See also Cori’s | Diseases | | G6PT1, GAA, LAMP2, LAMPB, |
| Disease, Pompe’s Disease, | | | AGL, GDE, GBE1, GYS2, PYGL, |
| McArdle’s disease, Hers Disease, | | | PFKM, see also Cori’s Disease, |
| and Von Gierke’s disease | | | Pompe’s Disease, McArdle’s disease, |
| | | | Hers Disease, and Von Gierke’s |
| | | | disease |
| RBC Glycolytic enzyme | blood | | any mutations in a gene for an enzyme |
| deficiency | | | in the glycolysis pathway including |
| | | | mutations in genes for hexokinases I |
| | | | and II, glucokinase, phosphoglucose |
| | | | isomerase, phosphofructokinase, |
| | | | aldolase Bm triosephosphate |
| | | | isomerease, glyceraldehydee-3- |
| | | | phosphate dehydrogenase, |
| | | | phosphoglycerokinase, |
| | | | phosphoglycerate mutase, enolase I, |
| | | | pyruvate kinase |
| Hartnup's disease | Malabsorption | Various- brain, | SLC6A19 |
| | disease | gastrointestinal, | |
| | | skin, | |
| Hearing Loss | ear | | NOX3, Hes5, BDNF, |
| Hemochromatosis (HH) | Iron absorption | Various- | HFE and H63D |
| | regulation | wherever iron | |
| | disease | accumulates, | |
| | | liver, heart, | |
| | | pancreas, joints, | |
| | | pituitary gland | |
| Hemophagocytic | blood | | PRF1, HPLH2, UNC13D, MUNC13- |
| lymphohistiocytosis disorders | | | 4, HPLH3, HLH3, FHL3 |
| Hemorrhagic disorders | blood | | PI, ATT, F5 |
| Hers disease (Glycogen storage | liver | muscle | PYGL |
| disease Type VI) | | | |
| Hereditary angioedema (HAE) | | | kalikrein B1 |
| Hereditary Hemorrhagic | Skin and | | ACVRL1, ENG and SMAD4 |
| Telangiectasia (Osler-Weber- | mucous | | |
| Rendu Syndrome) | membranes | | |
| Hereditary Spherocytosis | blood | | NK1, EPB42, SLC4A1, SPTA1, and |
| | | | SPTB |
| Hereditary Persistence of Fetal | blood | | HBG1, HBG2, BCL11A, promoter |
| Hemoglobin | | | region of HBG 1 and/or 2 (in the |
| | | | CCAATbox) |
| Hemophilia (hemophilia A | blood | | A: FVIII, F8C, HEMA |
| (Classic) a B (aka Christmas | | | B: FVIX, HEMB |
| disease) and C) | | | C: F9, F11 |
| Hepatic adenoma | liver | | TCF1, HNF1A, MODY3 |
| Hepatic failure, early onset, and | liver | | SCOD1, SCO1 |
| neurologic disorder | | | |
| Hepatic lipase deficiency | liver | | LIPC |
| Hepatoblastoma, cancer and | liver | | CTNNB1, PDGFRL, PDGRL, PRLTS, |
| carcinomas | | | AXIN1, AXIN, CTNNB1, TP53, P53, |
| | | | LFS1, IGF2R, MPRI, MET, CASP8, |
| | | | MCH5 |
| Hermansky-Pudlak syndrome | Skin, eyes, | | HPS1, HPS3, HPS4, HPS5, HPS6, |
| | blood, lung, | | HPS7, DTNBP1, BLOC1, BLOC1S2, |
| | kidneys, | | BLOC3 |
| | intestine | | |
| HIV susceptibility or infection | Immune system | | IL10, CSIF, CMKBR2, CCR2, |
| | | | CMKBR5, CCCKR5 (CCR5), those in |
| | | | WO2015148670A1 |
| Holoprosencephaly (HPE) | brain | | ACVRL1, ENG, SMAD4 |
| (Alobar, Semilobar, and Lobar) | | | |
| Homocystinuria | Metabolic | Various- | CBS, MTHFR, MTR, MTRR, and |
| | disease | connective | MMADHC |
| | | tissue, muscles, | |
| | | CNS, | |
| | | cardiovascular | |
| | | system | |
| HPV | | | HPV16 and HPV18 E6/E7 |
| HSV1, HSV2, and related | eye | | HSV1 genes (immediate early and late |
| keratitis | | | HSV-1 genes (UL1, 1.5, 5, 6, 8, 9, 12, |
| | | | 15, 16, 18, 19, 22, 23, 26, 26.5, 27, 28, |
| | | | 29, 30, 31, 32, 33, 34, 35, 36, 37, 38, |
| | | | 42, 48, 49.5, 50, 52, 54, S6, RL2, RS1, |
| | | | those described in WO2015153789, |
| | | | WO2015153791 |
| Hunter's Syndrome (aka | Lysosomal | Various- liver, | IDS |
| Mucopolysaccharidosis type II) | storage disease | spleen, eye, | |
| | | joint, heart, | |
| | | brain, skeletal | |
| Huntington's disease (HD) and | Brain, nervous | | HD, HTT, IT15, PRNP, PRIP, JPH3, |
| HD-like disorders | system | | JP3, HDL2, TBP, SCA17, PRKCE; |
| | | | IGF1; EP300; RCOR1; PRKCZ; |
| | | | HDAC4; and TGM2, and those |
| | | | described in WO2013130824, |
| | | | WO2015089354 |
| Hurler's Syndrome (aka | Lysosomal | Various- liver, | IDUA, α-L-iduronidase |
| mucopolysaccharidosis type IH, | storage disease | spleen, eye, | |
| MPS IH) | | joint, heart, | |
| | | brain, skeletal | |
| Hurler-Scheie syndrome (aka | Lysosomal | Various- liver, | IDUA, α-L-iduronidase |
| mucopolysaccharidosis type I | storage disease | spleen, eye, | |
| H-S, MPS I H-S) | | joint, heart, | |
| | | brain, skeletal | |
| hyaluronidase deficiency (aka | Soft and | | HYAL1 |
| MPS IX) | connective | | |
| | tissues | | |
| Hyper IgM syndrome | Immune system | | CD40L |
| Hyper- tension caused renal | kidney | | Mineral corticoid receptor |
| damage | | | |
| Immunodeficiencies | Immune System | | CD3E, CD3G, AICDA, AID, HIGM2, |
| | | | TNFRSF5, CD40, UNG, DGU, |
| | | | HIGM4, TNFSF5, CD40LG, HIGM1, |
| | | | IGM, FOXP3, IPEX, AIID, XPID, |
| | | | PIDX, TNFRSF14B, TACI |
| Inborn errors of metabolism: | Metabolism | Various organs | See also: Carbohydrate metabolism |
| including urea cycle disorders, | diseases, liver | and cells | disorders (e.g. galactosemia), Amino |
| organic acidemias), fatty acid | | | acid Metabolism disorders (e.g. |
| oxidation defects, amino | | | phenylketonuria), Fatty acid |
| acidopathies, carbohydrate | | | metabolism (e.g. MCAD deficiency), |
| disorders, mitochondrial | | | Urea Cycle disorders (e.g. |
| disorders | | | Citrullinemia), Organic acidemias (e.g. |
| | | | Maple Syrup Urine disease), |
| | | | Mitochondrial disorders (e.g. |
| | | | MELAS), peroxisomal disorders (e.g. |
| | | | Zellweger syndrome) |
| Inflammation | Various | | IL-10; IL-1 (IL-1a; IL-1b); IL-13; IL- |
| | | | 17 (IL-17a (CTLA8); IL- |
| | | | 17b; IL-17c; IL-17d; IL-17f); II-23; |
| | | | Cx3cr1; ptpn22; TNFa; |
| | | | NOD2/CARD15 for IBD; IL-6; IL-12 |
| | | | (IL-12a; IL-12b); |
| | | | CTLA4; Cx3cl1 |
| Inflammatory Bowel Diseases | Gastrointestinal | Joints, skin | NOD2, IRGM, LRRK2, ATG5, |
| (e.g. Ulcerative Colitis and | | | ATG16L1, IRGM, GATM, ECM1, |
| Chron's Disease) | | | CDH1, LAMB1, HNF4A, GNA12, |
| | | | IL10, CARD9/15. CCR6, IL2RA, |
| | | | MST1, TNFSF15, REL, STAT3, |
| | | | IL23R, IL12B, FUT2 |
| Interstitial renal fibrosis | kidney | | TGF-β type II receptor |
| Job's Syndrome (aka Hyper IgE | Immune System | | STAT3, DOCK8 |
| Syndrome) | | | |
| Juvenile Retinoschisis | eye | | RS1, XLRS1 |
| Kabuki Syndrome 1 | | | MLL4, KMT2D |
| Kennedy Disease (aka | Muscles, brain, | | SBMA/SMAX1/AR |
| Spinobulbar Muscular Atrophy) | nervous system | | |
| Klinefelter syndrome | Various- | | Extra X chromosome in males |
| | particularly | | |
| | those involved | | |
| | in development | | |
| | of male | | |
| | characteristics | | |
| Lafora Disease | Brain, CNS | | EMP2A and EMP2B |
| Leber Congenital Amaurosis | eye | | CRB1, RP12, CORD2, CRD, CRX, |
| | | | IMPDH1, OTX2, AIPL1, CABP4, |
| | | | CCT2, CEP290, CLUAP1, CRB1, |
| | | | CRX, DTHD1, GDF6, GUCY2D, |
| | | | IFT140, IQCB1, KCNJ13, LCA5, |
| | | | LRAT, NMNAT1, PRPH2, RD3, |
| | | | RDH12, RPE65, RP20, RPGRIP1, |
| | | | SPATA7, TULP1, LCA1, LCA4, |
| | | | GUC2D, CORD6, LCA3, |
| Lesch-Nyhan Syndrome | Metabolism | Various - joints, | HPRT1 |
| | disease | cognitive, brain, | |
| | | nervous system | |
| Leukocyte deficiencies and | blood | | ITGB2, CD18, LCAMB, LAD, |
| disorders | | | EIF2B1, EIF2BA, EIF2B2, EIF2B3, |
| | | | EIF2B5, LVWM, CACH, CLE, |
| | | | EIF2B4 |
| Leukemia | Blood | | TAL1, TCL5, SCL, TAL2, FLT3, |
| | | | NBS1, NBS, ZNFN1A1, IK1, LYF1, |
| | | | HOXD4, HOX4B, BCR, CML, PHL, |
| | | | ALL, ARNT, KRAS2, RASK2, |
| | | | GMPS, AF10, ARHGEF12, LARG, |
| | | | KIAA0382, CALM, CLTH, CEBPA, |
| | | | CEBP, CHIC2, BTL, FLT3, KIT, |
| | | | PBT, LPP, NPM1, NUP214, D9S46E, |
| | | | CAN, CAIN, RUNX1, CBFA2, |
| | | | AML1, WHSC1L1, NSD3, FLT3, |
| | | | AFIQ, NPM1, NUMA1, ZNF145, |
| | | | PLZF, PML, MYL, STAT5B, AF10, |
| | | | CALM, CLTH, ARL11, ARLTS1, |
| | | | P2RX7, P2X7, BCR, CML, PHL, |
| | | | ALL, GRAF, NF1, VRNF, WSS, |
| | | | NFNS, PTPN11, PTP2C, SHP2, NS1, |
| | | | BCL2, CCND1, PRAD1, BCL1, |
| | | | TCRA, GATA1, GF1, ERYF1, NFE1, |
| | | | ABL1, NQO1, DIA4, NMOR1, |
| | | | NUP214, D9S46E, CAN, CAIN |
| Limb-girdle muscular dystrophy | muscle | | LGMD |
| diseases | | | |
| Lowe syndrome | brain, eyes, | | OCRL |
| | kidneys | | |
| Lupus glomerulo-nephritis | kidney | | MAPKI |
| Machado- | Brain, CNS, | | ATX3 |
| Joseph’s Disease (also known as | muscle | | |
| Spinocerebellar ataxia Type 3) | | | |
| Macular degeneration | eye | | ABC4, CBC1, CHM1, APOE, |
| | | | C1QTNF5, C2, C3, CCL2, CCR2, |
| | | | CD36, CFB, CFH, CFHR1, CFHR3, |
| | | | CNGB3, CP, CRP, CST3, CTSD, |
| | | | CX3CR1, ELOVL4, ERCC6, FBLN5, |
| | | | FBLN6, FSCN2, HMCN1, HTRA1, |
| | | | IL6, IL8, PLEKHA1, PROM1, |
| | | | PRPH2, RPGR, SERPING1, TCOF1, |
| | | | TIMP3, TLR3 |
| Macular Dystrophy | eye | | BEST1, C1QTNF5, CTNNA1, |
| | | | EFEMP1, ELOVL4, FSCN2, |
| | | | GUCA1B, HMCN1, IMPG1, OTX2, |
| | | | PRDM13, PROM1, PRPH2, RP1L1, |
| | | | TIMP3, ABCA4, CFH, DRAM2, |
| | | | IMG1, MFSD8, ADMD, STGD2, |
| | | | STGD3, RDS, RP7, PRPH, AVMD, |
| | | | AOFMD, VMD2 |
| Malattia Leventinesse | eye | | EFEMP1, FBLN3 |
| Maple Syrup Urine Disease | Metabolism | | BCKDHA, BCKDHB, and DBT |
| | disease | | |
| Marfan syndrome | Connective | Musculoskeletal | FBN1 |
| | tissue | | |
| Maroteaux-Lamy Syndrome (aka | Musculoskeletal | Liver, spleen | ARSB |
| MPS VI) | system, nervous | | |
| | system | | |
| McArdle's Disease (Glycogen | Glycogen | muscle | PYGM |
| Storage Disease Type V) | storage disease | | |
| Medullary cystic kidney disease | kidney | | UMOD, HNFJ, FJHN, MCKD2, |
| | | | ADMCKD2 |
| Metachromatic leukodystrophy | Lysosomal | Nervous system | ARSA |
| | storage disease | | |
| Methylmalonic acidemia (MMA) | Metabolism | | MMAA, MMAB, MUT, MMACHC, |
| | disease | | MMADHC, LMBRD1 |
| Morquio Syndrome (aka MPS IV | Connective | heart | GALNS |
| A andB) | tissue, skin, | | |
| | bone, eyes | | |
| Mucopolysaccharidosis diseases | Lysosomal | | See also Hurler/Scheie syndrome, |
| (Types I H/S, I H, II, III A B and | storage disease - | | Hurler disease, Sanfillipo syndrome, |
| C, I S, IVA and B, IX, VII, and | affects various | | Scheie syndrome, Morquio syndrome, |
| VI) | organs/tissues | | hyaluronidase deficiency, Sly |
| | | | syndrome, and Maroteaux-Lamy |
| | | | syndrome |
| Muscular Atrophy | muscle | | VAPB, VAPC, ALS8, SMN1, SMA1, |
| | | | SMA2, SMA3, SMA4, BSCL2, |
| | | | SPG17, GARS, SMAD1, CMT2D, |
| | | | HEXB, IGHMBP2, SMUBP2, |
| | | | CATF1, SMARD1 |
| Muscular dystrophy | muscle | | FKRP, MDC1C, LGMD2I, LAMA2, |
| | | | LAMM, LARGE, KIAA0609, |
| | | | MDC1D, FCMD, TTID, MYOT, |
| | | | CAPN3, CANP3, DYSF, LGMD2B, |
| | | | SGCG, LGMD2C, DMDA1, SCG3, |
| | | | SGCA, ADL, DAG2, LGMD2D, |
| | | | DMDA2, SGCB, LGMD2E, SGCD, |
| | | | SGD, LGMD2F, CMD1L, TCAP, |
| | | | LGMD2G, CMD1N, TRIM32, HT2A, |
| | | | LGMD2H, FKRP, MDC1C, LGMD2I, |
| | | | TTN, CMD1G, TMD, LGMD2J, |
| | | | POMTI, CAV3, LGMD1C, SEPN1, |
| | | | SELN, RSMD1, PLEC1, PLTN, EBS1 |
| Myotonic dystrophy (Type 1 and | Muscles | Eyes, heart, | CNBP (Type 2) and DMPK (Type 1) |
| Type 2) | | endocrine | |
| Neoplasia | | | PTEN; ATM; ATR; EGFR; ERBB2; |
| | | | ERBB3; ERBB4; |
| | | | Notch1; Notch2; Notch3; Notch4; |
| | | | AKT; AKT2; AKT3; HIF; |
| | | | HIF1a; HIF3a; Met; HRG; Bcl2; |
| | | | PPAR alpha; PPAR |
| | | | gamma; WT1 (Wilms Tumor); FGF |
| | | | Receptor Family |
| | | | members (5 members: 1, 2, 3, 4, 5); |
| | | | CDKN2a; APC; RB |
| | | | (retinoblastoma); MEN1; VHL; |
| | | | BRCA1; BRCA2; AR |
| | | | (Androgen Receptor); TSG101; IGF; |
| | | | IGF Receptor; Igf1 (4 |
| | | | variants); Igf2 (3 variants); Igf 1 |
| | | | Receptor; Igf 2 Receptor; |
| | | | Bax; Bcl2; caspases family (9 |
| | | | members: |
| | | | 1, 2, 3, 4, 6, 7, 8, 9, 12); Kras; Apc |
| Neurofibromatosis (NF) (NF1, | brain, spinal | | NF1, NF2 |
| formerly Recklinghausen's NF, | cord, nerves, | | |
| andNF2) | and skin | | |
| Niemann-Pick Lipidosis (Types | Lysosomal | Various- where | Types A and B: SMPD1; Type C: |
| A, B, and C) | Storage Disease | sphingomyelin | NPC1 orNPC2 |
| | | accumulates, | |
| | | particularly | |
| | | spleen, liver, | |
| | | blood, CNS | |
| Noonan Syndrome | Various - | | PTPN11, SOS1, RAF1 and KRAS |
| | musculoskeletal, | | |
| | heart, eyes, | | |
| | reproductive | | |
| | organs, blood | | |
| Norrie Disease or X-linked | eye | | NDP |
| Familial Exudative | | | |
| Vitreoretinopathy | | | |
| North Carolina Macular | eye | | MCDRI |
| Dystrophy | | | |
| Osteogenesis imperfecta (OI) | bones, | | COL1A1, COL1A2, CRTAP, P3H |
| (Types I, II, III, IV, V, VI, VII) | musculoskeletal | | |
| Osteopetrosis | bones | | LRP5, BMND1, LRP7, LR3, OPPG, |
| | | | VBCH2, CLCN7, CLC7, OPTA2, |
| | | | OSTM1, GL, TCIRG1, TIRC7, |
| | | | OC116, OPTB1 |
| Patau's Syndrome | Brain, heart, | | Additional copy of chromosome 13 |
| (Trisomy 13) | skeletal system | | |
| Parkinson's disease (PD) | Brain, nervous | | SNCA (PARK1), UCHL1 (PARK 5), |
| | system | | and LRRK2 (PARK8), (PARK3), |
| | | | PARK2, PARK4, PARK7 (PARK7), |
| | | | PINK1 (PARK6); x-Synuclein, DJ-1, |
| | | | Parkin, NR4A2, NURR1, NOT, |
| | | | TINUR, SNCAIP, TBP, SCA17, |
| | | | NCAP, PRKN, PDJ, DBH, NDUFV2 |
| Pattern Dystrophy of the RPE | eye | | RDS/peripherin |
| Phenylketonuria (PKU) | Metabolism | Various due to | PAH, PKU1, QDPR, DHPR, PTS |
| | disorder | build-up of | |
| | | phenylalanine, | |
| | | phenyl ketones | |
| | | in tissues and | |
| | | CNS | |
| Polycystic kidney and hepatic | Kidney, liver | | FCYT, PKHD1, ARPKD, PKD1, |
| disease | | | PKD2, PKD4, PKDTS, PRKCSH, |
| | | | G19P1, PCLD, SEC63 |
| Pompe's Disease | Glycogen | Various - heart, | GAA |
| | storage disease | liver, spleen | |
| Porphyria (actually refers to a | Various- | | ALAD, ALAS2, CPOX, FECH, |
| group of different diseases all | wherever heme | | HMBS, PPOX, UROD, or UROS |
| having a specific heme | precursors | | |
| production process abnormality) | accumulate | | |
| posterior polymorphous corneal | eyes | | TCF4; COL8A2 |
| dystrophy | | | |
| Primary Hyperoxaluria (e.g. type | Various - eyes, | | LDHA (lactate dehydrogenase A) and |
| 1) | heart, kidneys, | | hydroxyacid oxidase 1 (HAO1) |
| | skeletal system | | |
| Primary Open Angle Glaucoma | eyes | | MYOC |
| (POAG) | | | |
| Primary sclerosing cholangitis | Liver, | | TCF4; COL8A2 |
| | gallbladder | | |
| Progeria (also called Hutchinson- | All | | LMNA |
| Gilford progeria syndrome) | | | |
| Prader-Willi Syndrome | Musculoskeletal | | Deletion of region of short arm of |
| | system, brain, | | chromosome 15, including UBE3 A |
| | reproductive | | |
| | and endocrine | | |
| | system | | |
| Prostate Cancer | prostate | | HOXB13, MSMB, GPRC6A, TP53 |
| Pyruvate Dehydrogenase | Brain, nervous | | PDHA1 |
| Deficiency | system | | |
| Kidney/Renal carcinoma | kidney | | RLIP76, VEGF |
| Rett Syndrome | Brain | | MECP2, RTT, PPMX, MRX16, |
| | | | MRX79, CDKL5, STK9, MECP2, |
| | | | RTT, PPMX, MRX16, MRX79, x- |
| | | | Synuclein, DJ-1 |
| Retinitis pigmentosa (RP) | eye | | ADIPOR1, ABCA4, AGBL5, |
| | | | ARHGEF18, ARL2BP, ARL3, ARL6, |
| | | | BEST1, BBS1, BBS2, C2ORF71, |
| | | | C8ORF37, CA4, CERKL, CLRN1, |
| | | | CNGA1, CMGB1, CRB1, CRX, |
| | | | CYP4V2, DHDDS, DHX38, EMC1, |
| | | | EYS, FAM161A, FSCN2, GPR125, |
| | | | GUCA1B, HK1, HPRPF3, HGSNAT, |
| | | | IDH3B, IMPDH1, IMPG2, IFT140, |
| | | | IFT172, KLHL7, KIAA1549, KIZ, |
| | | | LRAT, MAK, MERTK, MVK, NEK2, |
| | | | NUROD1, NR2E3, NRL, OFD1, |
| | | | PDE6A, PDE6B, PDE6G, POMGNT1, |
| | | | PRCD, PROM1, PRPF3, PRPF4, |
| | | | PRPF6, PRPF8, PRPF31, PRPH2, |
| | | | RPB3, RDH12, REEP6, RP39, RGR, |
| | | | RHO, RLBP1, ROM1, RP1, RP1L1, |
| | | | RPY, RP2, RP9, RPE65, RPGR, |
| | | | SAMD11, SAG, SEMA4A, SLC7A14, |
| | | | SNRNP200, SPP2, SPATA7, TRNT1, |
| | | | TOPORS, TTC8, TULP1, USH2A, |
| | | | ZFN408, ZNF513, see also |
| | | | 20120204282 |
| Scheie syndrome (also known as | Various- liver, | | IDUA, α-L-iduronidase |
| mucopolysaccharidosis type I | spleen, eye, | | |
| S(MPS I-S)) | joint, heart, | | |
| | brain, skeletal | | |
| Schizophrenia | Brain | | Neuregulinl (Nrg1); Erb4 (receptor for |
| | | | Neuregulin); |
| | | | Complexini (Cplx1); Tph1 |
| | | | Tryptophan hydroxylase; Tph2 |
| | | | Tryptophan hydroxylase 2; Neurexin |
| | | | 1; GSK3; GSK3a; |
| | | | GSK3b; 5-HTT (Slc6a4); COMT; |
| | | | DRD (Drd1a); SLC6A3; DAOA; |
| | | | DTNBP1; Dao (Dao1); TCF4; |
| | | | COL8A2 |
| Secretase Related Disorders | Various | | APH-1 (alpha and beta); PSEN1; |
| | | | NCSTN; PEN-2; Nos1, Parp1, Nat1, |
| | | | Nat2, CTSB, APP, APH1B, PSEN2, |
| | | | PSENEN, BACE1, ITM2B, CTSD, |
| | | | NOTCH1, TNF, INS, DYT10, |
| | | | ADAM17, APOE, ACE, STN, TP53, |
| | | | IL6, NGFR, IL1B, ACHE, CTNNB1, |
| | | | IGF1, IFNG, NRG1, CASP3, MAPK1, |
| | | | CDH1, APBB1, HMGCR, CREB1, |
| | | | PTGS2, HES1, CAT, TGFB1, ENO2, |
| | | | ERBB4, TRAPPC10, MAOB, NGF, |
| | | | MMP12, JAG1, CD40LG, PPARG, |
| | | | FGF2, LRP1, NOTCH4, MAPK8, |
| | | | PREP, NOTCH3, PRNP, CTSG, EGF, |
| | | | REN, CD44, SELP, GHR, ADCYAP1, |
| | | | INSR, GFAP, MMP3, MAPK10, SP1, |
| | | | MYC, CTSE, PPARA, JUN, TIMP1, |
| | | | IL5, IL1A, MMP9, HTR4, HSPG2, |
| | | | KRAS, CYCS, SMG1, IL1R1, |
| | | | PROK1, MAPK3, NTRK1, IL13, |
| | | | MME, TKT, CXCR2, CHRM1, |
| | | | ATXN1, PAWR, NOTCJ2, M6PR, |
| | | | CYP46A1, CSNK1D, MAPK14, |
| | | | PRG2, PRKCA, L1 CAM, CD40, |
| | | | NR1I2, JAG2, CTNND1, CMA1, |
| | | | SORT1, DLK1, THEM4, JUP, CD46, |
| | | | CCL11, CAV3, RNASE3, HSPA8, |
| | | | CASP9, CYP3A4, CCR3, TFAP2A, |
| | | | SCP2, CDK4, JOF1A, TCF7L2, |
| | | | B3GALTL, MDM2, RELA, CASP7, |
| | | | IDE, FANP4, CASK, ADCYAP1R1, |
| | | | ATF4, PDGFA, C21ORF33, SCG5, |
| | | | RMF123, NKFB1, ERBB2, CAV1, |
| | | | MMP7, TGFA, RXRA, STX1A, |
| | | | PSMC4, P2RY2, TNFRSF21, DLG1, |
| | | | NUMBL, SPN, PLSCR1, UBQLN2, |
| | | | UBQLN1, PCSK7, SPON1, SILV, |
| | | | QPCT, HESS, GCC1 |
| Selective IgA Deficiency | Immune system | | Type 1: MSH5; Type 2: TNFRSF13B |
| Severe Combined | Immune system | | JAK3, JAKL, DCLRE1C, ARTEMIS, |
| Immunodeficiency (SCID) and | | | SCIDA, RAG1, RAG2, ADA, PTPRC, |
| SCID-X1, and ADA-SCID | | | CD45, LCA, IL7R, CD3D, T3D, |
| | | | IL2RG, SCIDXI, SCIDX, IMD4, |
| | | | those identified in US Pat. App. Pub. |
| | | | 20110225664, 20110091441, |
| | | | 20100229252, 20090271881 and |
| | | | 20090222937; |
| Sickle cell disease | blood | | HBB, BCL11A, BCL11Ae, cis- |
| | | | regulatory elements of the B-globin |
| | | | locus, HBG 1/2 promoter, HBG distal |
| | | | CCAAT box region between −92 and |
| | | | −130 of the HBG Transcription Start |
| | | | Site, those described in |
| | | | WO2015148863, WO 2013/126794, |
| | | | US Pat. Pub. 20110182867 |
| Sly Syndrome (aka MPS VII) | | | GUSB |
| Spinocerebellar Ataxias (SCA | | | ATXN1, ATXN2, ATX3 |
| types 1, 2, 3, 6, 7, 8, 12 and 17) | | | |
| Sorsby Fundus Dystrophy | eye | | TIMP3 |
| Stargardt disease | eye | | ABCR, ELOVL4, ABCA4, PROM1 |
| Tay-Sachs Disease | Lysosomal | Various - CNS, | HEX-A |
| | Storage disease | brain, eye | |
| Thalassemia (Alpha, Beta, Delta) | blood | | HBA1, HBA2 (Alpha), HBB (Beta), |
| | | | HBB and HBD (delta), LCRB, |
| | | | BCL11A, BCL11Ae, cis-regulatory |
| | | | elements of the B-globin locus, HBG |
| | | | 1/2 promoter, those described in |
| | | | WO2015148860, US Pat. Pub. |
| | | | 20110182867, 2015/148860 |
| Thymic Aplasia (DiGeorge | Immune system, | | deletion of 30 to 40 genes in the |
| Syndrome; 22q11.2 deletion | thymus | | middle of chromosome 22 at |
| syndrome) | | | a location known as 22q11.2, including |
| | | | TBX1, DGCR8 |
| Transthyretin amyloidosis | liver | | TTR (transthyretin) |
| (ATTR) | | | |
| trimethylaminuria | Metabolism | | FMO3 |
| | disease | | |
| Trinucleotide Repeat Disorders | Various | | HTT; SBMA/SMAX1/AR; |
| (generally) | | | FXN/X25 ATX3; |
| | | | ATXN1; ATXN2; |
| | | | DMPK; Atrophin-1 and Atn1 |
| | | | (DRPLA Dx); CBP (Creb-BP - global |
| | | | instability); VLDLR; Atxn7; Atxn10; |
| | | | FEN1, TNRC6A, PABPN1, JPH3, |
| | | | MED15, ATXN1, ATXN3, TBP, |
| | | | CACNA1A, ATXN80S, PPP2R2B, |
| | | | ATXN7, TNRC6B, TNRC6C, CELF3, |
| | | | MAB21L1, MSH2, TMEM185A, |
| | | | SIX5, CNPY3, RAXE, GNB2, RPL14, |
| | | | ATXN8, ISR, TTR, EP400, GIGYF2, |
| | | | OGGI, STC1, CNDP1, C10ORF2, |
| | | | MAML3, DKC1, PAXIP1, CASK, |
| | | | MAPT, SP1, POLG, AFF2, THBS1, |
| | | | TP53, ESR1, CGGBP1, ABT1, KLK3, |
| | | | PRNP, JUN, KCNN3, BAX, FRAXA, |
| | | | KBTBD10, MBNL1, RAD51, |
| | | | NCOA3, ERDA1, TSC1, COMP, |
| | | | GGLC, RRAD, MSH3, DRD2, CD44, |
| | | | CTCF, CCND1, CLSPN, MEF2A, |
| | | | PTPRU, GAPDH, TRIM22, WT1, |
| | | | AHR, GPX1, TPMT, NDP, ARX, |
| | | | TYR, EGR1, UNG, NUMBL, FABP2, |
| | | | EN2, CRYGC, SRP14, CRYGB, |
| | | | PDCD1, HOXA1, ATXN2L, PMS2, |
| | | | GLA, CBL, FTH1, IL12RB2, OTX2, |
| | | | HOXA5, POLG2, DLX2, AHRR, |
| | | | MANF, RMEM158, see also |
| | | | 20110016540 |
| Turner's Syndrome (XO) | Various - | | Monosomy X |
| | reproductive | | |
| | organs, and sex | | |
| | characteristics, | | |
| | vasculature | | |
| Tuberous Sclerosis | CNS, heart, | | TSC1, TSC2 |
| | kidneys | | |
| Usher syndrome (Types I, II, and | Ears, eyes | | ABHD12, CDH23, CIB2, CLRN1, |
| III) | | | DFNB31, GPR98, HARS, MYO7A, |
| | | | PCDH15, USH1C, USH1G, USH2A, |
| | | | USH11A, those described in |
| | | | WO2015134812A1 |
| Velocardiofacial syndrome (aka | Various - | | Many genes are deleted, COM, TBX1, |
| 22q11.2 deletion syndrome, | skeletal, heart, | | and other are associated with |
| DiGeorge syndrome, conotruncal | kidney, immune | | symptoms |
| anomaly face syndrome (CTAF), | system, brain | | |
| autosomal dominant Opitz G/BB | | | |
| syndrome or Cayler cardiofacial | | | |
| syndrome) | | | |
| Von Gierke's Disease (Glycogen | Glycogen | Various - liver, | G6PC and SLC37A4 |
| Storage Disease type I) | Storage disease | kidney | |
| Von Hippel-Lindau Syndrome | Various - cell | CNS, Kidney, | VHL |
| | growth | Eye, visceral | |
| | regulation | organs | |
| | disorder | | |
| Von Willebrand Disease (Types | blood | | VWF |
| I, II and III) | | | |
| Wilson Disease | Various - | Liver, brains, | ATP7B |
| | Copper Storage | eyes, other | |
| | Disease | tissues where | |
| | | copper builds up | |
| Wiskott-Aldrich Syndrome | Immune System | | WAS |
| Xeroderma Pigmentosum | Skin | Nervous system | POLH |
| XXX Syndrome | Endocrine, brain | | X chromosome trisomy |

[1017] In some embodiments, the compositions, systems, or components thereof can be used treat or prevent a disease in a subject by modifying one or more genes associated with one or more cellular functions, such as any one or more of those in Table 11. In some embodiments, the disease is a genetic disease or disorder. In some of embodiments, the composition, system, or component thereof can modify one or more genes or polynucleotides associated with one or more genetic diseases such as any set forth in Table 11.

TABLE 11
Exemplary Genes controlling Cellular Functions

| CELLULAR FUNCTION | GENES |
|---|---|
| PI3K/AKT Signaling | PRKCE; ITGAM; ITGA5; IRAK1; PRKAA2; EIF2AK2;PTEN; EIF4E; |
| | PRKCZ; GRK6; MAPK1; TSC1; PLK1; AKT2; IKBKB; PIK3CA; CDK8; |
| | CDKN1B; NFKB2; BCL2;PIK3CB; PPP2R1A; MAPK8; BCL2L1; MAPK3; |
| | TSC2; ITGA1; KRAS; EIF4EBP1; RELA; PRKCD; NOS3; PRKAA1; |
| | MAPK9; CDK2; PPP2CA; PIM1; ITGB7; YWHAZ; ILK; TP53; RAF1; |
| | IKBKG; RELB; DYRK1A; CDKN1A; ITGB1; MAP2K2; JAK1; AKT1; JAK2; |
| | PIK3R1; CHUK; PDPK1; PPP2R5C; CTNNB1; MAP2K1; NFKB1; PAK3; |
| | ITGB3; CCND1; GSK3A; FRAP1; SFN; ITGA2; TTK; CSNK1A1; BRAF; |
| | GSK3B; AKT3; FOXO1; SGK; HSP90AA1; RPS6KB1 |
| ERK/MAPK Signaling | PRKCE; ITGAM; ITGA5; HSPB1; IRAK1; PRKAA2; EIF2AK2; RAC1; |
| | RAP1A; TLN1; EIF4E; ELK1; GRK6; MAPK1; RAC2; PLK1; AKT2; |
| | PIK3CA; CDK8; CREB1; PRKCI; PTK2; FOS; RPS6KA4; PIK3CB; |
| | PPP2R1A; PIK3C3; MAPK8; MAPK3; ITGA1; ETS1; KRAS; MYCN; |
| | EIF4EBP1; PPARG; PRKCD; PRKAA1; MAPK9; SRC; CDK2; PPP2CA; |
| | PIM1; PIK3C2A; ITGB7; YWHAZ; PPP1CC; KSR1; PXN; RAF1; FYN; |
| | DYRK1A; ITGB1; MAP2K2; PAK4; PIK3R1; STAT3; PPP2R5C; MAP2K1; |
| | PAK3; ITGB3; ESR1; ITGA2; MYC; TTK; CSNK1A1; CRKL; BRAF; ATF4; |
| | PRKCA; SRF; STAT1; SGK |
| Glucocorticoid Receptor | RAC1; TAF4B; EP300; SMAD2; TRAF6; PCAF; ELK1; MAPK1; SMAD3; |
| Signaling | AKT2; IKBKB; NCOR2; UBE2I; PIK3CA; CREB1; FOS; HSPA5; NFKB2; |
| | BCL2; MAP3K14; STAT5B; PIK3CB; PIK3C3; MAPK8; BCL2L1; MAPK3; |
| | TSC22D3; MAPK10; NRIP1; KRAS; MAPK13; RELA; STAT5A; MAPK9; |
| | NOS2A; PBX1; NR3C1; PIK3C2A; CDKN1C; TRAF2; SERPINE1; NCOA3; |
| | MAPK14; TNF; RAF1; IKBKG; MAP3K7; CREBBP; CDKN1A; MAP2K2; |
| | JAK1; IL8; NCOA2; AKT1; JAK2; PIK3R1; CHUK; STAT3; MAP2K1; |
| | NFKB1; TGFBR1; ESR1; SMAD4; CEBPB; JUN; AR; AKT3; CCL2; MMP1; |
| | STAT1; IL6; HSP90AA1 |
| Axonal Guidance Signaling | PRKCE; ITGAM; ROCK1; ITGA5; CXCR4; ADAM12; IGF1; RAC1; RAP1A; |
| | EIF4E; PRKCZ; NRP1; NTRK2; ARHGEF7; SMO; ROCK2; MAPK1; PGF; |
| | RAC2; PTPN11; GNAS; AKT2; PIK3CA; ERBB2; PRKCI; PTK2; CFL1; |
| | GNAQ; PIK3CB; CXCL12; PIK3C3; WNT11; PRKD1; GNB2L1; ABL1; |
| | MAPK3; ITGA1; KRAS; RHOA; PRKCD; PIK3C2A; ITGB7; GLI2; PXN; |
| | VASP; RAF1; FYN; ITGB1; MAP2K2; PAK4; ADAM17; AKT1; PIK3R1; |
| | GLH; WNT5A; ADAM10; MAP2K1; PAK3; ITGB3; CDC42; VEGFA; |
| | ITGA2; EPHA8; CRKL; RND1; GSK3B; AKT3; PRKCA |
| Ephrin Receptor Signaling | PRKCE; ITGAM; ROCK1; ITGA5; CXCR4; IRAK1; PRKAA2; EIF2AK2; |
| Actin Cytoskeleton | RAC1; RAP1A; GRK6; ROCK2; MAPK1; PGF; RAC2; PTPN11; GNAS; |
| Signaling | PLK1; AKT2; DOK1; CDK8; CREB1; PTK2; CFL1; GNAQ; MAP3K14; |
| | CXCL12; MAPK8; GNB2L1; ABL1; MAPK3; ITGA1; KRAS; RHOA; |
| | PRKCD; PRKAA1; MAPK9; SRC; CDK2; PIM1; ITGB7; PXN; RAF1; FYN; |
| | DYRK1A; ITGB1; MAP2K2; PAK4; AKT1; JAK2; STAT3; ADAM10; |
| | MAP2K1; PAK3; ITGB3; CDC42; VEGFA; ITGA2; EPHA8; TTK; |
| | CSNK1A1; CRKL; BRAF; PTPN13; ATF4; AKT3; SGK |
| | ACTN4; PRKCE; ITGAM; ROCK1; ITGA5; IRAK1; PRKAA2; EIF2AK2; |
| | RAC1; INS; ARHGEF7; GRK6; ROCK2; MAPK1; RAC2; PLK1; AKT2; |
| | PIK3CA; CDK8; PTK2; CFL1; PIK3CB; MYH9; DIAPH1; PIK3C3; MAPK8; |
| | F2R; MAPK3; SLC9A1; ITGA1; KRAS; RHOA; PRKCD; PRKAA1; MAPK9; |
| | CDK2; PIM1; PIK3C2A; ITGB7; PPPICC; PXN; VIL2; RAF1; GSN; |
| | DYRK1A; ITGB1; MAP2K2; PAK4; PIP5K1A; PIK3R1; MAP2K1; PAK3; |
| | ITGB3; CDC42; APC; ITGA2; TTK; CSNK1A1; CRKL; BRAF; VAV3; SGK |
| Huntington’s Disease | PRKCE; IGF1; EP300; RCOR1; PRKCZ; HDAC4; TGM2; MAPK1; CAPNS1; |
| Signaling | AKT2; EGFR; NCOR2; SP1; CAPN2; PIK3CA; HDAC5; CREB1; PRKCI; |
| | HSPA5; REST; GNAQ; PIK3CB; PIK3C3; MAPK8; IGFIR; PRKD1; |
| | GNB2L1; BCL2L1; CAPN1; MAPK3; CASP8; HDAC2; HDAC7A; PRKCD; |
| | HDAC11; MAPK9; HDAC9; PIK3C2A; HDAC3; TP53; CASP9; CREBBP; |
| | AKT1; PIK3R1; PDPK1; CASP1; APAF1; FRAP1; CASP2; JUN; BAX; ATF4; |
| | AKT3; PRKCA; CLTC; SGK; HDAC6; CASP3 |
| Apoptosis Signaling | PRKCE; ROCK1; BID; IRAK1; PRKAA2; EIF2AK2; BAK1; BIRC4; GRK6; |
| | MAPK1; CAPNS1; PLK1; AKT2; IKBKB; CAPN2; CDK8; FAS; NFKB2; |
| | BCL2; MAP3K14; MAPK8; BCL2L1; CAPN1; MAPK3; CASP8; KRAS; |
| | RELA; PRKCD; PRKAA1; MAPK9; CDK2; PIM1; TP53; TNF; RAF1; |
| | IKBKG; RELB; CASP9; DYRK1A; MAP2K2; CHUK; APAF1; MAP2K1; |
| | NFKB1; PAK3; LMNA; CASP2; BIRC2; TTK; CSNK1A1; BRAF; BAX; |
| | PRKCA; SGK; CASP3; BIRC3; PARP1 |
| B Cell Receptor Signaling | RAC1; PTEN; LYN; ELK1; MAPK1; RAC2; PTPN11; AKT2; IKBKB; |
| | PIK3CA; CREB1; SYK; NFKB2; CAMK2A; MAP3K14; PIK3CB; PIK3C3; |
| | MAPK8; BCL2L1; ABL1; MAPK3; ETS1; KRAS; MAPK13; RELA; PTPN6; |
| | MAPK9; EGR1; PIK3C2A; BTK; MAPK14; RAF1; IKBKG; RELB; MAP3K7; |
| | MAP2K2; AKT1; PIK3R1; CHUK; MAP2K1; NFKB1; CDC42; GSK3A; |
| | FRAP1; BCL6; BCL10; JUN; GSK3B; ATF4; AKT3; VAV3; RPS6KB1 |
| Leukocyte Extravasation | ACTN4; CD44; PRKCE; ITGAM; ROCK1; CXCR4; CYBA; RAC1; RAP1A; |
| Signaling | PRKCZ; ROCK2; RAC2; PTPN11; MMP14; PIK3CA; PRKC1; PTK2; |
| | PIK3CB; CXCL12; PIK3C3; MAPK8; PRKD1; ABL1; MAPK10; CYBB; |
| | MAPK13; RHOA; PRKCD; MAPK9; SRC; PIK3C2A; BTK; MAPK14; |
| | NOX1; PXN; VIL2; VASP; ITGB1; MAP2K2; CTNND1; PIK3R1; CTNNB1; |
| | CLDN1; CDC42; F11R; ITK; CRKL; VAV3; CTTN; PRKCA; MMP1; MMP9 |
| Integrin Signaling | ACTN4; ITGAM; ROCK1; ITGA5; RAC1; PTEN; RAP1A; TLN1; ARHGEF7; |
| | MAPK1; RAC2; CAPNS1; AKT2; CAPN2; PIK3CA; PTK2; PIK3CB; |
| | PIK3C3; MAPK8; CAV1; CAPN1; ABL1; MAPK3; ITGA1; KRAS; RHOA; |
| | SRC; PIK3C2A; ITGB7; PPPICC; ILK; PXN; VASP; RAF1; FYN; ITGB1; |
| | MAP2K2; PAK4; AKT1; PIK3R1; TNK2; MAP2K1; PAK3; ITGB3; CDC42; |
| | RND3; ITGA2; CRKL; BRAF; GSK3B; AKT3 |
| Acute Phase Response | IRAK1; SOD2; MYD88; TRAF6; ELK1; MAPK1; PTPN11; AKT2; IKBKB; |
| Signaling | PIK3CA; FOS; NFKB2; MAP3K14; PIK3CB; MAPK8; RIPK1; MAPK3; |
| | IL6ST; KRAS; MAPK13; IL6R; RELA; SOCS1; MAPK9; FTL; NR3C1; |
| | TRAF2; SERPINE1; MAPK14; TNF; RAF1; PDK1; IKBKG; RELB; |
| | MAP3K7; MAP2K2; AKT1; JAK2; PIK3R1; CHUK; STAT3; MAP2K1; |
| | NFKB1; FRAPI; CEBPB; JUN; AKT3; IL1R1; IL6 |
| PTEN Signaling | ITGAM; ITGA5; RAC1; PTEN; PRKCZ; BCL2L11; MAPK1; RAC2; AKT2; |
| | EGFR; IKBKB; CBL; PIK3CA; CDKN1B; PTK2; NFKB2; BCL2; PIK3CB; |
| | BCL2L1; MAPK3; ITGA1; KRAS; ITGB7; ILK; PDGFRB; INSR; RAF1; |
| | IKBKG; CASP9; CDKN1A; ITGB1; MAP2K2; AKT1; PIK3R1; CHUK; |
| | PDGFRA; PDPKI; MAP2K1; NFKB1; ITGB3; CDC42; CCND1; GSK3A; |
| | ITGA2; GSK3B; AKT3; FOXO1; CASP3; RPS6KB1 |
| p53 Signaling | PTEN; EP300; BBC3; PCAF; FASN; BRCA1; GADD45A; BIRC5; AKT2; |
| Signaling | PIK3CA; CHEK1; TP53INP1; BCL2; PIK3CB; PIK3C3; MAPK8; THBS1; |
| Aryl Hydrocarbon Receptor | ATR; BCL2L1; E2F1; PMAIP1; CHEK2; TNFRSF10B; TP73; RBI; HDAC9; |
| | CDK2; PIK3C2A; MAPK14; TP53; LRDD; CDKN1A; HIPK2; AKT1; |
| | PIK3R1; RRM2B; APAFI; CTNNB1; SIRT1; CCND1; PRKDC; ATM; SFN; |
| | CDKN2A; JUN; SNAI2; GSK3B; BAX; AKT3 |
| | HSPB1; EP300; FASN; TGM2; RXRA; MAPK1; NQO1; NCOR2; SP1; |
| | ARNT; CDKN1B; FOS; CHEK1; SMARCA4; NFKB2; MAPK8; ALDH1A1; |
| | ATR; E2F1; MAPK3; NRIP1; CHEK2; RELA; TP73; GSTPI; RB1; SRC; |
| | CDK2; AHR; NFE2L2; NCOA3; TP53; TNF; CDKN1A; NCOA2; APAFI; |
| | NFKB1; CCND1; ATM; ESR1; CDKN2A; MYC; JUN; ESR2; BAX; IL6; |
| | CYP1B1; HSP90AA1 |
| Xenobiotic Metabolism | PRKCE; EP300; PRKCZ; RXRA; MAPK1; NQO1; NCOR2; PIK3CA; ARNT; |
| Signaling | PRKC1; NFKB2; CAMK2A; PIK3CB; PPP2R1A; PIK3C3; MAPK8; PRKD1; |
| | ALDH1A1; MAPK3; NRIP1; KRAS; MAPK13; PRKCD; GSTPI; MAPK9; |
| | NOS2A; ABCB1; AHR; PPP2CA; FTL; NFE2L2; PIK3C2A; PPARGC1A; |
| | MAPK14; TNF; RAF1; CREBBP; MAP2K2; PIK3R1; PPP2R5C; MAP2K1; |
| | NFKB1; KEAP1; PRKCA; EIF2AK3; IL6; CYP1B1; HSP90AA1 |
| SAPK/JNK Signaling | PRKCE; IRAK1; PRKAA2; EIF2AK2; RAC1; ELK1; GRK6; MAPK1; |
| | GADD45A; RAC2; PLK1; AKT2; PIK3CA; FADD; CDK8; PIK3CB; PIK3C3; |
| | MAPK8; RIPK1; GNB2L1; IRS1; MAPK3; MAPK10; DAXX; KRAS; |
| | PRKCD; PRKAA1; MAPK9; CDK2; PIM1; PIK3C2A; TRAF2; TP53; LCK; |
| | MAP3K7; DYRK1A; MAP2K2; PIK3R1; MAP2K1; PAK3; CDC42; JUN; |
| | TTK; CSNK1A1; CRKL; BRAF; SGK |
| PPAr/RXR Signaling | PRKAA2; EP300; INS; SMAD2; TRAF6; PPARA; FASN; RXRA; MAPK1; |
| | SMAD3; GNAS; IKBKB; NCOR2; ABCA1; GNAQ; NFKB2; MAP3K14; |
| | STAT5B; MAPK8; IRS1; MAPK3; KRAS; RELA; PRKAA1; PPARGC1A; |
| | NCOA3; MAPK14; INSR; RAF1; IKBKG; RELB; MAP3K7; CREBBP; |
| | MAP2K2; JAK2; CHUK; MAP2K1; NFKB1; TGFBR1; SMAD4; JUN; IL1R1; |
| | PRKCA; IL6; HSP90AA1; ADIPOQ |
| NF-KB Signaling | IRAK1; EIF2AK2; EP300; INS; MYD88; PRKCZ; TRAF6; TBK1; AKT2; |
| | EGFR; IKBKB; PIK3CA; BTRC; NFKB2; MAP3K14; PIK3CB; PIK3C3; |
| | MAPK8; RIPK1; HDAC2; KRAS; RELA; PIK3C2A; TRAF2; TLR4; |
| | PDGFRB; TNF; INSR; LCK; IKBKG; RELB; MAP3K7; CREBBP; AKT1; |
| | PIK3R1; CHUK; PDGFRA; NFKB1; TLR2; BCL10; GSK3B; AKT3; |
| | TNFAIP3; ILIRI |
| Neuregulin Signaling | ERBB4; PRKCE; ITGAM; ITGA5; PTEN; PRKCZ; ELK1; MAPK1; PTPN11; |
| Signaling | AKT2; EGFR; ERBB2; PRKC1; CDKN1B; STAT5B; PRKD1; MAPK3; |
| | ITGA1; KRAS; PRKCD; STAT5A; SRC; ITGB7; RAF1; ITGB1; MAP2K2; |
| | ADAM17; AKT1; PIK3R1; PDPKI; MAP2K1; ITGB3; EREG; FRAPI; |
| | PSEN1; ITGA2; MYC; NRG1; CRKL; AKT3; PRKCA; HSP90AA1; |
| | RPS6KB1 |
| Wnt & Beta catenin | CD44; EP300; LRP6; DVL3; CSNKIE; GJA1; SMO; AKT2; PIN1; CDH1; |
| | BTRC; GNAQ; MARK2; PPP2R1A; WNT11; SRC; DKKI; PPP2CA; SOX6; |
| | SFRP2; ILK; LEF1; SOX9; TP53; MAP3K7; CREBBP; TCF7L2; AKT1; |
| | PPP2R5C; WNT5A; LRP5; CTNNB1; TGFBR1; CCND1; GSK3A; DVL1; |
| | APC; CDKN2A; MYC; CSNK1A1; GSK3B; AKT3; SOX2 |
| Insulin Receptor Signaling | PTEN; INS; EIF4E; PTPN1; PRKCZ; MAPK1; TSC1; PTPN11; AKT2; CBL; |
| | PIK3CA; PRKC1; PIK3CB; PIK3C3; MAPK8; IRS1; MAPK3; TSC2; KRAS; |
| | EIF4EBP1; SLC2A4; PIK3C2A; PPPICC; INSR; RAF1; FYN; MAP2K2; |
| | JAK1; AKT1; JAK2; PIK3R1; PDPKI; MAP2K1; GSK3A; FRAP1; CRKL; |
| | GSK3B; AKT3; FOXO1; SGK; RPS6KB1 |
| IL-6 Signaling | HSPB1; TRAF6; MAPKAPK2; ELK1; MAPK1; PTPN11; IKBKB; FOS; |
| | NFKB2; MAP3K14; MAPK8; MAPK3; MAPK10; IL6ST; KRAS; MAPK13; |
| | IL6R; RELA; SOCS1; MAPK9; ABCB1; TRAF2; MAPK14; TNF; RAF1; |
| | IKBKG; RELB; MAP3K7; MAP2K2; IL8; JAK2; CHUK; STAT3; MAP2K1; |
| | NFKB1; CEBPB; JUN; IL1R1; SRF; IL6 |
| Hepatic Cholestasis | PRKCE; IRAK1; INS; MYD88; PRKCZ; TRAF6; PPARA; RXRA; IKBKB; |
| | PRKC1; NFKB2; MAP3K14; MAPK8; PRKD1; MAPK10; RELA; PRKCD; |
| | MAPK9; ABCB1; TRAF2; TLR4; TNF; INSR; IKBKG; RELB; MAP3K7; IL8; |
| | CHUK; NR1H2; TJP2; NFKB1; ESR1; SREBF1; FGFR4; JUN; IL1R1; |
| | PRKCA; IL6 |
| IGF-1 Signaling | IGF1; PRKCZ; ELK1; MAPK1; PTPN11; NEDD4; AKT2; PIK3CA; PRKC1; |
| | PTK2; FOS; PIK3CB; PIK3C3; MAPK8; IGFIR; IRS1; MAPK3; IGFBP7; |
| | KRAS; PIK3C2A; YWHAZ; PXN; RAF1; CASP9; MAP2K2; AKT1; PIK3R1; |
| | PDPKI; MAP2K1; IGFBP2; SFN; JUN; CYR61; AKT3; FOXO1; SRF; CTGF; |
| | RPS6KB1 |
| NRF2-mediated Oxidative | PRKCE; EP300; SOD2; PRKCZ; MAPK1; SQSTM1; NQO1; PIK3CA; |
| Stress Response | PRKC1; FOS; PIK3CB; PIK3C3; MAPK8; PRKD1; MAPK3; KRAS; PRKCD; |
| | GSTPI; MAPK9; FTL; NFE2L2; PIK3C2A; MAPK14; RAF1; MAP3K7; |
| | CREBBP; MAP2K2; AKT1; PIK3R1; MAP2K1; PPIB; JUN; KEAP1; GSK3B; |
| | ATF4; PRKCA; EIF2AK3; HSP90AA1 |
| Hepatic Fibrosis/Hepatic | EDN1; IGF1; KDR; FLT1; SMAD2; FGFR1; MET; PGF; SMAD3; EGFR; |
| Stellate Cell Activation | FAS; CSF1; NFKB2; BCL2; MYH9; IGFIR; IL6R; RELA; TLR4; PDGFRB; |
| | TNF; RELB; IL8; PDGFRA; NFKB1; TGFBR1; SMAD4; VEGFA; BAX; |
| | IL1R1; CCL2; HGF; MMPI; STAT1; IL6; CTGF; MMP9 |
| PPAR Signaling | EP300; INS; TRAF6; PPARA; RXRA; MAPK1; IKBKB; NCOR2; FOS; |
| | NFKB2; MAP3K14; STAT5B; MAPK3; NRIP1; KRAS; PPARG; RELA; |
| | STAT5A; TRAF2; PP ARGCI A; PDGFRB; TNF; INSR; RAF1; IKBKG; |
| | RELB; MAP3K7; CREBBP; MAP2K2; CHUK; PDGFRA; MAP2K1; NFKB1; |
| | JUN; IL1R1; HSP90AA1 |
| Fc Epsilon RI Signaling | PRKCE; RAC1; PRKCZ; LYN; MAPK1; RAC2; PTPN11; AKT2; PIK3CA; |
| | SYK; PRKC1; PIK3CB; PIK3C3; MAPK8; PRKD1; MAPK3; MAPK10; |
| | KRAS; MAPK13; PRKCD; MAPK9; PIK3C2A; BTK; MAPK14; TNF; RAF1; |
| | FYN; MAP2K2; AKT1; PIK3R1; PDPK1; MAP2K1; AKT3; VAV3; PRKCA |
| G-Protein Coupled Receptor | PRKCE; RAP1A; RGS16; MAPK1; GNAS; AKT2; IKBKB; PIK3CA; CREB1; |
| Signaling | GNAQ; NFKB2; CAMK2A; PIK3CB; PIK3C3; MAPK3; KRAS; RELA; SRC; |
| | PIK3C2A; RAF1; IKBKG; RELB; FYN; MAP2K2; AKT1; PIK3R1; CHUK; |
| | PDPK1; STAT3; MAP2K1; NFKB1; BRAF; ATF4; AKT3; PRKCA |
| Inositol Phosphate Metabolism | PRKCE; IRAK1; PRKAA2; EIF2AK2; PTEN; GRK6; MAPK1; PLK1; AKT2; |
| | PIK3CA; CDK8; PIK3CB; PIK3C3; MAPK8; MAPK3; PRKCD; PRKAA1; |
| | MAPK9; CDK2; PIM1; PIK3C2A; DYRK1A; MAP2K2; PIP5K1A; PIK3R1; |
| | MAP2K1; PAK3; ATM; TTK; CSNK1A1; BRAF; SGK |
| PDGF Signaling | EIF2AK2; ELK1; ABL2; MAPK1; PIK3CA; FOS; PIK3CB; PIK3C3; MAPK8; |
| | CAV1; ABL1; MAPK3; KRAS; SRC; PIK3C2A; PDGFRB; RAF1; MAP2K2; |
| | JAK1; JAK2; PIK3R1; PDGFRA; STAT3; SPHK1; MAP2K1; MYC; JUN; |
| | CRKL; PRKCA; SRF; STAT1; SPHK2 |
| VEGF Signaling | ACTN4; ROCK1; KDR; FLT1; ROCK2; MAPK1; PGF; AKT2; PIK3CA; |
| | ARNT; PTK2; BCL2; PIK3CB; PIK3C3; BCL2L1; MAPK3; KRAS; HIF1A; |
| | NOS3; PIK3C2A; PXN; RAF1; MAP2K2; ELAVL1; AKT1; PIK3R1; |
| | MAP2K1; SFN; VEGFA; AKT3; FOXO1; PRKCA |
| Natural Killer Cell Signaling | PRKCE; RAC1; PRKCZ; MAPK1; RAC2; PTPN11; KIR2DL3; AKT2; |
| | PIK3CA; SYK; PRKC1; PIK3CB; PIK3C3; PRKD1; MAPK3; KRAS; PRKCD; |
| | PTPN6; PIK3C2A; LCK; RAF1; FYN; MAP2K2; PAK4; AKT1; PIK3R1; |
| | MAP2K1; PAK3; AKT3; VAV3; PRKCA |
| Cell Cycle: Gl/S Checkpoint | HDAC4; SMAD3; SUV39H1; HDAC5; CDKN1B; BTRC; ATR; ABL1; E2F1; |
| Regulation | HDAC2; HDAC7A; RB1; HDAC11; HDAC9; CDK2; E2F2; HDAC3; TP53; |
| | CDKN1A; CCND1; E2F4; ATM; RBL2; SMAD4; CDKN2A; MYC; NRGI; |
| | GSK3B; RBL1; HDAC6 |
| T Cell Receptor Signaling | RAC1; ELK1; MAPK1; IKBKB; CBL; PIK3CA; FOS; NFKB2; PIK3CB; |
| | PIK3C3; MAPK8; MAPK3; KRAS; RELA; PIK3C2A; BTK; LCK; RAF1; |
| | IKBKG; RELB; FYN; MAP2K2; PIK3R1; CHUK; MAP2K1; NFKB1; ITK; |
| | BCL10; JUN; VAV3 |
| Death Receptor Signaling | CRADD; HSPB1; BID; BIRC4; TBK1; IKBKB; FADD; FAS; NFKB2; BCL2; |
| | MAP3K14; MAPK8; RIPK1; CASP8; DAXX; TNFRSF10B; RELA; TRAF2; |
| | TNF; IKBKG; RELB; CASP9; CHUK; APAF1; NFKB1; CASP2; BIRC2; |
| | CASP3;BIRC3 |
| FGF Signaling | RAC1; FGFR1; MET; MAPKAPK2; MAPK1; PTPN11; AKT2; PIK3CA; |
| | CREB1; PIK3CB; PIK3C3; MAPK8; MAPK3; MAPK13; PTPN6; PIK3C2A; |
| | MAPK14; RAF1; AKT1; PIK3R1; STAT3; MAP2K1; FGFR4; CRKL; ATF4; |
| | AKT3; PRKCA; HGF |
| GM-CSF Signaling | LYN; ELK1; MAPK1; PTPN11; AKT2; PIK3CA; CAMK2A; STAT5B; |
| | PIK3CB; PIK3C3; GNB2L1; BCL2L1; MAPK3; ETS1; KRAS; RUNX1; |
| | PIM1; PIK3C2A; RAF1; MAP2K2; AKT1; JAK2; PIK3R1; STAT3; MAP2K1; |
| | CCNDI; AKT3; STATI |
| Amyotrophic Lateral Sclerosis | BID; IGF1; RAC1; BIRC4; PGF; CAPNS1; CAPN2; PIK3CA; BCL2; |
| Signaling | PIK3CB; PIK3C3; BCL2L1; CAPN1; PIK3C2A; TP53; CASP9; PIK3R1; |
| | RAB5A; CASP1; APAF1; VEGFA; BIRC2; BAX; AKT3; CASP3; BIRC3 |
| JAK/Stat Signaling | PTPN1; MAPK1; PTPN11; AKT2; PIK3CA; STAT5B; PIK3CB; PIK3C3; |
| | MAPK3; KRAS; SOCS1; STAT5A; PTPN6; PIK3C2A; RAF1; CDKN1A; |
| | MAP2K2; JAK1; AKT1; JAK2; PIK3R1; STAT3; MAP2K1; FRAP1; AKT3; |
| | STATI |
| Nicotinate and Nicotinamide | PRKCE; IRAK1; PRKAA2; EIF2AK2; GRK6; MAPK1; PLK1; AKT2; CDK8; |
| Metabolism | MAPK8; MAPK3; PRKCD; PRKAA1; PBEF1; MAPK9; CDK2; PIM1; |
| | DYRK1A; MAP2K2; MAP2K1; PAK3; NT5E; TTK; CSNK1A1; BRAF; SGK |
| Chemokine Signaling | CXCR4; ROCK2; MAPK1; PTK2; FOS; CFL1; GNAQ; CAMK2A; CXCL12; |
| | MAPK8; MAPK3; KRAS; MAPK13; RHOA; CCR3; SRC; PPPICC; |
| | MAPK14; NOX1; RAF1; MAP2K2; MAP2K1; JUN; CCL2; PRKCA |
| IL-2 Signaling | ELK1; MAPK1; PTPN11; AKT2; PIK3CA; SYK; FOS; STAT5B; PIK3CB; |
| | PIK3C3; MAPK8; MAPK3; KRAS; SOCS1; STAT5A; PIK3C2A; LCK; |
| | RAF1; MAP2K2; JAK1; AKT1; PIK3R1; MAP2K1; JUN; AKT3 |
| Synaptic Long Term | PRKCE; IGF1; PRKCZ; PRDX6; LYN; MAPK1; GNAS; PRKC1; GNAQ; |
| Depression | PPP2R1A; IGFIR; PRKD1; MAPK3; KRAS; GRN; PRKCD; NOS3; NOS2A; |
| | PPP2CA; YWHAZ; RAF1; MAP2K2; PPP2R5C; MAP2K1; PRKCA |
| Estrogen Receptor Signaling | TAF4B; EP300; CARMI; PCAF; MAPK1; NCOR2; SMARCA4; MAPK3; |
| | NRIP1; KRAS; SRC; NR3C1; HDAC3; PPARGC1A; RBM9; NCOA3; RAF1; |
| | CREBBP; MAP2K2; NCOA2; MAP2K1; PRKDC; ESR1; ESR2 |
| Protein Ubiquitination | TRAF6; SMURF1; BIRC4; BRCA1; UCHL1; NEDD4; CBL; UBE2I; BTRC; |
| Pathway | HSPA5; USP7; USP10; FBXW7; USP9X; STUB1; USP22; B2M; BIRC2; |
| | PARK2; USP8; USP1; VHL; HSP90AA1; BIRC3 |
| IL-10 Signaling | TRAF6; CCR1; ELK1; IKBKB; SP1; FOS; NFKB2; MAP3K14; MAPK8; |
| | MAPK13; RELA; MAPK14; TNF; IKBKG; RELB; MAP3K7; JAK1; CHUK; |
| | STAT3; NFKB1; JUN; IL1R1; IL6 |
| VDR/RXR Activation | PRKCE; EP300; PRKCZ; RXRA; GADD45A; HES1; NCOR2; SP1; PRKC1; |
| | CDKN1B; PRKD1; PRKCD; RUNX2; KLF4; YY1; NCOA3; CDKN1A; |
| | NCOA2; SPP1; LRP5; CEBPB; FOXO1; PRKCA |
| TGF-beta Signaling | EP300; SMAD2; SMURF1; MAPK1; SMAD3; SMAD1; FOS; MAPK8; |
| | MAPK3; KRAS; MAPK9; RUNX2; SERPINE1; RAF1; MAP3K7; CREBBP; |
| | MAP2K2; MAP2K1; TGFBR1; SMAD4; JUN; SMAD5 |
| Toll-like Receptor Signaling | IRAK1; EIF2AK2; MYD88; TRAF6; PPARA; ELK1; IKBKB; FOS; NFKB2; |
| | MAP3K14; MAPK8; MAPK13; RELA; TLR4; MAPK14; IKBKG; RELB; |
| | MAP3K7; CHUK; NFKB1; TLR2; JUN |
| p38 MAPK Signaling | HSPB1; IRAK1; TRAF6; MAPKAPK2; ELK1; FADD; FAS; CREB1; DDIT3; |
| | RPS6KA4; DAXX; MAPK13; TRAF2; MAPK14; TNF; MAP3K7; TGFBR1; |
| | MYC; ATF4; IL1R1; SRF; STAT1 |
| Neurotrophin/TRK Signaling | NTRK2; MAPK1; PTPN11; PIK3CA; CREB1; FOS; PIK3CB; PIK3C3; |
| | MAPK8; MAPK3; KRAS; PIK3C2A; RAF1; MAP2K2; AKT1; PIK3R1; |
| | PDPK1; MAP2K1; CDC42; JUN; ATF4 |
| FXR/RXR Activation | INS; PPARA; FASN; RXRA; AKT2; SDC1; MAPK8; APOB; MAPK10; |
| | PPARG; MTTP; MAPK9; PPARGC1A; TNF; CREBBP; AKT1; SREBF1; |
| | FGFR4; AKT3; FOXO1 |
| Synaptic Long Term | PRKCE; RAP1A; EP300; PRKCZ; MAPK1; CREB1; PRKC1; GNAQ; |
| Potentiation | CAMK2A; PRKD1; MAPK3; KRAS; PRKCD; PPPICC; RAF1; CREBBP; |
| | MAP2K2; MAP2K1; ATF4; PRKCA |
| Calcium Signaling | RAP1A; EP300; HDAC4; MAPK1; HDAC5; CREB1; CAMK2A; MYH9; |
| | MAPK3; HDAC2; HDAC7A; HDAC11; HDAC9; HDAC3; CREBBP; CALR; |
| | CAMKK2; ATF4; HDAC6 |
| EGF Signaling | ELK1; MAPK1; EGFR; PIK3CA; FOS; PIK3CB; PIK3C3; MAPK8; MAPK3; |
| | PIK3C2A; RAF1; JAK1; PIK3R1; STAT3; MAP2K1; JUN; PRKCA; SRF; |
| | STATI |
| Hypoxia Signaling in the | EDN1; PTEN; EP300; NQO1; UBE2I; CREB1; ARNT; HIF1A; SLC2A4; |
| Cardiovascular System | NOS3; TP53; LDHA; AKT1; ATM; VEGFA; JUN; ATF4; VHL; HSP90AA1 |
| LPS/IL-1 Mediated Inhibition | IRAK1; MYD88; TRAF6; PPARA; RXRA; ABCA1; MAPK8; ALDH1A1; |
| of RXR Function | GSTPI; MAPK9; ABCB1; TRAF2; TLR4; TNF; MAP3K7; NR1H2; SREBF1; |
| | JUN; IL1R1 |
| LXR/RXR Activation | FASN; RXRA; NCOR2; ABCA1; NFKB2; IRF3; RELA; NOS2A; TLR4; TNF; |
| | RELB; LDLR; NR1H2; NFKB1; SREBF1; IL1R1; CCL2; IL6; MMP9 |
| Amyloid Processing | PRKCE; CSNKIE; MAPK1; CAPNS1; AKT2; CAPN2; CAPN1; MAPK3; |
| | MAPK13; MAPT; MAPK14; AKT1; PSEN1; CSNK1A1; GSK3B; AKT3; APP |
| IL-4 Signaling | AKT2; PIK3CA; PIK3CB; PIK3C3; IRS1; KRAS; SOCS1; PTPN6; NR3C1; |
| | PIK3C2A; JAK1; AKT1; JAK2; PIK3R1; FRAP1; AKT3; RPS6KB1 |
| Cell Cycle: G2/M DNA | EP300; PCAF; BRCA1; GADD45A; PLK1; BTRC; CHEK1; ATR; CHEK2; |
| Damage Checkpoint | YWHAZ; TP53; CDKN1A; PRKDC; ATM; SFN; CDKN2A |
| Regulation | |
| Nitric Oxide Signaling in the | KDR; FLT1; PGF; AKT2; PIK3CA; PIK3CB; PIK3C3; CAV1; PRKCD; |
| Cardiovascular System | NOS3; PIK3C2A; AKT1; PIK3R1; VEGFA; AKT3; HSP90AA1 |
| Purine Metabolism | NME2; SMARCA4; MYH9; RRM2; ADAR; EIF2AK4; PKM2; ENTPD1; |
| | RAD51; RRM2B; TJP2; RAD51C; NT5E; POLD1; NME1 |
| cAMP-mediated Signaling | RAP1A; MAPK1; GNAS; CREB1; CAMK2A; MAPK3; SRC; RAF1; |
| | MAP2K2; STAT3; MAP2K1; BRAF; ATF4 |
| Mitochondrial Dysfunction | SOD2; MAPK8; CASP8; MAPK10; MAPK9; CASP9; PARK7; PSEN1; |
| Notch Signaling | PARK2; APP; CASP3 HES1; JAG1; NUMB; NOTCH4; ADAM17; NOTCH2; |
| | PSEN1; NOTCH3; NOTCH1; DLL4 |
| Endoplasmic Reticulum Stress | HSPA5; MAPK8; XBP1; TRAF2; ATF6; CASP9; ATF4; EIF2AK3; CASP3 |
| Pathway Pyrimidine | NME2; AICDA; RRM2; EIF2AK4; ENTPD1; RRM2B; NT5E; POLD1; NME1 |
| Metabolism | |
| Parkinson’s Signaling | UCHL1; MAPK8; MAPK13; MAPK14; CASP9; PARK7; PARK2; CASP3 |
| Cardiac & Beta Adrenergic | GNAS; GNAQ; PPP2R1A; GNB2L1; PPP2CA; PPPICC; PPP2R5C |
| Signaling | |
| Glycolysis/Gluconeogenesis | HK2; GCK; GPI; ALDH1A1; PKM2; LDHA; HK1 |
| Interferon Signaling | IRF1; SOCS1; JAK1; JAK2; IFITM1; STAT1; IFIT3 |
| Sonic Hedgehog Signaling | ARRB2; SMO; GLI2; DYRK1A; GLI1; GSK3B; DYRKIB |
| Glycerophospholipid | PLD1; GRN; GPAM; YWHAZ; SPHK1; SPHK2 |
| Metabolism | |
| Phospholipid Degradation | PRDX6; PLD1; GRN; YWHAZ; SPHK1; SPHK2 |
| Tryptophan Metabolism | SIAH2; PRMT5; NEDD4; ALDH1A1; CYP1B1; SIAH1 |
| Lysine Degradation | SUV39H1; EHMT2; NSD1; SETD7; PPP2R5C |
| Nucleotide Excision Repair | ERCC5; ERCC4; XPA; XPC; ERCC1 |
| Pathway | |
| Starch and Sucrose | UCHL1; HK2; GCK; GP1; HK1 |
| Metabolism | |
| Aminosugars Metabolism | NQO1; HK2; GCK; HK1 |
| Arachidonic Acid | PRDX6; GRN; YWHAZ; CYP1B1 |
| Metabolism | |
| Circadian Rhythm Signaling | CSNKIE; CREB1; ATF4; NR1D1 |
| Coagulation System | BDKRB1; F2R; SERPINE1; F3 |
| Dopamine Receptor | PPP2R1A; PPP2CA; PPPICC; PPP2R5C |
| Signaling | |
| Glutathione Metabolism | IDH2; GSTPI; ANPEP; IDH1 |
| Glvcerolinid Metabolism | ALDH1A1; GPAM; SPHK1; SPHK2 |
| Linoleic Acid Metabolism | PRDX6; GRN; YWHAZ; CYP1B1 |
| Methionine Metabolism | DNMT1; DNMT3B; AHCY; DNMT3A |
| Pyruvate Metabolism | GLO1; ALDH1A1; PKM2; LDHA |
| Arginine and Proline | ALDH1A1; NOS3; NOS2A |
| Metabolism | |
| Eicosanoid Signaling | PRDX6; GRN; YWHAZ |
| Fructose and Mannose | HK2; GCK; HK1 |
| Metabolism | |
| Galactose Metabolism | HK2; GCK; HK1 |
| Stilbene, Coumarine and | PRDX6; PRDXI; TYR |
| Lignin Biosynthesis | |
| Antigen Presentation | CALR; B2M |
| Pathway | |
| Biosynthesis of Steroids | NQO1;DHCR7 |
| Butanoate Metabolism | ALDH1A1; NLGN1 |
| Citrate Cycle | IDH2; IDH1 |
| Fatty Acid Metabolism | ALDH1A1; CYP1B1 |
| Glycerophospholipid | PRDX6; CHKA |
| Metabolism | |
| Histidine Metabolism | PRMT5; ALDH1A1 |
| Inositol Metabolism | EROIL; APEX1 |
| Metabolism of Xenobiotics | GSTPI; CYP1B1 |
| by Cytochrome p450 | |
| Methane Metabolism | PRDX6; PRDX1 |
| Phenylalanine Metabolism | PRDX6; PRDX1 |
| Propanoate Metabolism | ALDH1A1; LDHA |
| Selenoamino Acid | PRMT5; AHCY |
| Metabolism | |
| Sphingolipid Metabolism | SPHK1; SPHK2 |
| Aminophosphonate | PRMT5 |
| Metabolism | |
| Androgen and Estrogen | PRMT5 |
| Metabolism | |
| Ascorbate and Aldarate | ALDH1A1 |
| Metabolism | |
| Bile Acid Biosynthesis | ALDH1A1 |
| Cysteine Metabolism | LDHA |
| Fatty Acid Biosynthesis | FASN |
| Glutamate Receptor | GNB2L1 |
| Signaling | |
| NRF2-mediated Oxidative | PRDX1 |
| Stress Response | |
| Pentose Phosphate | GP1 |
| Pathway | |
| Pentose and Glucuronate | UCHL1 |
| Interconversions | |
| Retinol Metabolism | ALDH1A1 |
| Riboflavin Metabolism | TYR |
| Tyrosine Metabolism | PRMT5, TYR |
| Ubiquinone Biosynthesis | PRMT5 |
| Valine, Leucine and | ALDH1A1 |
| Isoleucine Degradation | |
| Glycine, Serine and | CHKA |
| Threonine Metabolism | |
| Lysine Degradation | ALDH1A1 |
| Pain/Taste | TRPM5; TRPA1 |
| Pain | TRPM7; TRPC5; TRPC6; TRPC1; Cnr1; cm2; Grk2; Trpa1; Pome; Cgrp; Crf; |
| | Pka; Era; Nr2b; TRPM5; Prkaca; Prkacb; Prkar1a; Prkar2a |
| Mitochondrial Function | AIF; CytC; SMAC (Diablo); Aifm-1; Aifm-2 |
| Developmental Neurology | BMP-4; Chordin (Chrd); Noggin (Nog); WNT (Wnt2; Wnt2b; Wnt3a; Wnt4; |
| | Wnt5a; Wnt6; Wnt7b; Wnt8b; Wnt9a; Wnt9b; Wnt10a; Wnt10b; Wnt16); beta- |
| | catenin; Dkk-1; Frizzled related proteins; Otx-2; Gbx2; FGF-8; Reelin; Dab1; |
| | unc-86 (Pou4f1 orBm3a); Numb; Reln |

[1018] In an aspect, the invention provides a method of individualized or personalized treatment of a genetic disease in a subject in need of such treatment comprising: (a) introducing one or more mutations ex vivo in a tissue, organ or a cell line, or in vivo in a transgenic non-human mammal, comprising delivering to cell(s) of the tissue, organ, cell or mammal a composition comprising the particle delivery system or the delivery system or the virus particle of any one of the above embodiments or the cell of any one of the above embodiments, wherein the specific mutations or precise sequence substitutions are or have been correlated to the genetic disease; (b) testing treatment(s) for the genetic disease on the cells to which the vector has been delivered that have the specific mutations or precise sequence substitutions correlated to the genetic disease; and (c) treating the subject based on results from the testing of treatment(s) of step (b).

### Infectious Diseases

[1019] In some embodiments, the composition, system(s) or component(s) thereof can be used to diagnose, prognose, treat, and/or prevent an infectious disease caused by a microorganism, such as bacteria, virus, fungi, parasites, or combinations thereof.

[1020] In some embodiments, the system(s) or component(s) thereof can be capable of targeting specific microorganism within a mixed population. Exemplary methods of such techniques are described in e.g. Gomaa A A, Klumpe H E, Luo M L, Selle K, Barrangou R, Beisel C L. 2014. Programmable removal of bacterial strains by use of genome-targeting composition, systems, mBio 5:e00928-13; Citorik R J, Mimee M, Lu T K. 2014. Sequence-specific antimicrobials using efficiently delivered RNA-guided nucleases. Nat Biotechnol 32:1141-1145, the teachings of which can be adapted for use with the compositions, systems, and components thereof described herein.

[1021] In some embodiments, the composition, system,(s) and/or components thereof can be capable of targeting pathogenic and/or drug-resistant microorganisms, such as bacteria, virus, parasites, and fungi. In some embodiments, the composition, system,(s) and/or components thereof can be capable of targeting and modifying one or more polynucleotides in a pathogenic microorganism such that the microorganism is less virulent, killed, inhibited, or is otherwise rendered incapable of causing disease and/or infecting and/or replicating in a host cell.

[1022] In some embodiments, the pathogenic bacteria that can be targeted and/or modified by the composition, system,(s) and/or component(s) thereof described herein include, but are not limited to, those of the genus Actinomyces (e.g. A. israelii), Bacillus (e.g. B. anthracis, B. cereus), Bactereoides (e.g. B. fragilis), Bartonella (B. henselae, B. quintana), Bordetella (B. pertussis), Borrelia (e.g. B. burgdorferi, B. garinii, B. afzelii, and B. recurreentis), Brucella (e.g. B. abortus, B. canis, B. melitensis, and B. suis), Campylobacter (e.g. C. jejuni), Chlamydia (e.g. C. pneumoniae and C. trachomatis), Chlamydophila (e.g. C. psittaci), Clostridium (e.g. C. botulinum, C. difficile, C. perfringens. C. tetani), Corynebacterium (e.g. C. diptheriae), Enterococcus (e.g. E. Faecalis, E. faecium), Ehrlichia (E. canis and E. chaffensis) Escherichia (e.g. E. coli), Francisella (e.g. F. tularensis), Haemophilus (e.g. H. influenzae), Helicobacter H. pylori), Klebsiella (E.g. K pneumoniae), Legionella (e.g. L. pneumophila), Leptospira (e.g. L. interrogans, L. santarosai, L. weilii, L. noguchii), Listereia (e.g. L. monocytogeenes), Mycobacterium (e.g. M. leprae, M. tuberculosis, M. ulcerans), Mycoplasma (M. pneumoniae), Neisseria (N. gonorrhoeae and N. menigitidis), Nocardia (e.g. N. asteeroides), Pseudomonas (P. aeruginosa), Rickettsia (R. rickettsia), Salmonella (S. typhi and S. typhimurium), Shigella (S. sonnei and S. dysenteriae), Staphylococcus (S. aureus, S. epidermidis, and S. saprophyticus), Streeptococcus (S. agalactiaee, S. pneumoniae, S. pyogenes), Treponema (T pallidum), Ureeaplasma (e.g. U. urealyticum), Vibrio (e.g. V. cholerae), Yersinia (e.g. Y. pestis, Y. enteerocolitica, and Y. pseudotuberculosis).

[1023] In some embodiments, the pathogenic virus that can be targeted and/or modified by the composition, system,(s) and/or component(s) thereof described herein include, but are not limited to, a double-stranded DNA virus, a partly double-stranded DNA virus, a single-stranded DNA virus, a positive single-stranded RNA virus, a negative single-stranded RNA virus, or a double stranded RNA virus. In some embodiments, the pathogenic virus can be from the family Adenoviridae (e.g. Adenovirus), Herpeesviridae (e.g. Herpes simplex, type 1, Herpes simplex, type 2, Varicella-zoster virus, Epstein-Barr virus, Human cytomegalovirus, Human herpesvirus, type 8), Papillomaviridae (e.g. Human papillomavirus), Polyomaviridae (e.g. BK virus, JC virus), Poxviridae (e.g. smallpox), Hepadnaviridae (e.g. Hepatitis B), Parvoviridae (e.g. Parvovirus B19), Astroviridae (e.g. Human astrovirus), Caliciviridae (e.g. Norwalk virus), Picornaviridae (e.g. coxsackievirus, hepatitis A virus, poliovirus, rhinovirus), Coronaviridae (e.g. Severe acute respiratory syndrome-related coronavirus, strains: Severe acute respiratory syndrome virus, Severe acute respiratory syndrome coronavirus 2 (COVID-19)), Flaviviridae (e.g. Hepatitis C virus, yellow fever virus, dengue virus, West Nile virus, TBE virus), Togaviridae (e.g. Rubella virus), Hepeviridae (e.g. Hepatitis E virus), Retroviridae (Human immunodeficiency virus (HIV)), Orthomyxoviridae (e.g. Influenza virus), Arenaviridae (e.g. Lassa virus), Bunyaviridae (e.g. Crimean-Congo hemorrhagic fever virus, Hantaan virus), Filoviridae (e.g. Ebola virus and Marburg virus), Paramyxoviridae (e.g. Measles virus, Mumps virus, Parainfluenza virus, Respiratory syncytial virus), Rhabdoviridae (Rabies virus), Hepatits D virus, Reoviridae (e.g. Rotavirus, Orbivirus, Coltivirus, Banna virus).

[1024] In some embodiments, the pathogenic fungi that can be targeted and/or modified by the composition, system,(s) and/or component(s) thereof described herein include, but are not limited to, those of the genus Candida (e.g. C. albicans), Aspergillus (e.g. A. fumigatus, A. flavus, A. clavatus), Cryptococcus (e.g. C. neoformans, C. gattii), Histoplasma (e.g., H. capsulatum), Pneumocystis (e.g. P. jiroveecii), Stachybotrys (e.g. S. chartarum).

[1025] In some embodiments, the pathogenic parasites that can be targeted and/or modified by the composition, system(s) and/or component(s) thereof described herein include, but are not limited to, protozoa, helminths, and ectoparasites. In some embodiments, the pathogenic protozoa that can be targeted and/or modified by the composition, system,(s) and/or component(s) thereof described herein include, but are not limited to, those from the groups Sarcodina (e.g. ameba such as Entamoeba), Mastigophora (e.g. flagellates such as Giardia and Leishmania), Cilophora (e.g. ciliates such as Balantidum), and sporozoa (e.g. plasmodium and cryptosporidium). In some embodiments, the pathogenic helminths that can be targeted and/or modified by the composition, system(s) and/or component(s) thereof described herein include, but are not limited to, flatworms (platyhelminths), thorny-headed worms (acanthoceephalins), and roundworms (nematodes). In some embodiments, the pathogenic ectoparasites that can be targeted and/or modified by the composition, system(s) and/or component(s) thereof described herein include, but are not limited to, ticks, fleas, lice, and mites.

[1026] In some embodiments, the pathogenic parasite that can be targeted and/or modified by the composition, system,(s) and/or component(s) thereof described herein include, but are not limited to, Acanthamoeba spp., Balamuthia mandrillaris, Babesiosis spp. (e.g. Babesia B. divergens, B. bigemina, B. equi, B. microfti, B. duncani), Balantidiasis spp. (e.g. Balantidium coli), Blastocystis spp., Cryptosporidium spp., Cyclosporiasis spp. (e.g. Cyclospora cayetanensis), Dientamoebiasis spp. (e.g. Dientamoeba fragilis), Amoebiasis spp. (e.g. Entamoeba histolytica), Giardiasis spp. (e.g. Giardia lamblia), Isosporiasis spp. (e.g. Isospora Leishmania spp., Naegleria spp. (e.g. Naegleria fowleri), Plasmodium spp. (e.g. Plasmodium falciparum, Plasmodium vivax, Plasmodium ovale curtisi, Plasmodium ovale wallikeri, Plasmodium malariae, Plasmodium knowlesi), Rhinosporidiosis spp. (e.g. Rhinosporidium seeberi), Sarcocystosis spp. (e.g. Sarcocystis bovihominis, Sarcocystis suihominis), Toxoplasma spp. (e.g. Toxoplasma gondii), Trichomonas spp. (e.g. Trichomonas vaginalis), Trypanosoma spp. (e.g. Trypanosoma brucei), Trypanosoma spp. (e.g. Trypanosoma cruzi), Tapeworm (e.g. Cestoda, Taenia multiceps, Taenia saginata, Taenia solium), Diphyllobothrium latum spp., Echinococcus spp. (e.g. Echinococcus granulosus, Echinococcus multilocularis, E. vogeli, E. oligarthrus), Hymenolepis spp. (e.g. Hymenolepis nana, Hymenolepis diminuta), Bertiella spp. (e.g. Bertiella mucronata, Bertiella studeri), Spirometra (e.g. Spirometra erinaceieuropaei), Clonorchis spp. (e.g. Clonorchis sinensis; Clonorchis viverrini), Dicrocoelium spp. (e.g. Dicrocoelium dendriticum), Fasciola spp. (e.g. Fasciola hepatica, Fasciola gigantica), Fasciolopsis spp. (e.g. Fasciolopsis buski), Metagonimus spp. (e.g. Metagonimus yokogawai), Metorchis spp. (e.g. Metorchis conjunctus), Opisthorchis spp. (e.g. Opisthorchis viverrini, Opisthorchis felineus), Clonorchis spp. (e.g. Clonorchis sinensis), Paragonimus spp. (e.g. Paragonimus westermani; Paragonimus africanus; Paragonimus caliensis; Paragonimus kellicotti; Paragonimus skrjabini; Paragonimus uterobilateralis), Schistosoma sp., Schistosoma spp. (e.g. Schistosoma mansoni, Schistosoma haematobium, Schistosoma japonicum, Schistosoma mekongi, and Schistosoma intercalatum), Echinostoma spp. (e.g. E. echinatum), Trichobilharzia spp. (e.g. Trichobilharzia regent), Ancylostoma spp. (e.g. Ancylostoma duodenale), Necator spp. (e.g. Necator americanus), Angiostrongylus spp., Anisakis spp., Ascaris spp. (e.g. Ascaris lumbricoides), Baylisascaris spp. (e.g. Baylisascaris procyonis), Brugia spp. (e.g. Brugia malayi, Brugia timori), Dioctophyme spp. (e.g. Dioctophyme renale), Dracunculus spp. (e.g. Dracunculus medinensis), Enterobius spp. (e.g. Enterobius vermicularis, Enterobius gregorii), Gnathostoma spp. (e.g. Gnathostoma spinigerum, Gnathostoma hispidum), Halicephalobus spp. (e.g. Halicephalobus gingivalis), Loa loa spp. (e.g. Loa loa filaria), Mansonella spp. (e.g. Mansonella streptocerca), Onchocerca spp. (e.g. Onchocerca volvulus), Strongyloides spp. (e.g. Strongyloides stercoralis), Thelazia spp. (e.g. Thelazia californiensis, Thelazia callipaeda), Toxocara spp. (e.g. Toxocara canis, Toxocara cati, Toxascaris leonine), Trichinella spp. (e.g. Trichinella spiralis, Trichinella britovi, Trichinella nelsoni, Trichinella nativa), Trichuris spp. (e.g. Trichuris trichiura, Trichuris vulpis), Wuchereria spp. (e.g. Wuchereria bancrofti), Dermatobia spp. (e.g. Dermatobia hominis), Tunga spp. (e.g. Tunga penetrans), Cochliomyia spp. (e.g. Cochliomyia hominivorax), Linguatula spp. (e.g. Linguatula serrata), Archiacanthocephala sp., Moniliformis sp. (e.g. Moniliformis moniliformis), Pediculus spp. (e.g. Pediculus humanus capitis, Pediculus humanus humanus), Pthirus spp. (e.g. Pthirus pubis), Arachnida spp. (e.g. Trombiculidae, Ixodidae, Argaside), Siphonaptera spp (e.g. Siphonaptera: Pulicinae), Cimicidae spp. (e.g. Cimex lectularius and Cimex hemipterus), Diptera spp., Demodex spp. (e.g. Demodex folliculorum/brevis/canis), Sarcoptes spp. (e.g. Sarcoptes scabiei), Dermanyssus spp. (e.g. Dermanyssus gallinae), Ornithonyssus spp. (e.g. Ornithonyssus sylviarum, Ornithonyssus bursa, Ornithonyssus bacoti), Laelaps spp. (e.g. Laelaps echidnina), Liponyssoides spp. (e.g. Liponyssoides sanguineus).

[1027] In some embodiments the gene targets can be any of those as set forth in Table 1 of Strich and Chertow. 2019. J. Clin. Microbio. 57:4 e01307-18, which is incorporated herein as if expressed in its entirety herein.

[1028] In some embodiments, the method can include delivering a composition, system, and/or component thereof to a pathogenic organism described herein, allowing the composition, system, and/or component thereof to specifically bind and modify one or more targets in the pathogenic organism, whereby the modification kills, inhibits, reduces the pathogenicity of the pathogenic organism, or otherwise renders the pathogenic organism non-pathogenic. In some embodiments, delivery of the composition, system, occurs in vivo (i.e. in the subject being treated). In some embodiments occurs by an intermediary, such as microorganism or phage that is non-pathogenic to the subject but is capable of transferring polynucleotides and/or infecting the pathogenic microorganism. In some embodiments, the intermediary microorganism can be an engineered bacteria, virus, or phage that contains the composition, system(s) and/or component(s) thereof and/or CRISPR-Cas vectors and/or vector systems. The method can include administering an intermediary microorganism containing the composition, system(s) and/or component(s) thereof and/or CRISPR-Cas vectors and/or vector systems to the subject to be treated. The intermediary microorganism can then produce the CRISPR-system and/or component thereof or transfer a composition, system, polynucleotide to the pathogenic organism. In embodiments, where the CRISPR-system and/or component thereof, vector, or vector system is transferred to the pathogenic microorganism, the composition, system, or component thereof is then produced in the pathogenic microorganism and modifies the pathogenic microorganism such that it is less virulent, killed, inhibited, or is otherwise rendered incapable of causing disease and/or infecting and/or replicating in a host or cell thereof.

[1029] In some embodiments, where the pathogenic microorganism inserts its genetic material into the host cell's genome (e.g. a virus), the composition, system, can be designed such that it modifies the host cell's genome such that the viral DNA or cDNA cannot be replicated by the host cell's machinery into a functional virus. In some embodiments, where the pathogenic microorganism inserts its genetic material into the host cell's genome (e.g. a virus), the composition, system can be designed such that it modifies the host cell's genome such that the viral DNA or cDNA is deleted from the host cell's genome.

[1030] It will be appreciated that inhibiting or killing the pathogenic microorganism, the disease and/or condition that its infection causes in the subject can be treated or prevented. Thus, also provided herein are methods of treating and/or preventing one or more diseases or symptoms thereof caused by any one or more pathogenic microorganisms, such as any of those described herein.

### Mitochondrial Diseases

[1031] Some of the most challenging mitochondrial disorders arise from mutations in mitochondrial DNA (mtDNA), a high copy number genome that is maternally inherited. In some embodiments, mtDNA mutations can be modified using a composition, system, described herein. In some embodiments, the mitochondrial disease that can be diagnosed, prognosed, treated, and/or prevented can be MELAS (mitochondrial myopathy encephalopathy, and lactic acidosis and stroke-like episodes), CPEO/PEO (chronic progressive external ophthalmoplegia syndrome/progressive external ophthalmoplegia), KSS (Kearns-Sayre syndrome), MIDD (maternally inherited diabetes and deafness), MERRF (myoclonic epilepsy associated with ragged red fibers), NIDDM (noninsulin-dependent diabetes mellitus), LHON (Leber hereditary optic neuropathy), LS (Leigh Syndrome) an aminoglycoside induced hearing disorder, NARP (neuropathy, ataxia, and pigmentary retinopathy), Extrapyramidal disorder with akinesia-rigidity, psychosis and SNHL, Nonsyndromic hearing loss a cardiomyopathy, an encephalomyopathy, Pearson's syndrome, or a combination thereof.

[1032] In some embodiments, the mtDNA of a subject can be modified in vivo or ex vivo. In some embodiments, where the mtDNA is modified ex vivo, after modification the cells containing the modified mitochondria can be administered back to the subject. In some embodiments, the composition, system, or component thereof can be capable of correcting an mtDNA mutation, or a combination thereof.

[1033] In some embodiments, at least one of the one or more mtDNA mutations is selected from the group consisting of: A3243G, C3256T, T3271C, G1019A, A1304T, A15533G, C1494T, C4467A, T1658C, G12315A, A3421G, A8344G, T8356C, G8363A, A13042T, T3200C, G3242A, A3252G, T3264C, G3316A, T3394C, T14577C, A4833G, G3460A, G9804A, G11778A, G14459A, A14484G, G15257A, T8993C, T8993G, G10197A, G13513A, T1095C, C1494T, A1555G, G1541A, C1634T, A3260G, A4269G, T7587C, A8296G, A8348G, G8363A, T9957C, T9997C, G12192A, C12297T, A14484G, G15059A, duplication of CCCCCTCCCC-tandem repeats at positions 305-314 and/or 956-965, deletion at positions from 8,469-13,447, 4,308-14,874, and/or 4,398-14,822, 961ins/delC, the mitochondrial common deletion (e.g. mtDNA 4,977 bp deletion), and combinations thereof.

[1034] In some embodiments, the mitochondrial mutation can be any mutation as set forth in or as identified by use of one or more bioinformatic tools available at Mitomap available at mitomap.org. Such tools include, but are not limited to, “Variant Search, aka Market Finder”, Find Sequences for Any Haplogroup, aka “Sequence Finder”, “Variant Info”, “POLG Pathogenicity Prediction Server”, “MITOMASTER”, “Allele Search”, “Sequence and Variant Downloads”, “Data Downloads”. MitoMap contains reports of mutations in mtDNA that can be associated with disease and maintains a database of reported mitochondrial DNA Base Substitution Diseases: rRNA/tRNA mutations.

[1035] In some embodiments, the method includes delivering a composition, system, and/or a component thereof to a cell, and more specifically one or more mitochondria in a cell, allowing the composition, system, and/or component thereof to modify one or more target polynucleotides in the cell, and more specifically one or more mitochondria in the cell. The target polynucleotides can correspond to a mutation in the mtDNA, such as any one or more of those described herein. In some embodiments, the modification can alter a function of the mitochondria such that the mitochondria functions normally or at least is/are less dysfunctional as compared to an unmodified mitochondria. Modification can occur in vivo or ex vivo. Where modification is performed ex vivo, cells containing modified mitochondria can be administered to a subject in need thereof in an autologous or allogenic manner.

### Microbiome Modification

[1036] Microbiomes play important roles in health and disease. For example, the gut microbiome can play a role in health by controlling digestion, preventing growth of pathogenic microorganisms and have been suggested to influence mood and emotion. Imbalanced microbiomes can promote disease and are suggested to contribute to weight gain, unregulated blood sugar, high cholesterol, cancer, and other disorders. A healthy microbiome has a series of joint characteristics that can be distinguished from non-healthy individuals, thus detection and identification of the disease-associated microbiome can be used to diagnose and detect disease in an individual. The compositions, systems, and components thereof can be used to screen the microbiome cell population and be used to identify a disease associated microbiome. Cell screening methods utilizing compositions, systems, and components thereof are described elsewhere herein and can be applied to screening a microbiome, such as a gut, skin, vagina, and/or oral microbiome, of a subject.

[1037] In some embodiments, the microbe population of a microbiome in a subject can be modified using a composition, system, and/or component thereof described herein. In some embodiments, the composition, system, and/or component thereof can be used to identify and select one or more cell types in the microbiome and remove them from the microbiome population. Exemplary methods of selecting cells using a composition, system, and/or component thereof are described elsewhere herein. In this way the make-up or microorganism profile of the microbiome can be altered. In some embodiments, the alteration causes a change from a diseased microbiome composition to a healthy microbiome composition. In this way the ratio of one type or species of microorganism to another can be modified, such as going from a diseased ratio to a healthy ratio. In some embodiments, the cells selected are pathogenic microorganisms.

[1038] In some embodiments, the compositions and systems described herein can be used to modify a polynucleotide in a microorganism of a microbiome in a subject. In some embodiments, the microorganism is a pathogenic microorganism. In some embodiments, the microorganism is a commensal and non-pathogenic microorganism. Methods of modifying polynucleotides in a cell in the subject are described elsewhere herein and can be applied to these embodiments.

### Models of Diseases and Conditions

[1039] In an aspect, the invention provides a method of modeling a disease associated with a genomic locus in a eukaryotic organism or a non-human organism comprising manipulation of a target sequence within a coding, non-coding or regulatory element of said genomic locus comprising delivering a non-naturally occurring or engineered composition comprising a viral vector system comprising one or more viral vectors operably encoding a composition for expression thereof, wherein the composition comprises particle delivery system or the delivery system or the virus particle of any one of the above embodiments or the cell of any one of the above embodiments.

[1040] In one aspect, the invention provides a method of generating a model eukaryotic cell that can include one or more a mutated disease genes and/or infectious microorganisms. In some embodiments, a disease gene is any gene associated an increase in the risk of having or developing a disease. In some embodiments, the method includes (a) introducing one or more vectors into a eukaryotic cell, wherein the one or more vectors comprise a composition, system, and/or component thereof and/or a vector or vector system that is capable of driving expression of a composition, system, and/or component thereof including, but not limited to: a guide sequence optionally linked to a tracr mate sequence, a tracr sequence, one or more Cas effectors, and combinations thereof and (b) allowing a composition, system, or complex to bind to one or more target polynucleotides, e.g., to effect cleavage, nicking, or other modification of the target polynucleotide within said disease gene, wherein the composition, system, or complex is composed of one or more CRISPR-Cas effectors complexed with (1) one or more guide sequences that is/are hybridized to the target sequence(s) within the target polynucleotide(s), and optionally (2) the tracr mate sequence(s) that is/are hybridized to the tracr sequence(s), thereby generating a model eukaryotic cell comprising one or more mutated disease gene(s). Thus, in some embodiments the composition and system, contains nucleic acid molecules for and drives expression of one or more of: a Cas effector, a guide sequence linked to a tracr mate sequence, and a tracr sequence and/or a Homologous Recombination template and/or a stabilizing ligand if the Cas effector has a destabilization domain. In some embodiments, said cleavage comprises cleaving one or two strands at the location of the target sequence by the Cas effector(s). In some embodiments, nicking comprises nicking one or two strands at the location of the target sequence by the Cas effector(s). In some embodiments, said cleavage or nicking results in modified transcription of a target polynucleotide. In some embodiments, modification results in decreased transcription of the target polynucleotide. In some embodiments, the method further comprises repairing said cleaved or nicked target polynucleotide by homologous recombination with an recombination template polynucleotide, wherein said repair results in a mutation comprising an insertion, deletion, or substitution of one or more nucleotides of said target polynucleotide. In some embodiments, said mutation results in one or more amino acid changes in a protein expression from a gene comprising the target sequence.

[1041] The disease modeled can be any disease with a genetic or epigenetic component. In some embodiments, the disease modeled can be any as discussed elsewhere herein, including but not limited to any as set forth in Tables 10 and 11 herein.

### In Situ Disease Detection

[1042] The compositions, systems, and/or components thereof can be used for diagnostic methods of detection such as in CASFISH (see e.g. Deng et al. 2015. PNAS USA 112(38): 11870-11875), CRISPR-Live FISH (see e.g. Wang et al. 2020. Science; 365(6459):1301-1305), sm-FISH (Lee and Jefcoate. 2017. Front. Endocrinol. doi.org/10.3389/fendo.2017.00289), sequential FISH CRISPRainbow (Ma et al. Nat Biotechnol, 34 (2016), pp. 528-530), CRISPR-Sirius (Nat Methods, 15 (2018), pp. 928-931), Casilio (Cheng et al. Cell Res, 26 (2016), pp. 254-257), Halo-Tag based genomic loci visualization techniques (e.g. Deng et al. 2015. PNAS USA 112(38): 11870-11875; Knight et al., Science, 350 (2015), pp. 823-826), RNA-aptamer based methods (e.g. Ma et al., J Cell Biol, 214 (2016), pp. 529-537), molecular beacon-based methods (e.g. Zhao et al. Biomaterials, 100 (2016), pp. 172-183; Wu et al. Nucleic Acids Res (2018)), Quantum Dot-based systems (e.g. Ma et al. Anal Chem, 89 (2017), pp. 12896-12901), multiplexed methods (e.g. Ma et al., Proc Natl Acad Sci USA, 112 (2015), pp. 3002-3007; Fu et al. Nat Commun, 7 (2016), p. 11707; Ma et al. Nat Biotechnol, 34 (2016), pp. 528-530; Shao et al. Nucleic Acids Res, 44 (2016), Article e86); Wang et al. Sci Rep, 6 (2016), p. 26857), ç, and other in situ CRISPR-hybridization based methods (e.g. Chen et al. Cell, 155 (2013), pp. 1479-1491; Gu et al. Science, 359 (2018), pp. 1050-1055; Tanebaum et al. Cell, 159 (2014), pp. 635-646; Ye et al. Protein Cell, 8 (2017), pp. 853-855; Chen et al. Nat Commun, 9 (2018), p. 5065; Shao et al. ACS Synth Biol (2017); Fu et al. Nat Commun, 7 (2016), p. 11707; Shao et al. Nucleic Acids Res, 44 (2016), Article e86; Wang et al., Sci Rep, 6 (2016), p. 26857), all of which are incorporated by reference herein as if expressed in their entirety and whose teachings can be adapted to the compositions, systems, and components thereof described herein in view of the description herein.

[1043] In some embodiments, the composition, system, or component thereof can be used in a detection method, such as an in situ detection method described herein. In some embodiments, the composition, system, or component thereof can include a catalytically inactivate Cas effector described herein and use this system in detection methods such as fluorescence in situ hybridization (FISH) or any other described herein. In some embodiments, the inactivated Cas effector, which lacks the ability to produce DNA double-strand breaks may be fused with a marker, such as fluorescent protein, such as the enhanced green fluorescent protein (eEGFP) and co-expressed with small guide RNAs to target pericentric, centric and telomeric repeats in vivo. The dCas effector or system thereof can be used to visualize both repetitive sequences and individual genes in the human genome. Such new applications of labelled dCas effector and compositions, systems, thereof can be important in imaging cells and studying the functional nuclear architecture, especially in cases with a small nucleus volume or complex 3-D structures.

### Cell Selection

[1044] In some embodiments, the compositions, systems, and/or components thereof described herein can be used in a method to screen and/or select cells. In some embodiments, composition, system,-based screening/selection method can be used to identify diseased cells in a cell population. In some embodiments, selection of the cells results in a modification in the cells such that the selected cells die. In this way, diseased cells can be identified, and removed from the healthy cell population. In some embodiments, the diseased cells can be a cancer cell, pre-cancerous cell, a virus or other pathogenic organism infected cells, or otherwise abnormal cell. In some embodiments, the modification can impart another detectable change in the cells to be selected (e.g. a functional change and/or genomic barcode) that facilitates selection of the desired cells. In some embodiments a negative selection scheme can be used to obtain a desired cell population. In these embodiments, the cells to be selected against are modified, thus can be removed from the cell population based on their death or identification or sorting based the detectable change imparted on the cells. Thus, in these embodiments, the remaining cells after selection are the desired cell population.

[1045] In some embodiments, a method of selecting one or more cell(s) containing a polynucleotide modification can include: introducing one or more composition, system,(s) and/or components thereof, and/or vectors or vector systems into the cell(s), wherein the composition, system,(s) and/or components thereof, and/or vectors or vector systems contains and/or is capable of expressing one or more of: a Cas effector, a guide sequence optionally linked to a tracr mate sequence, a tracr sequence, and an recombination template; wherein, for example that which is being expressed is within and expressed in vivo by the composition, system, vector or vector system and/or the recombination template comprises the one or more mutations that abolish Cas effector cleavage; allowing homologous recombination of the recombination template with the target polynucleotide in the cell(s) to be selected; allowing a composition, system, or complex to bind to a target polynucleotide to effect cleavage of the target polynucleotide within said gene, wherein the AAV-complex comprises the Cas effector complexed with (1) the guide sequence that is hybridized to the target sequence within the target polynucleotide, and (2) the tracr mate sequence that is hybridized to the tracr sequence, wherein binding of the complex to the target polynucleotide induces cell death or imparts some other detectable change to the cell, thereby allowing one or more cell(s) in which one or more mutations have been introduced to be selected. In some embodiments, the cell to be selected may be a eukaryotic cell. In some embodiments, the cell to be selected may be a prokaryotic cell. Selection of specific cells via the methods herein can be performed without requiring a selection marker or a two-step process that may include a counter-selection system.

### Therapeutic Agent Development

[1046] The compositions, systems, and components thereof described herein can be used to develop CRISPR-Cas-based and non-CRISPR-Cas-based biologically active agents, such as small molecule therapeutics. Thus, described herein are methods for developing a biologically active agent that modulates a cell function and/or signaling event associated with a disease and/or disease gene. In some embodiments, the method comprises (a) contacting a test compound with a diseased cell and/or a cell containing a disease gene cell; and (b) detecting a change in a readout that is indicative of a reduction or an augmentation of a cell signaling event or other cell functionality associated with said disease or disease gene, thereby developing said biologically active agent that modulates said cell signaling event or other functionality associated with said disease gene. In some embodiments, the diseased cell is a model cell described elsewhere herein. In some embodiments, the diseased cell is a diseased cell isolated from a subject in need of treatment. In some embodiments, the test compound is a small molecule agent. In some embodiments, test compound is a small molecule agent. In some embodiments, the test compound is a biologic molecule agent.

[1047] In some embodiments, the method involves developing a therapeutic based on the composition, system, described herein. In particular embodiments, the therapeutic comprises a Cas effector and/or a guide RNA capable of hybridizing to a target sequence of interest. In particular embodiments, the therapeutic is a vector or vector system that can contain a) a first regulatory element operably linked to a nucleotide sequence encoding the Cas effector protein(s); and b) a second regulatory element operably linked to one or more nucleotide sequences encoding one or more nucleic acid molecules comprising a guide RNA comprising a guide sequence, a direct repeat sequence; wherein components (a) and (b) are located on same or different vectors. In particular embodiments, the biologically active agent is a composition comprising a delivery system operably configured to deliver composition, system, or components thereof, and/or or one or more polynucleotide sequences, vectors, or vector systems containing or encoding said components into a cell and capable of forming a complex with the components of the composition and system herein, and wherein said complex is operable in the cell. In some embodiments, the complex can include the Cas effector protein(s) as described herein, guide RNA comprising the guide sequence, and a direct repeat sequence. In any such compositions, the delivery system can be a yeast system, a lipofection system, a microinjection system, a biolistic system, virosomes, liposomes, immunoliposomes, polycations, lipid:nucleic acid conjugates or artificial virions, or any other system as described herein. In particular embodiments, the delivery is via a particle, a nanoparticle, a lipid or a cell penetrating peptide (CPP).

[1048] Also described herein are methods for developing or designing a composition, system, optionally a composition, system, based therapy or therapeutic, comprising (a) selecting for a (therapeutic) locus of interest gRNA target sites, wherein said target sites have minimal sequence variation across a population, and from said selected target sites subselecting target sites, wherein a gRNA directed against said target sites recognizes a minimal number of off-target sites across said population, or (b) selecting for a (therapeutic) locus of interest gRNA target sites, wherein said target sites have minimal sequence variation across a population, or selecting for a (therapeutic) locus of interest gRNA target sites, wherein a gRNA directed against said target sites recognizes a minimal number of off-target sites across said population, and optionally estimating the number of (sub)selected target sites needed to treat or otherwise modulate or manipulate a population, and optionally validating one or more of the (sub)selected target sites for an individual subject, optionally designing one or more gRNA recognizing one or more of said (sub)selected target sites.

[1049] In some embodiments, the method for developing or designing a gRNA for use in a composition, system, optionally a composition, system, based therapy or therapeutic, can include (a) selecting for a (therapeutic) locus of interest gRNA target sites, wherein said target sites have minimal sequence variation across a population, and from said selected target sites subselecting target sites, wherein a gRNA directed against said target sites recognizes a minimal number of off-target sites across said population, or (b) selecting for a (therapeutic) locus of interest gRNA target sites, wherein said target sites have minimal sequence variation across a population, or selecting for a (therapeutic) locus of interest gRNA target sites, wherein a gRNA directed against said target sites recognizes a minimal number of off-target sites across said population, and optionally estimating the number of (sub)selected target sites needed to treat or otherwise modulate or manipulate a population, optionally validating one or more of the (sub)selected target sites for an individual subject, optionally designing one or more gRNA recognizing one or more of said (sub)selected target sites.

[1050] In some embodiments, the method for developing or designing a composition, system, optionally a composition, system, based therapy or therapeutic in a population, can include (a) selecting for a (therapeutic) locus of interest gRNA target sites, wherein said target sites have minimal sequence variation across a population, and from said selected target sites subselecting target sites, wherein a gRNA directed against said target sites recognizes a minimal number of off-target sites across said population, or (b) selecting for a (therapeutic) locus of interest gRNA target sites, wherein said target sites have minimal sequence variation across a population, or selecting for a (therapeutic) locus of interest gRNA target sites, wherein a gRNA directed against said target sites recognizes a minimal number of off-target sites across said population, and optionally estimating the number of (sub)selected target sites needed to treat or otherwise modulate or manipulate a population, optionally validating one or more of the (sub)selected target sites for an individual subject, optionally designing one or more gRNA recognizing one or more of said (sub)selected target sites.

[1051] In some embodiments the method for developing or designing a gRNA for use in a composition, system, optionally a composition, system, based therapy or therapeutic in a population, can include (a) selecting for a (therapeutic) locus of interest gRNA target sites, wherein said target sites have minimal sequence variation across a population, and from said selected target sites subselecting target sites, wherein a gRNA directed against said target sites recognizes a minimal number of off-target sites across said population, or (b) selecting for a (therapeutic) locus of interest gRNA target sites, wherein said target sites have minimal sequence variation across a population, or selecting for a (therapeutic) locus of interest gRNA target sites, wherein a gRNA directed against said target sites recognizes a minimal number of off-target sites across said population, and optionally estimating the number of (sub)selected target sites needed to treat or otherwise modulate or manipulate a population, optionally validating one or more of the (sub)selected target sites for an individual subject, optionally designing one or more gRNA recognizing one or more of said (sub)selected target sites.

[1052] In some embodiments, the method for developing or designing a composition, system, such as a composition, system, based therapy or therapeutic, optionally in a population; or for developing or designing a gRNA for use in a composition, system, optionally a composition, system, based therapy or therapeutic, optionally in a population, can include selecting a set of target sequences for one or more loci in a target population, wherein the target sequences do not contain variants occurring above a threshold allele frequency in the target population (i.e. platinum target sequences); removing from said selected (platinum) target sequences any target sequences having high frequency off-target candidates (relative to other (platinum) targets in the set) to define a final target sequence set; preparing one or more, such as a set of compositions, systems, based on the final target sequence set, optionally wherein a number of CRISP-Cas systems prepared is based (at least in part) on the size of a target population.

[1053] In certain embodiments, off-target candidates/off-targets, PFS, PAM restrictiveness, target cleavage efficiency, or effector protein specificity is identified or determined using a sequencing-based double-strand break (DSB) detection assay, such as described herein elsewhere. In certain embodiments, off-target candidates/off-targets are identified or determined using a sequencing-based double-strand break (DSB) detection assay, such as described herein elsewhere. In certain embodiments, off-targets, or off target candidates have at least 1, preferably 1-3, mismatches or (distal) PFS or PAM mismatches, such as 1 or more, such as 1, 2, 3, or more (distal) PFS or PAM mismatches. In certain embodiments, sequencing-based DSB detection assay comprises labeling a site of a DSB with an adapter comprising a primer binding site, labeling a site of a DSB with a barcode or unique molecular identifier, or combination thereof, as described herein elsewhere.

[1054] It will be understood that the guide sequence of the gRNA is 100% complementary to the target site, i.e. does not comprise any mismatch with the target site. It will be further understood that “recognition” of an (off-)target site by a gRNA presupposes composition, system, functionality, i.e. an (off-)target site is only recognized by a gRNA if binding of the gRNA to the (off-)target site leads to composition, system, activity (such as induction of single or double strand DNA cleavage, transcriptional modulation, etc.).

[1055] In certain embodiments, the target sites having minimal sequence variation across a population are characterized by absence of sequence variation in at least 99%, preferably at least 99.9%, more preferably at least 99.99% of the population. In certain embodiments, optimizing target location comprises selecting target sequences or loci having an absence of sequence variation in at least 99%, %, preferably at least 99.9%, more preferably at least 99.99% of a population. These targets are referred to herein elsewhere also as “platinum targets”. In certain embodiments, said population comprises at least 1000 individuals, such as at least 5000 individuals, such as at least 10000 individuals, such as at least 50000 individuals.

[1056] In certain embodiments, the off-target sites are characterized by at least one mismatch between the off-target site and the gRNA. In certain embodiments, the off-target sites are characterized by at most five, preferably at most four, more preferably at most three mismatches between the off-target site and the gRNA. In certain embodiments, the off-target sites are characterized by at least one mismatch between the off-target site and the gRNA and by at most five, preferably at most four, more preferably at most three mismatches between the off-target site and the gRNA.

[1057] In certain embodiments, said minimal number of off-target sites across said population is determined for high-frequency haplotypes in said population. In certain embodiments, said minimal number of off-target sites across said population is determined for high-frequency haplotypes of the off-target site locus in said population. In certain embodiments, said minimal number of off-target sites across said population is determined for high-frequency haplotypes of the target site locus in said population. In certain embodiments, the high-frequency haplotypes are characterized by occurrence in at least 0.1% of the population.

[1058] In certain embodiments, the number of (sub)selected target sites needed to treat a population is estimated based on based low frequency sequence variation, such as low frequency sequence variation captured in large scale sequencing datasets. In certain embodiments, the number of (sub)selected target sites needed to treat a population of a given size is estimated.

[1059] In certain embodiments, the method further comprises obtaining genome sequencing data of a subject to be treated; and treating the subject with a composition, system, selected from the set of compositions, systems, wherein the composition, system, selected is based (at least in part) on the genome sequencing data of the individual. In certain embodiments, the ((sub)selected) target is validated by genome sequencing, preferably whole genome sequencing.

[1060] In certain embodiments, target sequences or loci as described herein are (further) selected based on optimization of one or more parameters, such as PFS or PAM type (natural or modified), PFS or PAM nucleotide content, PFS or PAM length, target sequence length, PFS or PAM restrictiveness, target cleavage efficiency, and target sequence position within a gene, a locus or other genomic region. Methods of optimization are discussed in greater detail elsewhere herein.

[1061] In certain embodiments, target sequences or loci as described herein are (further) selected based on optimization of one or more of target loci location, target length, target specificity, and PFS or PAM characteristics. As used herein, PFS or PAM characteristics may comprise for instance PFS or PAM sequence, PFS or PAM length, and/or PFS or PAM GC contents. In certain embodiments, optimizing PFS or PAM characteristics comprises optimizing nucleotide content of a PFS or PAM. In certain embodiments, optimizing nucleotide content of PFS or PAM is selecting a PFS or PAM with a motif that maximizes abundance in the one or more target loci, minimizes mutation frequency, or both. Minimizing mutation frequency can for instance be achieved by selecting PFS or PAM sequences devoid of or having low or minimal CpG.

[1062] In certain embodiments, the effector protein for each composition and system, in the set of compositions, systems, is selected based on optimization of one or more parameters selected from the group consisting of; effector protein size, ability of effector protein to access regions of high chromatin accessibility, degree of uniform enzyme activity across genomic targets, epigenetic tolerance, mismatch/budge tolerance, effector protein specificity, effector protein stability or half-life, effector protein immunogenicity or toxicity. Methods of optimization are discussed in greater detail elsewhere herein.

### Optimization of the Systems

[1063] The methods of the present invention can involve optimization of selected parameters or variables associated with the composition, system, and/or its functionality, as described herein further elsewhere. Optimization of the composition, system, in the methods as described herein may depend on the target(s), such as the therapeutic target or therapeutic targets, the mode or type of composition, system, modulation, such as composition, system, based therapeutic target(s) modulation, modification, or manipulation, as well as the delivery of the composition, system, components. One or more targets may be selected, depending on the genotypic and/or phenotypic outcome. For instance, one or more therapeutic targets may be selected, depending on (genetic) disease etiology or the desired therapeutic outcome. The (therapeutic) target(s) may be a single gene, locus, or other genomic site, or may be multiple genes, loci or other genomic sites. As is known in the art, a single gene, locus, or other genomic site may be targeted more than once, such as by use of multiple gRNAs.

[1064] The activity of the composition and/or system, such as CRISPR-Cas system-based therapy or therapeutics may involve target disruption, such as target mutation, such as leading to gene knockout. The activity of the composition and/or system, such as CRISPR-Cas system-based therapy or therapeutics may involve replacement of particular target sites, such as leading to target correction. CRISPR-Cas system-based therapy or therapeutics may involve removal of particular target sites, such as leading to target deletion. The activity of the composition and/or system, such as CRISPR-Cas system-based therapy or therapeutics may involve modulation of target site functionality, such as target site activity or accessibility, leading for instance to (transcriptional and/or epigenetic) gene or genomic region activation or gene or genomic region silencing. The skilled person will understand that modulation of target site functionality may involve CRISPR effector mutation (such as for instance generation of a catalytically inactive CRISPR effector) and/or functionalization (such as for instance fusion of the CRISPR effector with a heterologous functional domain, such as a transcriptional activator or repressor), as described herein elsewhere.

[1065] Accordingly, in an aspect, the invention relates to a method as described herein, comprising selection of one or more (therapeutic) target, selecting one or more functionality of the composition and/or system, and optimization of selected parameters or variables associated with the CRISPR-Cas system and/or its functionality. In a related aspect, the invention relates to a method as described herein, comprising (a) selecting one or more (therapeutic) target loci, (b) selecting one or more CRISPR-Cas system functionalities, (c) optionally selecting one or more modes of delivery, and preparing, developing, or designing a CRISPR-Cas system selected based on steps (a)-(c).

[1066] In certain embodiments, the functionality of the composition and/or system comprises genomic mutation. In certain embodiments, the functionality of the composition and/or system comprises single genomic mutation. In certain embodiments, the functionality of the composition and/or system functionality comprises multiple genomic mutation. In certain embodiments, the functionality of the composition and/or system comprises gene knockout. In certain embodiments, the functionality of the composition and/or system comprises single gene knockout. In certain embodiments, the functionality of the composition and/or system comprises multiple gene knockout. In certain embodiments, the functionality of the composition and/or system comprises gene correction. In certain embodiments, the functionality of the composition and/or system comprises single gene correction. In certain embodiments, the functionality of the composition and/or system comprises multiple gene correction. In certain embodiments, the functionality of the composition and/or system comprises genomic region correction. In certain embodiments, the functionality of the composition and/or system comprises single genomic region correction. In certain embodiments, the functionality of the composition and/or system comprises multiple genomic region correction. In certain embodiments, the functionality of the composition and/or system comprises gene deletion. In certain embodiments, the functionality of the composition and/or system comprises single gene deletion. In certain embodiments, the functionality of the composition and/or system comprises multiple gene deletion. In certain embodiments, the functionality of the composition and/or system comprises genomic region deletion. In certain embodiments, the functionality of the composition and/or system comprises single genomic region deletion. In certain embodiments, the functionality of the composition and/or system comprises multiple genomic region deletion. In certain embodiments, the functionality of the composition and/or system comprises modulation of gene or genomic region functionality. In certain embodiments, the functionality of the composition and/or system comprises modulation of single gene or genomic region functionality. In certain embodiments, the functionality of the composition and/or system comprises modulation of multiple gene or genomic region functionality. In certain embodiments, the functionality of the composition and/or system comprises gene or genomic region functionality, such as gene or genomic region activity. In certain embodiments, the functionality of the composition and/or system comprises single gene or genomic region functionality, such as gene or genomic region activity. In certain embodiments, the functionality of the composition and/or system comprises multiple gene or genomic region functionality, such as gene or genomic region activity. In certain embodiments, the functionality of the composition and/or system comprises modulation gene activity or accessibility optionally leading to transcriptional and/or epigenetic gene or genomic region activation or gene or genomic region silencing. In certain embodiments, the functionality of the composition and/or system comprises modulation single gene activity or accessibility optionally leading to transcriptional and/or epigenetic gene or genomic region activation or gene or genomic region silencing. In certain embodiments, the functionality of the composition and/or system comprises modulation multiple gene activity or accessibility optionally leading to transcriptional and/or epigenetic gene or genomic region activation or gene or genomic region silencing.

[1067] Optimization of selected parameters or variables in the methods as described herein may result in optimized or improved the system, such as CRISPR-Cas system-based therapy or therapeutic, specificity, efficacy, and/or safety. In certain embodiments, one or more of the following parameters or variables are taken into account, are selected, or are optimized in the methods of the invention as described herein: Cas protein allosteric interactions, Cas protein functional domains and functional domain interactions, CRISPR effector specificity, gRNA specificity, CRISPR-Cas complex specificity, PFS or PAM restrictiveness, PFS or PAM type (natural or modified), PFS or PAM nucleotide content, PFS or PAM length, CRISPR effector activity, gRNA activity, CRISPR-Cas complex activity, target cleavage efficiency, target site selection, target sequence length, ability of effector protein to access regions of high chromatin accessibility, degree of uniform enzyme activity across genomic targets, epigenetic tolerance, mismatch/budge tolerance, CRISPR effector stability, CRISPR effector mRNA stability, gRNA stability, CRISPR-Cas complex stability, CRISPR effector protein or mRNA immunogenicity or toxicity, gRNA immunogenicity or toxicity, CRISPR-Cas complex immunogenicity or toxicity, CRISPR effector protein or mRNA dose or titer, gRNA dose or titer, CRISPR-Cas complex dose or titer, CRISPR effector protein size, CRISPR effector expression level, gRNA expression level, CRISPR-Cas complex expression level, CRISPR effector spatiotemporal expression, gRNA spatiotemporal expression, CRISPR-Cas complex spatiotemporal expression.

[1068] By means of example, and without limitation, parameter or variable optimization may be achieved as follows. CRISPR effector specificity may be optimized by selecting the most specific CRISPR effector. This may be achieved for instance by selecting the most specific CRISPR effector ortholog or by specific CRISPR effector mutations which increase specificity. gRNA specificity may be optimized by selecting the most specific gRNA. This can be achieved for instance by selecting gRNA having low homology, i.e. at least one or preferably more, such as at least 2, or preferably at least 3, mismatches to off-target sites. CRISPR-Cas complex specificity may be optimized by increasing CRISPR effector specificity and/or gRNA specificity as above. PFS or PAM restrictiveness may be optimized by selecting a CRISPR effector having to most restrictive PFS or PAM recognition. This can be achieved for instance by selecting a CRISPR effector ortholog having more restrictive PFS or PAM recognition or by specific CRISPR effector mutations which increase or alter PFS or PAM restrictiveness. PFS or PAM type may be optimized for instance by selecting the appropriate CRISPR effector, such as the appropriate CRISPR effector recognizing a desired PFS or PAM type. The CRISPR effector or PFS or PAM type may be naturally occurring or may for instance be optimized based on CRISPR effector mutants having an altered PFS or PAM recognition, or PFS or PAM recognition repertoire. PFS or PAM nucleotide content may for instance be optimized by selecting the appropriate CRISPR effector, such as the appropriate CRISPR effector recognizing a desired PFS or PAM nucleotide content. The CRISPR effector or PFS or PAM type may be naturally occurring or may for instance be optimized based on CRISPR effector mutants having an altered PFS or PAM recognition, or PAM recognition repertoire. PFS or PAM length may for instance be optimized by selecting the appropriate CRISPR effector, such as the appropriate CRISPR effector recognizing a desired PFS or PAM nucleotide length. The CRISPR effector or PFS or PAM type may be naturally occurring or may for instance be optimized based on CRISPR effector mutants having an altered PFS or PAM recognition, or PFS or PAM recognition repertoire.

[1069] Target length or target sequence length may be optimized, for instance, by selecting the appropriate CRISPR effector, such as the appropriate CRISPR effector recognizing a desired target or target sequence nucleotide length. Alternatively, or in addition, the target (sequence) length may be optimized by providing a target having a length deviating from the target (sequence) length typically associated with the CRISPR effector, such as the naturally occurring CRISPR effector. The CRISPR effector or target (sequence) length may be naturally occurring or may for instance be optimized based on CRISPR effector mutants having an altered target (sequence) length recognition, or target (sequence) length recognition repertoire. For instance, increasing or decreasing target (sequence) length may influence target recognition and/or off-target recognition. CRISPR effector activity may be optimized by selecting the most active CRISPR effector. This may be achieved for instance by selecting the most active CRISPR effector ortholog or by specific CRISPR effector mutations which increase activity. The ability of the CRISPR effector protein to access regions of high chromatin accessibility, may be optimized by selecting the appropriate CRISPR effector or mutant thereof, and can consider the size of the CRISPR effector, charge, or other dimensional variables etc. The degree of uniform CRISPR effector activity may be optimized by selecting the appropriate CRISPR effector or mutant thereof, and can consider CRISPR effector specificity and/or activity, PFS or PAM specificity, target length, mismatch tolerance, epigenetic tolerance, CRISPR effector and/or gRNA stability and/or half-life, CRISPR effector and/or gRNA immunogenicity and/or toxicity, etc. gRNA activity may be optimized by selecting the most active gRNA. In some embodiments, this can be achieved by increasing gRNA stability through RNA modification. CRISPR-Cas complex activity may be optimized by increasing CRISPR effector activity and/or gRNA activity as above.

[1070] The target site selection may be optimized by selecting the optimal position of the target site within a gene, locus or other genomic region. The target site selection may be optimized by optimizing target location comprises selecting a target sequence with a gene, locus, or other genomic region having low variability. This may be achieved for instance by selecting a target site in an early and/or conserved exon or domain (i.e. having low variability, such as polymorphisms, within a population).

[1071] In certain embodiments, optimizing target (sequence) length comprises selecting a target sequence within one or more target loci between 5 and 25 nucleotides. In certain embodiments, a target sequence is 20 nucleotides.

[1072] In certain embodiments, optimizing target specificity comprises selecting targets loci that minimize off-target candidates.

[1073] In some embodiments, the target site may be selected by minimization of off-target effects (e.g. off-targets qualified as having 1-5, 1-4, or preferably 1-3 mismatches compared to target and/or having one or more PFS or PAM mismatches, such as distal PFS or PAM mismatches), preferably also considering variability within a population. CRISPR effector stability may be optimized by selecting CRISPR effector having appropriate half-life, such as preferably a short half-life while still capable of maintaining sufficient activity. In some embodiments, this can be achieved by selecting an appropriate CRISPR effector ortholog having a specific half-life or by specific CRISPR effector mutations or modifications which affect half-life or stability, such as inclusion (e.g. fusion) of stabilizing or destabilizing domains or sequences. CRISPR effector mRNA stability may be optimized by increasing or decreasing CRISPR effector mRNA stability. In some embodiments, this can be achieved by increasing or decreasing CRISPR effector mRNA stability through mRNA modification. gRNA stability may be optimized by increasing or decreasing gRNA stability. In some embodiments, this can be achieved by increasing or decreasing gRNA stability through RNA modification. CRISPR-Cas complex stability may be optimized by increasing or decreasing CRISPR effector stability and/or gRNA stability as above. CRISPR effector protein or mRNA immunogenicity or toxicity may be optimized by decreasing CRISPR effector protein or mRNA immunogenicity or toxicity. In some embodiments, this can be achieved by mRNA or protein modifications. Similarly, in case of DNA based expression systems, DNA immunogenicity or toxicity may be decreased. gRNA immunogenicity or toxicity may be optimized by decreasing gRNA immunogenicity or toxicity. In some embodiments, this can be achieved by gRNA modifications. Similarly, in case of DNA based expression systems, DNA immunogenicity or toxicity may be decreased. CRISPR-Cas complex immunogenicity or toxicity may be optimized by decreasing CRISPR effector immunogenicity or toxicity and/or gRNA immunogenicity or toxicity as above, or by selecting the least immunogenic or toxic CRISPR effector/gRNA combination. Similarly, in the case of DNA based expression systems, DNA immunogenicity or toxicity may be decreased. CRISPR effector protein or mRNA dose or titer may be optimized by selecting dosage or titer to minimize toxicity and/or maximize specificity and/or efficacy. gRNA dose or titer may be optimized by selecting dosage or titer to minimize toxicity and/or maximize specificity and/or efficacy. CRISPR-Cas complex dose or titer may be optimized by selecting dosage or titer to minimize toxicity and/or maximize specificity and/or efficacy. CRISPR effector protein size may be optimized by selecting minimal protein size to increase efficiency of delivery, in particular for virus mediated delivery. CRISPR effector, gRNA, or CRISPR-Cas complex expression level may be optimized by limiting (or extending) the duration of expression and/or limiting (or increasing) expression level. This may be achieved for instance by using self-inactivating compositions, systems, such as including a self-targeting (e.g. CRISPR effector targeting) gRNA, by using viral vectors having limited expression duration, by using appropriate promoters for low (or high) expression levels, by combining different delivery methods for individual CRISP-Cas system components, such as virus mediated delivery of CRISPR-effector encoding nucleic acid combined with non-virus mediated delivery of gRNA, or virus mediated delivery of gRNA combined with non-virus mediated delivery of CRISPR effector protein or mRNA. CRISPR effector, gRNA, or CRISPR-Cas complex spatiotemporal expression may be optimized by appropriate choice of conditional and/or inducible expression systems, including controllable CRISPR effector activity optionally a destabilized CRISPR effector and/or a split CRISPR effector, and/or cell- or tissue-specific expression systems.

[1074] In an aspect, the invention relates to a method as described herein, comprising selection of one or more (therapeutic) target, selecting the functionality of the composition and/or system, selecting CRISPR-Cas system mode of delivery, selecting CRISPR-Cas system delivery vehicle or expression system, and optimization of selected parameters or variables associated with the CRISPR-Cas system and/or its functionality, optionally wherein the parameters or variables are one or more selected from CRISPR effector specificity, gRNA specificity, CRISPR-Cas complex specificity, PFS or PAM restrictiveness, PFS or PAM type (natural or modified), PFS or PAM nucleotide content, PFS or PAM length, CRISPR effector activity, gRNA activity, CRISPR-Cas complex activity, target cleavage efficiency, target site selection, target sequence length, ability of effector protein to access regions of high chromatin accessibility, degree of uniform enzyme activity across genomic targets, epigenetic tolerance, mismatch/budge tolerance, CRISPR effector stability, CRISPR effector mRNA stability, gRNA stability, CRISPR-Cas complex stability, CRISPR effector protein or mRNA immunogenicity or toxicity, gRNA immunogenicity or toxicity, CRISPR-Cas complex immunogenicity or toxicity, CRISPR effector protein or mRNA dose or titer, gRNA dose or titer, CRISPR-Cas complex dose or titer, CRISPR effector protein size, CRISPR effector expression level, gRNA expression level, CRISPR-Cas complex expression level, CRISPR effector spatiotemporal expression, gRNA spatiotemporal expression, CRISPR-Cas complex spatiotemporal expression.

[1075] In an aspect, the invention relates to a method as described herein, comprising selecting one or more (therapeutic) target, selecting one or more the functionality of the composition and/or system, selecting one or more CRISPR-Cas system mode of delivery, selecting one or more delivery vehicle or expression system, and optimization of selected parameters or variables associated with the CRISPR-Cas system and/or its functionality, wherein specificity, efficacy, and/or safety are optimized, and optionally wherein optimization of specificity comprises optimizing one or more parameters or variables selected from CRISPR effector specificity, gRNA specificity, CRISPR-Cas complex specificity, PFS or PAM restrictiveness, PFS or PAM type (natural or modified), PFS or PAM nucleotide content, PFS or PAM length, wherein optimization of efficacy comprises optimizing one or more parameters or variables selected from CRISPR effector activity, gRNA activity, CRISPR-Cas complex activity, target cleavage efficiency, target site selection, target sequence length, CRISPR effector protein size, ability of effector protein to access regions of high chromatin accessibility, degree of uniform enzyme activity across genomic targets, epigenetic tolerance, mismatch/budge tolerance, and wherein optimization of safety comprises optimizing one or more parameters or variables selected from CRISPR effector stability, CRISPR effector mRNA stability, gRNA stability, CRISPR-Cas complex stability, CRISPR effector protein or mRNA immunogenicity or toxicity, gRNA immunogenicity or toxicity, CRISPR-Cas complex immunogenicity or toxicity, CRISPR effector protein or mRNA dose or titer, gRNA dose or titer, CRISPR-Cas complex dose or titer, CRISPR effector expression level, gRNA expression level, CRISPR-Cas complex expression level, CRISPR effector spatiotemporal expression, gRNA spatiotemporal expression, CRISPR-Cas complex spatiotemporal expression.

[1076] In an aspect, the invention relates to a method as described herein, comprising optionally selecting one or more (therapeutic) target, optionally selecting one or more the functionality of the composition and/or system, optionally selecting one or more mode of delivery, optionally selecting one or more delivery vehicle or expression system, and optimization of selected parameters or variables associated with the system and/or its functionality, wherein specificity, efficacy, and/or safety are optimized, and optionally wherein optimization of specificity comprises optimizing one or more parameters or variables selected from CRISPR effector specificity, gRNA specificity, CRISPR-Cas complex specificity, PFS or PAM restrictiveness, PFS or PAM type (natural or modified), PFS or PAM nucleotide content, PFS or PAM length, wherein optimization of efficacy comprises optimizing one or more parameters or variables selected from CRISPR effector activity, gRNA activity, CRISPR-Cas complex activity, target cleavage efficiency, target site selection, target sequence length, CRISPR effector protein size, ability of effector protein to access regions of high chromatin accessibility, degree of uniform enzyme activity across genomic targets, epigenetic tolerance, mismatch/budge tolerance, and wherein optimization of safety comprises optimizing one or more parameters or variables selected from CRISPR effector stability, CRISPR effector mRNA stability, gRNA stability, CRISPR-Cas complex stability, CRISPR effector protein or mRNA immunogenicity or toxicity, gRNA immunogenicity or toxicity, CRISPR-Cas complex immunogenicity or toxicity, CRISPR effector protein or mRNA dose or titer, gRNA dose or titer, CRISPR-Cas complex dose or titer, CRISPR effector expression level, gRNA expression level, CRISPR-Cas complex expression level, CRISPR effector spatiotemporal expression, gRNA spatiotemporal expression, CRISPR-Cas complex spatiotemporal expression.

[1077] In an aspect, the invention relates to a method as described herein, comprising optimization of selected parameters or variables associated with the system and/or its functionality, wherein specificity, efficacy, and/or safety are optimized, and optionally wherein optimization of specificity comprises optimizing one or more parameters or variables selected from CRISPR effector specificity, gRNA specificity, CRISPR-Cas complex specificity, PFS or PAM restrictiveness, PFS or PAM type (natural or modified), PFS or PAM nucleotide content, PFS or PAM length, wherein optimization of efficacy comprises optimizing one or more parameters or variables selected from CRISPR effector activity, gRNA activity, CRISPR-Cas complex activity, target cleavage efficiency, target site selection, target sequence length, CRISPR effector protein size, ability of effector protein to access regions of high chromatin accessibility, degree of uniform enzyme activity across genomic targets, epigenetic tolerance, mismatch/budge tolerance, and wherein optimization of safety comprises optimizing one or more parameters or variables selected from CRISPR effector stability, CRISPR effector mRNA stability, gRNA stability, CRISPR-Cas complex stability, CRISPR effector protein or mRNA immunogenicity or toxicity, gRNA immunogenicity or toxicity, CRISPR-Cas complex immunogenicity or toxicity, CRISPR effector protein or mRNA dose or titer, gRNA dose or titer, CRISPR-Cas complex dose or titer, CRISPR effector expression level, gRNA expression level, CRISPR-Cas complex expression level, CRISPR effector spatiotemporal expression, gRNA spatiotemporal expression, CRISPR-Cas complex spatiotemporal expression.

[1078] It will be understood that the parameters or variables to be optimized as well as the nature of optimization may depend on the (therapeutic) target, the functionality of the composition and/or system, the system mode of delivery, and/or the CRISPR-Cas system delivery vehicle or expression system.

[1079] In an aspect, the invention relates to a method as described herein, comprising optimization of gRNA specificity at the population level. Preferably, said optimization of gRNA specificity comprises minimizing gRNA target site sequence variation across a population and/or minimizing gRNA off-target incidence across a population.

[1080] In some embodiments, optimization can result in selection of a CRISPR-Cas effector that is naturally occurring or is modified. In some embodiments, optimization can result in selection of a CRISPR-Cas effector that has nuclease, nickase, deaminase, transposase, and/or has one or more effector functionalities deactivated or eliminated. In some embodiments, optimizing a PFS or PAM specificity can include selecting a CRISPR-Cas effector with a modified PFS or PAM specificity. In some embodiments, optimizing can include selecting a CRISPR-Cas effector having a minimal size. In certain embodiments, optimizing effector protein stability comprises selecting an effector protein having a short half-life while maintaining sufficient activity, such as by selecting an appropriate CRISPR effector ortholog having a specific half-life or stability. In certain embodiments, optimizing immunogenicity or toxicity comprises minimizing effector protein immunogenicity or toxicity by protein modifications. In certain embodiments, optimizing functional specific comprises selecting a protein effector with reduced tolerance of mismatches and/or bulges between the guide RNA and one or more target loci.

[1081] In certain embodiments, optimizing efficacy comprises optimizing overall efficiency, epigenetic tolerance, or both. In certain embodiments, maximizing overall efficiency comprises selecting an effector protein with uniform enzyme activity across target loci with varying chromatin complexity, selecting an effector protein with enzyme activity limited to areas of open chromatin accessibility. In certain embodiments, chromatin accessibility is measured using one or more of ATAC-seq, or a DNA-proximity ligation assay. In certain embodiments, optimizing epigenetic tolerance comprises optimizing methylation tolerance, epigenetic mark competition, or both. In certain embodiments, optimizing methylation tolerance comprises selecting an effector protein that modify methylated DNA. In certain embodiments, optimizing epigenetic tolerance comprises selecting an effector protein unable to modify silenced regions of a chromosome, selecting an effector protein able to modify silenced regions of a chromosome, or selecting target loci not enriched for epigenetic markers

[1082] In certain embodiments, selecting an optimized guide RNA comprises optimizing gRNA stability, gRNA immunogenicity, or both, or other gRNA associated parameters or variables as described herein elsewhere.

[1083] In certain embodiments, optimizing gRNA stability and/or gRNA immunogenicity comprises RNA modification, or other gRNA associated parameters or variables as described herein elsewhere. In certain embodiments, the modification comprises removing 1-3 nucleotides form the 3′ end of a target complementarity region of the gRNA. In certain embodiments, modification comprises an extended gRNA and/or trans RNA/DNA element that create stable structures in the gRNA that compete with gRNA base pairing at a target of off-target loci, or extended complimentary nucleotides between the gRNA and target sequence, or both.

[1084] In certain embodiments, the mode of delivery comprises delivering gRNA and/or CRISPR effector protein, delivering gRNA and/or CRISPR effector mRNA, or delivery gRNA and/or CRISPR effector as a DNA based expression system. In certain embodiments, the mode of delivery further comprises selecting a delivery vehicle and/or expression systems from the group consisting of liposomes, lipid particles, nanoparticles, biolistics, or viral-based expression/delivery systems. In certain embodiments, expression is spatiotemporal expression is optimized by choice of conditional and/or inducible expression systems, including controllable CRISPR effector activity optionally a destabilized CRISPR effector and/or a split CRISPR effector, and/or cell- or tissue-specific expression system.

[1085] The methods as described herein may further involve selection of the mode of delivery. In certain embodiments, gRNA (and tracr, if and where needed, optionally provided as a sgRNA) and/or CRISPR effector protein are or are to be delivered. In certain embodiments, gRNA (and tracr, if and where needed, optionally provided as a sgRNA) and/or CRISPR effector mRNA are or are to be delivered. In certain embodiments, gRNA (and tracr, if and where needed, optionally provided as a sgRNA) and/or CRISPR effector provided in a DNA-based expression system are or are to be delivered. In certain embodiments, delivery of the individual system components comprises a combination of the above modes of delivery. In certain embodiments, delivery comprises delivering gRNA and/or CRISPR effector protein, delivering gRNA and/or CRISPR effector mRNA, or delivering gRNA and/or CRISPR effector as a DNA based expression system.

[1086] The methods as described herein may further involve selection of the CRISPR-Cas system delivery vehicle and/or expression system. Delivery vehicles and expression systems are described herein elsewhere. By means of example, delivery vehicles of nucleic acids and/or proteins include nanoparticles, liposomes, etc. Delivery vehicles for DNA, such as DNA-based expression systems include for instance biolistics, viral based vector systems (e.g. adenoviral, AAV, lentiviral), etc. the skilled person will understand that selection of the mode of delivery, as well as delivery vehicle or expression system may depend on for instance the cell or tissues to be targeted. In certain embodiments, the delivery vehicle and/or expression system for delivering the compositions, systems, or components thereof comprises liposomes, lipid particles, nanoparticles, biolistics, or viral-based expression/delivery systems.

### Considerations for Therapeutic Applications

[1087] A consideration in genome editing therapy is the choice of sequence-specific nuclease, such as a variant of a Cas nuclease. Each nuclease variant may possess its own unique set of strengths and weaknesses, many of which must be balanced in the context of treatment to maximize therapeutic benefit. For a specific editing therapy to be efficacious, a sufficiently high level of modification must be achieved in target cell populations to reverse disease symptoms. This therapeutic modification ‘threshold’ is determined by the fitness of edited cells following treatment and the amount of gene product necessary to reverse symptoms. With regard to fitness, editing creates three potential outcomes for treated cells relative to their unedited counterparts: increased, neutral, or decreased fitness. In the case of increased fitness, corrected cells may be able and expand relative to their diseased counterparts to mediate therapy. In this case, where edited cells possess a selective advantage, even low numbers of edited cells can be amplified through expansion, providing a therapeutic benefit to the patient. Where the edited cells possess no change in fitness, an increase the therapeutic modification threshold can be warranted. As such, significantly greater levels of editing may be needed to treat diseases, where editing creates a neutral fitness advantage, relative to diseases where editing creates increased fitness for target cells. If editing imposes a fitness disadvantage, as would be the case for restoring function to a tumor suppressor gene in cancer cells, modified cells would be outcompeted by their diseased counterparts, causing the benefit of treatment to be low relative to editing rates. This may be overcome with supplemental therapies to increase the potency and/or fitness of the edited cells relative to the diseased counterparts.

[1088] In addition to cell fitness, the amount of gene product necessary to treat disease can also influence the minimal level of therapeutic genome editing that can treat or prevent a disease or a symptom thereof. In cases where a small change in the gene product levels can result in significant changes in clinical outcome, the minimal level of therapeutic genome editing is less relative to cases where a larger change in the gene product levels are needed to gain a clinically relevant response. In some embodiments, the minimal level of therapeutic genome editing can range from 0.1 to 1%, 1-5%, 5-10%, 10-15%, 15-20%, 20-25%, 25-30%, 30-35%, 35-40%, 40-45%. 45-50%, or 50-55%. Thus, where a small change in gene product levels can influence clinical outcomes and diseases where there is a fitness advantage for edited cells, are ideal targets for genome editing therapy, as the therapeutic modification threshold is low enough to permit a high chance of success.

[1089] The activity of NHEJ and HDR DSB repair can vary by cell type and cell state. NHEJ is not highly regulated by the cell cycle and is efficient across cell types, allowing for high levels of gene disruption in accessible target cell populations. In contrast, HDR acts primarily during S/G2 phase, and is therefore restricted to cells that are actively dividing, limiting treatments that require precise genome modifications to mitotic cells [Ciccia, A. & Elledge, S. J. Molecular cell 40, 179-204 (2010); Chapman, J. R., et al. Molecular cell 47, 497-510 (2012)].

[1090] The efficiency of correction via HDR may be controlled by the epigenetic state or sequence of the targeted locus, or the specific repair template configuration (single vs. double stranded, long vs. short homology arms) used [Hacein-Bey-Abina, S., et al. The New England journal of medicine 346, 1185-1193 (2002); Gaspar, H. B., et al. Lancet 364, 2181-2187 (2004); Beumer, K. J., et al. G3 (2013)]. The relative activity of NHEJ and HDR machineries in target cells may also affect gene correction efficiency, as these pathways may compete to resolve DSBs [Beumer, K. J., et al. Proceedings of the National Academy of Sciences of the United States of America 105, 19821-19826 (2008)]. HDR also imposes a delivery challenge not seen with NHEJ strategies, as it uses the concurrent delivery of nucleases and repair templates. Thus, these differences can be kept in mind when designing, optimizing, and/or selecting a CRISPR-Cas based therapeutic as described in greater detail elsewhere herein.

[1091] CRISPR-Cas-based polynucleotide modification application can include combinations of proteins, small RNA molecules, and/or repair templates, and can make, in some embodiments, delivery of these multiple parts substantially more challenging than, for example, traditional small molecule therapeutics. Two main strategies for delivery of compositions, systems, and components thereof have been developed: ex vivo and in vivo. In some embodiments of ex vivo treatments, diseased cells are removed from a subject, edited and then transplanted back into the patient. In other embodiments, cells from a healthy allogeneic donor are collected, modified using a CRISPR-Cas system or component thereof, to impart various functionalities and/or reduce immunogenicity, and administered to an allogeneic recipient in need of treatment. Ex vivo editing has the advantage of allowing the target cell population to be well defined and the specific dosage of therapeutic molecules delivered to cells to be specified. The latter consideration may be particularly important when off-target modifications are a concern, as titrating the amount of nuclease may decrease such mutations (Hsu et al., 2013). Another advantage of ex vivo approaches is the typically high editing rates that can be achieved, due to the development of efficient delivery systems for proteins and nucleic acids into cells in culture for research and gene therapy applications.

[1092] In vivo polynucleotide modification via compositions, systems, and/or components thereof involves direct delivery of the compositions, systems, and/or components thereof to cell types in their native tissues. In vivo polynucleotide modification via compositions, systems, and/or components thereof allows diseases in which the affected cell population is not amenable to ex vivo manipulation to be treated. Furthermore, delivering compositions, systems, and/or components thereof to cells in situ allows for the treatment of multiple tissue and cell types.

[1093] In some embodiments, such as those where viral vector systems are used to generate viral particles to deliver the CRISPR-Cas system and/or component thereof to a cell, the total cargo size of the CRISPR-Cas system and/or component thereof should be considered as vector systems can have limits on the size of a polynucleotide that can be expressed therefrom and/or packaged into cargo inside of a viral particle. In some embodiments, the tropism of a vector system, such as a viral vector system, should be considered as it can impact the cell type to which the CRISPR-Cas system or component thereof can be efficiently and/or effectively delivered.

[1094] When delivering a system or component thereof via a viral-based system, it can be important to consider the amount of viral particles that will be needed to achieve a therapeutic effect so as to account for the potential immune response that can be elicited by the viral particles when delivered to a subject or cell(s). When delivering a system or component thereof via a viral based system, it can be important to consider mechanisms of controlling the distribution and/or dosage of the system in vivo. Generally, to reduce the potential for off-target effects, it is optimal but not necessarily required, that the amount of the system be as close to the minimum or least effective dose. In practice this can be challenging to do.

[1095] In some embodiments, it can be important to considered the immunogenicity of the system or component thereof. In embodiments, where the immunogenicity of the system or component thereof is of concern, the immunogenicity system or component thereof can be reduced. By way of example only, the immunogenicity of the system or component thereof can be reduced using the approach set out in Tangri et al. Accordingly, directed evolution or rational design may be used to reduce the immunogenicity of the CRISPR enzyme in the host species (human or other species).

### Xenotransplantation

[1096] The present invention also contemplates use of the CRISPR-Cas system described herein, e.g. Cas effector protein systems, to provide RNA-guided DNA nucleases adapted to be used to provide modified tissues for transplantation. For example, RNA-guided DNA nucleases may be used to knockout, knockdown or disrupt selected genes in an animal, such as a transgenic pig (such as the human heme oxygenase-1 transgenic pig line), for example by disrupting expression of genes that encode epitopes recognized by the human immune system, i.e. xenoantigen genes. Candidate porcine genes for disruption may for example include α(1,3)-galactosyltransferase and cytidine monophosphate-N-acetylneuraminic acid hydroxylase genes (see PCT Patent Publication WO 2014/066505). In addition, genes encoding endogenous retroviruses may be disrupted, for example the genes encoding all porcine endogenous retroviruses (see Yang et al., 2015, Genome-wide inactivation of porcine endogenous retroviruses (PERVs), Science 27 Nov. 2015: Vol. 350 no. 6264 pp. 1101-1104). In addition, RNA-guided DNA nucleases may be used to target a site for integration of additional genes in xenotransplant donor animals, such as a human CD55 gene to improve protection against hyperacute rejection.

[1097] Embodiments of the invention also relate to methods and compositions related to knocking out genes, amplifying genes and repairing particular mutations associated with DNA repeat instability and neurological disorders (Robert D. Wells, Tetsuo Ashizawa, Genetic Instabilities and Neurological Diseases, Second Edition, Academic Press, Oct. 13, 2011—Medical). Specific aspects of tandem repeat sequences have been found to be responsible for more than twenty human diseases (New insights into repeat instability: role of RNADNA hybrids. McIvor E I, Polak U, Napierala M. RNA Biol. 2010 September-October; 7(5):551-8). The present effector protein systems may be harnessed to correct these defects of genomic instability.

[1098] Several further aspects of the invention relate to correcting defects associated with a wide range of genetic diseases which are further described on the website of the National Institutes of Health under the topic subsection Genetic Disorders (website at health.nih.gov/topic/GeneticDisorders). The genetic brain diseases may include but are not limited to Adrenoleukodystrophy, Agenesis of the Corpus Callosum, Aicardi Syndrome, Alpers' Disease, Alzheimer's Disease, Barth Syndrome, Batten Disease, CADASIL, Cerebellar Degeneration, Fabry's Disease, Gerstmann-Straussler-Scheinker Disease, Huntington's Disease and other Triplet Repeat Disorders, Leigh's Disease, Lesch-Nyhan Syndrome, Menkes Disease, Mitochondrial Myopathies and NINDS Colpocephaly. These diseases are further described on the website of the National Institutes of Health under the subsection Genetic Brain Disorders.

### Immune Orthogonal Orthologs

[1099] In some embodiments, when the Cas need to be expressed or administered in a subject, immunogenicity of the Cas may be reduced by sequentially expressing or administering immune orthogonal orthologs of the Cas to the subject. As used herein, the term “immune orthogonal orthologs” refer to orthologous proteins that have similar or substantially the same function or activity, but have no or low cross-reactivity with the immune response generated by one another. In some embodiments, sequential expression or administration of such orthologs elicits low or no secondary immune response. The immune orthogonal orthologs can avoid being neutralized by antibodies (e.g., existing antibodies in the host before the orthologs are expressed or administered). Cells expressing the orthologs can avoid being cleared by the host's immune system (e.g., by activated CTLs). In some examples, CRISPR enzyme orthologs from different species may be immune orthogonal orthologs.

[1100] Immune orthogonal orthologs may be identified by analyzing the sequences, structures, and/or immunogenicity of a set of candidates orthologs. In an example method, a set of immune orthogonal orthologs may be identified by a) comparing the sequences of a set of candidate orthologs (e.g., orthologs from different species) to identify a subset of candidates that have low or no sequence similarity; b) assessing immune overlap among the members of the subset of candidates to identify candidates that have no or low immune overlap. In some cases, immune overlap among candidates may be assessed by determining the binding (e.g., affinity) between a candidate ortholog and MHC (e.g., MHC type I and/or MHC II) of the host. Alternatively or additionally, immune overlap among candidates may be assessed by determining B-cell epitopes for the candidate orthologs. In one example, immune orthogonal orthologs may be identified using the method described in Moreno A M et al., BioRxiv, published online Jan. 10, 2018, doi: doi.org/10.1101/245985.

### Patient-Specific Screening Methods

[1101] A nucleic acid-targeting system that targets RNA or single stranded DNA can be used to screen patients or patient samples for the presence of particular RNA or single stranded DNA. Methods may comprise detection of one or more viruses in a sample from the patient. Advantageously, rapid detection using one or more CRISPR Cas systems can identify those patients with particular viral infections.

### Transcript Detection Methods

[1102] The effector proteins and systems of the invention are useful for specific detection of RNAs in a cell or other sample. In the presence of an RNA target of interest, guide-dependent CRISPR-Cas nuclease activity may be accompanied by non-specific RNAse activity against collateral targets. To take advantage of the RNase activity, all that is needed is a reporter substrate that can be detectably cleaved. For example, a reporter molecule can comprise RNA, tagged with a fluorescent reporter molecule (fluor) on one end and a quencher on the other. In the absence of CRISPR-Cas RNase activity, the physical proximity of the quencher dampens fluorescence from the fluor to low levels. When CRISPR-Cas target specific cleavage is activated by the presence of an RNA target-of-interest and suitable guide RNA, the RNA-containing reporter molecule is non-specifically cleaved and the fluor and quencher are spatially separated. This causes the fluor to emit a detectable signal when excited by light of the appropriate wavelength. In one exemplary assay method, CRISPR-Cas effector, target-of-interest-specific guide RNA, and reporter molecule are added to a cellular sample. An increase in fluorescence indicates the presence of the RNA target-of-interest. In another exemplary method, a detection array is provided. Each location of the array is provided with CRISPR-Cas effector, reporter molecule, and a target-of-interest-specific guide RNA. Depending on the assay to be performed, the target-of-interest-specific guide RNAs at each location of the array can be the same, different, or a combination thereof. Different target-of-interest-specific guide RNAs might be provided, for example when it is desired to test for one or more targets in a single source sample. The same target-of-interest-specific guide RNA might be provided at each location, for example when it is desired to test multiple samples for the same target.

[1103] In certain embodiments, CRISPR-Cas is provided or expressed in an in vitro system or in a cell, transiently or stably, and targeted or triggered to non-specifically cleave cellular nucleic acids. In one embodiment, CRISPR-Cas is engineered to knock down ssDNA, for example viral ssDNA. In another embodiment, CRISPR-Cas is engineered to knock down RNA. The system can be devised such that the knockdown is dependent on a target DNA present in the cell or in vitro system, or triggered by the addition of a target nucleic acid to the system or cell.

[1104] In an embodiment, the CRISPR-Cas system is engineered to non-specifically cleave RNA in a subset of cells distinguishable by the presence of an aberrant DNA sequence, for instance where cleavage of the aberrant DNA might be incomplete or ineffectual. In one non-limiting example, a DNA translocation that is present in a cancer cell and drives cell transformation is targeted. Whereas a subpopulation of cells that undergoes chromosomal DNA and repair may survive, non-specific collateral ribonuclease activity advantageously leads to cell death of potential survivors.

### Kits

[1105] In one aspect, the invention provides kits containing any one or more of the elements disclosed in the above methods and compositions. In some embodiments, the kit comprises a vector system as taught herein or one or more of the components of the CRISPR/Cas system or complex as taught herein, such as crRNAs and/or CRISPR-Cas effector protein or CRISPR-Cas effector protein encoding mRNA, and instructions for using the kit. Elements may be provided individually or in combinations, and may be provided in any suitable container, such as a vial, a bottle, or a tube. In some embodiments, the kit includes instructions in one or more languages, for example in more than one language. The instructions may be specific to the applications and methods described herein. In some embodiments, a kit comprises one or more reagents for use in a process utilizing one or more of the elements described herein. Reagents may be provided in any suitable container. For example, a kit may provide one or more reaction or storage buffers. Reagents may be provided in a form that is usable in a particular assay, or in a form that requires addition of one or more other components before use (e.g., in concentrate or lyophilized form). A buffer can be any buffer, including but not limited to a sodium carbonate buffer, a sodium bicarbonate buffer, a borate buffer, a Tris buffer, a MOPS buffer, a HEPES buffer, and combinations thereof. In some embodiments, the buffer is alkaline. In some embodiments, the buffer has a pH from about 7 to about 10. In some embodiments, the kit comprises one or more oligonucleotides corresponding to a guide sequence for insertion into a vector so as to operably link the guide or crRNA sequence and a regulatory element. In some embodiments, the kit comprises a homologous recombination template polynucleotide. In some embodiments, the kit comprises one or more of the vectors and/or one or more of the polynucleotides described herein. The kit may advantageously allow to provide all elements of the systems of the invention.

[1106] The present application also provides aspects and embodiments as set forth in the following numbered Statements:

[1107] Statement 1. A non-naturally occurring or engineered composition comprising:

[1108] (a) a Cas protein that comprises at least one HEPN domain and is less than 900 amino acids in size; and (b) a guide sequence capable of forming of complex with the Cas protein and directing the complex to bind to a target sequence.

[1109] Statement 2. The composition of Statement 1, wherein the Cas protein is a Type VI Cas protein.

[1110] Statement 3. The composition of Statement 1, wherein the Cas protein is Cas13.

[1111] Statement 4. The composition of Statement 1, wherein the Cas protein is selected from (a) SEQ ID NOs. 4102-4298; (b) SEQ ID NOs. 4299-4654; (c) SEQ ID NOs. 2771-2772, 4655-4768, or 5260-5265; (d) SEQ ID NOs. 4769-4797; or (e) SEQ ID NOs. 4798-5203.

[1112] Statement 5. A non-naturally occurring or engineered system comprising: (a) a Cas protein selected from: (i) SEQ ID NOs. 1-1323, (ii) SEQ ID NOs. 1324-2770, (iii) SEQ ID NOs. 2773-2797, or (iv) SEQ ID NOs. 2798-4092; (b) a guide sequence capable of forming of complex with the Cas protein and directing the complex to bind to a target sequence.

[1113] Statement 6. The composition of any one of the proceeding Statements, wherein the Cas protein exhibits collateral nuclease activity and cleaves a non-target sequence.

[1114] Statement 7. The composition of any one of the proceeding Statements, which comprises two or more guide sequences capable of hybridizing to two different target sequences or different regions of a target sequence.

[1115] Statement 8. The composition of any one of the proceeding Statements, wherein the guide sequence is capable of hybridizing to one or more target sequences in a prokaryotic cell.

[1116] Statement 9. The composition of any one of the proceeding Statements, wherein the guide sequence is capable of hybridizing to one or more target sequences in a eukaryotic cell.

[1117] Statement 10. The composition of any one of the proceeding Statements, wherein the Cas protein comprises one or more nuclear localization signals.

[1118] Statement 11. The composition of any one of the proceeding Statements, wherein the Cas protein comprises one or more nuclear export signals.

[1119] Statement 12. The composition of any one of the proceeding Statements, wherein the Cas protein is catalytically inactive.

[1120] Statement 13. The composition of any one of the proceeding Statements, wherein the Cas protein is a nickase.

[1121] Statement 14. The composition of any one of the proceeding Statements, wherein the Cas protein is associated with one or more functional domains.

[1122] Statement 15. The composition of Statement 14, wherein the one or more functional domains is heterologous functional domains.

[1123] Statement 16. The composition of Statement 14, wherein the one or more functional domains cleaves the one or more target sequences.

[1124] Statement 17. The composition of Statement 16, wherein the one or more functional domains modifies transcription or translation of the target sequence.

[1125] Statement 18. The composition of any one of the proceeding Statements, wherein the Cas protein is associated with an adenosine deaminase or cytidine deaminase.

[1126] Statement 19. The composition of any one of the proceeding Statements, further comprising a recombination template.

[1127] Statement 20. The composition of Statement 19, wherein the recombination template is inserted by homology-directed repair (HDR).

[1128] Statement 21. The composition of any one of the proceeding Statements, further comprising a tracr RNA.

[1129] Statement 22. The composition of any one of the proceeding Statements, wherein the Cas protein comprises two HEPN domains.

[1130] Statement 23. A non-naturally occurring or engineered composition comprising: (a) an mRNA encoding the Cas protein of any one of the proceeding Statements, and (b) a guide sequence capable of forming of complex with the Cas protein and directing the complex to bind to a target sequence.

[1131] Statement 24. A non-naturally occurring or engineered composition for modifying nucleotides in a target nucleic acid, comprising: (a) the composition of any one of Statements 1-22; and (b) a nucleotide deaminase associated with the Cas protein.

[1132] Statement 25. The composition of Statement 24, wherein the Cas protein is a dead Cas protein.

[1133] Statement 26. The composition of any one of Statements 24-25, wherein the Cas protein is a nickase.

[1134] Statement 27. The composition of any one of Statements 24-26, wherein the nucleotide deaminase is covalently or non-covalently linked to the Cas protein or the guide sequence, or is adapted to link thereof after delivery.

[1135] Statement 28. The composition of any one of Statements 24-27, wherein the nucleotide deaminase is a adenosine deaminase.

[1136] Statement 29. The composition of any one of Statements 24-28, wherein the nucleotide deaminase is a cytidine deaminase.

[1137] Statement 30. The composition of any one of Statements 24-29, wherein the nucleotide deaminase is a human ADAR2 or a deaminase domain thereof.

[1138] Statement 31. The composition of Statement 28, wherein the adenosine deaminase comprises one or more mutations.

[1139] Statement 32. The composition of Statement 31, wherein the one or more mutations comprise E620G or Q696L based on amino acid sequence positions of human ADAR2, and corresponding mutations in a homologous ADAR protein.

[1140] Statement 33. The composition of Statement 32, wherein the adenosine deaminase comprises (i) E488Q and E620G, (ii) E488Q and Q696L, or (iii) E488Q and V505I, based on amino acid sequence positions of human ADAR2, or corresponding mutations in a homologous ADAR protein.

[1141] Statement 34. The composition of Statement 31, wherein the adenosine deaminase has cytidine deaminase activity.

[1142] Statement 35. The composition of any one of Statements 24-34, wherein the nucleotide deaminase protein or catalytic domain thereof has been modified to increase activity against a DNA-RNA heteroduplex.

[1143] Statement 36. The composition of any one of Statements 24-35, wherein the nucleotide deaminase protein or catalytic domain thereof has been modified to reduce off-target effects.

[1144] Statement 37. The composition of any one of Statements 24-36, wherein modification of the nucleotides in the target nucleic acid remedies a disease caused by a G→A or C→T point mutation or a pathogenic SNP.

[1145] Statement 38. The composition of Statement 37, wherein the disease comprises cancer, haemophilia, beta-thalassemia, Marfan syndrome, and Wiskott-Aldrich syndrome.

[1146] Statement 39. The composition of any one of Statements 24-38, wherein modification of the nucleotides in the target nucleic acid remedies a disease caused by a T→C or A→G point mutation or a pathogenic SNP.

[1147] Statement 40. The composition of any one of Statements 24-39, wherein modification of the nucleotide at the target locus of interest inactivates a target gene at the target locus.

[1148] Statement 41. The composition of any one of Statements 24-40, wherein modification of the nucleotide modifies gene product encoded at the target locus or expression of the gene product.

[1149] Statement 42. An engineered adenosine deaminase comprising one or more mutations: E488Q, E620G, Q696L, or V505I based on amino acid sequence positions of human ADAR2, or corresponding mutations in a homologous ADAR protein.

[1150] Statement 43. The engineered adenosine deaminase of Statement 42, wherein the adenosine deaminase comprises (i) E488Q and E620G, (ii) E488Q and Q696L, or (iii) E488Q and V505I based on amino acid sequence positions of human ADAR2, or corresponding mutations in a homologous ADAR protein.

[1151] Statement 44. A system for detecting presence of one or more target polypeptides in one or more in vitro samples comprising: a Cas protein of any one of Statements 1 to 41; one or more detection aptamers, each designed to bind to one of the one or more target polypeptides, each detection aptamer comprising a masked promoter binding site or masked primer binding site and a trigger sequence template; and an oligonucleotide-based masking construct comprising a non-target sequence.

[1152] Statement 45. The system of Statement 44, further comprising nucleic acid amplification reagents to amplify the target sequence or the trigger sequence.

[1153] Statement 46. The system of Statement 45, wherein the nucleic acid amplification reagents are isothermal amplification reagents.

[1154] Statement 47. A system for detecting the presence of one or more target sequences in one or more in vitro samples, comprising: (a) a Cas protein of any one of Statements 1 to 41; (b) at least one guide polynucleotide comprising a guide sequence designed to have a degree of complementarity with the one or more target sequences, and designed to form a complex with the Cas protein; and (c) an oligonucleotide-based masking construct comprising a non-target sequence, wherein the Cas protein exhibits collateral nuclease activity and cleaves the non-target sequence of the oligo-nucleotide based masking construct once activated by the one or more target sequences.

[1155] Statement 48. A non-naturally occurring or engineered composition comprising the Cas protein of any one of Statements 1 to 41 that is linked to an inactive first portion of an enzyme or reporter moiety, wherein the enzyme or reporter moiety is reconstituted when contacted with a complementary portion of the enzyme or reporter moiety.

[1156] Statement 49. The composition of Statement 48, wherein the enzyme or reporter moiety comprises a proteolytic enzyme.

[1157] Statement 50. The composition of Statement 48 or 49, wherein the Cas protein comprises a first Cas protein and a second Cas protein linked to the complementary portion of the enzyme or reporter moiety.

[1158] Statement 51. The composition of Statement 48, 49, or 50, further comprising: i) a first guide capable of forming a complex with the first Cas protein and hybridizing to a first target sequence of a target nucleic acid; and ii) a second guide capable of forming a complex with the second Cas protein, and hybridizing to a second target sequence of the target nucleic acid.

[1159] Statement 52. A non-naturally occurring or engineered composition comprising one or more polynucleotides encoding the Cas protein and the guide sequence in any one of Statements 1 to 41.

[1160] Statement 53. A vector system, which comprises one or more vectors comprising: a first regulatory element operably linked to a nucleotide sequence encoding a Cas protein of any one of Statements 1 to 41, and a second regulatory element operably linked to a nucleotide sequence encoding the guide sequence.

[1161] Statement 54. The vector system of Statement 53, wherein the nucleotide sequence encoding the Cas protein is codon optimized for expression in a eukaryotic cell.

[1162] Statement 55. The vector system of Statement 53 or 54, which is comprised in a single vector.

[1163] Statement 56. The vector system of any one of Statements 53-55, wherein the one or more vectors comprise viral vectors.

[1164] Statement 57. The vector system of any one of Statements 53-56, wherein the one or more vectors comprise one or more retroviral, lentiviral, adenoviral, adeno-associated or herpes simplex viral vectors.

[1165] Statement 58. A delivery system comprising the composition of any one of Statements 1 to 52, or the system of any one of Statements 53 to 57 and a delivery vehicle.

[1166] Statement 59. The delivery system of Statement 58, which comprises one or more vectors, or one or more polynucleotide molecules, the one or more vectors or polynucleotide molecules comprising one or more polynucleotide molecules encoding the Cas protein and one or more nucleic acid components of the non-naturally occurring or engineered composition.

[1167] Statement 60. The delivery system of Statement 58, wherein the delivery vehicle comprises a ribonucleoprotein complex, one or more particles, one or more vesicles, or one or more viral vectors, liposomes, nanoparticles, exosomes, microvesicles, nucleic acid nanoassemblies, a gene gun, an implantable device, or a vector system.

[1168] Statement 61. The delivery system of Statement 58, wherein the one or more particles comprises a lipid, a sugar, a metal or a protein.

[1169] Statement 62. The delivery system of Statement 58, wherein the one or more particles comprises lipid nanoparticles.

[1170] Statement 63. The delivery system of Statement 58, wherein the one or more vesicles comprises exosomes or liposomes.

[1171] Statement 64. The delivery system of Statement 58, wherein the one or more viral vectors comprises one or more adenoviral vectors, one or more lentiviral vectors, or one or more adeno-associated viral vectors.

[1172] Statement 65. A cell comprising the composition of any one of Statements 1 to 52, or the system of any one of Statements 53 to 64.

[1173] Statement 66. The cell of Statement 65 or progeny thereof is a eukaryotic cell, preferably a human or non-human animal cell, optionally a therapeutic T cell or antibody-producing B-cell or wherein the cell is a plant cell.

[1174] Statement 67. A non-human animal or plant comprising the cell of Statement 65 or 66, or progeny thereof.

[1175] Statement 68. The composition of any one of Statements 1 to 52, or the system of any one of Statements 53 to 64, or the cell of Statement 65 or 66, for use in a therapeutic method of treatment.

[1176] Statement 69. A method of modifying one or more target sequences, the method comprising contacting the one or more target sequences with the composition of any one of Statements 1 to 52.

[1177] Statement 70. The method of Statement 69, wherein modifying the one or more target sequences comprises increasing or decreasing expression of the one or more target sequences.

[1178] Statement 71. The method of Statement 69 or 70, wherein the system further comprises a recombination template, and wherein modifying the one or more target sequences comprises insertion of the recombination template or a portion thereof.

[1179] Statement 72. The method of any one of Statements 69-71, wherein the one or more target sequences is in a prokaryotic cell.

[1180] Statement 73. The method of any one of Statements 69-72, wherein the one or more target sequences is in a eukaryotic cell.

[1181] Statement 74. A method of modifying one or more nucleotides in a target sequence, comprising contacting the target sequences with the composition of any one of any one of Statements 1 to 52.

[1182] Statement 75. The method of any one of any one of Statements 69-74, wherein the target sequence is RNA.

[1183] Statement 76. A method for detecting a target nucleic acid in a sample comprising: (a) contacting a sample with: (i) the composition of any one of Statements 1 to 52; and (ii) a RNA-based masking construct comprising a non-target sequence; wherein the Cas protein exhibits collateral RNase activity and cleaves the non-target sequence of the detection construct; and (b) detecting a signal from cleavage of the non-target sequence, thereby detecting the target nucleic acid in the sample.

[1184] Statement 77. The method of Statement 76, further comprising contacting the sample with reagents for amplifying the target nucleic acid.

[1185] Statement 78. The method of Statement 76 or 77, wherein the reagents for amplifying comprises isothermal amplification reaction reagents.

[1186] Statement 79. The method of any one of Statements 76-78, wherein the isothermal amplification reagents comprise nucleic-acid sequence-based amplification, recombinase polymerase amplification, loop-mediated isothermal amplification, strand displacement amplification, helicase-dependent amplification, or nicking enzyme amplification reagents.

[1187] Statement 80. The method of any one of Statements 76-79, wherein the target nucleic acid is DNA molecule and the method further comprises contacting the target DNA molecule with a primer comprising an RNA polymerase site and RNA polymerase.

[1188] Statement 81. The method of any one of Statements 76-80, wherein the masking construct: suppresses generation of a detectable positive signal until the masking construct cleaved or deactivated, or masks a detectable positive signal or generates a detectable negative signal until the masking construct cleaved or deactivated.

[1189] Statement 82. The method of any one of Statements 76-81, wherein the masking construct comprises: a. a silencing RNA that suppresses generation of a gene product encoded by a reporting construct, wherein the gene product generates the detectable positive signal when expressed; b. a ribozyme that generates the negative detectable signal, and wherein the positive detectable signal is generated when the ribozyme is deactivated; c. a ribozyme that converts a substrate to a first color and wherein the substrate converts to a second color when the ribozyme is deactivated; d. an aptamer and/or comprises a polynucleotide-tethered inhibitor; e. a polynucleotide to which a detectable ligand and a masking component are attached; f. a nanoparticle held in aggregate by bridge molecules, wherein at least a portion of the bridge molecules comprises a polynucleotide, and wherein the solution undergoes a color shift when the nanoparticle is disbursed in solution; g. a quantum dot or fluorophore linked to one or more quencher molecules by a linking molecule, wherein at least a portion of the linking molecule comprises a polynucleotide; h. a polynucleotide in complex with an intercalating agent, wherein the intercalating agent changes absorbance upon cleavage of the polynucleotide; or 1. two fluorophores tethered by a polynucleotide that undergo a shift in fluorescence when released from the polynucleotide.

[1190] Statement 83. The method of Statement 82, wherein the aptamer: a. comprises a polynucleotide-tethered inhibitor that sequesters an enzyme, wherein the enzyme generates a detectable signal upon release from the aptamer or polynucleotide-tethered inhibitor by acting upon a substrate; b. is an inhibitory aptamer that inhibits an enzyme and prevents the enzyme from catalyzing generation of a detectable signal from a substrate or wherein the polynucleotide-tethered inhibitor inhibits an enzyme and prevents the enzyme from catalyzing generation of a detectable signal from a substrate; or c. sequesters a pair of agents that when released from the aptamers combine to generate a detectable signal.

[1191] Statement 84. The method of Statement 82 or 83, wherein the nanoparticle is a colloidal metal.

[1192] Statement 85. The method of any one of Statements 76-84, wherein the at least one guide polynucleotide comprises a mismatch.

[1193] Statement 86. The method of Statement 85, wherein the mismatch is upstream or downstream of a single nucleotide variation on the one or more guide sequences.

[1194] Statement 87. A method of treating or preventing a disease in a subject, comprising administering the composition of any one of Statements 1 to 52, or the system of any one of Statements 53 to 64, or the cell of Statement 65 or 66 to the subject.

### EXAMPLES

### Example 1

[1195] Systems, compositions, and methods can be designed for the detection and diagnosis of viruses and viral infections, including acute respiratory infections using the disclosure detailed herein. The systems can comprise two or more CRISPR Cas systems to multiplex, as described elsewhere herein, to detect a plurality of respiratory infections or viral infections, including coronavirus. The coronavirus is a positive-sense single stranded RNA family of viruses, infecting a variety of animals and humans. SARS-CoV is one type of coronavirus infection, as well as MERS-CoV Detection of one or more coronaviruses are envisioned, including the 2019-nCoV detected in Wuhan City. Sequences of the 2019-nCoV are available at GISAID accession no. EPI_ISL_402124 and EPI_ISL_402127-402130, and described in DOI: 10.1101/2020.01.22.914952. Further deposits of the Wuhan coronavirus deposited in the GISAID platform include EP_ISL 402119-402121 and EP_ISL 402123-402124; see also GenBank Accession No. MN908947.3.

[1196] Multiplexed Detection

[1197] Multiplex design of guide molecules for the detection of coronaviruses and/or other respiratory viruses in a sample to identify the cause of a respiratory infection is envisioned, with design can be according to the disclosure of U.S. Provisional Application 62/818,702, filed Mar. 14, 2019 and entitled “CRISPR Effector System Based Multiplex Diagnostics”, and U.S. Provisional Application 62/890,5556, filed Aug. 22, 2019, entitled “CRISPR Effector System Based Multiplex Diagnostics” incorporated herein in their entirety. Briefly, the design of guide molecules can encompass utilization of training models as described in U.S. Provisional Application 62/818,702 and U.S. Provisional Application 62/890,5556 using a variety of input features, which may include the particular Cas protein used for targeting of the sequences of interest. See U.S. Provisional Application 62/818,702 FIG. 4A, incorporated specifically by reference. Guide molecules can be designed as detailed elsewhere herein. Regarding detection of coronavirus, guide design can be predicated on genome sequences disclosed in Tian et al, “Potent binding of 2019 novel coronavirus spike protein by a SARS coronavirus-specific human monoclonal antibody”; doi: 10.1101/2020.01.28.923011, incorporated by reference, which details human monoclonal antibody, CR3022 binding of the 2019-nCoV RBD (KD of 6.3 nM) or Sequences of the 2019-nCoV are available at GISAID accession no. EPI_ISL_402124 and EPI_ISL_402127-402130, and described in doi:10.1101/2020.01.22.914952, or EP_ISL 402119-402121 and EP_ISL 402123-402124; see also GenBank Accession No. MN908947.3. Guide design can target unique viral genomic regions of the 2019-nCoV or conserved genomic regions across one or more viruses of the coronavirus family.

[1198] Detection of respiratory viruses such as coronavirus may include a thermostable CRISPR-Cas protein as described herein, which may be a Cas13a ortholog. As described elsewhere herein, one or more Cas13a orthologs may be utilized in a multiplex design, including the thermostable Cas13a orthologs described herein, including those derived from Herbinix hemicellulosilytica, defined by SEQ ID NO: 1, or by SEQ ID NO: 75 of International Publication No. WO 2017/219027, defined by a sequence from FIG. 1A (loci QNRW01000010.1, OWPA01000389.1, 0153798_10014618, 0153978_10005171, and 0153798_10004687), or encoded by the nucleic acid sequence 0123519_10037894 or 0J26742_10014101, or have at least 80%, 85%, 90%, 91%, 92%, 93%, 94%, 95%, 96%, 97%, 98%, 99%, or 99.5% sequence identity to SEQ ID NO: 1 or to SEQ ID NO: 75 of International Publication No. WO 2017/219027, defined by a sequence from FIG. 1A (loci QNRW01000010.1, OWPA01000389.1, 0153798_10014618, 0153978_10005171, and 0153798_10004687), or encoded by the nucleic acid sequence 0123519_10037894 (FIG. 3G) or 0J26742_10014101(FIG. 3F) and may comprise least one HEPN domain or at least two HEPN domains. Additionally, in certain example embodiments, such thermostability confers further rapidity to the diagnostic and detections platforms and methods disclosed herein.

[1199] Coronavirus detection can comprise two or more detection systems utilizing RNA targeting Cas effector proteins; DNA targeting Cas effector proteins, or a combination thereof. The RNA-targeting effector proteins may be a Cas13 protein, such as Cas13a, Cas13b, or Cas13c, including one of the thermostable Cas13a proteins described herein. Multiplexing systems can be designed such that different Cas proteins with different sequence specificities or other motif cutting preferences can be used, including, in certain embodiments, at least one Cas13a thermostable protein described herein. See International Publication WO 2019/126577. Type VI and Type V Cas proteins are known to possess different cutting motif preferences. See Gootenberg et al. “Multiplexed and portable nucleic acid detection platform with Cas13b, Cas12a, and Csm6.” Science. Apr. 27, 2018, 360:439-444; International Publication WO 2019/051318. Thus, embodiments disclosed herein may further comprise multiplex embodiments comprising two or more Type VI Cas proteins with different cutting preferences, or one or more Type VI Cas proteins and one or more Type V case proteins.

[1200] Multiplex approaches and selection of Cas effector proteins can be as described in International Publication WO 2019/126577 at [0415]-[0416] and Examples 1-10, incorporated herein by reference. In certain example embodiments, the coronavirus assay comprises a Type VI Cas protein disclosed herein and guide molecule comprising a guide sequence configured to directed binding of the CRISPR-Cas complex to a target molecule and a labeled detection molecule (“RNA-based masking construct”). A multiplex embodiment can be designed to track one or more variants of coronavirus or one or more variants of coronavirus, including the 2019-nCoV, in combination with other viruses, for example, Human respiratory syncytial virus, Middle East respiratory syndrome (MERS) coronavirus, Severe acute respiratory syndrome-related (SARS) coronavirus, and influenza.

[1201] In certain embodiments, the detection assay can be provided on a lateral flow device, as described in International Publication WO 2019/071051, incorporated herein by reference. The lateral flow device can be adapted to detect one or more coronaviruses and/or other viruses in combination of the coronavirus. The lateral flow device may comprise a flexible substrate, such as a paper substrate or a flexible polymer-based substrate, which can include freeze-dried reagents for detection assays with a visual readout of the assay results. See, WO 2019/071051 at [0145]-[0151] and Example 2, specifically incorporated herein by reference. In certain embodiments, the coronavirus assay can be utilized with isothermal amplification reagents, allowing amplification without complex instrumentation that may be unavailable in the field as described in WO 2019/071051. Accordingly, the assay can be adapted for field diagnostics, including use of visual readout on a lateral flow device, rapid, sensitive detection and can be deployed for early and direct detection.

### Example 2—Identification and Characterization of Novel CRISPR-Cas Systems

[1202] To identify novel Cas proteins, proteins operonized with Cas1/Cas2, large proteins near CRISPRs, and proteins co-evolving with known Cas Genes were identified using (FIG. 4). Iterative multi-criterion HMM searches were conducted (FIG. 5). Spacer hits to phage/bacterial genomes were identified (FIG. 6). Estimated feature co-occurrence rates were determined (FIG. 7). FIG. 8 shows hypothesized evolution of various CRISPR systems.

[1203] The distribution of sizes of proteins in Cas13 families are shown in FIG. 9.

[1204] In exemplary Cas13b-ts, small RNA sequencing of the locus in E. coli shows that the only associated small RNA is the CRISPR RNA. 3 exemplary Cas13b-ts were found active in E. coli in an essential gene knockdown screen. This screen also allowed for the determination of the protospacer flanking motif (PFS) of the active orthologs, which was found to be a weak 5′ not C preference for all active orthologs. In mammalian cells, the three active orthologs were also found to be active for mediating knockdown of both luciferase reporter and endogenous transcripts. Fused to ADAR, Cas13b-t1 and t3 were able to mediate A-to-I RNA editing of both reporter and endogenous transcripts in multiple cell types. Additionally, fusion to a directedly-evolved CDAR mediated C-to-U RNA editing of reporter transcripts. Small proteins that can mediate nucleic acid modification were useful for delivery of gene therapy agents via adeno-associated virus (AAV). Current plans included delivery of a Cas13b-t1-ADAR fusion via AAV as well as a guide RNA expression cassette targeting the beta catenin transcript in mice to demonstrate effective Cas13-mediated RNA editing in an in vivo setting via AAV delivery.

[1205] Cas13b-t proteins were identified from the analysis. The Cas13b-t proteins are a subgroup of Type VI-B1 with no auxiliary proteins (FIG. 10). 6 examples of Cas13b-ts are shown in FIG. 11. The analysis suggested that CRISPR arrays in Cas13b-t loci were processed and no other ncRNAs were present (FIG. 12).

[1206] E. coli essential gene screens were performed to determine protospacer flanking sites (PFS) as shown in FIG. 10. E. coli essential gene PFS screens showed depletion by Cas13b-t1, Cas13b-t3, and Cas13-bt5 (FIG. 14). The tested active orthologs had 5′ D PFS preference (FIG. 15). Cas13b-t5 robustly depleted sequences containing PFS in E coli (FIG. 16). Active orthologs from PFS screens also mediated gene knockdown in mammalian cells (FIG. 17). The Cas13b-ts' mediated knockdown of endogenous transcripts in mammalian cells (FIG. 18). Cas13b-t1 and Cas13-t3 were found to mediate A-to-I RNA editing in human cells (FIG. 19).

[1207] Injected C57BL/6 male mice are injected with single vector AAV containing Cas13bt1-huADAR2dd(E488Q) fusion driven by EFS promoter and guide RNA targeting the mouse beta catenin gene or nontargeting guide RNA. Maps of the vector expressing targeting guide RNA is shown in FIG. 20A and the vector expressing the non-target guide RNA is shown in FIG. 20B. Sequences of the vectors are shown in the Table 12 below.

TABLE 12

| | |
|---|---|
| pab1991-u6- | ggccgcaggaacccctagtgatggagttggccactccctctctgcgcgctcgctcgctcactgaggccgggcgaccaaaggtcgcccgacgcccgggctttgcccgggcggc |
| mouse-ctnnb1- | ctcagtgagcgagcgagcgcgcagctgcctgcaggggcgcctgatgcggtattttctccttacgcatctgtgcggtatttcacaccgcatacgtcaaagcaaccatagtacgcgcc |
| t41a-30-bp20- | ctgtagcggcgcattaagcgcggcgggtgtggtggttacgcgcagcgtgaccgctacacttgccagcgccctagcgcccgctcctttcgctttcttcccttcctttctcgccacgttc |
| mm-guide-bt1- | gccggctttccccgtcaagctctaaatcgggggctccctttagggttccgatttagtgctttacggcacctcgaccccaaaaaacttgatttgggtgatggttcacgtagtgggccatc |
| dr-efs-3xha- | gccctgatagacggtttttcgccctttgacgttggagtccacgttctttaatagtggactcttgttccaaactggaacaacactcaaccctatctcgggctattcttttgatttataagggat |
| hivnes-dbt1- | tttgccgatttcggcctattggttaaaaaatgagctgatttaacaaaaatttaacgcgaattttaacaaaatattaacgtttacaattttatggtgcactctcagtacaatctgctctgatgcc |
| huadar2dd- | gcatagttaagccagccccgacacccgccaacacccgctgacgcgccctgacgggcttgtctgctcccggcatccgcttacagacaagctgtgaccgtctccgggagctgcatg |
| bghpolya | tgtcagaggttttcaccgtcatcaccgaaacgcgcgagacgaaagggcctcgtgatacgcctatttttataggttaatgtcatgataataatggtttcttagacgtcaggtggcacttttc |
| SEQ ID NO: | ggggaaatgtgcgcggaacccctatttgtttatttttctaaatacattcaaatatgtatccgctcatgagacaataaccctgataaatgcttcaataatattgaaaaaggaagagtatgag |
| 5247 | tattcaacatttccgtgtcgcccttattcccttttttgcggcattttgccttcctgtttttgctcacccagaaacgctggtgaaagtaaaagatgctgaagatcagttgggtgcacgagtgg |
| | gttacatcgaactggatctcaacagcggtaagatccttgagagttttcgccccgaagaacgttttccaatgatgagcacttttaaagttctgctatgtggcgcggtattatcccgtattga |
| | cgccgggcaagagcaactcggtcgccgcatacactattctcagaatgacttggttgagtactcaccagtcacagaaaagcatcttacggatggcatgacagtaagagaattatgca |
| | gtgctgccataaccatgagtgataacactgcggccaacttacttctgacaacgatcggaggaccgaaggagctaaccgcttttttgcacaacatgggggatcatgtaactcgccttg |
| | atcgttgggaaccggagctgaatgaagccataccaaacgacgagcgtgacaccacgatgcctgtagcaatggcaacaacgttgcgcaaactattaactggcgaactacttactct |
| | agcttcccggcaacaattaatagactggatggaggcggataaagttgcaggaccacttctgcgctcggcccttccggctggctggtttattgctgataaatctggagccggtgagc |
| | gtggaagccgcggtatcattgcagcactggggccagatggtaagccctcccgtatcgtagttatctacacgacggggagtcaggcaactatggatgaacgaaatagacagatcg |
| | ctgagataggtgcctcactgattaagcattggtaactgtcagaccaagtttactcatatatactttagattgatttaaaacttcatttttaatttaaaaggatctaggtgaagatcctttttgat |
| | aatctcatgaccaaaatcccttaacgtgagttttcgttccactgagcgtcagaccccgtagaaaagatcaaaggatcttcttgagatcctttttttctgcgcgtaatctgctgcttgcaaac |
| | aaaaaaaccaccgctaccagcggtggtttgtttgccggatcaagagctaccaactctttttccgaaggtaactggcttcagcagagcgcagataccaaatactgtccttctagtgtag |
| | ccgtagttaggccaccacttcaagaactctgtagcaccgcctacatacctcgctctgctaatcctgttaccagtggctgctgccagtggcgataagtcgtgtcttaccgggttggactc |
| | aagacgatagttaccggataaggcgcagcggtcgggctgaacggggggttcgtgcacacagcccagcttggagcgaacgacctacaccgaactgagatacctacagcgtgag |
| | ctatgagaaagcgccacgcttcccgaagggagaaaggcggacaggtatccggtaagcggcagggtcggaacaggagagcgcacgagggagcttccagggggaaacgcct |
| | ggtatctttatagtcctgtcgggtttcgccacctctgacttgagcgtcgatttttgtgatgctcgtcaggggggcggagcctatggaaaaacgccagcaacgcggcctttttacggttc |
| | ctggccttttgctggccttttgctcacatgtcctgcaggcagctgcgcgctcgctcgctcactgaggccgcccgggcgtcgggcgacctttggtcgcccggcctcagtgagcgag |
| | cgagcgcgcagagagggagtggccaactccatcactaggggttcctgcggcctctagAgagggcctatttcccatgattccttcatatttgcatatacgatacaaggctgttagag |
| | agataattggaattaatttgactgtaaacacaaagatattagtacaaaatacgtgacgtagaaagtaataatttcttgggtagtttgcagttttaaaattatgttttaaaatggactatcatat |
| | gcttaccgtaacttgaaagtatttcgatttcttggctttatatatcttgtggaaaggacgaaacaccgAGCTGTGGcGGTGGCACCAGAATGGATTCCGC |
| | TGAAGAAGCCTCCGATTTGTGGGGTGATTACAGCTTTTTTATCGATCTCGtaggtcttgaaaggagtgggaattggctccggtgcc |
| | cgtcagtgggcagagcgcacatcgcccacagtccccgagaagttggggggaggggtcggcaattgatccggtgcctagagaaggtggcgcggggtaaactgggaaagtgat |
| | gtcgtgtactggctccgcctttttcccgagggtgggggagaaccgtatataagtgcagtagtcgccgtgaacgttctttttcgcaacgggtttgccgccagaacacaggaaacttaa |
| | gcttgccaccATGTACCCATACGATGTTCCAGATTACGCTTATCCCTACGACGTGCCTGATTATGCATACCCATAT |
| | GATGTCCCCGACTATGCCggatccCTTCAACTGCCTCCACTTGAAAGACTGACACTGgGATCCGAATTCGAGAA |
| | CATCAAGAAAACCAGCAACAAAGAGGTGTACAGCATCGAGCAGTACGAGGGCGAGAAGAAGTGGTGCTTC |
| | GCCATCGTGCTGAACAGAGCCCAGACCAACCTGGAAGAGAACCCCAAGCTGTTCGAGCAGACCCTGACCAG |
| | ATTTGAGAAGATCATGAAGCAGGACTGGTTCAACGAGGAAACGAAGAAGCTGATCTACGAGAAAGAGGAA |
| | GAAAACAAAGTCAAAGAGGAAATCCAGATCGCCGCCAGCGAGCGGCTGAAGAACCTGgcAAACTACTTCAG |
| | CgcCTACCTGCACGCCCCTGACTGCCTGATCTTCAACCGGAACGACACCATCCGGATCATCATGGAAAAGGC |
| | CTACGAGAAGTCCCGCTTCGAGGCCAAGAAGAAGCAGCAAGAGGACATCTCCATCGAGTTCCCCGAGCTGT |
| | TTGAGGAAGAGGACAAGATCACCTCTGCCGGCGTGGTGTTCTTCGTCAGCTTTTTTATCGAGCGGCGGTTCC |
| | TGAACCGGCTGATGGGCTATGTGCAGGGCTTCAGAAAGACAGAGGGCGAGTACAACATCACCAGACAGGTG |
| | TTCAGCAAGTACTGCCTGAAGGACAGCTACAGCGTGCAGGCCCAGGATCACGATGCCGTGATGTTCAGAGA |
| | CATCCTGGGCTACCTGAGCAGAGTGCCCACCGAGATCTACCAGCACATCAAGCTGACCCGGAAGCGGAGCC |
| | AGGATCAGCTGAGCGAGAGAAAGACCGACAAGTTCATCCTGTTCGCCCTGAAGTACCTCGAGGACTACGGA |
| | CTGAAGGACCTGGCCGATTACACCGCCTGCTTTGCCAGAAGCAAGATCAAGAGAGAGAACGAGGACACCAA |
| | AGAGACAGACGGCAACAAGCACAAGTTCCACCGCGAGAAGCCCGTGGTGGAAATCCACTTCGACAAAGAG |
| | AAGCAGGATCAGTTCTACATCAAGCGGAACAACGTCATCCTGAAGGCCCAGAAGAAAGGCGGCCAGAGCA |
| | ACGTGTTCCGGATGGGAGTGTACGAGCTGAAGTATCTGGTGCTGCTGAGCCTGCTGGGCAAAGCCGAAGAG |
| | GCCATCCAGAGAATCGACCGGTACATCAGCAGCCTGAAGAAACAGCTGCCCTACCTGGATAAGATCAGCAA |
| | CGAAGAGATCCAGAAGTCCATCAACTTTCTGCCCAGATTCGTGCGGAGCCGGCTGGGACTGCTGCAAGTGG |
| | ATGATGAGAAGAGACTGAAAACCCGGCTGGAATACGTGAAGGCCAAGTGGACCGATAAGAAAGAGGGCAG |
| | CAGAAAGCTGGAACTGCACCGGAAGGGCAGAGATATCCTGCGGTATATCAACGAGAGATGCGACAGACCC |
| | CTGAGCCGGAAAGAGTATAACAACATTCTGAAGTTCATCGTGAACAAGGACTTCGCCGGCTTCTACAACGA |
| | GCTGGAAGAACTGAAGCGGACCAGACGGCTGGACAAGAACATCATCCAGAAGCTGAGCGGCCACACCACA |
| | CTGAACGCTCTGCACGAGCGAGTGTGTGACCTGGTCCTGCAAGAGCTGGGCTCTCTGCAGTCCGAGAACCTG |
| | AAAGAGTACATCGGACTGATCCCCAAAGAAGAGAAAGAAGTCACCTTCCGCGAGAAAGTGGACAGAATCC |
| | TGGAACAGCCTGTGGTGTACAAGGGCTTCCTGAGATACGAGTTCTTCAAAGAAGATAAGAAATCCTTCGCC |
| | AGGCTGGTGGAAGAGGCTATCAAGACCAAGTGGAGCGACTTCGACATCCCTCTGGGCGAAGAGTACTACAA |
| | CATCCCTAGCCTGGACAGATTCGACCGGACCAACAAGAAGCTGTACGAGACACTGGCCATGGACCGGCTGT |
| | GTCTGATGATGGCCAGACAGTACTACCTGCGGCTGAACGAGAAGCTGGCCGAGAAGGCACAGCACATCTAC |
| | TGGAAAAAAGAGGACGGCCGGGAAGTCATCATCTTCAAGTTCCAGAATCCGAAAGAGCAGAAGAAGTCCTT |
| | CAGCATCAGGTTCAGCATCCTGGACTACACCAAGATGTACGTGATGGACGACCCCGAGTTCCTGAGCAGGC |
| | TGTGGGAGTACTTCATCCCTAAAGAGGCCAAAGAGATCGACTACCACAAGCACTACGCCAGAGCCTTCGAC |
| | AAGTACACCAACCTGCAGAAAGAAGGCATCGACGCCATCCTGAAACTGGAAGGCAGAATCATCGAGCGCC |
| | GGAAGATCAAGCCCGCCAAGAACTACATCGAGTTTCAAGAGATTATGAATCGGAGCGGCTACAACAACGAC |
| | CAGCAGGTTGCCCTGAAGAGAGTGgcGAACGCCCTGCTGgcCTACAACCTGAACTTCGAGAGAGAGCACCTG |
| | AAGCGGTTCTACGGCGTCGTGAAGAGAGAGGGCATCGAGAAAAAATGGTCCCTGATCGTGGGAGGGTCAG |
| | GCGGTAGTcagctgcatttaccgcaggttttagctgacgctgtctcacgcctggtcctgggtaagtttggtgacctgaccgacaacttctcctcccctcacgctcgcagaaaa |
| | gtgctggctggagtcgtcatgacaacaggcacagatgttaaagatgccaaggtgataagtgtttctacaggaacaaaatgtattaatggtgaatacatgagtgatcgtggccttgcat |
| | taaatgactgccatgcagaaataatatctcggagatccttgctcagatttctttatacacaacttgagctttacttaaataacaaagatgatcaaaaaagatccatctttcagaaatcaga |
| | gcgaggggggtttaggctgaaggagaatgtccagtttcatctgtacatcagcacctctccctgtggagatgccagaatcttctcaccacatgagccaatcctggaagaaccagcag |
| | atagacacccaaatcgtaaagcaagaggacagctacggaccaaaatagagtctggtCaggggacgattccagtgcgctccaatgcgagcatccaaacgtgggacggggtgct |
| | gcaaggggagcggctgctcaccatgtcctgcagtgacaagattgcacgctggaacgtggtgggcatccagggatcActgctcagcattttcgtggagcccatttacttctcgagc |
| | atcatcctgggcagcctttaccacggggaccacctttccagggccatgtaccagcggatctccaacatagaggacctgccacctctctacaccctcaacaagcctttgctcagtgg |
| | catcagcaatgcagaagcacggcagccagggaaggcccccaacttcagtgtcaactggacggtaggcgactccgctattgaggtcatcaacgccacgactgggaaggatgag |
| | ctgggccgcgcgtcccgcctgtgtaagcacgcgttgtactgtcgctggatgcgtgtgcacggcaaggttccctcccacttactacgctccaagattaccaagcccaacgtgtacca |
| | tgagtccaagctggcggcaaaggagtaccaggccgccaaggcgcgtctgttcacagccttcatcaaggcggggctgggggcctgggtggagaagcccaccgagcaggacc |
| | agttctcactcacgTAAcgacctcgactgtgccttctagttgccagccatctgttgtttgcccctcccccgtgccttccttgaccctggaaggtgccactcccactgtcctttcctaat |
| | aaaatgaggaaattgcatcgcattgtctgagtaggtgtcattctattctggggggtggggtggggcaggacagcaagggggaggattgggaagacaatagcaggcatgctggg |
| | gatgcggtgggctctatgg |
| pab1992-u6- | ggccgcaggaacccctagtgatggagttggccactccctctctgcgcgctcgctcgctcactgaggccgggcgaccaaaggtcgcccgacgcccgggctttgcccgggcggc |
| nontargeting- | ctcagtgagcgagcgagcgcgcagctgcctgcaggggcgcctgatgcggtattttctccttacgcatctgtgcggtatttcacaccgcatacgtcaaagcaaccatagtacgcgcc |
| guide-bt1-dr- | ctgtagcggcgcattaagcgcggcgggtgtggtggttacgcgcagcgtgaccgctacacttgccagcgccctagcgcccgctcctttcgctttcttcccttcctttctcgccacgttc |
| efs-3xha- | gccggctttccccgtcaagctctaaatcgggggctccctttagggttccgatttagtgctttacggcacctcgaccccaaaaaacttgatttgggtgatggttcacgtagtgggccatc |
| hivnes-dbtl- | gccctgatagacggtttttcgccctttgacgttggagtccacgttctttaatagtggactcttgttccaaactggaacaacactcaaccctatctcgggctattcttttgatttataagggat |
| huadar2dd- | tttgccgatttcggcctattggttaaaaaatgagctgatttaacaaaaatttaacgcgaattttaacaaaatattaacgtttacaattttatggtgcactctcagtacaatctgctctgatgcc |
| bghpolya | gcatagttaagccagccccgacacccgccaacacccgctgacgcgccctgacgggcttgtctgctcccggcatccgcttacagacaagctgtgaccgtctccgggagctgcatg |
| SEQ ID NO: | tgtcagaggttttcaccgtcatcaccgaaacgcgcgagacgaaagggcctcgtgatacgcctatttttataggttaatgtcatgataataatggtttcttagacgtcaggtggcacttttc |
| 5248 | ggggaaatgtgcgcggaacccctatttgtttatttttctaaatacattcaaatatgtatccgctcatgagacaataaccctgataaatgcttcaataatattgaaaaaggaagagtatgag |
| | tattcaacatttccgtgtcgcccttattcccttttttgcggcattttgccttcctgtttttgctcacccagaaacgctggtgaaagtaaaagatgctgaagatcagttgggtgcacgagtgg |
| | gttacatcgaactggatctcaacagcggtaagatccttgagagttttcgccccgaagaacgttttccaatgatgagcacttttaaagttctgctatgtggcgcggtattatcccgtattga |
| | cgccgggcaagagcaactcggtcgccgcatacactattctcagaatgacttggttgagtactcaccagtcacagaaaagcatcttacggatggcatgacagtaagagaattatgca |
| | gtgctgccataaccatgagtgataacactgcggccaacttacttctgacaacgatcggaggaccgaaggagctaaccgcttttttgcacaacatgggggatcatgtaactcgccttg |
| | atcgttgggaaccggagctgaatgaagccataccaaacgacgagcgtgacaccacgatgcctgtagcaatggcaacaacgttgcgcaaactattaactggcgaactacttactct |
| | agcttcccggcaacaattaatagactggatggaggcggataaagttgcaggaccacttctgcgctcggcccttccggctggctggtttattgctgataaatctggagccggtgagc |
| | gtggaagccgcggtatcattgcagcactggggccagatggtaagccctcccgtatcgtagttatctacacgacggggagtcaggcaactatggatgaacgaaatagacagatcg |
| | ctgagataggtgcctcactgattaagcattggtaactgtcagaccaagtttactcatatatactttagattgatttaaaacttcatttttaatttaaaaggatctaggtgaagatcctttttgat |
| | aatctcatgaccaaaatcccttaacgtgagttttcgttccactgagcgtcagaccccgtagaaaagatcaaaggatcttcttgagatcctttttttctgcgcgtaatctgctgcttgcaaac |
| | aaaaaaaccaccgctaccagcggtggtttgtttgccggatcaagagctaccaactctttttccgaaggtaactggcttcagcagagcgcagataccaaatactgtccttctagtgtag |
| | ccgtagttaggccaccacttcaagaactctgtagcaccgcctacatacctcgctctgctaatcctgttaccagtggctgctgccagtggcgataagtcgtgtcttaccgggttggactc |
| | aagacgatagttaccggataaggcgcagcggtcgggctgaacggggggttcgtgcacacagcccagcttggagcgaacgacctacaccgaactgagatacctacagcgtgag |
| | ctatgagaaagcgccacgcttcccgaagggagaaaggcggacaggtatccggtaagcggcagggtcggaacaggagagcgcacgagggagcttccagggggaaacgcct |
| | ggtatctttatagtcctgtcgggtttcgccacctctgacttgagcgtcgatttttgtgatgctcgtcaggggggcggagcctatggaaaaacgccagcaacgcggcctttttacggttc |
| | ctggccttttgctggccttttgctcacatgtcctgcaggcagctgcgcgctcgctcgctcactgaggccgcccgggcgtcgggcgacctttggtcgcccggcctcagtgagcgag |
| | cgagcgcgcagagagggagtggccaactccatcactaggggttcctgcggcctctagAgagggcctatttcccatgattccttcatatttgcatatacgatacaaggctgttagag |
| | agataattggaattaatttgactgtaaacacaaagatattagtacaaaatacgtgacgtagaaagtaataatttcttgggtagtttgcagttttaaaattatgttttaaaatggactatcatat |
| | gcttaccgtaacttgaaagtatttcgatttcttggctttatatatcttgtggaaaggacgaaacaccGTAATGCCTGGCTTGTCGACGCATAGTCTGGCT |
| | GAAGAAGCCTCCGATTTGTGGGGTGATTACAGCTTTTTTATCGATCTCGtaggtcttgaaaggagtgggaattggctccggtgcccg |
| | tcagtgggcagagcgcacatcgcccacagtccccgagaagttggggggaggggtcggcaattgatccggtgcctagagaaggtggcgcggggtaaactgggaaagtgatgt |
| | cgtgtactggctccgcctttttcccgagggtgggggagaaccgtatataagtgcagtagtcgccgtgaacgttctttttcgcaacgggtttgccgccagaacacaggaaacttaagc |
| | ttgccaccATGTACCCATACGATGTTCCAGATTACGCTTATCCCTACGACGTGCCTGATTATGCATACCCATATGA |
| | TGTCCCCGACTATGCCggatccCTTCAACTGCCTCCACTTGAAAGACTGACACTGgGATCCGAATTCGAGAACAT |
| | CAAGAAAACCAGCAACAAAGAGGTGTACAGCATCGAGCAGTACGAGGGCGAGAAGAAGTGGTGCTTCGCC |
| | ATCGTGCTGAACAGAGCCCAGACCAACCTGGAAGAGAACCCCAAGCTGTTCGAGCAGACCCTGACCAGATT |
| | TGAGAAGATCATGAAGCAGGACTGGTTCAACGAGGAAACGAAGAAGCTGATCTACGAGAAAGAGGAAGAA |
| | AACAAAGTCAAAGAGGAAATCCAGATCGCCGCCAGCGAGCGGCTGAAGAACCTGgcAAACTACTTCAGCgcC |
| | TACCTGCACGCCCCTGACTGCCTGATCTTCAACCGGAACGACACCATCCGGATCATCATGGAAAAGGCCTAC |
| | GAGAAGTCCCGCTTCGAGGCCAAGAAGAAGCAGCAAGAGGACATCTCCATCGAGTTCCCCGAGCTGTTTGA |
| | GGAAGAGGACAAGATCACCTCTGCCGGCGTGGTGTTCTTCGTCAGCTTTTTTATCGAGCGGCGGTTCCTGAA |
| | CCGGCTGATGGGCTATGTGCAGGGCTTCAGAAAGACAGAGGGCGAGTACAACATCACCAGACAGGTGTTCA |
| | GCAAGTACTGCCTGAAGGACAGCTACAGCGTGCAGGCCCAGGATCACGATGCCGTGATGTTCAGAGACATC |
| | CTGGGCTACCTGAGCAGAGTGCCCACCGAGATCTACCAGCACATCAAGCTGACCCGGAAGCGGAGCCAGGA |
| | TCAGCTGAGCGAGAGAAAGACCGACAAGTTCATCCTGTTCGCCCTGAAGTACCTCGAGGACTACGGACTGA |
| | AGGACCTGGCCGATTACACCGCCTGCTTTGCCAGAAGCAAGATCAAGAGAGAGAACGAGGACACCAAAGA |
| | GACAGACGGCAACAAGCACAAGTTCCACCGCGAGAAGCCCGTGGTGGAAATCCACTTCGACAAAGAGAAG |
| | CAGGATCAGTTCTACATCAAGCGGAACAACGTCATCCTGAAGGCCCAGAAGAAAGGCGGCCAGAGCAACGT |
| | GTTCCGGATGGGAGTGTACGAGCTGAAGTATCTGGTGCTGCTGAGCCTGCTGGGCAAAGCCGAAGAGGCCA |
| | TCCAGAGAATCGACCGGTACATCAGCAGCCTGAAGAAACAGCTGCCCTACCTGGATAAGATCAGCAACGAA |
| | GAGATCCAGAAGTCCATCAACTTTCTGCCCAGATTCGTGCGGAGCCGGCTGGGACTGCTGCAAGTGGATGAT |
| | GAGAAGAGACTGAAAACCCGGCTGGAATACGTGAAGGCCAAGTGGACCGATAAGAAAGAGGGCAGCAGAA |
| | AGCTGGAACTGCACCGGAAGGGCAGAGATATCCTGCGGTATATCAACGAGAGATGCGACAGACCCCTGAGC |
| | CGGAAAGAGTATAACAACATTCTGAAGTTCATCGTGAACAAGGACTTCGCCGGCTTCTACAACGAGCTGGA |
| | AGAACTGAAGCGGACCAGACGGCTGGACAAGAACATCATCCAGAAGCTGAGCGGCCACACCACACTGAAC |
| | GCTCTGCACGAGCGAGTGTGTGACCTGGTCCTGCAAGAGCTGGGCTCTCTGCAGTCCGAGAACCTGAAAGA |
| | GTACATCGGACTGATCCCCAAAGAAGAGAAAGAAGTCACCTTCCGCGAGAAAGTGGACAGAATCCTGGAAC |
| | AGCCTGTGGTGTACAAGGGCTTCCTGAGATACGAGTTCTTCAAAGAAGATAAGAAATCCTTCGCCAGGCTG |
| | GTGGAAGAGGCTATCAAGACCAAGTGGAGCGACTTCGACATCCCTCTGGGCGAAGAGTACTACAACATCCC |
| | TAGCCTGGACAGATTCGACCGGACCAACAAGAAGCTGTACGAGACACTGGCCATGGACCGGCTGTGTCTGA |
| | TGATGGCCAGACAGTACTACCTGCGGCTGAACGAGAAGCTGGCCGAGAAGGCACAGCACATCTACTGGAAA |
| | AAAGAGGACGGCCGGGAAGTCATCATCTTCAAGTTCCAGAATCCGAAAGAGCAGAAGAAGTCCTTCAGCAT |
| | CAGGTTCAGCATCCTGGACTACACCAAGATGTACGTGATGGACGACCCCGAGTTCCTGAGCAGGCTGTGGG |
| | AGTACTTCATCCCTAAAGAGGCCAAAGAGATCGACTACCACAAGCACTACGCCAGAGCCTTCGACAAGTAC |
| | ACCAACCTGCAGAAAGAAGGCATCGACGCCATCCTGAAACTGGAAGGCAGAATCATCGAGCGCCGGAAGA |
| | TCAAGCCCGCCAAGAACTACATCGAGTTTCAAGAGATTATGAATCGGAGCGGCTACAACAACGACCAGCAG |
| | GTTGCCCTGAAGAGAGTGgcGAACGCCCTGCTGgcCTACAACCTGAACTTCGAGAGAGAGCACCTGAAGCGG |
| | TTCTACGGCGTCGTGAAGAGAGAGGGCATCGAGAAAAAATGGTCCCTGATCGTGGGAGGGTCAGGCGGTAG |
| | Tcagctgcatttaccgcaggttttagctgacgctgtctcacgcctggtcctgggtaagtttggtgacctgaccgacaacttctcctcccctcacgctcgcagaaaagtgctggctgg |
| | agtcgtcatgacaacaggcacagatgttaaagatgccaaggtgataagtgtttctacaggaacaaaatgtattaatggtgaatacatgagtgatcgtggccttgcattaaatgactgc |
| | catgcagaaataatatctcggagatccttgctcagatttctttatacacaacttgagctttacttaaataacaaagatgatcaaaaaagatccatctttcagaaatcagagcgagggggg |
| | tttaggctgaaggagaatgtccagtttcatctgtacatcagcacctctccctgtggagatgccagaatcttctcaccacatgagccaatcctggaagaaccagcagatagacaccca |
| | aatcgtaaagcaagaggacagctacggaccaaaatagagtctggtCaggggacgattccagtgcgctccaatgcgagcatccaaacgtgggacggggtgctgcaaggggag |
| | cggctgctcaccatgtcctgcagtgacaagattgcacgctggaacgtggtgggcatccagggatcActgctcagcattttcgtggagcccatttacttctcgagcatcatcctgggc |
| | agcctttaccacggggaccacctttccagggccatgtaccagcggatctccaacatagaggacctgccacctctctacaccctcaacaagcctttgctcagtggcatcagcaatgc |
| | agaagcacggcagccagggaaggcccccaacttcagtgtcaactggacggtaggcgactccgctattgaggtcatcaacgccacgactgggaaggatgagctgggccgcgc |
| | gtcccgcctgtgtaagcacgcgttgtactgtcgctggatgcgtgtgcacggcaaggttccctcccacttactacgctccaagattaccaagcccaacgtgtaccatgagtccaagct |
| | ggcggcaaaggagtaccaggccgccaaggcgcgtctgttcacagccttcatcaaggcggggctgggggcctgggtggagaagcccaccgagcaggaccagttctcactcac |
| | gTAAcgacctcgactgtgccttctagttgccagccatctgttgtttgcccctcccccgtgccttccttgaccctggaaggtgccactcccactgtcctttcctaataaaatgaggaaa |
| | ttgcatcgcattgtctgagtaggtgtcattctattctggggggtggggtggggcaggacagcaagggggaggattgggaagacaatagcaggcatgctggggatgcggtgggct |
| | ctatgg |

[1208] Cas13b-t1 and Cas13b-t3 mediated C-to-U editing of reporter transcripts in mammalian cells when fused to evolved CDAR (FIG. 21).

[1209] Nucleic acid sequences of loci and related sequences of Cas13b-t1, Cas13b-t2, Cas13b-t3, Cas13b-t4, Cas13b-t5, and Cas13b-t6 are shown in Table 13 below.

TABLE 13

| Locus | | Sequences | |
|---|---|---|---|
| Cas13 | Locus | 1 | cgggcctggt ttttatttcg tcaatcgagc gactaagaaa tcttcaaagg cgcttaaatc |
| b-t1 | sequence | 61 | cttccatacc gtggcacagt taatggtttt ggctttgtta tctattacgg tgtatccata |
| | SEQ ID | 121 | gtcggtaacc cgaatgccga gtttttcggg ctcattttag acatttgcat ctatgccgcc |
| | NO: 5249 | 181 | ggcagcgctg aaggtttttt cggagctaat tgagtattca gcataaatgt tgaacggttt |
| | | 241 | tgccaatgcg ggtactatga tgttgatgct aacgttgata aatacaaatg tgatggtccc |
| | | 301 | tcccataggg cctgtcggcc tggactatat cgcaggagcc gtcagggcag ccgggaacca |
| | | 361 | ggcagacgta gttgatttat gtcttgctga tgacccgtca aagactctcc agggctattt |
| | | 421 | cgctacgcac agcccgcaat tggtgggggt ctcttttcgc aatgtggacg attctttctg |
| | | 481 | gccaagcgcc cggtggttcg tccccgacct ggctgacact atccgtacga tacgaagtat |
| | | 541 | gacggatgca ccaattgtag ttggcggcgt tggcttttcc attttttccg agcgaatcgt |
| | | 601 | cgaatatacc ggcgctgact ttgggattcg gggcgacgga gagcaggcaa tagtttcact |
| | | 661 | tcttaatcag ctgcagcggc cggaacggct tgaacgcata gatgggttag tccggcggcg |
| | | 721 | cgacggagtt attcacagca accgaccagc gtggcctgca ccgctttctt tgcgcaccga |
| | | 781 | acgtgatgcg attgataacc tcgcttactt caaaaaagga gggcagtgtg gtgtggagac |
| | | 841 | caaacggggc tgtaaccgcc gatgcctata ttgtgccgac ccgctggcta agggtgcggc |
| | | 901 | agtcaggccg agggccccgt cggaggtcgc cgatgaggtc cagtctctaa taggcaaggg |
| | | 961 | aatagaagta ttgcatttgt gcgactctga gttcaacatc tctcaaagcc acgcctatgc |
| | | 1021 | ggtctgcgaa gagttcagcc gtcgctcatt tgcgaaaaag gtgcgctggt acacatatat |
| | | 1081 | ggcggtggtg ccattcgatg ccgagcttgc cggggctatg agcagagcgg gctgtgtcgg |
| | | 1141 | tatcgacttt accggcgact ctgcgtgccc atcaattcta aagacctatc gccagcggca |
| | | 1201 | tcataaagaa gaccttgcct cggcggtgcg tttgtgccgt gctaacggca taacggttat |
| | | 1261 | gatagacctg ctgtttggcg gcccgggtga aacgccggaa acggtcgcag agacaataga |
| | | 1321 | tttcattaag caaattgacc cggattgcgc aggggctccg ctcggtataa gaatctaccc |
| | | 1381 | cggcaccgaa atggcccgaa tagtggcaaa cgaaggccca ccggaaacga acccgaacgt |
| | | 1441 | tcaccgaaag tacgaggggc ctgtggattt cttcaaacca acttactata tatctgaagc |
| | | 1501 | cctcggtgag cagccggccg ggcttatcaa ggatttgatt tcggcagatg aaagattctt |
| | | 1561 | tgagccgatg ccggaaatag ccccggaggc tctaaaaagt agccagtcca ccgaccacaa |
| | | 1621 | ttacaatgat aataccgaac ttgtagaagc aatcagcaaa ggtgcacgcg gggcatattg |
| | | 1681 | ggatatactg cgcaagcttc gctgcgacta agcagcttat ggtagtagat gattcccgcc |
| | | 1741 | tgcgggagat tggcccgaat cctgaggaat ttgttagaag cggatgcaat gttgattttt |
| | | 1801 | ggggtaaaaa cgggggcagg gggatttggt ccccggtttg aggattccga gaagcccacc |
| | | 1861 | cgtagggatc tccgctccct tagggataaa ttcgcttcga gtttgaaatt ggtccccggt |
| | | 1921 | ttgaggattc cgagaagctc acccgtagtg atctccgctt cgcttcggct ttgtttgggt |
| | | 1981 | ttgttttccc cgcgtctgcg aagtggttca ttttcataat cctttataac atataagttt |
| | | 2041 | acgttcattt tgggctttcg gcaaattggg tttgaattgg gtttgttttt ttggactgcg |
| | | 2101 | aaatcatctt tttttctgta aacctttgtt ataagagagt ttacattcat ttgggcattt |
| | | 2161 | agtaaattgg gtttgattgg ctttgaattg ggtttgtttt caccaagtgt ccaattggat |
| | | 2221 | ttattttcat aatcctttgt attatatgga tttacgttca tttgagcatc cagaaaattg |
| | | 2281 | gctttgtttt gcataaaaag ggctgatttg tagaggactc tttacagttg tagagggcaa |
| | | 2341 | gttagttaag agtgagctaa agtgcctaaa gtgaactaaa gttggattct cgattctcgt |
| | | 2401 | atagcgtata gcgtatttca cggttattca ccattcatta aggaataaat ttgattaggc |
| | | 2461 | ctgctggccc ctccggcgat tagtaaatgg ttctcggcgg caaaacaacg cgcctctata |
| | | 2521 | attgggcgaa catgcacgtt tgagtcgaaa attggtgctt tcttgacagg ataaacagga |
| | | 2581 | gtaactcgtt gtgagaaaag gagtaaaatt ttttttcaat tttccgattt taggttccaa |
| | | 2641 | ctacctgcac ttttgattga aaaatcacaa atgtcttgcc tattttaacg cagtttttcg |
| | | 2701 | tcgaaacgtc agcgaactag gaaaataggc gatttctggg ggaaaacaaa taaaaaatgc |
| | | 2761 | acaaaagtga caaaaaaacg gccaaaaaag tgcttttttt ggctgccttt accccgtgag |
| | | 2821 | atgatttacc aaaccttcct ctgctattcc tatgcaagtt tgctcagggc tggtgtgaat |
| | | 2881 | actataaaaa tttgtgctgt aatcactcca caaatcggag gcttcttcag cgtggaaatt |
| | | 2941 | ctggaggcca aaatgaaata cgctgtaatc accccacaaa tcggaggctt cttcagcttc |
| | | 3001 | actacctctc aaatcgccca actatacgct gtaatcaccc cacaaatcgg aggcttcttc |
| | | 3061 | agctcgcaag tcccgtccac gcacaaagtt tgagctgtaa tcaccccaca aatcggaggc |
| | | 3121 | ttcttcagca tgagcttttg gttgtgctgg atatgccagc tgtaatcacc ccacaaatcg |
| | | 3181 | gaggcttctt cagcacaaaa cggttcaaca aggtcgaaga actagctgta atcaccccac |
| | | 3241 | aaatcggagg cttcttcagc ttctgcggag tctttcgccg gtgttcaaat gctgtaatca |
| | | 3301 | ccccacaaat cggaggcttc ttcagcctat cctttataat acattttcct atatagattt |
| | | 3361 | acaatacaaa acccacgaca aaactgactt cttcttttga atcatgccgt attataacac |
| | | 3421 | ttttttacac tatcaaagac cacttttttt ctattccttc tcttttcacg accccataga |
| | | 3481 | atctcttcag atgttccctc tcaaaattga gattatagtg caaaagcgca tttcgcaccc |
| | | 3541 | gctttaaagc aacctgttga tcattattat aaccgcttct attcattatc tcctgaaatt |
| | | 3601 | ctatataatt ttttgctggt ttaatctttc ttcgttcgat aatccttcct tcaagcttta |
| | | 3661 | gtattgcatc gattccctct ttttgaaggt ttgtatattt gtcgaacgcc cttgcatagt |
| | | 3721 | gcttatggta gtctatttct tttgcttctt ttgggataaa atattcccaa agtctgctta |
| | | 3781 | aaaattcagg atcgtccatt acatacatct ttgtataatc caagatcgaa aagcgtatcg |
| | | 3841 | aaaaactctt cttttgctct tttggatttt ggaatttgaa aataatcact tctctgccat |
| | | 3901 | cttccttctt ccaatagata tgctgtgcct tttctgcaag tttttcgttc aatctgagat |
| | | 3961 | aatattgcct tgccatcata aggcaaagtc tgtccattgc cagtgtttca tatagcttct |
| | | 4021 | tgtttgttct gtcaaatcga tcaagagatg ggatgttata atactcttca ccaagaggaa |
| | | 4081 | tatcaaaatc cgaccacttt gtcttaattg cttcttcaac aagtctggca aaactctttt |
| | | 4141 | tgtcttcttt gaagaattcg tatctcaaaa atcccttata aacaaccggc tgttccaaaa |
| | | 4201 | tcctatctac cttttctcta aaagttacct ctttttcttc tttaggtatc agcccaatat |
| | | 4261 | attccttgag attctccgat tgcaaactgc ccagttcttg tagaaccaaa tcacataccc |
| | | 4321 | tttcatgaag tgcattgagc gttgtatgcc cggaaagctt ctggataata tttttgtcta |
| | | 4381 | atcgtctggt tcttttcagt tcttcaagtt cattataaaa tccggcgaag tctttgttca |
| | | 4441 | ctataaactt taaaatatta ttatattcct tcctgctaag tggcctatcg catcgctcgt |
| | | 4501 | tgatatatct gagtatatcc cttccttttc gatgtagttc aagcttcctc gatccctctt |
| | | 4561 | ttttatccgt ccacttggcc ttaacatatt ccaatcgagt ctttaacctt ttctcatcat |
| | | 4621 | caacctgtaa aagacctagt cttgaacgta cgaatcttgg aaggaagttt atagattttt |
| | | 4681 | gaatctcctc attacttatt ttatctaaat aaggcaactg cttctttaaa ctactaatat |
| | | 4741 | agcggtcaat tctttgaatt gcctcttcgg cttttcccaa tagactcaaa agaacaagat |
| | | 4801 | atttaagttc ataaactccc atcctgaata cgttggactg tccacctttt ttttgagcct |
| | | 4861 | tcagaataac attatttcgt ttaatataaa attggtcttg cttctctttg tcaaaatgaa |
| | | 4921 | tctcgactac cggcttttcc ctgtgaaatt tgtgtttgtt accatctgtc tctttcgtat |
| | | 4981 | cttcgttctc ccttttaatt ttacttcttg caaaacatgc tgtgtagtct gccaaatcct |
| | | 5041 | taagtccata atcctcaaga tatttcagtg caaataatat gaacttgtcc gtctttcttt |
| | | 5101 | cgctcaactg atcctggctt ctctttcgag ttagtttgat atgctgatat atctcagtgg |
| | | 5161 | gaactcggga caggtatccg agaatatccc tgaacataac tgcatcatgg tcctgcgcct |
| | | 5221 | gaaccgaata actatcctta agacaatatt tggaaaaaac ttgccgtgtt atattatatt |
| | | 5281 | caccctctgt ttttctaaac ccttggacat atcccattaa gcgatttaaa aatcttcttt |
| | | 5341 | caataaaaaa tgagacaaag aatactacac ctgctgatgt tatcttatct tcttcttcaa |
| | | 5401 | ataactctgg aaattcaatc gaaatatctt cttgttgttt tttcttcgct tcaaaacggc |
| | | 5461 | tcttttcgta tgctttttcc ataattatcc ttatggtgtc atttcgattg aatatcaggc |
| | | 5521 | agtcaggcgc gtgaagataa tgtgagaaat aattccttaa attctttagt ctttcactgg |
| | | 5581 | ccgctatttg aatttcttct tttactttgt tttcctcttc tttttcataa atcagttttt |
| | | 5641 | ttgtttcctc attaaaccaa tcctgtttca tgattttttc aaatcttgta agtgtttgct |
| | | 5701 | caaataactt tggattttcc tctaaatttg tttgtgctct attaagaact attgcaaaac |
| | | 5761 | accacttttt ttctccttca tattgctcga tagaatacac ttctttattg cttgtttttt |
| | | 5821 | ttatattttc aaactccata tttttaatcc ccgatcttct tactaatata aagtcaaagt |
| | | 5881 | ggtgcgaaat atcgcaccct accctctgcc tgcgcaggaa agaccaacgg acgattcgat |
| | | 5941 | gcagtttgag ctgccaggtg cttttatcat tcaaggggta aaatagcaga aaagccttaa |
| | | 6001 | tgtgtcaagg ggattttaga tttactattt ccaatttacg attttggatt gagattgctt |
| | | 6061 | cggcctaaaa gacaggcctc gcaatgaccc ccttagagtt gaaagcactc taaacaaggg |
| | | 6121 | ggcaggcggg gggaatatcg aatatcgaat ctgaatgtcc aatgtcgaag tgcaactgcg |
| | | 6181 | cgggaatgac aggtcggcagatttatttaattctgtggcc agatccctcc gcttcgtcca |
| | | 6241 | cctgcggtgg acttcggtcg ggatgacact gggggtgtgc cattgctccg ctcg |

| | Relevant | GACATAAAGACCCAATGGTGGCGTATGGGCTTGGCATACGTCTGATGTTTCATCAGAAAATCCTTTCTGG | |
|---|---|---|---|
| | sequence | AGGCTCTTGACTTATGGAATGAAATGCCGATAATGATATTAACCGGATTCCGTTCCGGCCTCTAAAACTT | |
| | SEQ ID | GCTTCCGTGAGTTTTAGAGGGTTCACAATACACGGGGCTGCTCTCTCGTAAAGGGCAGCCCTACTCTTTT | |
| | NO: 5250 | GGTTCATCCTGTTTGTGTGGGGTATAAAGCTTTAAAAATCCTTCAATAAAGGTTATATCTTCAGAGTTTA | |
| | | ACTTGCCATAGATTACCAAAGTAGCGTTTCCGCTGGGTAGGGGTATTGAAGTGGGTGTTGAACCAGTCG | |
| | | AATCGCCATTTTTAGAGCTATAAGAGGGGGTCGGTTGCATTGGCGGCGATCCCGCTTCATATTCTTCCAT | |
| | | TTCTTCTTTTACTCCATTAACTTCAGTCTTTCCTAATTGTTCTTTGATAAACATATTTGTGTCTCGAAAGCA | |
| | | TTCGATTGTCGTTTGCGCACCTTCATCTGTGAATCCACGTTGCTTGAGTGACCATATAAGGGCATCGTCC | |
| | | GAGGGTAAGTTTTCGGTATAACTTTGATATAACTCATCAAATATGGTAGGTGACTTAGCACATCTCTCTA | |
| | | ACGCTTCTTTTCTTTCTAATGAATTATGAGGAGCTTCTGTTATTATAAAAGCATCCTCCGAAATACCAAC | |
| | | CTTACCCTTTTGGTAACGAATAAGTCCATATTGAGCCATAGCAGCTAATATTGTAAGAGAACGACCGTGT | |
| | | AGCCTATTATAACCCCATACCTTAACTGCAATCTCTTTTGCCACAAATGCCTTTTTTTCCCTCTCATACAA | |
| | | TGCCCGTACATTTTTAACGCTTTCTCGCAAGCTGATACACGGATACCGTGGGCTACGTGGCCTATATTTC | |
| | | CTTCTTTTCTGTTGTTTTGTTTCAATTTTTTTGTCTTTTTGTCCTTTTTGTTCATTCATAATATTTACCCTTA | |
| | | AATTTTCTGGTCTTTTATATATCATCGACAACCACCGCGTGAAATACAAGAGAAATATTACTTTTTTCGT | |
| | | GAAATTTATGAAATTCTTTGTGATAAAGTGTTGCCGGAGAGTAATGTGCTGTTATAACAGATAAAAAGC | |
| | | CCCGCTGGGGCCTTGCAAACGACCCAACGGGGCAAAATGGCGGGTTAGCTGAGCTGCTGAAATAAACC | |
| | | TCGTGTTTCTTATTTCGAGTGCCCCTTCGGCTCTGCTCCCCCCTTCGCTATCCTCCTTCGCCAAGGCTACG | |
| | | AAAGAACCAGCTACGGAGGGCAGGCAGGGCTTCGGCTAATTCAGGACGGCATCCGTAAACTTTAAATTA | |
| | | TCAGATTTTCGTCTGCTTGTCATGAAGAAATAATGGTGGGGCAAGCCCACCCTACGATTTTGGTGTTTGT | |
| | | CGCGTATTATCCGGGAAATCCGGGCTAAGACAACGCCAATCAGGTTAATACACTGACGGCTTCGGCGAT | |
| | | TAGCTCGCGTATCGGCAGATGCTGTGGGCAGCGAGCTTCCGCAAGTCTGTAATCGGTGGTGAGCAGTTT | |
| | | GTTTCTAACCTTGCGGGGAATTTGAGCGAAAAGCCCTCTTGCCCTATCCTGGTCGCTGTAGCTGTTGTAG | |
| | | TACATCAAATACCGCATAATGTCACTGACATAAGGTGTATCGGGCAGGGCTGAATCGCAGATGTATGCA | |
| | | CAGCCGGCACAATAACCGCTGCAGGTCGCCTCCGCGTATTTCTTGAAAACGTCTAAATCCTGCTGAGTG | |
| | | AGTTTTGTTTTGTTCAGCACGGCATCGACGTTTGTAGTTAAAAGAGATATATTCTGCATCCCGACGCAGA | |
| | | CTGCGCTGAACCTTTTATCTTGCAGCACAACCTTTATCTTTGCCTGTTCTTCGGTGAAACCCCGCTTCTGG | |
| | | AAGTGACCGAGGAGTTTCTTATCCTGTTCGGTTTCAACCTCCTGAAGACGTCTGACCCCGCGGGAGAAA | |
| | | GCCTTCATAGCAGTAAGACCTATGCCCGCTTTGTGGCAGGCTTCAATAGCAGCCTGCATTGGAGCATCCT | |
| | | GCATGACTCGGAAGTTGTAAAGTGTCGTTATTGCATCAATCCAGTCGAGCTTGGCTGCAGCGGCGAGGC | |
| | | ATCTGGCCATATTCGAGTGGGTGCTGAACCCGAAAAACCGTATCAGCCCGCGCTTCTTTGCATCTTTGGC | |
| | | CCACTGTTTTAATTCATCCGTCAACTGTGCAGGGTCGGATAAGCCGTGAAAAGCATAGTACAAATCGAC | |
| | | GTATTTGGTGTTCATTCTTTTCAGCGAGGCCTGAAGACGCTCTTCCACCTTCTCGGCGGTTATTGCCCCCC | |
| | | AAAAAATCGCCGCCTTGCTTACAATGAATAGTTTCTTTCTGGCCTTCGGGTTCTTCGAGAGGAATTTACC | |
| | | TATCCCGAGCTCTGCGTTTCCACGCCCATAGTTGTAAGCTGTATCCCAATAGGTAACCCCCCATTCGAGG | |
| | | GCTTTTCTTAAAACGATTTGCTTATCAATAAAACTAAAGTCTCCGCCCAGAGACAGGCAGGAGACCTCG | |
| | | ACGCCTATTTTGCCTAACTTTCGTTTCGGCATCTGTGGGATTTTGGTTTTTTTTGGTTTTGGTGGAGCATT | |
| | | AGGGTCGCTGGTCTTCGGTTCGCCTGGGCCGGCTGTTGCTTCAGCCGAACCCCGTATTAAATACGGGGCC | |
| | | AATCCAGTCGCTCCCATCGTTTTCAAAAAATTCCTTCTGTTGATTTTGTTGTGTTTTTCCTTCATCATATTA | |
| | | ACCTCCGAAAGCGATTAATGTTTAAGTAATAACTTTCTATCTGCACTTCTTGTTTCATTTTCCGCAGAGAC | |
| | | CCTTATAGCTTTTTTGCCGCTTACGGGGCATTCGTGCTCACAAACTCCGCAGCCGATACATTTTTCAATAT | |
| | | CAACGAGAGGTCTTTGCAGGCGAACCTGAAGCTCAATTTTGCTGCCTGCAGCGGGGATTTTTTCGAATTG | |
| | | CTCATCAGGTGAAATTACGATGGTGTTTTCGGTGTTTGCTGCGATTTTTCTGCGTTCATCACCTTCGACGG | |
| | | CACAATAATAATCGCCGGTGGCAAATTTGGCAGGCACAATGTTCTCTTCAACTTCCACAGTATTATCCGT | |
| | | GGCTTTCTTTACAGTCAAAATGCCATCTCTTATTGTATTGAAACATTCCTCCGTATAAATTGCCTTTGGGC | |
| | | TAAGCGGGCAGTTTTCTTCGCAGACTATGCAGGGCTTATCCATCGCCCAGGGAAGGCACCTGTTTTGGTC | |
| | | AACAAAAGCGGTGCCCAGCTTGATTGGCCCGACGTCGGCAAACTCGTCGGTTCCGAGTTTTTCCGCAAG | |
| | | TGTAATCGGACGAATGGCCGAGGTCGGGCAAACCTGCCCGCAGGCCACGCAGTTTAGTTGACAGCCGCT | |
| | | TGAGCCGATTCGATTGTTCAGCACGGGGGTCCAGAGATTTTCCAGTCCTCCCTGTATGCCGCCTGGCTGG | |
| | | ATAACATTTGTGGGGCACACGCGCATACATTGGCCGCACTTGATACATCTCTTTAAGAATTCCTCTTCCG | |
| | | ACAATGCGCCTGGCGGGCGAATGACCTTATGGTACCAGTTGCTGCCGAGTTTGTTGCTCAGCCTGACCGC | |
| | | CGGTACTGCAATGATGCCGCCGGTGAGTGAAAGCACAAAGCCCCTGCGAGAGATGTCCGGATTTGTGAT | |
| | | TTCGCCTGCCAGTGACGGTTTTGTCTGGTAACTGATTAGTTCGTCCTTGCAGTCCCTGCGGCAATTAAAA | |
| | | CAAAGTACGCATTCACTTATTCTTATATTTCCGCTGGGCTGGCAGGCGCCTTCGCAGGCCCGCTCGCACA | |
| | | ATTTGCAATTGGTGCATTCGCTCCGGTTCTGGCTGATTCGCCATATAGCGAATCTGCCGAGGATGCCGAA | |
| | | TAATGCGCCGAGCGGACAAATGAATCTGCAGTAGAATCGGGGGATAGTCAGGTTAAGCAAGACCGCCG | |
| | | TCAGGAATATCGTTAGTATCAGCCATGCGCCCTCGTAAAAGCGTGCCGTTACTGAGGCGAGGTTGGCGG | |
| | | GTCTATCAGCAAGGGGCAATAATACGAGGTTAAAAGAGCGGGTTATCAACGGTATAGGGTCGAGCAGG | |
| | | CCCGTTTGCAAGGTAACCCCTATCGATGGAAACGCAGCCATAAAAAGAAAGAATATGAGAATGAGGTA | |
| | | TTTTATGCACTGGGCTTTTCGGTATTTGTTGAGCTGGATTTTTTGTGGTGCGGTTTTTTTTCGATTGCCTAA | |
| | | AAAGCCGACAAAGTGATGCAATGAGCCGAAGGGACAGACCCAACTGCAGAAGAACCGCCCGAATATTA | |
| | | TTGTCAATATAATCGTAGCCAGTGCCCATAAAAGAGGCCAGTAGAGGGTGTGTGTAGTTAATATTGTCC | |
| | | CGATTGCCACCAGCGGGTCGAGCTGTAAAAACCAGTTAACGGGCCAGCCCCGCAACTGCCACAATTTCT | |
| | | CGCCTACGGTGGCGACTATGCAGAACCAGGCGAACATCGAGAAAAAGAAGGCCTGGCTTATTTGTCTAA | |
| | | CTGTTACAATCTTCATACTTACACTTTTAGCTTACCGTGGCGGTTATTGGTTTGAGTGATTCATAATCAGT | |
| | | GGTTCCGGCATCGGCGATTTGGGCTTTGGCAAGGTAAGGCAGGTCCGAGGCCTTCAAATTTAGAAGACT | |
| | | GCAGCCATAGGCATCGGCCGCCACCATATCACAACTTGCAATCAGCGTATTTGCGCGTCTCAAATCTTCG | |
| | | ACAGAGCCTCCCGTTGGGCCATTGGTCATCATAACTTCAGTGCCGTCCAGTATAACCAACGTCGGCTTTA | |
| | | CCATCATAGCCAGCTCGGCAATGATTGTGTTAATATCCTGGTGAAAGATATTGCGGCGTCCGCCCAAAA | |
| | | GGCCGTACCAGTTTTTCATCGACATAGAAGCGCCGGCCCTGGCGTGGTGTTTGACCGGGGTGATACCAA | |
| | | TCAGTTTGTTGACCTTCTCAAACGGCCCGAAGAAGATAGGCCAATTTTTAATGAGTTTGCCACGTTCGAG | |
| | | CGTGGTGTGCTTGAAGTGATGGTCTTTTGGCAATATGACTTTTGCGCCTGCCCGGCTTGCCGCTTTACTG | |
| | | ATGCCGCTTAATGTAAAACAGCTTGCGGGGTCGTTAATCGGATTGTCGGTAACGTACACCCGCTTTGCCC | |
| | | CGGCTTTGTAACACAGCCGGACTACCTCAGCCACCAGTTCAGGGTGGGCCGTGGCTCCAAGCATTGGCG | |
| | | GCGAGGCGAATGCAACATTTGGTTTTATTGCAACCGTTTCGCCGGGCTTGACAAATCTTTTTATGCCGCC | |
| | | GAGCAATTCTATCGCCTTGTTGACAGTCACTCTCCTATCGGCGCCTTTGACAATGCTCATTGTCTTGCCCT | |
| | | CTTCAGACGGCACCGAAAAAGGCGGTAATGTTACGAGCGATTCGACATCAACGCCGGGTTTTGGGCCCT | |
| | | GGCTATCATAAAGCCGATAAGAAATTATACCGGCGGCGGCGATCGAGATTCCTGCTTTGCCTGCCCGCG | |
| | | CCAGAAATTTCCTTCGCCCGAGTTTTTTATCATTTTGCTCGGTCATTGTTAGCTGTCCCGCTGAGCTTATT | |
| | | AACAAGCATTACCGCTAAATTTTCCGCGGACTGTTGGTTTTCAGCTTCGTGAATGCCAACAACAAAAGG | |
| | | CCCTGTCGAAAGCACAATTTCGGTGGTGTCATAGAAATCCAGGACTTTGCCTTCGAGGGTTTTATTGGTT | |
| | | GCCTTCTTTGCTGTGGCGCCATTTTCAATCAGAAAGCTGCGATAGCTTTCTGCGACTGCCTCGGCATCTTT | |
| | | GGGACCGGAGCGTTTGCTCAGAAATGCCGTGATGGTTTCACCGTTAAGCTGGTATCCGGCAGCGAAGAT | |
| | | GTCAGTCAATCCTTCAAAGCCAAATGCACTTGCCAGATAAAGCTTAATGCTTCCTGGGACCAAATTATCC | |
| | | TTTGGCAGGTGCTCGATTTCAGGTATAGCGGTATCATCGTGAACGGCCAGGTTCGTGGGAATTTTCCTTG | |
| | | CGACTTCCGCCATTGCCGCAAACAGCTCATCCGATTCGGCGAAGCCGACCAGCTCGATATAATATTGGC | |
| | | CGTGCGCAAGATAAAACGCATTACTGGTTTTGTATGCAAATTGCATATCCGGCAGGTTCTCAACTTCGGG | |
| | | CCTTTTTTGCACGCTGTAAACCGAGAATGCGTTTCTGGTTCTGGCCATATCAAAGATATAGAGCTCCATC | |
| | | ACCAGGTTTTCATCCGCCTGGCTTACAAATCTCTGGGTGGACAATTTTATAAAACCAGCGTCGATATAAA | |
| | | GGGGGGCCTTGCCGTTAATCTTTTCGTAAAGATTTTCGGTGGTGTAGACTTCAATTTCTGAAAGCGTTTT | |
| | | GAATCCGTAAGGCAGAAGAAAAGTCAGGTCTTTCTTTTGTTTTGGCATCTGCTTTATGAATACCCCAACG | |
| | | GCGATAAGTAAGAGAATCGCTAATAAGCAGATGCCTATAACAGATTCGAGACGTTTTGCCCGGCTTGGT | |
| | | ACCGAACCCATAACCAACTCCAGTAATGACAAATTACTTGACTTTATAACCGGGCTGGATTATAATTTTT | |
| | | GCCGGTGTTGCTGTCAACCCCAAATGCTACAGGTGAAAAAGGCGAAGATAGATTTCTAACGAGGTTGAC | |
| | | AAAGCAGGTCAGGGCGTGTTATAATAGGTTGCTAAAGTAAAAAGGAGACTGAAATGATTGAATATGCA | |
| | | CAATATTTGGGGTTTTGGACGCCGGGCCCCCTTGAAATTGCTGTTATTGCGATTGTCGCTCTTCTGATATT | |
| | | CGGCAGACGGCTGCCTGAAATCGCCCGCAACGTAGGCAAGAGCCTGACTGAATTCAAGAAGGGGCTTC | |
| | | ACGAGGCCAAGGAGACCAAGGACGAATTGGTGGATGATGTCCGGGAAGTCAAGGATGATGTGGTAAGA | |
| | | GAGGCGAAGGATGCCGCCGGGCTGAATGAAGAGGATACAATGGGCTCTGATTGATTATTGATAAAGGG | |
| | | GAACTAATCACTGAGAACAATTGTCAATCATTAATCAACAATCAATATTGAAGATCCGCCTGTGGCGGA | |
| | | ATCAATTTTTAAGATGGGCGATACAAAGAAGAAAGAGGACCTCCTTGATTCCACTATGAGTCTGGGCGA | |
| | | CCACCTTGAGGAATTGCGGATGCGGCTGATTCGCGCGCTGGTGGGCCTGGCGTTAGCTCTTATTATCTGT | |
| | | CTGATCTTCGGCAAGCTGCTGATATCATTTATTCAAAAACCTTACGTTGCTGTGATGGGTGAAGAGGCTA | |
| | | CTCTGAAGACGCTTGCCCCGGCCCAAGGGATTAACAGCTACGTAAAAATAGCCTTGGTCTCAGGCTTGA | |
| | | TATTCTCATCGCCCTGGGTCTTCTACCAGTTATGGATGTTCGTGGCTGCAGGACTCTATCCTAATGAAAA | |
| | | AAGATATGTGTATGTAGCAGTACCTTTTTCGGTGGTATTATTTGTTGCCGGAGCTTTGTTTTTCATCTTTG | |
| | | TAGTGGCAGAAGTGTCTCTTGCTTTCTTAATAAAGGTCGACAGGTGGCTCGGACTGGAACCCGACTGGA | |
| | | CTTTCCCGAAGTATGTGACCTTTGTAACCACCCTGATGCTGGTATTTGGTGTTGCGTTTCAGACCCCGAT | |
| | | AGCTATTTTCTTTTTGAACAAGACAGGTCTGGTTTCAGTCCAGGCGTTACGGCGGTCAAGAAAATATGTA | |
| | | CTGCTACTTATCGTTGTAGTAGCAGCTATGGCGACTCCGCCTGATGTGGTTTCTCAAGTAACACTGGCGA | |
| | | TACCGTTGTATGTGCTGTTTGAATTAGGCATACTGCTGAGTTACTTTGCAGAACTAAAAAAGAGAAAGTC | |
| | | GAAAAACAACCAGTGATAAGCCGACAATCCCCAGCTTTCCCAGTACCGACTACTTGTTTCTTT | |
| Cas13 | Locus | 1 | agccgagtcg atggtagcta aggtgaacga caagcgtggt tatacggaga taagttgatg |
| bt-2 | sequence | 61 | cgactggtta tccatgagga cgaagtagat tcgatggatt ggttatatgg aattagatcg |
| | SEQ ID | 121 | aaacgtatac ctatgaagct cacagtcaaa taccaatcgg gatagaaatg cggcgcgcgc |
| | NO: 5251 | 181 | aaccttaggc aaaggcttgg ctgtttcagc gtttccgctt tacgtgcccg tttagccttc |
| | | 241 | accatagtcc acctttccgc aagcctccct gcgatcccgg acagtcggat ttcccaaatc |
| | | 301 | cggttctggt ctcggcccta tttgtcattt tctggataaa ggccttcctg tacaatttga |
| | | 361 | gacttaagtg ctagctcact tgcaccccat aattgtacag tttaccagta tcctcgttcc |
| | | 421 | gagagtccat ggcattcgtt ccagttcggt gcctggatgc acatgcctta ctcagaacca |
| | | 481 | ccgagtaccc agagcccctt tgtcaggcgt gggcgctacc cactacctgg atgactttga |
| | | 541 | aagtcacctc agaagacatt actcttcctt catagctcat acggactcat gcgccagacc |
| | | 601 | aaatccctcc caacgtcttg gttttccctt gtacgttagg tctttgcagg ttgtcgccag |
| | | 661 | tccctgctgg gaaacggccc ttcccgacat tatctctgca atccttgtat aggtgcaagg |
| | | 721 | acccttaccc cgcagcgtcc cttcggtgcc cttgcccgtt tcttcccgaa ggactgcggt |
| | | 781 | ctcacctcag gatttaaagg ttcgacacgc caattatccg tcgcaatgca acttcaacaa |
| | | 841 | cggggcaaat ttcggggctg cagtcattcc ataacgttca agctcctata cctgctatgc |
| | | 901 | cctgcggttg cacccaccac tgagcatata tgagctcagg gcagccgggc cgtttacacc |
| | | 961 | acgcatcgcc cggatggtta cccattccga gatgtggcat cgctacgtgc ctgaatcggg |
| | | 1021 | caactggcac gacgggactt tcacccgctg gattgcagcc ttgtcggctg ctccaaatcc |
| | | 1081 | ctgttgccac aaaaattttc tttgaggcat ccacgttacg acgtgtcggc cacgcttcgt |
| | | 1141 | agcttatctg aacagccttt cgacttcacg atgcattata atggacatcg tgaatctagc |
| | | 1201 | tatgtcatgg tcaatcgtag tgtggccagg ggccggccaa tcgagtatac ttgataaagt |
| | | 1261 | gttcatgaag ctgtattctt taatctccca agagtatgct tcgaacgttt aagaaatgac |
| | | 1321 | agatagtggt gaagtggtct gaaaacgggc ccgggaggcg aagacgtgag tacaggtaca |
| | | 1381 | gtgaaatggt ttaatgcaag aaggggatac ggttttattg tccccgatga tggcggagat |
| | | 1441 | gatttatttg ttcaccgttc ggacattaac acagaggact atgcatcgcg agattattaa |
| | | 1501 | ggtcggcaac gacatggttg ccgaccatat caatcataag ggcttggata atcgcaaggc |
| | | 1561 | caatttgcga gcggcgacga ttgcgcagaa tgcgtggaac cgccagcgca aaagaagcgg |
| | | 1621 | atttatgggc gtagtgtgga ataagcagat gaggaaatgg cgtgttaata tcagtcacga |
| | | 1681 | gggcacgtgc aggcatatcg gctacttcga tgatgaggtt gaagcggcga aggcgcacga |
| | | 1741 | ccgggcagcg aaaaaatatc acggagagtt cgcgagtttg aatttcacgc gttaaagcca |
| | | 1801 | catcacagcg agtccgacta tggcggacgc agcaatctta agcatatttg gctgcgcaat |
| | | 1861 | gtgttgcgcg ggttcctgct tggggcgagc tatcgaggtg taatcacccc acaaatcggg |
| | | 1921 | ggcttctcca gcgccgtaaa agttgataag aattttagat gcgccgtaat cacccctcaa |
| | | 1981 | atcgggggct tctccagcgc tgaccgaatt gataaaacca agagagcgct gtaatcaccc |
| | | 2041 | cacaaatcgg gggcttctcc agctgtacga caaatcataa cagaatattt gaagctgcaa |
| | | 2101 | tcaccccaca aatcgggggc ttctccagca aaatgagaca ccacgcttga cgtcactgtg |
| | | 2161 | ctgtaatcac cccacaaatc gggggcttct ccagcttcga gctatatctg gctcggtctg |
| | | 2221 | atttggctgt aatcacccca caaatcgggg gcttctccag cactggctta gcaagttcct |
| | | 2281 | ttgggcgttt cgctgtaatc accccacaaa tcgggggctt ctccagctaa tcgaagatga |
| | | 2341 | gaccgaagac tatcactgct gtaatcaccc cacaaatcgg gggcttctcc agctgattgg |
| | | 2401 | gaaagcactc cttacgcacg agagctgtaa tcaccccaca aatcgggggc ttctccagca |
| | | 2461 | catcctcgat aatacgttat ctcgattgga tttacaacag aaaaatcact gaaaatacca |
| | | 2521 | gggtttttgg tgcaatgcgc acacattaga acctgttttc atactgctaa agaccagcgt |
| | | 2581 | ttttcaatcc cttccctttt cataattcca cagaacctct taaaatctgc cctggcaaaa |
| | | 2641 | ttaaggttat gatgcaaaag cgcgtttcgc acacgtcgga gagctttctg gtcatcttca |
| | | 2701 | ttgtaggcgc ttttatccat tatctcgcta aatgggatgt agttctttgg aggtcttggc |
| | | 2761 | tgctctggac cgatagtctt tttctcaagc tcgagtatgg cttcaattcc ttccctttgc |
| | | 2821 | aggtttgtgt atctgttcat cccttgcgta taaagcctat ggtagtcgat ttgttcttcg |
| | | 2881 | tcttttggca aaaaataatc gcaaagtcgg gccaaaaact ccgcgtcgtc catcacatag |
| | | 2941 | agtttcgtat aatccctcag cgagaaccgt accgaacaac tctgctccgg ctgtgccgga |
| | | 3001 | ttcttcaagg tgaaaataat tacttcttcg ccatcctctt tcttccactc gatttgctgt |
| | | 3061 | gccctcttgg caagctcttt gttaagacta agatgatatt gccttgcgat catcagcaaa |
| | | 3121 | agcctgtcca ttgccagtgt ttcatacagt ctcttattgt ctttatcaaa cgtatcaagt |
| | | 3181 | gacacgattt cgtaatactc cccccccaga ggaacatcat aaacctctcc tttttccctc |
| | | 3241 | accgcttctt caacaagcct cgcaaaactc tttctgcttt ctctgaagaa ttcattcctc |
| | | 3301 | aaaaatcctt tataaataac cggctgtttc acaaccctgt ccgtcttttc ttcaaatgac |
| | | 3361 | acctcttttt cttctttggg tatcagtcca acatattcct tcagttcttc tctgcctagg |
| | | 3421 | ctttcaagtt cttgcacgac caaatcgcac accttttcgt gcagcgcatt gacgctttta |
| | | 3481 | tgcctggaaa gattgcacac gatgttctta tctatccgtc tggtcttctt caattcttca |
| | | 3541 | agctctcggt aaaacccgtc gaggtgctta gtgaccaaaa gctccaaaat acggttatat |
| | | 3601 | tcatcgatgt tcagcggcct ctcacaccgc tcattgatat acctcagaat atcccgtcct |
| | | 3661 | tttcgatgga gctgaagctc cctcgacttt tcttttttct ccaaccactt ggccttaaca |
| | | 3721 | taatcaactc gcgccttgat ctttttttca tcatcaaccc ctaagagacc cagatgggaa |
| | | 3781 | cgcacaaacc tcggaagaaa tctcacgtat ccttcaatct cttccgtgct tttcttctct |
| | | 3841 | atgtgaggca actggttgcg caagctatga acatacctgt cgattctttt gactgcctct |
| | | 3901 | gctccttttc ctaataagct cagtagaaca agatatttaa gctcgtagac gcccatcctg |
| | | 3961 | aatatatagg tttgggcgcc tttcttctga gttcgcagaa tgacgttatt gtgtttgata |
| | | 4021 | taaaatgggt ctccttcggc tctctcaaaa tgaatctcga ctctcggctt cttcctgtga |
| | | 4081 | ggtttctgct ccttgccatc tgtattttcg tcctgctccc gcttaatcct cgttctggca |
| | | 4141 | aaacatgctg tgtagtctgc caaatcctcc agcccgtaat cctcaagata gttcagcgca |
| | | 4201 | aacaatatga acttgtccgt ctttctttcg cttaactggg tttcgcttcg catttgcgat |
| | | 4261 | tctttgatac gctgatacga ctcactggga actcgtgaca aataccccag aatatcccgg |
| | | 4321 | aacatgaccg catcatgatc cggcgtctta accgaataac tgtccctaag acaatatgtc |
| | | 4381 | gaaaaaacgt cccgcgttat tttatattcc ccctctgtac gcgtaaaccc ctgaacatat |
| | | 4441 | cccattaacc gatttaggaa ccttctctca gcaaaaaatg acgcgaaaaa taccacacct |
| | | 4501 | gctgatgtta tcctgccgtt ctcttcgaac aactccccaa attcaatcga aatatcttcc |
| | | 4561 | tgttcctttt ttgcctgttc aaaacgcgcc ttttcgtacg ctttttccat aattatcctg |
| | | 4621 | accgggtcat tttgggtgaa tatcaggcag tcaggcgtat gaaaatagtg cgagaaataa |
| | | 4681 | ttcctcaaat ctctaagctt ttcatcagcc gctttttgaa tttcctcctc tacttcgttt |
| | | 4741 | tgttcttgtt ttgcatagat cagttttttc gtttcctggt caaaccaatc ttcctttctg |
| | | 4801 | atcctttcga atcgtgtcag cgtttcctcg aacaacttcg gattcccctg caaatttgtt |
| | | 4861 | tgcgccctat taagcactat cgcaaaacac cacttcttgg ccccctcata ttgctcgata |
| | | 4921 | gaatacattc cttggctgct tcctttcttg atattttcaa cctgcatatc tcagactctc |
| | | 4981 | ccaattgttg tttttcgcca tttttgttga agtccccgaa tgtcagtcta ttgggccagc |
| | | 5041 | tgagtcaacc cacaaggcac aatgtacata cagtctcgag tcatttcgag aagactttcc |
| | | 5101 | gctcgcccga taagataagc tttgagtatc tcacggggtg gacccgagca gataattcca |
| | | 5161 | catctcgtat ccggtgaagc tatccggcat aaattcgtgc ttagtgaatc gtgtttcgtg |
| | | 5221 | ttgatacggc tcccggctgc attcactttt cacggcagag aatatcgcaa aataaggcaa |
| | | 5281 | cagtcaaagg aaaaagggta aaaatggtga aatagatgag cgagcagtga attgttgtgg |
| | | 5341 | caagcaagcc gcaaatgaat ccttcggcca cgctc |

| | Relevant | AGGACAGGTTTGGGGGCAAATATTAGAAGGCGGTTATGCAGTTTTGTGGTCGCGGAGGCTATGGGGGAG | |
|---|---|---|---|
| | sequence | ATTGCTGGTTTCTGAGGCAAATCGGGGCGGTTATGCGGGTAAGATATTAAGGAAGGCCGGTCTTTGGTC | |
| | SEQ ID | ATATCAGTTACAAGGGGCTTGAAAGATTGGGCGAGGTTCGTTAGATTAGTGAACGTGATAGGCTGCCGA | |
| | NO: 5252 | ATATGATAAGGATTCTTGTAGGATGAAAGGACGCGAAGAAGATGAACGGGACGAGACAGACAATTAAG | |
| | | CTGTGGACGTGGGTATTGGTGGGGCTGGGCTGTCTGGTTGGCGGACGGCTGAACGCCGAGCCGTGGGTG | |
| | | GTTTTTGAGGGTGGCGAGGGGCCGGGCAAGGGAAGGCATATCGTTCTTGTCACCGGCGATGAGGAGTAC | |
| | | CGATCGGAAGACTCAATGCCACAACTGGCCAAGATCTTATCAGTGCAGCACGGCTTTAAGTGCACGGTG | |
| | | CTGTTTGCCATCAATAAGGAAACGGGCGAGATCGATCCCGTGACGGTGGACAACATTCCGGGTCTTGAA | |
| | | GCTCTGGGGCAGGCCGACCTGATGGTGCTTTTCACGCGTTTCCGCGAGCTTCCCGACGAGCAGATGAAA | |
| | | TACATTATCGATTACACCAATTCGGGCAGGCCGATCCTCGGGCTGAGAACGGCGACGCACGCATTCTTC | |
| | | TACAGCAAGCACAAGGATAGTCCGTACGCCAAATACAGCTTCCGCGACAGGCAGTTCGAGGGTGGGTA | |
| | | CGGACGTCAGGTTTTGGGTGAGACCTGGATTAACCATTACGGACATCACCAAAAAGAGAGTACGCGCGG | |
| | | ACTTATTGCGAAAGGCATGGAAAAGCATCCGATTGTGAAAGGCATTAAGGATGTCTGGGGCCCATCTGA | |
| | | TGTTTACGGCATTACGACGCTGAGCGGCGACAGCAAGCCACTTATCATGGGACATGTGCTAAAGGGTAT | |
| | | GGAGCCGGATGATGAGCCAAACCCGGAGAAGGAGCCGGTGCCGGTGGCCTGGACAAAATCTTACACAG | |
| | | GGGAAAAGGGCAAAACGGCCCGCGTTTTCGCTACGACCATGGGACACGGTGGCGACCTTAAGAACGAA | |
| | | GGTTTTCGCCGTCTTCTCGTAAATGCATGTTACTGGTGCATGGGAATGGAGGATAAGATTCCGGCCAAA | |
| | | AGCAAGGTTGATATTGTCGGCAAATACGAGCCCAATCCGATCGGGTTCGGCGGGCACAAAAAGGGCCT | |
| | | AAAGCCCTCGGATCATAAACTCTGATGAGCGGGCACAGCTCGGCATACTACGCAGGACAACAGCAAAC | |
| | | ATAGCAGGCGGGACAGAATAATCCTGGCCGCGTTTGCATCATACGGTGAAGGGTTCCCGCTATTCGCGC | |
| | | TGAACGCTACATCAGCCGGCGGCAACATCGAGAGCGATTTGAATTTCTCTCTGAAGATTTGCACATTTTG | |
| | | TGGATGTGGGGATTATTGTGTAGAATATCGATGATGGTGATGATAGCGGTGATGGTTAGCAGCGGTGCA | |
| | | CGAATTCGCAGGCTTCCTGCTACGGGCCGATAAGAAATCCGGCTGCTCCATCGAGCACCGCCGCGAACG | |
| | | TTATAAACGCTGCCTGGGGTCATCAGATTGGATTGAGGAAACAGCTCTTCCGATATAATCGTATGGTGCT | |
| | | TTTCGTAATTGTTTAGTCGTTTGAGAGGCCTTAGATGGGTGAAGAATCACGCAAGGTGGCGCTGCCCGG | |
| | | CAGGATTTACCAGAAGAAGAAGCGCTGGTGGTGGAACGTGCGGCTGCCCGGCGAGCAGAAGGCAAAAG | |
| | | CTCGCGCACTGAAGCCTGCTGGGTCGCGTTTGGCTACGACGGAGCGTGAGGTAGCTGAAGAGATTGCGC | |
| | | TGGAGATGTGGCAGCTCGCCATAAGGGGCGAAATTGAGGCAAAGGTCAAGGCGGAAGCTGAGCAAAAG | |
| | | ATTAGATCCTGCACGGAGGAGATAGAAAAAGTCAAAACCGAAGCGGCTGAAACGATAGCCAGGCTAAA | |
| | | GGCGGAATTCGAAGAAAAGGTAAGGACTTACTCCGAGGCGGTAGCCAGAGCCGAGGAAAAAGCGAAG | |
| | | GCAGAGGCCGAAGCAAGAGCACAAGTGGAAGCAAAGTTGAACGAGGTGCTTGCTGAGCCAACGGCAAC | |
| | | TGGTGCCTGCGAATGTTGTGGCAGAGAAGACGTTCCAGAGAATGACCTGGCGAGAATTGACTCGGGACA | |
| | | AATGCTTTGTCCGGACTGCATTAAGCAACTAAGAGGCTGATTCTCCTTTTATCGGCAGCTACACTTCGAG | |
| | | GCTCGACTCACTCAGCGATACAGCTAACACCGGCAGAAAGACTTTCTCACGATGAGCCGGAAGAGATCC | |
| | | CACCGGAGACAACAAACGCCATTGCTTGTGAACTTTCAACATCCAACGGCTTAACGGACTCTTTCGGCA | |
| | | AGAGCAAAACATTGCCGGCGAAGTTGTAAGATTGAGGCAGGTAGACTGCAACATGGTCTGAAAGTCCA | |
| | | AGGTTTTCAAGACTCTCTCTGGTAACAAAACCGACCACCTTTGCATCGGCTGCAGGCACAATGGTGGCG | |
| | | AGTACGGGTTTGTCAAAACTTTTCTTCTCACCAGCGAAGGCCTCAATCACGTCCTTAAGGGCTGAGAAA | |
| | | AGCAGCTTGACCAAAGGGAGCTTTTTGAAGAGCTTTTCTATGAGCTCAAAGAACTTCCTGCCTAAAAAG | |
| | | TTTGATGTGAGAAAGCCAATAACAATTATCAATACGACCGTCACCAGAAGTCCCAGCCCCGGGATTTCT | |
| | | ATTCGAAAGAGAGCCCGAAGGAAGGCATCTAAATTTGTGAATGCCCACACAAGCAGATAGACGGTGAG | |
| | | GGCTATCGGTACAAAGACCAGAAGTCCCTGGACGAAATAATGAATTAGTTTTTTCATTTTCTTGCTCCAA | |
| | | AAACGGGCCACTCAACCGATAAGGACGAAGAGTAAAGGCCAAAAGTGTTCTTTTCGCAGTTTCCTCAAG | |
| | | GAAGACGCATAACACCACTACCCATTTGACTCTGGCTGGGCACAGCACCATGTTCTCATTCAGCGAAAT | |
| | | ACCAAATTTGCGTAACCGGTGCAATGGCTTGGCCGGTAAATTGCCACGAAATGCTTTGATCCTTGAGTGT | |
| | | CCGGCGGTACCTCTCCGCCCGGCTTAGGTTGGGTGGGCTGTGGACAAGAAGAAAAGAAAAAAGCCCCT | |
| | | GTGCGGGCAGCAGCGAAGACATCCCCGTATTTCCATTTCTGTAATGTTTGAGATACTCGCCTTCTGCTTG | |
| | | ACAGGGGCAACATCAAGTCAATCTTATCTTCTTGCTTCTTAGCTCCCTTCTTACTACGCCCACATATAACC | |
| | | GCGGCTTGTTCTCGATGCCGGAAAGTAGTCAAGCAAGTCAAAATCGCTATGGCCGGAGATGTCACCTTT | |
| | | TAGAGTCACTTACTACTATATCCAGCCTAACATTTTGAATCGGCAGATTTGGTACTTGAGCTTGAGCTTT | |
| | | TCTGGATGTGGCCAATTTCGGCAATATGGCGGTGTTTTAACACAGGCAAAAAGGCCAAAAGTCAAAGAG | |
| | | CTTCCTATTTCTTTTCCGCTCCCCCAGACATCCAACTTGACGACATGGAGCCTTTCTCCCAAGCTCATCGA | |
| | | CTTCTCTGACTTAAACCCGATAACGAGAATTATTATTGTTCGGAATTTTTTCAGAAGACTTTAAGAATAC | |
| | | GCAAAAATTTTCTTCTTTTTGACCGAGAAGTCACTGATGAGCCAACTCGTCAGAGGCCGTGAATTGGAA | |
| | | AGACTTTTACCTTAATCGTTTCTATTGTGGCTTCTATTGCGGGCATCACCGTATCCCGCTGCTGGTTGTTT | |
| | | ACGGCAAGCGCTTTGTCCCGCAACGGGCCGTGCCATTGAGAAGTGCCGAGCATGACGCCGTCGATAATA | |
| | | GGATTCTTGCTCCGGTCACTATCGGCGCCGCATAGTATGGTCCAGGCAAGGGCCCAGGCCCTTACGGTG | |
| | | TTGTCGATGTCATATCCGCCGCCCCCAGTTGCAAGGATGGGTCTATTAAAACTCAGCACGGATTCGATAA | |
| | | CGCCGACATAAGCATTATTAGTTAAGCACAGGTGTGCAAGCGGGTCACCGGCAAGGGCATCAGCGCCC | |
| | | AACTGAAGAACGATTGCATCGGGATTGTAAGCGGCGATCAGTGGCGGTGCTATCGCCTTGAATGCCTTG | |
| | | ATGTATGCTTCGTCATAAGTACCCACCGGCAGAGGGACGTTTACACAGTAGCCCCTGCCCTGGCCGGTT | |
| | | CCGATCTCGTCGGCGAATCCGGTTCCGGGAAACAGTGCTCTCGGGTCTTCGTGAAATGATATAGTCATA | |
| | | ACATCGGAGCGGTCGTAAAACGCGTACCCAACGCCGTCTCCGTGATGAACGTCCACATCGAGGTATAAG | |
| | | ACTCGCTTTCCAGCCTCGGCGAGTATGATACAGGCAAGAGCGACATCATTGATGTAGCAAAAGCCGGAC | |
| | | GCGCGTTCGGGGCCTGCGTGATGAAATCCGCCCGATGGATTGAAGGCGACGTCAGCAGAGCCTGCGAG | |
| | | GATGAGCTTTGCACCGGTGAGTGTGGCACCAGAGGCCAGGACTGCATAGTCATATAGTCCCTTAAAGAC | |
| | | GGGACAATCGCTCGTCCCTAACCCCATATCGAGTGCCTCGGCATCCCAGCGGCCTTTTGAAGCGGTCTGC | |
| | | AAGGCGTGCAGGTATCGGGCTGAGTGGAATTTCTTCAGGACTATCCTATCAGCGGGCGCCGGCGGCACT | |
| | | TCGGTTCGGCCGCCGCCCGAAAGCAGGCCCATGGAATTCACAATCTTGCGAACTCTTTTAGCTCGGATC | |
| | | GTGTTAAAAGGATGGTCCGGGGGGTAAGGATGCTTTTCTAGCTCCCGCGAATAAACAAAGACAGCTTTT | |
| | | CTCATTGCCGGCATCGATCCACTGACAGACAGTTCTTCTTAAAGCGTCGACCACTCCAAATGACAGAAT | |
| | | ATAGTACTCTATGTGCCGCAAAACCGCAAAGCCTTTTGTTGTTCTTCAGCCTGTACAAACACCATTACTA | |
| | | TTCTTAAAATGCTCTCTTGAATGGCAAGAGAGTCAAAGGCGTATATCAACAGACAGCTCAAAGCAGGAA | |
| | | CGACTTGAGAGGCAAGCTTATGAAGCAGGCAGGGACCAAAGAGTTGGAGCAAATTCCAGGCGTAGGCG | |
| | | AAAGAATTGCTCAGGATATGCGAAATATTGGTATTCACTCTGTCAGCCAGCTCAAGGGCCGGGACCCTG | |
| | | AGAAGCTTTATCAAAGACTCTGCGATTTTAAGGCAAGCCCCGTTGACAGATGTATGCTCTACGTGTTGCG | |
| | | TTGTGCGGTATACTACGCGTCAAACACCGAGCATGAGCCAAATTTGCTGAAATGGTGGAATTGGAAGGA | |
| | | TAAAGACTGACTTCTTCTCGTGCTCTGACGCCGGCAGCAGTTCGAATCAGTTTTTATCGAGCGGGTCATA | |
| | | CCAGCGCTTAAGCACGCCTTCCCCCGTGGTTTCTTTCATATCACTTACATGGGTGTCCAGCCAAAGAATA | |
| | | TTCAAGGTTCCACCAGTTCTGAACTCGTCACCCGACTTTATGTTGTGCCGAAAGATCCCGCGGTACCAAT | |
| | | TCCTACGACTACCAGTTTCTCGATAGTGAGTCAGGTTTATGCCAGTTGGACTGGGGAAGAGCATGTCGG | |
| | | AGTTCCCGGCGTTCGCTCCATTTTCGATTCTTGGCTCCATGTGGTCATGGGCAACAATAACTTCAGTGTG | |
| | | TTTTGGAATAGCGTTTGTGTTCTCTTTGGTCAGCCAGCCATTGACAGCAAATGCCGAAGTGTAGATGAGT | |
| | | TTATAATCACCGCCATAGAGTAAATCCTTTGCTATCGTCTCGCAAAAGTTGCGGAAGGCTGCGCAGCCA | |
| | | AAGAGCTTTCTTTCTTTGACATAGTCTATATAGGCAATGCCCCAATAAGCGCGATCATCCGTGGCCCTGA | |
| | | GCGGATTGCCGGAGGAATTCCACCAAAGGTGGCCGTTACAGTTGTTGGTGTGCGTGCACATATCAGGCA | |
| | | TCGTGTATTCGTTGTCGTCAAGGTACATTCTAATACCCAGGCCTATACCTTTGAGGTGTCCCTTGCAGGC | |
| | | CTGGTCTCGTGCCTGATCCTTTGCTGCCTGCAGTGCAGGCATCAGAATTGCCAATAACAGAGCTATGATG | |
| | | GAGATAACCACCAACAGCTCTATTAGTGTAAACCCTCTTGCCATGTACTTAGCGAGCCTTGCGTTGTAAT | |
| | | TCATCATTGCGTTACCTCTTAGAGTTGTATCCATGTGTTAGCCCAAAGAATCATTCTTCGCAGGATACTC | |
| | | ACATCTCGGCATGAAGGCGGCGCCGCCATGCTGATATGCAGCTAACAGCCTACGTTTGGTAATTTGTTTC | |
| | | ACAACCTACCATTAAGCGTCAATATCGCTATGTTTGAGCGGTCCTTACCGCTTTAGAATACCAAATCTAC | |
| | | GTGAAAAAAGCAAGCCATTGTGGATTTCTTCAATAAATTTCCTCGCGGAAGGACCAAGTTTGCTGAATT | |
| | | CGCACCGGCTAACGTGCTTTCGGCGCGATTTTCGTGCGGTGGTCTAAGCCCGAGCCCTCCAGGTCAATGC | |
| | | TCACTGACGGGCCTATCTTCGCAAGGCCGGTATATCCGGCTCGATGTGAACGGTGATATTGACCGGGCG | |
| | | GGTCAACTGCTCGTCGAGGGCAGTCTCCAGACTCTCGGATATTTCATGGGCGGCGGCTATGTCTAAATTG | |
| | | GGGTCAACAAGTATATGCAGATCGAGAAAAACCTCCCTGCCAACCGTACGCGTCCTGAGCCTGTGCCAC | |
| | | TGGCGGATTTGCTTATTTGCATTGATTACACGCTCTATGTGCTCAACTGTTCCCTGGTCGACGGCACCCTC | |
| | | TGTCAGCTCGCGGAGGGAATCGCCGATTATCCTAAAGCCCACCCAGATAATCATGAGGCCAACCGCAAC | |
| | | GGCGGCTACCTGGTCGCCGTGCTCGAAGCCGAGCCTTAGCGATATGAAACCTATCACAACCGCCACGGA | |
| | | GCTCAAAGCATCACTGCGATGATGCCAGGCATTGGCATAAAGTGCGGCGCTGTGGGATTGGATGGCAGC | |
| | | TTTTTGCGTGACCCTGTAGAGCCACTCTTTAGCAGCGATCGAGACTACCGCGACGACCAGAATGGCGAT | |
| | | GCGAGGGATAGTAACTCGATTGGCGGCTATGGCAGCGGTGGCATAGTAGACCATTGCTCCACCGACAAG | |
| | | AATCAAGATGATAGCAATCGAGCCTGCCGAGAAGGTTTCAAGCCGGCCGTGGCCATAGGGATGTTCCCG | |
| | | GTCAGGCTCTTTGGAGCCGAGTCGTAAGCCTATGAGCACAACGACGTCCGTGGCCATGTCTGAAAGTGA | |
| | | GTGGAAGCCATCAGCTATCAGTGCTAAGGAAGCTGTGAAAAAGCCAATGACAATCTTGAGTGCTGAAA | |
| | | GCGCAATATTTATAGCGATGCCAAGATATGTGATCGACCTTATCTGCTTGCCGGCAATTTTTTGTTTGTC | |
| | | GTTTTGCATCAATCTGTTAGCCCAACACCTGGTTGCGTATTTTCAAAACGTCGTTGATATATCGCCTAAC | |
| | | GGTGGATTGGTCCTTTGCCTCCGCTATGACCCTTACTATAGGTTCGGTATTGCTGGCCCTGAGATGTAGC | |
| | | CAACCATCATCAAAATCGAATCGGCAGCCGTCGGTAGTGTCAAGCTTTGCATCGGTGAATGTCTCTTTT | |
| Cas13 | Locus | 1 | tatccaaaat gtggtttgaa ttcaagaatc aacgctttat tccttaaaaa ggggcggtgc |
| b-t3 | sequence | 61 | gatggaaaaa gaaccagaaa catccgtgca atcggcgtcg ggacacaata tggatatccc |
| | SEQ ID | 121 | gattgactgg tcggtaacct cacgctattt cgaagatgaa gatacgctga tgcaggtggt |
| | NO: 5253 | 181 | ggggatattt gctgaagact ctccgcagac cgtccgggac cttgccaagg ctatacagac |
| | | 241 | gcaaatatcc caggatgttc aattgcacgc tcacagcctg aagggagcct cggctcttat |
| | | 301 | cggggccgaa catctgcggc aaagagcctg gcggcttgaa tacgccgccc aggagaaaaa |
| | | 361 | cacggcggcg tttgaggcgc tgtttgacga gacaaaggcc gagttcgaca agctgatgtc |
| | | 421 | gttcctttac cgcgccgatt ggattgaagc agcaaaagaa cgccactgca acaggcaaca |
| | | 481 | ggccgagcag gtatgaaaca tcttttggaa aagaaggcga tggaatgagt ggatggttct |
| | | 541 | ccattttgat cattgatgat gacaggatgg ttacagacaa gttggagaag atcagcggcg |
| | | 601 | ccaaggctgc aaagaaaagg ttcagcctgg caggcgtttt ctcaaagggc gcctgaagcc |
| | | 661 | ctttatttgc aggcgtgcta ccgcttgtca acgggcaggg gacagaaccg caatcaggat |
| | | 721 | taccatcagt ttcttcattc cattaacctc gctttttcct ctcgttcttt ttcttcttcc |
| | | 781 | tggttttcgc agcgttgggc tgtctttttg ccggttttgt atagttgtcg ccgtaaatgt |
| | | 841 | caatgagtgc ggcttttagt ttttcgggcc agttgcggtt ttcaaaagcg cacacgagcg |
| | | 901 | gatcgccgct ttgtttcatc cagttatgaa gccggccctg catcttcttg atttcgctcc |
| | | 961 | tttgctctgc ggaatcgata aggttgttga ggcagtcggg gtcatttctg agatcataga |
| | | 1021 | actcctcggc cgcgcgatat ctgaacatct tgacgcgctg tgcggcgaac ttattcgttg |
| | | 1081 | gagcggcctc gaccatcgcc ttcatggtaa ggccctcgtt gttgtttcgg taccagaatc |
| | | 1141 | tgccgtcggc ccacggattg aagatatagc cgaagcgctt atcctggacg caccgcatcg |
| | | 1201 | ggacagcgtc tccgccggct ttcatgtcta tctgcgtaaa gaccacgtcg cgtccggatt |
| | | 1261 | gcttttcgcc tttcaacagc cccaggaaag aggaaccgtc aagccccctg ggtatgccca |
| | | 1321 | gaccgaccgc ttcgagcacc gtcgggaaga agtcgatccc tgagataaag tgcgccttat |
| | | 1381 | cgacggcgcc tgcttttacc atttgcggcc aacgaacgat ccacggcgtc cgcgtgctgg |
| | | 1441 | caagataggc gttgcatttt gcaaacggta tggcgatgcc gttgtcggag aggaacatca |
| | | 1501 | caagcgtatt ctcctcgaag cccgactcct tcagggcctg caacgtcttg ccgaaggtat |
| | | 1561 | cgtcgagtcg gcggacggag ttgagatagc agctcagttc ctgccgaacg cccggcaggt |
| | | 1621 | cgcagacaaa accgggaacc gcaacctcat cgggcttata cgtctttgaa ggttcctttg |
| | | 1681 | cccccttgat tggcttgccg ccgatatgat acgggcgatg cggatcgtgc gagttgacca |
| | | 1741 | taaagtagaa gggcttattc tcgcggcgac acctcgccag aaactccttg cagtaaactg |
| | | 1801 | taatagagtt ccggatcgcg gccggcgccg agttccttct ggtcatgcac aaaatcccat |
| | | 1861 | ttgtaatccg catggggcgt tgagtgcccc accttgccga gaataccggt aagatagccg |
| | | 1921 | gcatccctca gcgtctgcat gacagtcatc accaaggcgg cgcccaatcc tgcggccctt |
| | | 1981 | agaaaatcac gacgattcat cattgtcccc actaatcctt attgttcttc tcaagatacc |
| | | 2041 | ccgacaattt ctgcatttgc cgatacaggc cgccgggaca tatcagtata gccgcaaacc |
| | | 2101 | ttgaaaatat caacctcccg gaatataacg tcgacttcca acccagatcg ccaatccaga |
| | | 2161 | ataagaaaac aaagcaaaac gcttcaaatt cgtttaaccc cagggttcgc ctgaggttcg |
| | | 2221 | taaacaccat ctcgatgtac atcgggattc aaattcgttg agccccagcc cttcttgtgg |
| | | 2281 | ctcttgttcg gcaagaaacg ctgtaatcac cccacaaatc gggggctgct ccagcatcgc |
| | | 2341 | caagacgggc aatgccgctt tgaggctgta atcaccccac aaatcggggg ctgctccagc |
| | | 2401 | tgatttcgag tttcgatgct ttcggacagg gctgtaatca ccccacaaat cgggggctgc |
| | | 2461 | tccagcactc cttatggaga aggagcttat cgtgtcgctg taatcacccc acaaatcggg |
| | | 2521 | ggctgctcca gcttattcct tccatcatcc cgacagcagt gggctgtaat caccccacaa |
| | | 2581 | atcgggggct gctccagccc actttcgtaa ccattttact cgcaaacgct tataacgaaa |
| | | 2641 | acactttcca aaaaccatac caacgtcctc atttaacagg aaacttccac tccttttcaa |
| | | 2701 | ttccatattt cttcataaca tcactaaaca acccaaattc atctatcaca aactttaaat |
| | | 2761 | gatgatggaa aaacgctcta cgcaccttat tcacggcggt cttctccgcc tctttacaca |
| | | 2821 | ttgtttgtgc cagtatctca cgaaaatcaa tataatgcgc cccttccttc tcgctcatct |
| | | 2881 | ttttggcttt gacaaccttc tcttcaaacg ccagcaccgc ctcgacacat ttcttctgca |
| | | 2941 | gatcattata tgccctaaac cctttttcgt aaactgtatg ataccgtatc ttcccttttt |
| | | 3001 | cgtgcggcat aaagtactca catatccgcc caagaaactc agcgtcatcc aacacatata |
| | | 3061 | acttgccgta atcactcact gagaagacga tgcttttttc gttacccact gagccctcca |
| | | 3121 | cgggcaactc gatgctatca ttcgaccaca caattttatt acccaattcc ttgcgtacac |
| | | 3181 | tccccaggaa gtattgcgcc atcatcagac acaaacggtc tcgcgccagc gtttcataca |
| | | 3241 | aggctggatt agcaccctcg aatcgcccaa tcgcatcaat atgataatac tttttatcca |
| | | 3301 | gcccaacgtc cctctgtccg ccgccgcttt ccaaatgctc ttccacaagc ttcgcgaatc |
| | | 3361 | ccttcttgct gtcataccag aacttcttgc gcaagaaacc cctgcggata gaaatatgct |
| | | 3421 | ccttgaacca tgcaaccttc tgcttgtaat ctatttcatc cttcttccca agccccacat |
| | | 3481 | aatcgtagag cttctgatcg ccgattcggc aaagtctgtt gagaatctga tcacacacca |
| | | 3541 | cctgatgcat ctcgtttatt gtggaggtct gcgcaaaaat tgaatatacc cgcccgtcga |
| | | 3601 | ttcgctcggc cagttgcagg cgtttcagtc ccgcctgaaa attctcaaca tccttgccaa |
| | | 3661 | ccagacacac cagcagccgg ttgtactcgc cgggattgaa agacctcgtg caattttcat |
| | | 3721 | ttacgtattg aagaatgtcc cgcgccttct cgtgaagtgt catctcgttg gtcgccgcct |
| | | 3781 | tcttcttttc ccacacccct cgaacatgct ttactctgcc gtctattctt tgcttaaaag |
| | | 3841 | ctttcctgcc aatcccatgt tgctccagca caaatcgcgg caggaagacg tgattatcct |
| | | 3901 | tatctgtgac cttcactaca tccagaatgt tctccacatg ctgccgatac ctgtacagtt |
| | | 3961 | ttgcaatcgc atcgtcgccc tttccctgaa ggctaagcaa tacaaggtat ttcaattcgt |
| | | 4021 | taagccccat gcgataactc cgaggcccgg cattcttatc aatcctgacg ataacattgt |
| | | 4081 | tcttactgat atagtatgac tgatcttcgt ctttttttga aaagtcgaca actaccttgc |
| | | 4141 | ctttggtcct gtgctttttg tgttcgtcgc ctgccccggc ctcctccctg acaatgtgtc |
| | | 4201 | gccgcccgaa gcatatctca ctgtgttgcg cctccagata atgcagtgca aactcgatga |
| | | 4261 | acttgtcttt atggcgtttc ggattcgtcc cctcattgtc gtttgctctt ttcttgtcgc |
| | | 4321 | cctgctctcc gtggtagtat tcatacgcct ccgcagggat gcgtccaagc tgcgcgagta |
| | | 4381 | tatccctgaa aagcagcacg cgtttgtccc acgccttcgt gaaacgactg tctttcaggc |
| | | 4441 | aatacatcga aagcgccttc cgagtcagct tgtactgtcc ttcgtttttc ttaagcccac |
| | | 4501 | ttaccgcacc gtacaaacga tccagcaccc gccgttcaac aaagaacgaa acgaaaaaca |
| | | 4561 | caacccccgc cgtagtgatc cggtcgcctt cgaacaggct gggaaactcg atgatcactt |
| | | 4621 | cagtttcgcg tctcctgcat tcaaagatcg cccgctcata cgccctttcc atgattgtcc |
| | | 4681 | gcaactcatc ttctgctgta aatgtcagac acccgggcga atgtcgatag tgggagaaat |
| | | 4741 | agtttcttaa cgcctcggcc ttcgcattgg ccgcttgtgt gctacacttg atcaaagcgc |
| | | 4801 | gtgtatcctc atcgtaccag tcgtgctttg aatacttttc atggcgtaac agcgactcga |
| | | 4861 | caaaaagccc gtcgttctta tctcgattca caagagcctt gttgaaggca atcgtaaaac |
| | | 4921 | accatttccg agcaccttga tattcatcga tagacaactc tctctttttc gaagtctgct |
| | | 4981 | ttgacacttg cgccattgag cacctcccat tccagatttt agtgcgatct ttacctcatg |
| | | 5041 | cctccacaac actcccagcg ccaaacgttg agcaaagcaa aatacgccgc aggcgggctc |
| | | 5101 | cgtcgaatcc gtaatcctaa tttctaactt cccaatcatc taaaccgccc gcaaccgatt |
| | | 5161 | tgtcaaccaa aaaccacatc aatccgcaga tggccgcaga taaccgcaga tattgcaact |
| | | 5221 | aatccaccca acccaaaacc tctgttccat ctgcgccctc tgcgaaatct gcggacagct |
| | | 5281 | ttttttttcg tgcccttcat gtcttcgtgg tgaatttcat ttaacatttg acaaatatca |
| | | 5341 | aacggcatgg tataatgcgt tgcgtattta aggacaaagc aacaccaaaa acagggggag |
| | | 5401 | taaaaaaccg tgtccatcca aaaagaatcg caggccgcag gcctgccacc tatgattaac |
| | | 5461 | ctcggtcttt cagccaagga tgctccccac acccaaacaa gcgaaacgaa ccgtgcgcca |
| | | 5521 | agctaagctg gtgcaattca gcaggtgtaa tcctgcccgg tcaaaggtta gccgcccggc |
| | | 5581 | cggaatgaac atgtacgtat aaggaggcaa caaat |

| | Relevant | ATCACCTTTGTCTCCTGGCCCTTGTTTGGGCCATTGCCCGTTTTATCGTCCGGTGCGGATTTCCTGCACCC | |
|---|---|---|---|
| | sequence | GCCCAGGCAAAGACAAACAGCCAACATCAAGACCCATACTCTCATGCCAAATCGTCCAGTCATTTGAAT | |
| | SEQ ID | CCCTCTCAAAATAACTTTGCCCCTGATAATCGTTTCGTCCTGCTTATATGCCAAAGAAGGCCAAAAAGCA | |
| | NO: 5254 | AGTATCATAAAACCCGGAATAAGAAAATTTTTCGGCGGCTTCCCGCGGCCATGCCCCTAAAAGGACTTT | |
| | | CTACGTAAAGTGTATACTTACTGCGCAAAGAAAACCAGGCTCAGAGCCATCACGATCATGCCTATTATC | |
| | | AGACCATAAAGCGACGGGGGCGCTCACCCTGCGTTTCGGTACGCCTCAGGGGACGCTTGTCAGCTTGTA | |
| | | GAGTCGCAGCATACTCGGTGCGGGCAGCGGGCCTTTGACCGGACCGCGCGGATAGGCGTTCATCCTGCC | |
| | | CCGGCCGTCGGTCAGAGGCTTGTCCAGCAGCCGCCTCCAAGTCTGCGTCTCTGAATCGTAAACATTGTAT | |
| | | ATTTCAATACCGTTGCCGCTGCCGCCGTCGCGATAGCGGAATATGAACTCGTCGTCGGCCCCGCGAATA | |
| | | AACACCGGGTACGTACAGCGGTTCTCCTTTTCACCGGTCATGGCGTCTATTCGCTTGAAACTGGTCCCGT | |
| | | CATAAGGCCGCCCCGTCCTGAAATAGATCAACGGCGCACAATGCATATTCCCGGCAAGATGAACGTACC | |
| | | CCTTACTGTCGACCGCCATCTTGATGGAATTATGACTGTCCCAGCCGACCCTGGAATCCAGCTTTTGATA | |
| | | TTGCCATTTATCCGAATCCAGCCGCCGATAACAGCAGACAACATAACGTCGGTAAAACTCGTGAAATCT | |
| | | TCACCTCTTCGGTCTCCTTGAACCGGTCCGCACCCATTCTACAGGATCGACCTTGTAATAACCCTTCAAC | |
| | | TCATCATAAAGCTCAGGGTGCTTGCGTTGCATCCGCCTGGGCTTTTCAAAAAATGCTTCCGTTATGACGG | |
| | | CAAAGAACTCCGCCGGATTCGTCGCGCCGTACTTGTTCATGGCCGAGCGCCTGTGTTTTCGCGTTTTCGT | |
| | | GCAAAGCGCCTCGTATTCGGCACTCAAGACGCTCGCCCACGTGATATAGCTTGACCGGCTCTCGAGGAT | |
| | | AGGAGCGCCGTCGGCGGCGCCGTCTTCCTGGTCGAGCTGGTGAGAAAACTCGTGCATGACCACGTTCCT | |
| | | GCCGTCATGGATATTCCTCGCCCCGCCCATGACGCTGTCCCAGGCTAAAACAACAGGCCCGTTCCGCCA | |
| | | CGACTCGCCGAGCCGGACGCTCCGGCCCTCGATCACCATCACGCCGTCCCAGGATGTCTGCTTTGCAAC | |
| | | GTAGGTGTGAGGATAGACGTAGATGGTCTTGAGCTTCTTAAAAAACTTTGTCTTTCGATTCAGCAGCAGC | |
| | | ATGCACGCCTGCGCCGCGATTGTTACCCTGATTTCGTCGGTCATCTCCAGGCCCTGGCAGCCCTTGAAAG | |
| | | TCTTTTCCGCAACAAACACATTCACAAGCCCGCAAAGCTGCTCTTGCAAGTCGTCCGGCAGACGATTAT | |
| | | AAAGAGGGATGTTCTTTTCTATGTGCCCCTTCCAGTCATCGGGGAAAGGCGCACGCATCAACTTGCCTCG | |
| | | TCGCGCATCTCGAGCCCTGCGCCTTGCAGCCACAATCGCCACAAGCACAACAACTACCGCCGCCGATAT | |
| | | TATAATTGTCGGAAACATTCCAACTCCTTTGCCGAAATGGTGTACATTGCAATACCCTTTCACAAATGAT | |
| | | GCGAGGGATTCTGTCCGGTTCAGGCCCGCCGGTCAATGCACAATATACACTAATCGCCGCCCGGCGTCC | |
| | | ACCACCGAAGAGCCGCCGCCCCCTGTCGACTGGGCCGCTGCCACTAAGCCCGGTCAGGAGAAACTCCTG | |
| | | AGATTCTGAGAATTTCCCGGAGCAGGGCGGGACCGTGCAACTGTCTTTGGATCCTGAGCCGGTTATGAT | |
| | | AAAGGCGAAACAGCCCCATTATGGGACGCCACCGGCATGTCGGCCTGTGTGAGGGCGTATATACAAAC | |
| | | AACCGCCCTAAACAGCCCAAGTCGCAAGGTTATTGTTCCGA | |
| Cas13 | Locus | 1 | accggcggtt tttcatcgga ggtttggttt gctcaagcgg ctgcagattc aaattgaagg |
| b-t4 | sequence | 61 | cacggtgcaa ggggttgggg cccgtccttt tttttatcgc aaagccaggg acttgaacct |
| | SEQ ID | 121 | gagcggcttt gttctcaatg accgcagggg tctggtgctc gaagtgcagg gccggccgga |
| | NO: 5255 | 181 | taacctgcaa gccctgctga acctgctcga acatccgggc gggtgtgccg accggccgcc |
| | | 241 | tctgatgcag attgaaagct ggcgcgcgac accctgtccg ccgctggaaa acgaaacggc |
| | | 301 | ctttcagatt cttcccagcc gaacggaagg ggcgccggtg tgtcaaatca cccctgatac |
| | | 361 | ggccgtttgt ccgcagtgcc tgcgcgaact gttcgagccg tccgattttc gctatcgcta |
| | | 421 | cccctttatc acctgtacgc agtgcggccc ccgctatacc cttattaaaa gcatcccgta |
| | | 481 | cgaccgttcc aatacgacga tggactgctt tccgatgtgt ccgcgctgcc aaagccagta |
| | | 541 | caacgataag gccgatcggc gttttcatgc tcagccgctt gcctgtccgc agtgcgggcc |
| | | 601 | gtctctttcg ctgacggaca gtcagggccg gctccttgcc gatgaatccg acgccgccat |
| | | 661 | cgcccaggcc gcccgcattc tccgctccgg cggcatcgtc gctatcaagg gcatcggcgg |
| | | 721 | atttcatctg gcggcagatg cctccagcga agaggccgtt cagcggcttc ggcagcgcaa |
| | | 781 | gcatcgtcag gccaaaccct ttgccgtgat ggttcgctcg ctgaagcagg cccgtttgtg |
| | | 841 | tgccgagatt gacccgcagg ccgccgccgt gctggccggc ccgcaggccc ctattgtgct |
| | | 901 | gctgcccaaa aaagaaccca acccgctggc gccttccatc gccgaaggca ccaacacttt |
| | | 961 | cgggctgatg cttccttata ctccccttca tcatctgctg tttgccgagg agggcatctt |
| | | 1021 | atggctggtg atgaccagtg ccaacttcag cgaagagccc ctgctgtatg acaatgagca |
| | | 1081 | ggccctggcc gaactgtccg gcgttgccga tgcctttctg cttcacaatc gggatatcta |
| | | 1141 | tcggcccatc gacgattccg tccttcactg ggttgacggc gggccggcct ttctccggcg |
| | | 1201 | ggcacgcgga tatgtgccgg cgcccatccg aagaagccgc cccgtcctca aagaaatctt |
| | | 1261 | cgccgccggt gccgacttaa aaaacacctt ctgctttgcc aagcgtgatc aatatgtgct |
| | | 1321 | cagcgaacat atcggcgacc tggccgaagg caaatcgttc cgccattacc tttgggccgt |
| | | 1381 | cggccatctc cgctctcttc tggaggcgga accaaaggcg gtcgtctgcg accttcatcc |
| | | 1441 | ggattatctg tctgtgcggt ttgcccgctc gctgccggct gaacatttct ttcaggttca |
| | | 1501 | gcatcactgg gcccatatcg cctcagtgct ggctgaatac caactcgaaa ttgaggaatc |
| | | 1561 | cgtcatcggg ctggccgccg acgggaccgg cttcggcacg gatggagcca tctggggctg |
| | | 1621 | tgagtgtctg attgcctcgc aggttcaatt cgagcggttc gctcatctgt cgtattatcc |
| | | 1681 | tttggccggc ggcgatgcgg ccgcccgaga agccgtccgt ccgctgctgg ggctgctggg |
| | | 1741 | ttcgcagatt cctgcctcgc ttgaagcggt tcttgaacgg ctggagccgg accggaagaa |
| | | 1801 | actcgaaatc ctccgcctcc aggttcaaaa aggcatttcc gctgtgccga cgtcgagttt |
| | | 1861 | gggccgtttg ttcgatgccg ccgcggccct cgccggcctg gggacggtca acacgtttga |
| | | 1921 | agctcagctg ccgatggcgc ttgaggcggc cgccgaccct gcagaaaagg gactttacac |
| | | 1981 | cattcagata gacagccggc cgccgcagcc gctgcggtgg gagccgcgtc cgctcctgct |
| | | 2041 | ggagatggct gaggagttgg gccgacatgt tcctgctgcc gttgtgtgcg cccgctttca |
| | | 2101 | caataccgtc gccggcgctt tgctgcagat ggccgagcac gcccgccgtc aaacgggcat |
| | | 2161 | ccgcaaagtc gccctcgccg gcggggtctt ctgcaaccgc tttttaacca accggctgat |
| | | 2221 | tgaggccttg aaacaaaatg attttgctgt actctggatg cgcaaggtgc cggccaatga |
| | | 2281 | cggcggtctg gctctgggac aggccgccat tgccgccgcc cggatggaaa tggaacagaa |
| | | 2341 | aggttcacga taagaaaaac gatgtgttta gccgtaccag ccagaatcgt tgaactcgaa |
| | | 2401 | ggcgaccagg ccgtcgccga tgccatgggc actcgatgga ctatccgaac caccctcacg |
| | | 2461 | ccggagattc agttgggcga tatcgtcctt gtccacgccg gctatgccat caccaaaatt |
| | | 2521 | gacgaacagg aagcccggca gacctggcag ctctttgaag aaatcgcccg tctggacgag |
| | | 2581 | ccgccgcaga atcctccttc gtcgaggccg caatgaagcc cgcctgcatc gaacttcttc |
| | | 2641 | aagaccggat gtcgcaggcc gttcgccaaa tcggcaggcc cattcaaatc atggaagtct |
| | | 2701 | gcggcaccca tacggtggcg ctctttcggc acggcatccg ctcgctgctg ccggaaggca |
| | | 2761 | ttcgtcttct ttccgggccg ggctgtccgg tctgcgtaac cgaccagggc actatcgatg |
| | | 2821 | ccctcatcga actggcctgc cgagacgata cgctgattgc cacctacggc gatatgattc |
| | | 2881 | gcgtgccggg ctcaaagact tctcttgaaa aactccaccg ctccaacatc cggctggtcc |
| | | 2941 | tgagtaccga cgatgccctt caggccgccc gccggcatcc tgacaaaatc gtcgtctttg |
| | | 3001 | cggcggtagg ttttgagacg accgcaccgg ccaccgccgt cgctctccgc caggccctgc |
| | | 3061 | aggaagggct ggacaacttc accatcctct gcgcccacaa actcgtcatt ccggcgatgc |
| | | 3121 | gggcacttct ggaaggacgc aacgacaaaa ttgatgcctt tctctgtccg ggccatgtga |
| | | 3181 | gcgtcatcat cggctccgat gcatatcggc ccatcgcgga agagtttcac cgtccctgcg |
| | | 3241 | ttgccgccgg ttttgaaccg ctccagattc ttgaaggcat ctgccgcatc tgcgagcaaa |
| | | 3301 | tccagtcagg ccaggccaag gcagagtcgg tgtatcctgc cgtccggccg gccggcaatc |
| | | 3361 | cggttgccct ggcgatgctg gagcgtttct ttgaaccgtg ggacgggccg tggcgcgggc |
| | | 3421 | tgggctgcat ccccggcggt acgctccggc tgaagaaaga atatgaatcg ttcgatgtcc |
| | | 3481 | tccaacggct gaaccgaaca atcccgccat cgcctgagcc ggccggctgc ctttgcggcc |
| | | 3541 | aaatcctctg cgggctggcg gaaccggatg cctgtccttt cttcgccgga caatgcaccc |
| | | 3601 | ccgacaatcc catcggcccc tgcatggtct ccagcgaagg aacctgctcc gcctggtaca |
| | | 3661 | aatacaaggg ccggtaattc cattgcctgg gcccggggcc ttcttttccc ttccaagccg |
| | | 3721 | cttaacgttt tcaattctta aagtttccag cgtcccctgc cctcatcgcc gcgcaggcgc |
| | | 3781 | gatgcggaaa atcccctgcc cattccacgg cagtatccag aaccccccac tcaaaaaccg |
| | | 3841 | cacctaaaaa tccgactctg cccttcaacc ctcccaaaat ctgaccttac ccaaaaatgg |
| | | 3901 | ttgtgattac cccacaaaac gggggctgct ccaactgtta tcgacgtgta cggagcggtc |
| | | 3961 | aatgtgttgt gattacccca caaaacgggg gctactccaa ccaggatttg ttcgtcacgt |
| | | 4021 | attttgcacc ggttgtgatt accccacaaa acgggggctg ctccaacgag gcaagtgttg |
| | | 4081 | cagtctgggc actctatgtt gtgattaccc cacaaaacgg gggctgctcc aaccttcgag |
| | | 4141 | aaggcagaca cacgtcggtg caagttgtga ttaccccaca aaacgggggc tgctccaaca |
| | | 4201 | tcggtgagca ttgatgtcat aggtatgatg ttgtgattac cccacaaaac gggggctgct |
| | | 4261 | ccaacccccg ttctgcaagg tacgagttct aaacaagtta tacccatttc tttcggcaaa |
| | | 4321 | aacaaggggg aaaccacgtt ttatctcttc tttttcttcg gtttttctct tttttcctta |
| | | 4381 | ttcagatatt ccgacattcg tctttcaaaa tcccgccatt gagaaggtgt cgcctcaaac |
| | | 4441 | tcttcatgga aaaaatcatt ccttactcgt cttatactct ctttctcctc ttcgctcagg |
| | | 4501 | cggttttttc cggaaaatcg ctcaagaacc tcatcaaaag aaagatggct ttttcccttc |
| | | 4561 | cattcctctt cagggatctt caggttttct tcaaagcgga acagggccct gaccaccaat |
| | | 4621 | atctgacgct gcctgtaccg ctggaggccg tcccgaagaa actccggcca ggttatctct |
| | | 4681 | tttcttccgc tgagaaacca ttgacagata ttgtcaagca tcggcgcctt gttcagaaag |
| | | 4741 | tccagtctcc caaaatcctg cacccggaag ataatcctgc agccctgagg ccccttgtac |
| | | 4801 | tccactttga agcgattgta tccgtcggat tctttgcttt cgctgttgat ttcccagtca |
| | | 4861 | attttccctt ttacctgagg ggtcagatgt tcatagtgcc attgagccat ttgcatgcac |
| | | 4921 | agcaagtcct gcacataaag ataatacatc ttttggatga ttttccggtc ggaccatgga |
| | | 4981 | taatcgccgg gctgctcttc cctcagatac aaacgctcct catggaaaac agaagttttc |
| | | 5041 | ggtttcaggt gttcctgaac caacttcaag agattcgtcc gacggctgcc gccggttaca |
| | | 5101 | aaaagtttgc agcgaaggaa gtatttgggg acagagagct ggttttcgat aaaccgttca |
| | | 5161 | aacttcctgg cgggagtgtt ctgttcttcg tagtgtttcc ctttttcctt cggcagcagc |
| | | 5221 | ccgatataac gtttgagttc gtcgccgccc tgcttttcaa gttcgtccag acgctgctgc |
| | | 5281 | tgaagctgac agcatcgttc gcacagttcg ttgatgcttt tgcattgggc cagattattc |
| | | 5341 | cagactgccg cgtccagttt tctttcggtt tggaaacttg ccagtttgcg atagaaatca |
| | | 5401 | tcaaaagcca gcgtctggag caattcccgc agttcattat actccttcac agagggacgt |
| | | 5461 | ctcctgaagt ccggcatgct gtcggaaata aatctcagga tatgacgaat cttttgtcct |
| | | 5521 | ttgtccagaa tccattgtcc cgtttgcgct tccttctgaa ggttcgcctg tatctccttc |
| | | 5581 | agcgtctttc ggatatagtt gagccgattc tgcaccgcct gctcagaaac ctccgaagcc |
| | | 5641 | ggcgacctca aaaaggcagg aaagtttcgg ggcatgttcg ttaacggccc gcggcttcgc |
| | | 5701 | attctgacat cccaaacata cttgctcagt ttctggacgg cattccctcc tttcccgctc |
| | | 5761 | aggattgcaa gaacaaggta catcaattca tgctcggaga tacgaaccgt aacgggggtt |
| | | 5821 | ttggctttaa gatgaatgcg gatgagggca tggttattcc gaatataaag aagcccttcc |
| | | 5881 | aaatcctgtt cttccgctga aaggttgttt aaagcagaag ggaaaaaaac ttctctgacc |
| | | 5941 | tttttgccgc tctgctttct gcggtcttcc tcgttttgaa tgtttctgta ccgtccaaac |
| | | 6001 | tcgacgctga gtttttcatt cctggcccat gcttcgataa accgtacagc gaaaagaata |
| | | 6061 | aacttgtttt ttttgcgcat tctccggccg gctggagcgg tctgcttctc cgtctgggca |
| | | 6121 | gggttttctt cgtcctgctc ttccacaggc cggccgaaaa attctttctc ttctgacttg |
| | | 6181 | ctcagttttc catgggcttg aagccactgg acagaatcga aaggaacaca cgacaaatag |
| | | 6241 | gagaggattt cccgaaaggg ccgtgtctca tcggcttgca gataataact gtctctgagg |
| | | 6301 | gtatagaaac ttagaagaga acgggtaaaa taataatccc gcttttgccc ggtatccaaa |
| | | 6361 | tcgccgcgat cgctccgctt gaagccctgg accgctccga acattcgttc cagcgtgctt |
| | | 6421 | cggggcacaa aaaaggacgc cagaaaaata acccctgccg ccgtaatccg gacctgatcg |
| | | 6481 | ccgcagagtt caaaaatggg agggataatc ccctgatatc cgctttcctt aactcttttc |
| | | 6541 | tgagtttctc ctgcggcata cgaaaacgtt ttttccagaa agtcctttac tgcgtcatcg |
| | | 6601 | tctcctttct tgaactccag tggtttatct tcgtgataat agtgagaaaa ataatcacga |
| | | 6661 | atgccgttca gtttttccgc cagagaccga tgaactttct cgatatcctc ctgggtaaag |
| | | 6721 | ccgcccctgg ttcgcatggc ctccttaaga agattctcac accctttttt cgaaccattg |
| | | 6781 | tcccaggcaa tattcagggg aacagtgaaa cagcttttgt gagtcccttt gtaataatcc |
| | | 6841 | tggtctaaag agtagttaac aggcatggta tccctccttc tttgccggct ggttttgggc |
| | | 6901 | tgttttctgc atactcgaca cggattcttt tacatctttc ttgattccct cgcaagcgga |
| | | 6961 | ttttatgccg ccgattttcg gccttccgat tttttttgaa atcgggaggg ggtgggcggc |
| | | 7021 | gtcttactgt ttgttcaaac gtatagaagc agagaaaggg actatattca tattatagaa |
| | | 7081 | gaggggatat attatgaata tttcactgga aaccgattcc gactcgtcgc cgctggggtt |
| | | 7141 | gcttgtccgt tatcggcagc ttttgctttt ttatgccctg gccctgtttt ttgacacggt |
| | | 7201 | cagcaccatc cactttatga atcggggcgg catccacctc gaaattcacc cgctggttcg |
| | | 7261 | ctggggcgcc cttatctacg ggcctatcgc ggggccgttt ctgtttgcct ttcttttcaa |
| | | 7321 | gtttttgtcg gggctgctgg tgctgtttta cgtccgccgg cttgctcctt gcattttgcg |
| | | 7381 | gcttgcggcg gcggtttcaa cgatagccgg catcctgaac ttctggggcg agtcgcttct |
| | | 7441 | gatgcactaa aaaatcgccc gccgctcctg tttttcagcc gcacaagacc gataatatcg |
| | | 7501 | cctttccccc gattaagccc gagccggcgg ccaaatccag ccggtttttg ccgcggccgg |
| | | 7561 | ccgacggcgg gcttctcctg cggccggcaa aggggtataa tagctcatag ggaaaaactc |
| | | 7621 | ttgaaaggtc ccgtccaaat gaacccatgg atgcaagccg ttcttgtctt atcggcggcg |
| | | 7681 | tcg |

| | Relevant | AGACAAAAAGGGCTGGGGAGGGGGTTTGGGGGAAATTGCTGAGAATCTAATTGGGGCACAGATTCTTG | |
|---|---|---|---|
| | sequence | AACCAGAGGGGAAGGGGTGAGGGGTTGCGGGGGCAATTGGTAAGAATCCAATGGAGAGGCGAGGTTTT | |
| | SEQ ID | GAGCTGGTTGGGAATGACTGCGGAAAGGGGTTGGGGGAGACGGCTGATAATTCAATGGAGAGGCGGAT | |
| | NO: 5256 | TGGGGGGCCAGGTGGAAATGGCTGAGAGGGGGCAATGGAGAGGAAGTGGAGGGGGAAGATCTGAAAT | |
| | | AATGGGGCAAATAGAGGGGGATTGGGGCGGATGAGGGGTGTCGGGTTGTGCTCCTTCTGCTGCCCATTT | |
| | | TGATTTCTTTAACTCCTTGCGGCTCCTTGGGGCCGAATGTCTGCTCCTTCGTCAGTACAGGGGGTATTATA | |
| | | CCATATATGATTTTGAAATCAAGGAAATGTTTGGTAATTATCAAACTTTTTTTGCGTGCAGGCGGAGCCG | |
| | | CATTTTAAGAGTGAAAAGTGAAGAGGGAAAAGGGGAATAGTCGAGGAAGCGGGGCTGGTTTGGGGTTT | |
| | | TGGCAAAAAATAAGCAGAAAATGGGAGAATGGCTTGCCGGAGGGGGTTGGCGCGGGGTATAATGAGGG | |
| | | GCGGTATGGCTGCTTTGAAAAATATTGAAAAATCGGAAGGAAATAAAAATAAGGAGTTTGCTAAGGAG | |
| | | TCTGCCAACCTTTGGACGTGCACCGAGTTTCTGGGGCTGAGGAGGGAATGGCTCTCGAAACTGAAATTT | |
| | | TTAGAGGTGCCCTTAAGGGATTTTTGCTAATTCCTTATAAAAAGTGGAGAACAACTCAGATATTGTCGAT | |
| | | AGAAAAACAAGGGAATCCCCAAAAATTCTAAGGAAAATCTGTCAAGCTGTAGAAAAATAAGGTTACTT | |
| | | TGGATATATTCAGCCCTAACCTTTGGGCTTGCTTTTTATAGAAAAACATACTAAAATAAAACAAAAATA | |
| | | AAGGATTACCTGTTTTGGCAAAACAAAAAAACCCCAAAAAAGCAGGAGTACAGAAGGCTGAACCAATA | |
| | | GTCTTATCTATTAATATATGTGATATAATCATTAGGGATGAAAAAACCAAGAAGGTCTCCCTCATAGGTT | |
| | | TGTTTAGTAACATAAATGCATATGCTTTTCCTGTTCAGCATCCTTTGATGCATGTATATATCGCATTAACA | |
| | | AATGGCCATGGAAAATATAAAATAAATATCCAATTTGTTAGAGTTGCGGACAACAATATCATTGTTGAA | |
| | | ATGGAAGGCGAAATAGACTTTCCTGATCCGTTAGGTGTTGTAGAAATGAATCTTGAGTGGCGAGGAATA | |
| | | CAATTCGAGAAACCAGGAACATACTCAGTTGAAGTTCTATGTGAAGGTTCACCAATTGGTTCTCGCAAA | |
| | | TTTAATGTAAGGCAATTACAGAAACAAATACCGCCTACCAAAGGAACTGAAGGAACATAATATGTTAAA | |
| | | TGACTCTAACAACTTTGTTTGTTTTCCCTCGCAGGAACGATATTATGATTTCTCTGCCTGTCAATTCGTAC | |
| | | CGTCTCACTATATATGCTTGCGCTGGGATAGGGCCGAAGCAGAGGCCACAGAGGAGGAAATTGCAGATT | |
| | | ATGCAGCTAAGAGTCCGGCTTTCGCTTTTCTTTCTGATCCCGAAGAGGATATCTATAATTGTAATGACGG | |
| | | CAAGCCGTTATGAGTTTAAAAAGAGGGGATATAGTACTGCTTTCTTTCCCATGGACGGATTTTACAAGTT | |
| | | ATAAATTTCGTCCGGCACTTGTCATTTCGGAAGACGATTTTAACAAGAAAAACAATGATGCAGTCTTTAT | |
| | | GTTCATAACTTCGAAAAGATACTCTTCTGATTACGATTTTTACCTTGATTCAGAAGATCCCAGTTTTAAC | |
| | | AAGACCGGCCTGAAGAAATCCTCTACTTTCAGAATCTCTAAAATTATTACATTAGAACAGAAGTTGGCG | |
| | | AAAAGACACCTGGGCAATCTCGATAAAAAAGTTTTGAAAAAACTGGAAGCAGGTTTGAAGTTACTTCTA | |
| | | AATATATAAACTTTCGTATTTTTATTAACTGTATAACTAAGCTTCTTTCGCAAACATTTTTACAGAACTTG | |
| | | CTGAAAGTGTCAAGGGGGCGTTTTTCACGGTTTGGCAGATGGGGGTGGGGCTGCCGTCGTTTTTGATTTT | |
| | | CCGCTAACTCCAAACATTTCCAACAAGGCACACTGTTATTGCGGCGGCCGGGGCGGGGGCTGTTTTGAT | |
| | | GCGGTTTTGCCGGACGTGCTAAGGACGGTGTTAGGACGGTGCTAAGAAGGAAAAAAGAAGGAAAAGAG | |
| | | AGAGCGGGAATAAAAAAGCGGGGGCCAATAAGAACAGAAACAAAAAGGTCCTGTTCCGGGGTCGGTG | |
| | | GCCCCCGCATAGTATGCCTGCGGCTTTTCGTGTTCAGCGATTTTACCATTTCGAATATCCCCCATTCAAAT | |
| | | GATTCTTTTTATTTTTGAGTTGAGCCGAATTGATATTGATAGAGCATCCGTCTGGGAAAAACGTTCCTTTT | |
| | | TTTCAACCGGCGGGGGCCGCTGCCTTTCAGCGGCTGTCTTCACTTGAAATATTCGAAAAATCTTCATTGT | |
| | | TCTTACCCCCCATAGCAGGTTTCATCGTTAACTATGATAACGGGATTATACAAAAAACCTGCTTTGATTT | |
| | | CAAGGGTTTCTTAAGAAAATATTAAGATTTTTTAAGATTGTGCCAAAATGCCTTAATATTTTATTAAAAC | |
| | | AAGCACGTTATCGGACGATGGCGGCTGAACAAAATGAATTTTTTCGAGGGCGGCCGGTTTTTTTGATTGC | |
| | | AAAAAAACGGCTTTTTCCTTTTTACATAATA | |
| | Relevant | GCTGGGTTGGGATTGGGGTGGTTTTACTTCGCCCGCACCTACCGCCGAGCCGTGTGGGGGGCGGTGGCG | |
| | sequence | GCTGTCGGCTGGCTTGCGGTTGTCTTGACTGCTCATTTTGCCCATCTTTTCAGCACATTCGGCGGTCTGGA | |
| | SEQ ID | CTGGATTGCCGCCTCCCGAAACAAGTTTCTTTTTATCGGTTTTGCCCTCTGTTTCGGGCTGGTCGGCCCGC | |
| | NO: 5257 | TGCCTCACCTGAACCGCCGATGGAAGCAGGCCTTTACGCTTGCGGTACTGGCGATTTTTGCGGTCTTGTT | |
| | | CATAGGAATCCCCTTCGTTGGGCCTGCCGTGTTTGGGCATCAAATAAGCCGTCTGCCGACGCATCTGGAC | |
| | | CAAAACGGCATCTGCCGGCAATCCACTTCCTTTACCTGCGGGCCGGCGGCGGCCGTAAGCGTCCTGCAC | |
| | | CGGCTGGGGCTGGAGGCCTCCGAGGGGGAGATTGCCCGCGCCTCCGGTACTGCACCGGCTCTGGGTACG | |
| | | GGAATCTGGGACCTCTACCAGGGTCTGCGGCGGCTCTATCCGCCTGAGCAGCTTCAATGCTGTTATCTGC | |
| | | GTGCAGGGTCCCTCGCGCATTTGCCCGAGGGGGAGTTTATCCTTGCCGTCATCCGCGAAACATTCTGGCT | |
| | | GGATCATTGCGTGGCCATCCTCGAAATCAGGCCGACATCGGTTATTTTTGCTGACCCGGTCAACGGCCTG | |
| | | TCCATCCTGCCCCGAAGTGCCTTTGAGGCGTGCTGGCGAAAGTCGGCTATCGTCCTTCGCCGGCCCGATT | |
| | | TGCACACGGCCGGCCTTTGAAATTTTGCCTTTTTCCCTGCCGGCCGGCTCTTTGCAAGGGGCTGCTTGTTT | |
| | | GGTATAATCTCCGCTGACCATTTATGTTATGGGAGATTTGATTATGAAATTGCCGAAGATTGAAAATGCC | |
| | | CCCCGCTATGCCGGCCTGTATATCGTGGATTTTGGAGACCACTGCGGGGTCGGCTTCCTGGCCGAAGAG | |
| | | GTCGCCGAACTGCTCGAGAGCGAACGCTTCCAGCACATCACCGTTTACAAAATATACAATGCCTACCCT | |
| | | GATGGGACCCTCGAAATCATAGGAGTCCGTAAGGAAATCTTTCAGCAGGAAAGCGGGATGTTCTTTTAT | |
| | | GCCTTTGACGAGGAGACGGCTCGGGCGGATTTTGCCCGGCTTGCGGAATGTTCCCGTCGCCTGGAGCCG | |
| | | CCCTCACGTGCGAAAATCCAACTGGCGGAACTCGCCCCGCGGCAGTATGCAACCGCCCTGATTTATCCG | |
| | | GCCGAATATGATGCCGAATTCAGCCGCTGGCTGCTCGATTGCCGCTACCGAACTGAAGGCCCGGCCGCC | |
| | | GGCGGGGTCAGTGCGGTCGAACAGTATTACCGCCAAAAACCGGCCATTCTCGAAAGCACCCAGATTTTT | |
| | | AACAGTACCTCTGCAGCTTTCCACGGCGAAAATCTGCTGGAGGCGGCCAAAAAGGCGATGGTCCGATGA | |
| | | CCCGGACGAACCCCGCCAAAAAACGCCTTCTTGGGGCGATTGCCGGCCTTTTTATCGGAGCCAAAAAGC | |
| | | CCGCTGCGGACTCAGAATCCGACAAAATGGACCATTTCAAAAGCAGCACCCAGCGGATAGGGGTTCGA | |
| | | TTTTCTGAGAAAATCCGCTCCGTTTTCCGGAAAAGGTGGATTAAAATTCACTGAGGTTTTTCTCATTTTTC | |
| | | TCTTGACAACGTCCCATAAAATTCCTAATTTCTGGCATCTAAACGCCTTATTTGGCGGTTTTTTGCGGAA | |
| | | AACCGCCGATAGAGGACCGGGGAGTTTCGTTCGAGCAATTTTTTATTAAAGATTTCAGATATGCCTTGCC | |
| | | GAAACAGCAAGAGCAAGAGTTTTCTCCCCTCCGGAAAACATCAGGAAATTAGGGTTTCCTGATGTTTTC | |
| | | TTTTTTGCGCACCGGACCGGATTACGATTTGGGCAGAGTGTACTTGGAAATATCGCCGCCCTTTTCCTTG | |
| | | ATAGAGTCCAGATAGACATGGAGCCGCTCCGTCAGTTGGCTGATGGTGCCGGTCAGTTTTGTAATGTCAT | |
| | | CCTGAAGGGCCTTGGCCTTTTCGCCCATCTTCTCGGCCAGCGGAATCGCGGAAAATTGATCCATCAGTTT | |
| | | CTGGAGTTCGGACTGTTTGGCCGCGATTTCATCGACATACTTCTGGGCCGTCTTTTCCAGAGATGCGAGA | |
| | | TCCATTTTTGCCGCGGCCTCTTTCAGGGACTCGATGGAGGCAGACAGGTCGATGCCGGCTGTCGAACCG | |
| | | GCCCGGCCGCCGGATTCCTTTTTGCTGCAGCCGCCGGCGGCCATCAGCAGAATGGCTAACCCGGTAAGA | |
| | | ATCCAATTCTTCATACAACAACTCCTTTCTTTGAAATGTTGGTTCACCCGCCGTCGAAGGTTCGCAGCGG | |
| | | CGCCGTTTTGTTCAGCGTATCCAACCTCTTGTTTTTTCGCAAGATATTATTTCCCGCCCCGGCTTGCTTCA | |
| | | GAACAAGCAGAGTCCTCCAGGATCCTTGAGCCATTCCAACTTACACAGTTTATTTCACTTCCTCAGTTTC | |
| | | CAGGTTCCATCCTCTGCATAATTGGAACTATAGGGTAAGCCAAATGCATTCCATACTGAATCAAATATCG | |
| | | GCCTCATAAAAGACGGGACTTCTTCATTGTAACTGCCCACTTCTACTTCAGGAAAAATAACAACATCTTT | |
| | | TTCTATTGGAACATCAAATTGCATATGGGATTTTGTGTCTAAATAAGCACCTTTGCATCCGAGCAACGCC | |
| | | GCTGAAATTATAAAAGGAGCTTCTATGCCTAATTTTTTATATCCTTCAAAATACCTTTCGATAGACGTCA | |
| | | CTATGTCTCGTTCAAAATCTTGACTTGGCAGGAAATTTCTCAATCTCCCTGGATAAAGGATATCAGAACG | |
| | | GACCGCTTCTACAGCGCCATTAAAAAACACAAGACAATAGCTGCTCCTCCCCTCATGATCCCTGCCATA | |
| | | GGTTAAGAAGCCATCAAGATTATATCGATAACCGGAACAACTACCATTTAATGGTCTAAAAGAATCCAA | |
| | | AAATTTGTTATAAAATCTTAGGTCCAGTCGTTGACGGTTGAGAAATGGATACAGCGGTATAACATGCAG | |
| | | AATCAAGCGATCTTTTGACAGCGGTAGCGGTGTTTCATCAGCCATAATCGCGGCTAACCGATCCTGCAA | |
| | | AAAATTGCGGATTCGCTCTGCCTGCGACTCCGTAGCCAAAAAAGCACTTCTTATTTCATGAACATCCAGC | |
| | | GGAGATTTGCCTCCCGAATTTCGAGCATAGAAACGGGAGTGCCCTCCCAAAGTTACCATATGGGGTGAT | |
| | | GCAAAACTTTTGGGAATACGAACAAGAAGAACAAAACCTTTTCCGTCATCGCCAAAGCCATCGATTGTC | |
| | | TTGATTTGAACCCGAACGCGGGGTTCAATGCCGTTACGGATCAGATCTTCAAGACGCCGCTTTGCCTCAT | |
| | | CTGCGGTTATGTCTTGAAGAGGAACTACTGAATCAGGTTCGCCTGTTTTTTGGCTATTTTCTTCGAGTGTT | |
| | | CCTTCAGGTGTTTCTTCGACTGTTTCTTTAACCGCTTCTTTAATACCGTATATAATATCGCCGCCCGAGGC | |
| | | GTTCGCAAATGAAGAGATATCTGCCAGAAATTTCTTCTCATCAGAGTCTCGACGGCCGGGAAGTTTTAAT | |
| | | TTGTATTCAAGGGTCTTGCTTTCGGCGATTTTGTTTTCTATCAGCCAATCAATGTCTTCTTTTGTTATTTCA | |
| | | TCAAAATTTTTCTGTATCATGGTACCTCCTTTTGCTGTTTTTCCGGTATCCTTTTTCCTTCGTTCGTCTCCT | |
| | | GTGGGCCGGAGGGTTTATAATGGCTCCGGCTGGTTTAGTTTATCTTCTGTTTGGCTTTTTTGCAAGATGCG | |
| | | GGGGTTCCAGTGCTGATTTTGGCGAGGAATTGTCCTTTTTTCAGTTTTCAAACACCGAACCTGGACTGCC | |
| | | GGCGGAAAAAGCCCGACGAAAGGAGATTAGACGGGTCGGGAAATCGACGGCAAGGGGCAAGGCATCA | |
| | | GGATTTTTCTTCAGCGGTCCCCAGGGAAATGGGAGAATAAAGAGGTGTTGTGTCCTGAACCGGCCGGCG | |
| | | GCAAACTCTTTTTCCAATAAATTTTTAAAAAAATCAAAATTTCTCTTGCAAATCGAAGGGAATGCCGATA | |
| | | TATTACCTTGTGGATTGATGCTCTTTTTCTATACCCTATTCAATGGGTCAGGACGCAGGTTGATAACCTTG | |
| | | GTTCTATTTAATTTAGGATTGTGCGTCTGGCCCAAGGCAGATATGTCTCTCATATCTGCCTTTTTTTTGCG | |
| | | CCCTGCGTGTTTGCCCCCGTTCAGACTGTCTGTCTTCCGTATTCCGTCAGATAAACCGCCATCAGAATAT | |
| | | GCCGCAGCCGCTCATCGGTCTGGCCTTCCAGGTAGTCTTCGGTAAAGTCCAGTTTTAACCGCCCCTGAAA | |
| | | ATGGAGCAGGCGCTCCTTTAATTCGCAGCGGCTCATCGAGGCAATCTGAACGCTTATGGCTTCATAATTA | |
| | | TTCTCAAAACTCATGGCTTCCTCCAGTACAATTTCGCAAGCAGGTACGCCTGTTGTATCGTTCCTTTCGG | |
| | | GCCGGCGGTTTATGTGCCGCCGGACAAATTCGCCGCTTCAGCCCGCGGGGGCGCAGGGCCGGCCGCTAT | |
| | | AGACGCTACAGCCCTTTTAAAGGAAAATATCATTGTCTCCGCCCGTCGGCGGTGATAAGGTTTCTGCCCT | |
| | | ATGAGAACAGACCAACTGGAGTATGACCTGCCGGAAGAATTGATTGCTCAGCATCCGGCCCAACGGCGT | |
| | | CCGCAGTCGCGGCTGCTGGTGCTTCACCGCGCCGACGGCCGGCTCGAAGACCGCCATTTTTGCGACCTG | |
| | | CCTGAGTATCTCCAGCCGGGCGATTGTCTGGTTCTCAACGATACCAAAGTCCTGCCGGCCCGCTTTTTCT | |
| | | GCCGAAAACAAACCGGTGCCAGGATAGAGGGGCTTTTTCTTGAAGAAACACCGGACGGCAGCTGGAAG | |
| | | GTCCTGCTGAAAAACGCACGCAAACTTAAACCCGGCAGCCGACTGACATTTCTCGATCGGCAGGGACGG | |
| | | CAATGGGAAACGCTGCAAATTCAGGAAAAACTCGAAGAGGGGCAATGGCTCCTCCGGCCCGACACGCA | |
| | | GAAACCGCCGCAGGCCATCCTCGAACACATCGGCTCAGCTCCCCTGCCCCCTTATATCCGGCGTCCGGC | |
| | | CTTTCGGCAGGAGCCGCAGGAGGATTTGGCCCGCTATCAAACCGTTTATGCTTGCCGGCCGGGCGCCGT | |
| | | GGCCGCCCCGACGGCCGGGCTGCACTTTGACAGACCCCTTCTTCAGCAGTTGGAGCAGAAGGGCATCCG | |
| | | CATCGCCTGCCTGACCCTGCATGTAGGAATCGGCACCTTTCGGCCTGTGCAGACCGAAACGCTCGAGGA | |
| | | ACACACCATGCACAGCGAACGATACGAAATCAGCCCGCAGGCGGCTCAACAGATCAATGCCGCCGCTG | |
| | | AAGAAGGCCGACGAATTATCGCCGTGGGCACAACCTGCGTGCGCACCCTTGAGACCGTCGCAGAAAAT | |
| | | CGAAGAGTCCGGCCGGCCGCCGGCCAAACTGCCCTCTTCATCCAGCCGGGCTATTCATTCAAAATCGTG | |
| | | GACGCCCTCATTACAAATTTTCACCTGCCCCGCTCCACGCTGCTGGCTTTGACGGCCGCCTTCGCCGGAT | |
| | | TGGAAACCATCCTCAGCGCCTACCGCCGCGCCGTCCAATTGCGATACCGCTTCTACTCCTACGGCGACGC | |
| | | CATGCTCATCCTTTAAACCCCTGCAAGGCAACCCCCTCTAAAGTTAATCAAAAAGGGACTGTTTACCCTT | |
| | | GGATGCCGCACTTTTATTAGTGGTCCCATCAATCACTTTTAGTAATGACCAGTACCCACGGCCTGATTTT | |
| | | TCAGTTAAAATAGCAAGGGCATCTCTCTTTTTATTCCCTTCTCTCCGAAGCGATTCGTATTCACGGCGCA | |
| | | AAAAATCTCTTTCATGAGCGGTGATTGGTCTGCCTTGATTATAATATGTGTTTGGCGGCGGTGTGCGCAC | |
| | | TTCGGACAGCAATGAACCTGGAATTATTTTCTCCATTTGCTTGATTTGATAATCGAAAGCAACTTTACTC | |
| | | TTCTCAAAACCTGCGGCCTTTCTATTCAAACCTATGGCAACTTTAGCCGTGGAAAAACTGCCCAAAAAA | |
| | | AAGTCGCAAACCAACTCCCCCGGATTGCTTGAATACTGGATCATCTTGATGAGAAGCTGGGTGGGAAGC | |
| | | TCGTTTTTGTTTTTTACTTTTCCCGGCTTGTATTCTCGATTAATAATCCAAACATCCTCACGGTCCTTATAG | |
| | | TTGAGCGCTCCCTCTTCATCCCTTTCGCTGTCCG | |
| Cas13 | Locus | 1 | ccccccatcg aacgctgtga ttaccctgca aatcgagggc tgctccagca taagtgctgg |
| b-t5 | sequence | 61 | tatccgtaca cgggacggtg ctgtgattac cctgcaaatc gagggctgct ccagccgcca |
| | SEQ ID | 121 | agattaacgg acaggatgtc tactggctgt gattaccctg caaatcgagg gctgctccag |
| | NO: 5258 | 181 | ccgctctatc gcaaggtatt atctcaattc catttatggc aatatttaac agtaaatttc |
| | | 241 | tgtatagagc aatcactttt gctttttatc tcgccgtttt tttgtgtcgt cttttcgttc |
| | | 301 | gacaatcgga aagtatttct gaaaaatcgc ctgctgatct tctgttgact taaattcctc |
| | | 361 | atgaaaaaaa tcatttctgc cgcgattcag agcctccttg tctttgcctg tatcttttat |
| | | 421 | tttaccttgt tttaccgcct cgtcaagaat attgcaaaat ggaaagtatc tctcatgact |
| | | 481 | ccatttatcc tcttgtattt ttaaaccttc ctcaaacgca aatatcgcac gcacagcctc |
| | | 541 | ggcctgccgc tttctgtatt ttgcaatgcc gtctttattg aatttatccc aggttatctt |
| | | 601 | cttttcggca cccgaattga gttttttgtt tccgagcaca aaacactggc aaatattttc |
| | | 661 | tatcatcgca ggtttttcaa tgatatccag tcgcaaaaaa tccgccggcg taaattgtat |
| | | 721 | gacaaccccg cagcctgtct tataccacag cgaatatcgc tcataaccca tatttccctg |
| | | 781 | cccaatacaa ttccattcca atttattcct gaattcagtc gcggagatta atttctcata |
| | | 841 | atgccacatc gccatcttca tacagagaac atcttgtata taggtgttgc acatctgtcg |
| | | 901 | gataatcctg ctgtgtttat tgtcatagtt cttcggattc ctgtcgataa gataccaccg |
| | | 961 | gtcatcgtgt atgggcttga tgtccttgag tttttctttc acaatgctat acagactttt |
| | | 1021 | tcgctctttc gcttgtgtat tgtaaccttt ttcttcgtca aagcaccgct tttgacaaca |
| | | 1081 | atcgccataa aacattttcc gcaaaaagtt tttcccgata gaaaactgcg actccagaaa |
| | | 1141 | tcgcttggcc ttttcctgca gtgtgttcca ctctccgtac ttcggatgtt tttcctgcgc |
| | | 1201 | ttcaagccca atataacgcc tcagctcgga gccattcttt gcctccagcc cagccagtct |
| | | 1261 | ttcaagtgtc agttcgcaga cttttttaca aagcccgctg atgtcattga cacccttgat |
| | | 1321 | ctgatcgtat aatgaaaccg caatccggcc gtcattgacg taattttgaa gttccttata |
| | | 1381 | aaatccatca aagtcgagcc tctgaagcgc atcgcgtaaa atatgatatt gtttcacatt |
| | | 1441 | cggccgcctt tgaatatcgc gaatgctgtc ggagataaac ttcagtatca ttgatatttt |
| | | 1501 | tttgcctttg tatatcagcc acttattatt ccgcggctct tcctgaccga ttttctctat |
| | | 1561 | cgtctcctga agttgtttgc gaatatagct taaccggctc tgcactgcct ccggcgtaac |
| | | 1621 | cgtcctgtcg gcacgcttgg taaacgacgg catccatcgc tcatcctccg gcctgtgttt |
| | | 1681 | ccattcgccc tcgatttttt ggctcatact gtaaatataa caattcagct tttggacggc |
| | | 1741 | gtcattgccc ttctcctcaa aaatcagcag caccagatat tttaattcat tttcagaaat |
| | | 1801 | acgggcagca acggcttttt tattattcag tttaatctgg ataattgcgt gttcattctg |
| | | 1861 | aatgtaatac atccattcgt tattgaaatc cggattgagt ccttggtttc tgtattttaa |
| | | 1921 | ttgcaccgct ctggcctgtt tgccatcctg attcttattc tccgcttttt ccactgtttt |
| | | 1981 | ttggtagcgt gcaaatgtca catctaatcc ctgttcagcc gcccacccct caataaattg |
| | | 2041 | gatagcaaat aaaatgaatt tttcatctct gcggagacta cgcctctttt ctttgctttt |
| | | 2101 | tttattttta tcactggacg aagagtccga aatatccccg ccctcatctt cggcgggttg |
| | | 2161 | attcaaaaaa gcttcttttt cttctggtgt aagcagctgt tgttcattca gccaatctac |
| | | 2221 | tgccaattgc ggtactctcg acaaatagct taatatctcg cggaaacatc gtgtcttgtc |
| | | 2281 | ttccgccccc acagaatagc tgtcccggag cgcataataa gccagcagcc ggcgagtgaa |
| | | 2341 | accataatct cgtttctgcc catcgctcaa ttgctctttt ccggtatgtt taaatccttt |
| | | 2401 | caccgctccc agcatccgat agacattact ccgatggcag aaaaatgatg ccagaaaaat |
| | | 2461 | aacccccgcc gccgtaatca tatatgtacc gttatgcaat tcaaataatg gcggcacaac |
| | | 2521 | gcctttatag tcgctttctt ttgtcgctcc gacagtcttt gattccgcgt tcttgtatat |
| | | 2581 | ttcttccaga aaaaccttga cggcatcttg gtctccaaac cgcagacagt cttctgcgtg |
| | | 2641 | gtaataatgc gagaaataat tgcgaatgtc tttaagtcgc ttctgaattc catccactac |
| | | 2701 | ttgtgatttt atttgctcat cagaaatccc tcccttgctg cgcagcacct cactcagaag |
| | | 2761 | agtcctacat cctttatgat cacagttatc atatgcaata ttcaaagcaa ctgcaaaaca |
| | | 2821 | agacttgttg atgcctcgat aacagtcact tgtaagcgaa taatcaatac ccataatggc |
| | | 2881 | tccttaaata gtttaaaagc tgatagaata acttatattc tctcatatat tgtttttatg |
| | | 2941 | tgtttgaaca tcgtatacat attctgccct taaattactt cagcccgtga tggtgataca |
| | | 3001 | caactcgatt cgatgctgcc gtccggcaca aatgtactgt ttcagtacaa ccgatttaaa |
| | | 3061 | aatgcccccg aattatataa aatctccctc tgctatacaa acaatatttc ccacatatca |
| | | 3121 | actccacttc ccccccacaa attccaaatg ctcaacttaa aattcccacc tcttcaaatc |
| | | 3181 | gacaatctgc cccccgcctc cttgaattct tgtgttcttg agttcttgtg ttcttttatc |
| | | 3241 | ttttaatttt ctaaattatt taaaaattat aagcaacttt tcctccccat ccgacatata |
| | | 3301 | tatagggcct gctcaggaag gacaggcaga aaaaaataag ggctaaaaag gagctgcaaa |
| | | 3361 | agggctaaaa ggaggctgca atgaacagaa aaaaatcaaa ccaaaacctg catacgtata |
| | | 3421 | tacctatata cttacatacc attatcctgt taattcccta aatcccgtcc aaaaggaatt |
| | | 3481 | ttatcgaaac atatccattc catacagcat ctgaatggca tagtattgac tgaacacaaa |
| | | 3541 | agcgataaaa atggagacag aactgatgaa atggtttaca gtgggtttgg tttgccttgc |
| | | 3601 | gggaacgatt gcccaggcgg aaaagcagct tgtggattat gttaatccgt ttct |

| | | | |
|---|---|---|---|
| Cas13 | SEQ ID | 1 | aaccgcaaag ctgctcgcag ccatcgacgc cgcacaataa gacgattaca tacgataggc |
| b-t6 | NO: 5259 | 61 | ataaaattga aaaacatacg caaatgtcac tggaattcct tgtagcgttg tagtactagt |
| | | 12 | tttcctcgcc ggttttctgg tattccgcct tggccttttg gtaggcatcc ttaagctctt |
| | | 181 | ctatagccgt attgaatgca ttattggttt tttgcagatt ctcatctcca gcttccttga |
| | | 241 | gttcggcgag cttctgttgc gtagcgttca gtttgctgtc aagattagag cttagttttt |
| | | 301 | gccagttttc ttttcctgct tccttcatat ctgccatcaa ctgctgagtg tcatttttta |
| | | 361 | attgatcata agtagtatta gcttttttca aaatggcctc cttttgttcg tttagatacg |
| | | 421 | ttccggtagc ctcggccgcc tcggagattt cctctttaac ctgattagca tcggccgagc |
| | | 481 | tcgatgttcc ggaatcctgc tttttgcatc ccaaaggcaa aataacgaaa ctcaatatca |
| | | 541 | gtaacaaaat cttcatagtt ttcatgatct actcctttaa aaataatatt cttttctttt |
| | | 601 | acaccttatc atttttataa aaactcacga aaaatgccaa taaggaattt actgatttgg |
| | | 661 | tatcagttat atactgattt taaccgccaa gtaaatcaga cgctggcagt aattagccgg |
| | | 721 | ggccgaagtg ctttttcttt ttgatactgc tacggtcaat ccctaatttt aattaatgaa |
| | | 781 | aattgccaca gagcgcaacg agtattcaga gaaatcgaaa caggtagggt gggcctcggc |
| | | 841 | ccaccgatca aagcttatcg aaaatgtacc ccctgtggag caggcatacg cctttaattt |
| | | 901 | accctgagaa tcttcgttaa agcttaaaga aagggctgaa cctcaaaatc cctccccaaa |
| | | 961 | atccctccca tactttcaaa atttctaatg ttccacggtc ttcaagattt tttgtcttcc |
| | | 1021 | tcaaggccat tggaaaactc cgtcttcgta tctttgaata gatgtttgat accattccat |
| | | 1081 | atttcttcgg taccttcttt aagctcttcc cagccaatgt tatctgattc ctgaatctgt |
| | | 1141 | tttatttttt ctttagctga cttgcacttc ttgcgcaaca gttcaattcg tttttcaaaa |
| | | 1201 | tcctctttta tatctgcttt tgctcgtaga gcatctgttt tcaaaacttt aatttcagac |
| | | 1261 | tcccactcgt ccaactgttg ttgcaatttc tttatataat cttcacgaga ggtcataatg |
| | | 1321 | taggctcctt tcttaagctt tgagctttgc aatcattacg tattgataag gcaaacatta |
| | | 1381 | tcatggggag ggcgaggaga gggggacagt cacctattaa tgtctgtctg tccacgactc |
| | | 1441 | taagctcctc ttttcactct attgttcctg tgactcggac ttgtcctcct tttctttttc |
| | | 1501 | gagctcttct tcgaccttgg cgtcgaattc gtccatatcc ttctccgatc gagccttggt |
| | | 1561 | ctgctcctgt gcctcagttt tgcgctgggc ttccgtatct tcgtttgctt ggagttccgt |
| | | 1621 | ttggggctcc ggcacgggta catccttctt ttccggtatg atgagctctt gcttacattt |
| | | 1681 | ggggcacacc gtttttctgc cggcggaatc ttcaggggct ttgaccccct ttttacagtg |
| | | 1741 | cgggcattcg aaatgaatag ccattttatc tctccttatc tgcctgtgtt tgattgacca |
| | | 1801 | acacttccca tataaatttc actaaaaact tctgcatact tcaaatgtat aatgcttatt |
| | | 1861 | ataatgcggt aattttattc gaagttcaac aataatgccg cggaattaaa tatttttctt |
| | | 1921 | tcttgtctta gtccaagtca cgcagttatg aggttggata gagctttttg atagcgccag |
| | | 1981 | gggcgattta tgcaaaaagt cttcaataca tttgagggag tatagggagt attagggtca |
| | | 2041 | gcccttaatt ttatggacag tcaccctttt tggaattgca aacagccatt aataggttga |
| | | 2101 | ctgtccctag ttttttatat tgtgtttttg taaaaaactt gactatgaag accaaaagaa |
| | | 2161 | acgaaaatgt agaaattaga acaagtgaga aaggactaga aaatgaagaa agctaaaatc |
| | | 2221 | gttctgatct tagttatttt gttgttggct ttggttgtgt ctcttcaaaa tacagaggct |
| | | 2281 | gtcgaaacca aatttctgct aatgacgatc acaatgcctc gggtaattct gcttttattg |
| | | 2341 | acctttacgc tcggatttgt cggaggtatt attacagcca gtttcattct caagaaatca |
| | | 2401 | ggtaagcctc aagagaaaat caaagcagcg cgagagtgaa agtgtatgtc gaattgaaca |
| | | 2461 | gaatgtccaa taactataac taaggacatg gattaaagct gattgttatt atggactgtc |
| | | 2521 | acaatttttg gaactgaaaa cagccattaa taggtgaatg tccctagttt tccaatagca |
| | | 2581 | gcaaacggga aggtagtcaa tcattattta tattttaagg gctggcccct atgactttcc |
| | | 2641 | cagagaaaga atatgtagga tggcgcagct ttgctgccca tgctgatttt tgacacggat |
| | | 2701 | taacgctgtt taacacggtt taggatttgc cgcagagcac atcaaggaca ctgagaaata |
| | | 2761 | ttaaattaca atagtaagtt tatggcttag ccatagaaaa tagaaaattt atgccacttg |
| | | 2821 | tgccacaggt ataggtatcg taaatgtcaa atcggtgtct gaaaccttta attttcccga |
| | | 2881 | aggaagtcaa tcattattta tattttaagg gctggccccc tatgcctcca cagctttcta |
| | | 2941 | cttctcccga taaggttgag caccgctgtt acttccccac aaattgaggc ccatcacagc |
| | | 3001 | ctgtcaatat cgacgtcgat tgcaaaaaga gctgttactt ccccacaaat tgaggcccat |
| | | 3061 | cacagctcac tcttggtaaa ccatactcaa tagactgctg ttacttcccc acaaattgag |
| | | 3121 | gcccatcaca gcggagtaac atggcagaga caggatataa ttgctgttac ttccccacaa |
| | | 3181 | attgaggccc atcacagcaa taataatatc attaaacgat aaattcgcgc tgttacttcc |
| | | 3241 | ccacaaattg aggcccatca cagcataatc cctggagagg agaaagagtt cactgctgtt |
| | | 3301 | acttccccac aaattgaggc ccatcacagc gactatgtgc tgtacgaggc agatagcttc |
| | | 3361 | gctgttactt ccccacaaat tgaggcccat cacagcatca ccttataagt aacaatacac |
| | | 3421 | caataagctg ttacttcccc acaaattgag gcccatcaca gcaatcagcg gcttgagcgg |
| | | 3481 | cgcatcggta cggctgttac ttccccacaa attgaggccc atcacagcca ttgtatttta |
| | | 3541 | acctttttat tgacagatag ttatctttaa gtttgttttt caaaaagtac atatatatgc |
| | | 3601 | ttctcattcc gtcattatta tcattttttg atttcattta tcaatagctt tgctttttca |
| | | 3661 | aaagaagtcc catcaggaat ctcgccgtgc aaggctttat tccttgcatg tttgagttta |
| | | 3721 | gagagttttt ctgtgtcccg tcctttttta ataagctcat catgtatttg tgtaaaactt |
| | | 3781 | atatgagtct cctcgtcatt aaatttgctt ttttcgataa tcctattttc gaaaatatat |
| | | 3841 | tcctcaaaac agagaacttg tttgataaat tccatacgtt gcttttctat gatatccact |
| | | 3901 | ttatccaaaa tagctttttt ggattcgtaa gccgcaaatg cataactatc gatattgtca |
| | | 3961 | acatattttc ggttcattgc atacacaagc ttggggtaat aggaaagcgg gatatcttct |
| | | 4021 | tttaccttat cggatatttt atatgtcatc cttgtttgtt taagctcgcc taattttgtt |
| | | 4081 | ttctccttta attcaaatcc aagccgctcc aaaagataga taaccataaa tgcgataagt |
| | | 4141 | ttgttctttt cacaaaggcc gtttatcagt gtcatcttat cgaaattctt tttatcaaaa |
| | | 4201 | aattgccttg aaagttcttc atattttccc gatagctcaa ttttacaata atcctctctt |
| | | 4261 | attcttttcg atattttctc agacgaattt tgctggatat gattcttcac aaaacctttg |
| | | 4321 | ggcaaagcta tcctgttcat aaccgtctgc ctgcttttat tcgtgtcaat gcttattcta |
| | | 4381 | agattaagat tctcgatgcc gtgcattttc tttagttcag cggtaatcct ttgtttcatg |
| | | 4441 | attgtaagtt tctgattgtc tgatatctgc ttctttatct gcccggaata ttcaacccag |
| | | 4501 | tccttttcct gccatttcac acctaactcc tgtgacagaa gccttaaatt ctccaggtca |
| | | 4561 | ttaacgtaat taatctgctg atatttttca aggtcatttt ctttaaggct tcgtacttga |
| | | 4621 | tttctcatat cttcaagttt ctttttgttc tctttccgtg ctaattgata ggcttcttct |
| | | 4681 | agatttcttt tattccacaa ttccgtcggc aaaaacctcg tccatttttt actgtcaaac |
| | | 4741 | tcgcgcttaa tgttatgctt ttccttattc cagaaacgaa ccatctttaa gtatcgtcta |
| | | 4801 | taatcctttt gcctcaactt ctcatcagac ggaaggcaca tattgataaa ttccatcact |
| | | 4861 | tcaatcattt tgtcataagc tttatccgtc actttagatg taggatccat cctcttatca |
| | | 4921 | agccggttta gaatcttttc ttttagggtc cctgttcctg cccggccaaa gtaatttgca |
| | | 4981 | gggaaatatt ctcttttaag caattcatct tcgtcaactt gctgcttgct gctgacattc |
| | | 5041 | tgaaattttt tgagaaattg tataatttta ccttccaagg aatcaacgtt ttgcttctca |
| | | 5101 | attaaaattg tgtaacaaag ctccttcaat tgatcttcac taatcactcc cttatgtcca |
| | | 5161 | tttaacgtaa aataactatt gccttgaaaa ggctctatcc atgtaaaggt atccttttcg |
| | | 5221 | tgtttgagtt ctcctctttt ctcttttagc ctgttgctct gatatgtata aaattgcatt |
| | | 5281 | ttattgaaga tgccgctctc gtttaaaaaa gtcgaagcta tacgatggaa aaacaaaccc |
| | | 5341 | ttaccgagct cgtctgactg ctgctgcttc tcaatatgat catcctgctc agatagatga |
| | | 5401 | ttgaccagag cgaatagaag gaaatgcttc tgcatatcag gcacaacctt atatccctcc |
| | | 5461 | ctcacactat aataagtgaa tagatttctt ctcggttgtc cttctttatc attcctttta |
| | | 5521 | aaaccactaa cggaacttat aagcttgttt gcctgtgatt tttttaagaa catacacagc |
| | | 5581 | aaaaacagca cgccagaatc cgtgagacag ttgttgtttt ctatgattac aagtttaaca |
| | | 5641 | tttttacttc cggttgcttc tatagcaatt tgataatatt tttccagtat aggtttttca |
| | | 5701 | ccgttactta gtatcttgac ggtatcatta tgaacgtaat gtgagtaaaa attacgtagc |
| | | 5761 | tctactaatt tcaacaatat agcctcaatt tcagttcttg cgtttttagc cacatcttta |
| | | 5821 | aagttgtaga tataattctc cacacttttt aataataagc ggttattgaa aatcttatca |
| | | 5881 | atcactttct ttgcattttc cttgttgctg attatgtgcg gaatttgttt ttcaataatt |
| | | 5941 | tcatcaagcc ctgaaagatt gaggatcgtc tgattaaaat aaaacgcagc ttcttctttt |
| | | 6001 | tttaatttaa tgatgttcat aattaaatac ctccataaca acaaagattt tgtcaggcga |
| | | 6061 | aaaaaccaat tttaaaaacg ctcttacaaa tacgaatatc ccttatgatt tctcagagca |
| | | 6121 | ggctcttaag tggagttgaa tgcgcaaacc cctagtaaga ctgattaggc gcggtaagac |
| | | 6181 | aaaataaggc gattcgagga agtttttcgt tcagtgattc ttttcacctc aacaaatata |
| | | 6241 | atacacgaaa gaaagtaaaa aggcaaaagt aaaaaagaaa aaactttttt tacaggataa |
| | | 6301 | tgtcggggat gctttactta tagataaaac taagtgatag tcacctataa aatttaagta |
| | | 6361 | acacggtctt attaaaatac tcattctcga aagcttgtat tcgacgaaat aaataataaa |
| | | 6421 | acagaataca gaacacagga gacagaacct ttctattaac gattttcgat tgactattga |
| | | 6481 | ctattttttt tgttaatccg cgtttatctg cgttcatctg cggtttccca tcttctatcc |
| | | 6541 | tatccgtggc cgttttatgg cctattcact atatacagcg tatctcacgg ggtaaatgtt |
| | | 6601 | acctataaaa ttggaaagtt tcgattttta agcaaaatag tgaaaaaaca cgaagaacag |
| | | 6661 | gcctgaaaca agtaaaaagt taaaaggaaa aagggaaaat ttagtcgatt cttgattctg |
| | | 6721 | gaagcggtat ttagcaggga cagtccagtt cttttatcag cttaaatttg agcataatcg |
| | | 6781 | ggcgttaacc aaacggttta gactgacatt ctcttcagca gcctcaattg tgagttcacg |
| | | 6841 | atgcacctca ggaggaacac gaactacgaa tttaccactg tactgctgga agcttagtgg |
| | | 6901 | ttttggtatc ggttctccgt ttttcttcat atctttgata acatcatcca cgacacgaat |
| | | 6961 | aattcccccc acggctcttt cgggagtaga agccaagtaa cttagacttg ggaattctgc |
| | | 7021 | acacagaccg acaaattcgg catcatcttc ggaccaaatt accctgtatg tataataatg |
| | | 7081 | cctaatcttt ggttttattt tcttcataat taaatagtac taatattgat actataagtc |
| | | 7141 | aatgaaaaag ttctaaaaat tttaaaatag ttcaataatc gcgaaaaaca ggcctgaaac |
| | | 7201 | aagtaaaaag ttaaaaggaa aaaggcaaaa aagcgagata aaggcagaat tcaggagaca |
| | | 7261 | ggagacagaa tacaggggaa aaattaaagg gaaaaatgcc ttgtaattga ttatttatta |
| | | 7321 | ttgtatattg actatttctc tgtactttcg gcgccctctg tggccctttt aattttctat |
| | | 7381 | tttctattta ctattgatta tttttgcgca aaaaaaacgc tccatggaat ccacggagcg |
| | | 7441 | tttttatatc aagaacagtt aagccgacag cgaaaatgcc tgacatacac cggctttaga |
| | | 7501 | ttcatcgctt tcgctcagaa tgacatatgg ccgggttcta gtatatccct agaaaggagg |
| | | 7561 | tgatccagcc gcaggttccc ctacggctac cttgttacga cttagtgcca gtcatcgggc |
| | | 7621 | ttaccgt |

[1210] Amino acid sequences of Cas13b-t1, Cas13b-t2, Cas13b-t3, Cas13b-t4, Cas13b-t5, and Cas13b-t6 proteins tested in this example are shown in Table 14 below.

TABLE 14

| Protein | |
|---|---|
| names | Sequences |
| Cas13b-t1 | MEFENIKKTSNKEVYSIEQYEGEKKWCFAIVLNRAQTNLEENPKLFEQTLTRFEKIMKQDWFNEETKKLIYEKEEENK |
| SEQ ID | VKEEIQIAASERLKNLRNYFSHYLHAPDCLIFNRNDTIRIIMEKAYEKSRFEAKKKQQEDISIEFPELFEEEDKITSAGVVF |
| NO: 5260 | FVSFFIERRFLNRLMGYVQGFRKTEGEYNITRQVFSKYCLKDSYSVQAQDHDAVMFRDILGYLSRVPTEIYQHIKLTRK |
| | RSQDQLSERKTDKFILFALKYLEDYGLKDLADYTACFARSKIKRENEDTKETDGNKHKFHREKPVVEIHFDKEKQDQF |
| | YIKRNNVILKAQKKGGQSNVFRMGVYELKYLVLLSLLGKAEEAIQRIDRYISSLKKQLPYLDKISNEEIQKSINFLPRFV |
| | RSRLGLLQVDDEKRLKTRLEYVKAKWTDKKEGSRKLELHRKGRDILRYINERCDRPLSRKEYNNILKFIVNKDFAGFY |
| | NELEELKRTRRLDKNIIQKLSGHTTLNALHERVCDLVLQELGSLQSENLKEYIGLIPKEEKEVTFREKVDRILEQPVVYK |
| | GFLRYEFFKEDKKSFARLVEEAIKTKWSDFDIPLGEEYYNIPSLDRFDRTNKKLYETLAMDRLCLMMARQYYLRLNEK |
| | LAEKAQHIYWKKEDGREVIIFKFQNPKEQKKSFSIRFSILDYTKMYVMDDPEFLSRLWEYFIPKEAKEIDYHKHYARAF |
| | DKYTNLQKEGIDAILKLEGRIIERRKIKPAKNYIEFQEIMNRSGYNNDQQVALKRVRNALLHYNLNFEREHLKRFYGVV |
| | KREGIEKKWSLIV |
| Cas13b-t2 | MQVENIKKGSSQGMYSIEQYEGAKKWCFAIVLNRAQTNLQGNPKLFEETLTRFERIRKEDWFDQETKKLIYAKQEQNE |
| SEQ ID | VEEEIQKAADEKLRDLRNYFSHYFHTPDCLIFTQNDPVRIIMEKAYEKARFEQAKKEQEDISIEFGELFEENGRITSAGV |
| NO: 5261 | VFFASFFAERRFLNRLMGYVQGFTRTEGEYKITRDVFSTYCLRDSYSVKTPDHDAVMFRDILGYLSRVPSESYQRIKES |
| | QMRSETQLSERKTDKFILFALNYLEDYGLEDLADYTACFARTRIKREQDENTDGKEQKPHRKKPRVEIHFERAEGDPF |
| | YIKHNNVILRTQKKGAQTYIFRMGVYELKYLVLLSLLGKGAEAVKRIDRYVHSLRNQLPHIEKKSTEEIEGYVRFLPRF |
| | VRSHLGLLGVDDEKKIKARVDYVKAKWLEKKEKSRELQLHRKGRDILRYINERCERPLNIDEYNRILELLVTKHLDGF |
| | YRELEELKKTRRIDKNIVCNLSRHKSVNALHEKVCDLVVQELESLGREELKEYVGLIPKEEKEVSFEEKTDRVVKQPVI |
| | YKGFLRNEFFRESRKSFARLVEEAVREKGEVYDVPLGGEYYEIVSLDTFDKDNKRLYETLAMDRLLLMIARQYHLSLN |
| | KELAKRAQQIEWKKEDGEEVIIFTLKNPAQPEQSCSVRFSLRDYTKLYVMDDAEFLARLCDYFLPKDEEQIDYHRLYT |
| | QGMNRYTNLQREGIEAILELEKKTIGPEQPRPPKNYIPFSEIMDKSAYNEDDQKALRRVRNALLHHNLNFARADFKRFC |
| | GIMKREGIEKRWSLAV |
| Cas13b-t3 | MAQVSKQTSKKRELSIDEYQGARKWCFTIAFNKALVNRDKNDGLFVESLLRHEKYSKHDWYDEDTRALIKCSTQAA |
| SEQ ID | NAKAEALRNYFSHYRHSPGCLTFTAEDELRTIMERAYERAIFECRRRETEVIIEFPSLFEGDRITTAGVVFFVSFFVERRV |
| NO: 5262 | LDRLYGAVSGLKKNEGQYKLTRKALSMYCLKDSRFTKAWDKRVLLFRDILAQLGRIPAEAYEYYHGEQGDKKRAND |
| | NEGTNPKRHKDKFIEFALHYLEAQHSEICFGRRHIVREEAGAGDEHKKHRTKGKVVVDFSKKDEDQSYYISKNNVIVR |
| | IDKNAGPRSYRMGLNELKYLVLLSLQGKGDDAIAKLYRYRQHVENILDVVKVTDKDNHVFLPRFVLEQHGIGRKAFK |
| | QRIDGRVKHVRGVWEKKKAATNEMTLHEKARDILQYVNENCTRSFNPGEYNRLLVCLVGKDVENFQAGLKRLQLAE |
| | RIDGRVYSIFAQTSTINEMHQVVCDQILNRLCRIGDQKLYDYVGLGKKDEIDYKQKVAWFKEHISIRRGFLRKKFWYD |
| | SKKGFAKLVEEHLESGGGQRDVGLDKKYYHIDAIGRFEGANPALYETLARDRLCLMMAQYFLGSVRKELGNKIVWS |
| | NDSIELPVEGSVGNEKSIVFSVSDYGKLYVLDDAEFLGRICEYFMPHEKGKIRYHTVYEKGFRAYNDLQKKCVEAVLA |
| | FEEKVVKAKKMSEKEGAHYIDFREILAQTMCKEAEKTAVNKVRRAFFHHHLKFVIDEFGLFSDVMKKYGIEKEWKFP |
| | VK |
| Cas13b-t4 | MPVNYSLDQDYYKGTHKSCFTVPLNIAWDNGSKKGCENLLKEAMRTRGGFTQEDIEKVHRSLAEKLNGIRDYFSHYY |
| SEQ ID | HEDKPLEFKKGDDDAVKDFLEKTFSYAAGETQKRVKESGYQGIIPPIFELCGDQVRITAAGVIFLASFFVPRSTLERMFG |
| NO: 5263 | AVQGFKRSDRGDLDTGQKRDYYFTRSLLSFYTLRDSYYLQADETRPFREILSYLSCVPFDSVQWLQAHGKLSKSEEKE |
| | FFGRPVEEQDEENPAQTEKQTAPAGRRMRKKNKFILFAVRFIEAWARNEKLSVEFGRYRNIQNEEDRRKQSGKKVREV |
| | FFPSALNNLSAEEQDLEGLLYIRNNHALIRIHLKAKTPVTVRISEHELMYLVLAILSGKGGNAVQKLSKYVWDVRMRS |
| | RGPLTNMPRNFPAFLRSPASEVSEQAVQNRLNYIRKTLKEIQANLQKEAQTGQWILDKGQKIRHILRFISDSMPDFRRRP |
| | SVKEYNELRELLQTLAFDDFYRKLASFQTERKLDAAVWNNLAQCKSINELCERCCQLQQQRLDELEKQGGDELKRYI |
| | GLLPKEKGKHYEEQNTPARKFERFIENQLSVPKYFLRCKLFVTGGSRRTNLLKLVQEHLKPKTSVFHEERLYLREEQPG |
| | DYPWSDRKIIQKMYYLYVQDLLCMQMAQWHYEHLTPQVKGKIDWEINSESKESDGYNRFKVEYKGPQGCRIIFRVQ |
| | DFGRLDFLNKAPMLDNICQWFLSGRKEITWPEFLRDGLQRYRQRQILVVRALFRFEENLKIPEEEWKGKSHLSFDEVLE |
| | RFSGKNRLSEEEKESIRRVRNDFFHEEFEATPSQWRDFERRMSEYLNKEKREKPKKKKR |
| Cas13b-t5 | MGIDYSLTSDCYRGINKSCFAVALNIAYDNCDHKGCRTLLSEVLRSKGGISDEQIKSQVVDGIQKRLKDIRNYFSHYYH |
| SEQ ID | AEDCLRFGDQDAVKVFLEEIYKNAESKTVGATKESDYKGVVPPLFELHNGTYMITAAGVIFLASFFCHRSNVYRMLGA |
| NO: 5264 | VKGFKHTGKEQLSDGQKRDYGFTRRLLAYYALRDSYSVGAEDKTRCFREILSYLSRVPQLAVDWLNEQQLLTPEEKE |
| | AFLNQPAEDEGGDISDSSSSDKNKKSKEKRRSLRRDEKFILFAIQFIEGWAAEQGLDVTFARYQKTVEKAENKNQDGK |
| | QARAVQLKYRNQGLNPDFNNEWMYYIQNEHAIIQIKLNNKKAVAARISENELKYLVLLIFEEKGNDAVQKLNCYIYS |
| | MSQKIEGEWKHRPEDERWMPSFTKRADRTVTPEAVQSRLSYIRKQLQETIEKIGQEEPRNNKWLIYKGKKISMILKFIS |
| | DSIRDIQRRPNVKQYHILRDALQRLDFDGFYKELQNYVNDGRIAVSLYDQIKGVNDISGLCKKVCELTLERLAGLEAK |
| | NGSELRRYIGLEAQEKHPKYGEWNTLQEKAKRFLESQFSIGKNFLRKMFYGDCCQKRCFDEEKGYNTQAKERKSLYSI |
| | VKEKLKDIKPIHDDRWYLIDRNPKNYDNKHSRIIRQMCNTYIQDVLCMKMAMWHYEKLISATEFRNKLEWNCIGQGN |
| | MGYERYSLWYKTGCGVVIQFTPADFLRLDIIEKPAMIENICQCFVLGNKKLNSGAEKKITWDKFNKDGIAKYRKRQAE |
| | AVRAIFAFEEGLKIQEDKWSHERYFPFCNILDEAVKQGKIKDTGKDKEALNRGRNDFFHEEFKSTEDQQAIFQKYFPIV |
| | ERKDDTKKRRDKKQK |
| Cas13b-t6 | MNIIKLKKEEAAFYFNQTILNLSGLDEIIEKQIPHIISNKENAKKVIDKIFNNRLLLKSVENYIYNFKDVAKNARTEIEAIL |
| SEQ ID | LKLVELRNFYSHYVHNDTVKILSNGEKPILEKYYQIAIEATGSKNVKLVIIENNNCLTDSGVLFLLCMFLKKSQANKLIS |
| NO: 5265 | SVSGFKRNDKEGQPRRNLFTYYSVREGYKVVPDMQKHFLLFALVNHLSEQDDHIEKQQQSDELGKGLFFHRIASTFLN |
| | ESGIFNKMQFYTYQSNRLKEKRGELKHEKDTFTWIEPFQGNSYFTLNGHKGVISEDQLKELCYTILIEKQNVDSLEGKII |
| | QFLKKFQNVSSKQQVDEDELLKREYFPANYFGRAGTGTLKEKILNRLDKRMDPTSKVTDKAYDKMIEVMEFINMCLP |
| | SDEKLRQKDYRRYLKMVRFWNKEKHNIKREFDSKKWTRFLPTELWNKRNLEEAYQLARKENKKKLEDMRNQVRSL |
| | KENDLEKYQQINYVNDLENLRLLSQELGVKWQEKDWVEYSGQIKKQISDNQKLTIMKQRITAELKKMHGIENLNLRIS |
| | IDTNKSRQTVMNRIALPKGFVKNHIQQNSSEKISKRIREDYCKIELSGKYEELSRQFFDKKNFDKMTLINGLCEKNKLIA |
| | FMVIYLLERLGFELKEKTKLGELKQTRMTYKISDKVKEDIPLSYYPKLVYAMNRKYVDNIDSYAFAAYESKKAILDKV |
| | DIIEKQRMEFIKQVLCFEEYIFENRIIEKSKFNDEETHISFTQIHDELIKKGRDTEKLSKLKHARNKALHGEIPDGTSFEKA |
| | KLLINEIKK |

### Example 3—Identification and Characterization of Exemplary Small Cas13 Proteins

[1211] CRISPR-Cas13 systems can be used for precise RNA editing, an attractive therapeutic strategy when temporary changes are desirable or DNA editing is not possible. In this example, Applicants identified and characterized an ultra-small family of Cas13b, Cas13b-t, and showed it mediates mammalian transcript knockdown. By functionalizing Cas13b-t with adenosine and cytosine deaminase domains, Applicants engineered compact variants of REPAIR and RESCUE RNA editors, which may be more amenable for in vivo use.

[1212] RNA-targeting CRISPR-Cas13 systems can be harnessed for a variety of applications (1), including precision base editing (2, 3). RNA base editing is a therapeutic strategy that allows for installation of temporary, non-heritable edits. Cas-13-based RNA editing systems with smaller sizes are needed because they are better compatible with the packaging capacity of delivery systems, such as adeno-associated virus, a widely used viral vector for gene delivery (4, 5).

[1213] To overcome this limitation, Applicants performed a computational search of prokaryotic and viral genomes and metagenomes for small Cas13 orthologs, identifying 4726 candidates. Phylogenetic analysis revealed two novel groups of ultra-small Cas13 proteins that form distinct branches within the Cas13b and c subtypes. (FIG. 22A). Unlike other Type VI-B CRISPR-Cas loci (6), the genomic loci encoding Cas13b-t lack any accessory genes. In this example, Applicants focused on the new tiny Cas13b (Cas13b-t) subfamily (FIG. 22B).

[1214] To experimentally characterize Cas13b-t, Applicants first identified the CRISPR RNA (crRNA) components. Applicants transformed E. coli with a plasmid containing the Cas13b-t2 locus (FIGS. 22B-229C) with the CRISPR array truncated to two direct repeats (DRs) and performed small RNA sequencing. Applicants found that the crRNA of Cas13b-t2 has a 3′ DR (FIG. 22D). To determine if Cas13b-t is capable of mediating nucleic acid interference, Applicants performed a negative selection screen using a library of crRNAs that consist of a spacer followed by the DR and target essential gene transcripts in E. coli6 (FIG. 24A). Three of the five tested members of the Cas13b-t subfamily, Cas13b-t1, 3, and 5, mediate depletion of targeting spacers in E. coli (FIG. 22F). Mapping of depleted spacers to the E. coli transcriptome and analysis of the flanking sequences revealed that all three active orthologs have a permissive 5′ D (A/G/T) protospacer flanking sequence (PFS) preference (FIGS. 22F and 24B). Additionally, assessment of the normalized position of depleted spacers along the target transcript indicates no positional preference within the coding region and enhanced depletion when targeting the 5′ UTR (FIG. 22F).

[1215] To evaluate Cas13b-t-mediated knockdown and the importance of the PFS for RNA targeting in human cells, Applicants tested the three active Cas13b-t's using a set of 20 guideRNAs (gRNAs) with spacer sequences targeting regions with different adjacent 5′ bases in a Gaussia luciferase reporter. Applicants found that all three proteins promoted knockdown in HEK293FT cells with varying efficiencies, from 50% to 75% for the most efficient gRNA tested (FIG. 22G). Mutation of the HEPN domains in Cas13b-t1 and 3 (dCas13b-t1 and 3) abolished the knockdown activity (FIG. 25). Further, Applicants found that the PFS preference detected in E. coli was not manifested in HEK293FT cells, indicating that the PFS has little effect in mammalian cells, similar to previously studied Cas13′s2 (FIG. 22G). Applicants next targeted endogenous transcripts in mammalian cells with Cas13b-t1 and 3, the smallest and most active members of the tested Cas13b-t's. Both proteins mediated knockdown of five target transcripts for all gRNAs tested (12-68% and 27-64% knockdown compared to a non-targeting gRNA for Cas13b-t1 and 3, respectively) (FIG. 22H).

[1216] To test the capacity of Cas13b-t's for RNA editing, Applicants fused dCas13b-t1 and 3 with a hyperactive mutant of the human adenosine deaminase acting on RNA 2 (ADAR2dd(E488Q)) to create Cas13b-t1-REPAIR and Cas13b-t3 REPAIR. Applicants evaluated the ability of these fusion proteins to direct A-to-I RNA editing in HEK293FT cells by attempting to revert tryptophan (W) 85 to STOP (X) mutation in a Cypridina luciferase reporter. Site-specific RNA editing was achieved by introducing a cytidine mismatch in the gRNA spacer sequence across from the target adenosine (2, 7) (FIG. 23A). Spacer sequences were designed to vary the distance between this mismatch and the DR, as variability in the optional mismatch position has been observed for different Cas13b-ADAR fusion proteins and target sites (2, 3). Applicants found that both Cas13b-t1-REPAIR and Cas13b-t3-REPAIR showed optimal editing with a mismatch distance of 18-22 base pairs (bp) in a 30-bp spacer sequence. Editing efficiency was comparable to the previously described REPAIRv1 and v2 systems2 and approximately 50% and 13% of that of the more efficient RanCas13b-REPAIR3 for Cas13b-t1-REPAIR and Cas13b-t3-REPAIR, respectively (FIG. 23B).

[1217] Applicants additionally fused both dCas13b-t1 and dCas13b-t3 with a previously described evolved ADAR2dd capable of cytidine to uridine deamination3 (Cas13b-t1-RESCUE and Cas13b-t3-RESCUE) and directed both editors to reporter and endogenous transcripts in HEK293FT cells (FIGS. 26A-26H). Applicants found that these fusion proteins were capable of mediating both A-to-I or C-to-U editing of all targets tested at levels comparable to or better than RanCas13b-REPAIR/RESCUE (FIGS. 23C-23F and FIGS. 27A-27L).

[1218] To demonstrate the ability of Cas13b-t-REPAIR to edit functionally relevant targets, Applicants targeted previously characterized phosphorylation sites. In particular, Applicants attempted to alter activation of the Wnt/beta-catenin pathway by editing the threonine (T) 41 codon of CTNNB1, a site known to promote degradation of beta-catenin when phosphorylated (8). Applicants found that Cas13b-t1-REPAIR was able to mediate 40% editing at this site, converting the codon to alanine (A) and leading to a 51-fold increase in beta catenin activity, which may be relevant for promoting regeneration after acute liver failure (9, 10) (FIG. 20E). Cas13b-t1-REPAIR was also able to efficiently edit sites corresponding to phosphorylated residues in the STAT1, STAT3 and LATS1 transcripts (FIG. 23C).

[1219] Finally, Applicants evaluated the transcriptome-wide specificity of Cas13b-t1-REPAIR and found the number of off-target edits caused by this system was comparable to REPAIRv1 (FIGS. 30A-30B), which may be due to promiscuous activity of the ADAR deaminase domain (2, 3). To additionally accelerate the translation of REPAIR to therapeutic use, Applicants sought to improve the specificity of Cas13b-t1-REPAIR (FIG. 23G). Through a parallel effort to directly evolve ADAR mutants that are both highly specific and efficient in the context of fusion with dRanCas13b, Applicants identified two promising mutations in ADAR2dd (E620G and Q696L) (FIGS. 28A-28F, 29A-29J). Applicants incorporated these two mutations in Cas13b-t1-REPAIR and found that the number of off-target edits decreased while maintaining comparable on-target activity as the original Cas13b-t1-REPAIR (FIGS. 23H-23I).

[1220] The small size and high efficacy of Cas13b-t-REPAIR and RESCUE constructs made them compatible with viral delivery, resolving a major challenge to deployment of this novel therapeutic strategy.

[1221] Methods

[1222] Data Curation and Search Pipeline

[1223] Assembled prokaryotic and phage genomic DNA contigs from metagenomes and genomes were downloaded from NCBI, WGS, and JGI, totaling 3.16 trillion bp. All open reading frames larger than 80 aa were annotated resulting in 10 billion putative proteins for further analysis. Previously developed Cas13 profiles (11) were used to identify Cas13 family proteins with HMMER3.212 using a minimum bitscore threshold of 25. A group of small (˜800aa) but divergent Cas13b's were identified and used to seed a second HMMER search with the same settings to retrieve additional members of this subfamily. In total, 4726 Cas13 proteins were identified.

[1224] Phylogenetic Analysis

[1225] For phylogenetic analysis and classification, the 4726 candidate genes were clustered using MMseqs2 with a minimum sequence identity of 50% and minimum coverage of 70% (13, 14). Proteins within each cluster were clustered at 90% identity and 80% minimum coverage for redundancy reduction. Each redundancy reduced cluster was aligned using MAFFT15 with default parameters. Proteins identified as truncated or partial and/or clusters entirely composed of them were removed from the analysis.

[1226] The aligned redundancy reduced clusters were converted into HHsuite profiles using all columns with less than 50% gaps, and each of these profiles was searched against each other with profile-profile alignment using HHsearch. The resulting pairwise bitscores between clusters, sij, where i,j denote clusters i and j, respectively, were used to construct a classification dendrogram. First, the asymmetric bitscores were symmetrized by setting sᵢⱼ=(sᵢⱼ+sⱼᵢ)/2. Then, pseudo-distances were calculated by setting dᵢⱼ=−(log sᵢⱼ−log min(sᵢᵢ, sⱼⱼ))/2 to generate a distance matrix (16). A UGPMA dendrogram was constructed using these distances. Branches and the subtrees of the dendrogram were contracted without modifying their topology, to highlight known subtypes and subgroups within each subtype. Lengths in amino acids (aa) of the redundancy reduced proteins from each subtree were used to generate protein size distributions.

[1227] Design and Cloning of Bacterial Expression Plasmid Constructs

[1228] All cloning in this study was performed using chemically competent Stb13 E. coli (NEB) unless otherwise noted. All PCR for cloning was performed using 2× Phusion Flash High-Fidelity Master Mix (Thermo Fisher) unless otherwise noted.

[1229] The Cas13b-t2 full locus was synthesized and cloned into the BamHI site of pACYC184 by GenScript.

[1230] To clone bacterial expression plasmids for the PFS screen, Cas13b-t protein coding sequences were human codon optimized using GeneArt GeneOptimizer (Thermo Fisher) and synthesized by GenScript into a pcDNA3.1(+) backbone. Genes were amplified by PCR to add a pLac promoter and cloned into a pBR322 backbone (NEB) digested with EcoRV (Thermo Fisher) by Gibson assembly.

[1231] crRNA expression cassettes for each DR corresponding to each Cas13b-t of interest were synthesized by IDT, amplified by PCR, and cloned into a pACYC184 backbone digested with EcoRV and BamHI (Thermo Fisher) by Gibson assembly. All primers are listed in Table 18 and final constructs in Table 31.

[1232] Design and Cloning of Mammalian Expression Plasmid Constructs

[1233] Mammalian gRNA expression cassettes were amplified from pC0048 (Addgene plasmid #103854) (2) using primers to add the DR for each Cas13b-t ortholog of interest and cloned into pC0048 digested with LguI and KpnI (Thermo Fisher) using Gibson assembly.

[1234] Mammalian protein expression cassettes were cloned by amplifying previously mentioned synthesized Cas13b-t genes by PCR and cloning into pC0053 (Addgene plasmid #103869) (2) digested with HindIII and NotI (Thermo Fisher), either alone or with addition of a piece including ADAR2dd(E488Q) amplified from pC0053 for REPAIR constructs and pC0078 (Addgene plasmid #130661) (3) for RESCUE constructs. Site directed mutagenesis was used to create catalytically inactivated Cas13b-t's. All primers are listed in final constructs in Table 21.

[1235] ADAR2 mutants derived from directed evolution screens were cloned by introduction of mutations via PCR primers listed in Table 21.

[1236] gRNA spacers were cloned into expression backbones by Golden Gate assembly as previously described 17. Spacer sequences are listed in Tables 23, 24, 26 and 27.

[1237] Bacterial RNA Sequencing

[1238] Bacterial RNA sequencing was performed as previously described (18). Briefly, 5 mL overnight cultures of a Stb13 E. coli colony transformed with a plasmid containing the locus of interest was spun down and resuspended in 1 mL of TRI Reagent (Zymo Research). After a 5-minute room temperature incubation, 250 uL of 0.5 mm Zirconia beads were added and the Trizol resuspension was vortexed vigorously for 30s to 1 min. 200 uL chloroform was added, samples were inverted gently, incubated at room temperature for 3 minutes, and then spun down at 12000×g for 5 min at 4 C. Following centrifugation, the aqueous fraction was used as input to the Qiagen miRNeasy kit, as per the manufacturer's instructions.

[1239] Purified RNA was treated with DNase I (NEB), purified again using RNA Clean & Concentrate-25 (Zymo Research), and treated with T4 polynucleotide kinase (PNK) (NEB). PNK-treated RNA was again purified using RNA Clean & Concentrate-25 (Zymo Research), and ribosomal RNA was removed using the Ribominus Transcriptome Isolation Kit (Yeast and Bacteria) (Thermo Fisher Scientific). Samples were subsequently treated with RNA 5′ polyphosphatase (Epicentre) and purified again using an RNA Clean & Concentrate-5 kit (Zymo Research). Purified RNA was used as input to the NEBNext Multiplex Small RNA Library Prep Set for Illumina (NEB). Library preparation was performed as per the manufacturer's instructions, except with a final PCR of 20 cycles. Libraries were quantified by qPCR using the KAPA Library Quantification Kit for Illumina (Roche) on a StepOnePlus Real-Time PCR System (Thermo Fisher Scientific) and sequenced on an Illumina NextSeq. Reads were mapped using BWA and a custom Python script available upon request.

[1240] E. coli Essential Gene PFS Screen

[1241] Libraries were designed as previously described (6). The library of spacers was cloned into each Cas13b-t pJ23119-spacer-DR backbone containing a chloramphenicol resistance gene using Golden Gate Assembly with a 5:1 ratio of spacer library to pre-digested backbone with 210 cycles. Libraries were transformed into Endura Electrocompetent Cells (Lucigen) by electroporation and plated over five 22.7 cm×22.7 cm chloramphenicol LB agar plates. 12 hours after plating, libraries were scraped from plates and DNA was extracted using the Macherey-Nagel Nucleobond Xtra Maxiprep Kit (Macherey-Nagel). 200 ng of library plasmid and 200 ng Cas13b-t gene plasmid containing an ampicillin resistance gene were transformed into 100 uL of Endura Electrocompetent Cells (Lucigen) by electroporation as per the manufacturer's protocol and plated across four 22.7 cm×22.7 cm ampicillin/chloramphenicol LB agar plates per biological replicate, with three biological replicates per condition. 10-12 hours post-transformation, libraries of transformants were scraped from the plates and DNA was extracted using the Macherey-Nagel Nucleobond Xtra Maxiprep Kit (Macherey-Nagel). Libraries were prepared from extracted DNA for next generation sequencing using primers in Table 22 with NEBNext High-Fidelity 2×PCR Master Mix (NEB) and sequenced on an Illumina NextSeq. Spacer abundance relative to an empty vector was analyzed using a custom Python script, available on request. A mixed Gaussian distribution was fit to the distribution of negative control spacers, and the distribution with the higher mean was used as the null distribution. Depleted spacers were selected as those greater than 5 standard deviations away from the selected null distribution mean. Weblogos were generated using https://weblogo.berkeley.edu/logo.cgi using the top 1% of depleted spacers.

[1242] Mammalian Cell Culture and Transfection

[1243] Mammalian cell culture experiments were performed in the HEK293FT line (American Type Culture Collection (ATCC)) grown in Dulbecco's Modified Eagle Medium with high glucose, sodium pyruvate, and GlutaMAX (Thermo Fisher Scientific), additionally supplemented with 1× penicillin—streptomycin (Thermo Fisher Scientific), 10 mM HEPES (Thermo Fisher Scientific), and 10% fetal bovine serum (VWR Seradigm). All cells were maintained at confluency below 80%.

[1244] All transfections were performed with Lipofectamine 2000 (Thermo Fisher Scientific) in 96-well plates. Cells were plated at approximately 20,000 cells/well 16-20 hours prior to transfection to ensure 90% confluency at the time of transfection. For each well on the plate, transfection plasmids were combined with OptiMEM I Reduced Serum Medium (Thermo Fisher Scientific) to a total of 25 μl. Separately, 24.5 μl of OptiMEM was combined with 0.5 μl of Lipofectamine 2000. Plasmid and Lipofectamine solutions were then combined and pipetted onto cells.

[1245] Mammalian RNA Knockdown Assays

[1246] HEK293FT cells were transfected as described with 75 ng of a plasmid encoding expression of either a Cas13b-t ortholog or GFP from a CMV promoter, 150 ng of a plasmid encoding expression of a gRNA from a human U6 promoter and, where relevant, 45 ng of reporter plasmid. After 48 h, RNA was harvested as described previously 17 with 2× the amount of recommended DNase and a 20 minute lysis step. RNA expression was measured by qPCR using commercially available TaqMan probes (Thermo Fisher Scientific) (Table 29) on a LightCycler 480 II (Roche) with GAPDH as an endogenous internal control in 5 uL multiplexed reactions (17). Probes and primer sets were generally selected to amplify across the Cas13 target site so as to minimize detection of cleaved transcripts. Data is the average of 4 biological replicates with fold-change calculated relative to a negative control condition with the corresponding gRNA expression plasmid co-transfected with the GFP expression plasmid rather than a Cas13b-t expression plasmid using the ddCt method (19). Error bars were calculated in GraphPad Prism 7 and represent the standard deviation, n=4.

[1247] For luciferase reporter assays, media was aspirated from cells and Cypridina and Gaussia luciferase activity in the media was measured using Gaussia and Cypridina Luciferase Assay Kits (Targeting Systems) with an injection protocol on a Biotek Synergy Neo 2 (Agilent). Each experimental luciferase measurement was normalized to the appropriate control luciferase measurement (i.e., if Cypridina luciferase was targeted, the Gaussia luciferase measurement was used as the control value and vice versa). For knockdown assays, normalized luciferase values were then again normalized to an average normalized luciferase measurement of 4 biological replicates of a negative control condition consisting of the corresponding gRNA expression plasmid co-transfected with a GFP expression plasmid rather than a Cas13 expression plasmid. Error bars were calculated in GraphPad Prism 7 and represent the standard deviation of the luciferase values normalized to negative control transfection, n=4.

[1248] Mammalian RNA Editing Assays

[1249] HEK293FT cells were transfected as described with 150 ng a plasmid encoding expression of a dCas13b ortholog-ADAR2dd(E488Q) fusion from a CMV promoter, 300 ng of a plasmid encoding expression of a gRNA from a human U6 promoter and, where relevant, 45 ng of a reporter plasmid. After 48 h, RNA was harvested as described previously and reverse transcription was performed as described (17) using gene-specific primers for the relevant target transcript (Table 32). cDNA was used as input for library preparation of next-generation sequencing libraries (Table 33) using NEBNext High-Fidelity 2×PCR Master Mix (NEB), and amplicons were sequenced on an Illumina MiSeq. Editing was quantified by counting the number of reads at which the expected edited position in the amplicon was called as a G (for A-to-I editing) or T (for C-to-U editing) and dividing by the total number of reads in the sample using a custom Python script, available upon request. Unless otherwise noted, all reported data is the average of 4 biological replicates.

[1250] Luciferase reporter assays for RNA editing were performed as described above, with the modification that normalized luciferase values were not normalized to a GFP control condition. For CTNNB1 targeting, Applicants engineered a luciferase reporter by replacing the EF1alpha promoter driving Gaussia luciferase expression in the dual luciferase reporter plasmid with a promoter derived either from an M50 Super 8× TOPFlash (TOP) or M51 Super 8× FOPFlash (FOP) reporter. M50 Super 8× TOPFlash (Addgene plasmid #12456) and M51 Super 8× FOPFlash (TOPFlash mutant) (Addgene plasmid #12457) were gifts from Randall Moon3,20. Luciferase activity was measured for these custom dual luciferase reporters for each protein/gRNA condition and normalized as described for a dual luciferase reporter. Fold activation was calculated by taking the ratio of the average TOP measurement and dividing by average FOP measurement, and error was calculated by a standard error propagation formula.

[1251] Optimal spacers for all target sites tested were determined by tiling spacers across the site of interest, varying the distance of the mismatch from the DR from 14 bp to 28 bp in intervals of 2 bp.

[1252] RNA Editing Specificity

[1253] HEK293FT cells were transfected as described for mammalian RNA editing assays. After 48 h, RNA was harvested using a QIAGEN RNeasy Plus 96 kit as per the manufacturer's protocol. The mRNA fraction was enriched using an NEBNext Poly(A) Magnetic Isolation Module (NEB). Libraries were prepared using an NEBNExt Ultra II Directional RNA library prep kit (NEB) as per the manufacturer's protocol and sequenced on an Illumina NextSeq. Each sample was sequenced with an average read depth of 8 million reads per sample and randomly downsampled to 5 million reads per sample. Data was analyzed using a previously described custom pipeline on the FireCloud computational framework and downstream analysis using a custom Python script2,3. Any significant edits found in eGFP-transfected conditions were considered to be SNPs or artifacts of the transfection and filtered out. An additional layer of filtering for known SNP positions was performed using the Kaviar21 method for identifying SNPs.

### REFERENCES

[1254] 1. Terns, M. P. Mol. Cell 72, 404-412 (2018).
[1255] 2. Cox, D. B. T. et al. Science 358, 1019-1027 (2017).
[1256] 3. Abudayyeh, O. O. et al. Science 365, 382-386 (2019).
[1257] 4. Dong, J. Y., Fan, P. D. & Frizzell, R. A. Hum. Gene Ther. 7, 2101-2112 (1996).
[1258] 5. Wu, Z., Yang, H. & Colosi, P. Mol. Ther. 18, 80-86 (2010).
[1259] 6. Smargon, A. A. et al. Mol. Cell 65, 618-630.e7 (2017).
[1260] 7. Matthews, M. M. et al. Nat. Struct. Mol. Biol. 23, 426-433 (2016).
[1261] 8. MacDonald, B. T., Tamai, K. & He, X. Developmental Cell vol. 17 9-26 (2009).
[1262] 9. Apte, U. et al. Am. J. Pathol. 175, 1056-1065 (2009).
[1263] 10. Bhushan, B. et al. Am. J. Pathol. 184, 3013-3025 (2014).
[1264] 11. Shmakov, S. A., Makarova, K. S., Wolf, Y. I., Severinov, K. V. & Koonin, E. V. Proc. Natl. Acad. Sci. U.S.A 115, E5307-E5316 (2018).
[1265] 12. Eddy, S. R. PLoS Comput. Biol. 7, e1002195 (2011).
[1266] 13. Steinegger, M. & Soding, J. Nat. Biotechnol. 35, 1026-1028 (2017).
[1267] 14. Steinegger, M. & Soding, J. Nat. Commun. 9, 2542 (2018).
[1268] 15. Katoh, K. & Standley, D. M. Mol. Biol. Evol. 30, 772-780 (2013).
[1269] 16. Makarova, K. S. et al. Nature Reviews Microbiology vol. 18 67-83 (2020).
[1270] 17. Joung, J. et al. Nat. Protoc. 12, 828-863 (2017).
[1271] 18. Zetsche, B. et al. Cell 163, 759-771 (2015).
[1272] 19. Schmittgen, T. D. & Livak, K. J. Nature Protocols vol. 3 1101-1108 (2008).
[1273] 20. Veeman, M. T., Slusarski, D. C., Kaykas, A., Louie, S. H. & Moon, R. T. Curr. Biol. 13, 680-685 (2003).
[1274] 21. Glusman, G., Caballero, J., Mauldin, D. E., Hood, L. & Roach, J. C. Bioinformatics 27, 3216-3217 (2011).

[1275] Supplementary Methods

[1276] Design and Cloning of Yeast Expression Plasmid Constructs

[1277] Yeast reporter constructs were cloned into a pYES3/CT backbone (Thermo Fisher). A previously described reporter containing a crRNA expression cassette under a pADH1 terminator (1) was digested with HindIII and MluI (Thermo Fisher). A URA3 gene was amplified by PCR using the selection marker from a pRSII426 backbone (2) with the introduced stop codon added by site-directed mutagenesis (Table 24) and cloned via Gibson assembly This backbone was digested with BcuI (Thermo Fisher) and an ADE2 gene amplified from M3499 ura3::ADE2 Disruptor Converter (Addgene plasmid #51674) (3), with the introduced stop codon added by site-directed mutagenesis (Table 24) and cloned via Gibson assembly. gRNA spacers were cloned into this backbone using Golden Gate assembly (4). Final constructs are listed in Table 31.

[1278] Yeast REPAIR expression plasmids were derived from a previously described pRSII426 backbone (2) with a pGAL promoter driving expression of the REPAIR fusion protein (2). The URA3 selection marker was replaced with a LEU2 selection marker by digesting this backbone with Eco105I and KpnI (Thermo Fisher) and inserting a LEU2 gene amplified from a synthesized gene (IDT) by Gibson assembly. ADAR2 mutants to create sequences that could be used as a basis for error-prone PCR for each subsequent evolution round were inserted by amplifying the analogous sequence from the previous round of evolution and adding the new mutation via the site-directed mutagenesis (Table 24). Final constructs are listed in Table 31.

[1279] Cloning of Mutagenesis Libraries for ADAR Evolution

[1280] ADAR2dd mutant libraries were generated by performing 8 error-prone PCR reactions for 20 cycles using a GeneMorph II Random Mutagenesis Kit (Agilent) with titrated template concentrations. For each round of evolution, Applicants used a yeast codon-optimized ADAR2dd gene containing the selected mutants from all prior rounds. Resulting PCR reactions were pooled, gel purified, subjected to DpnI (Thermo Fisher) treatment and cloned into a yeast RanCas13b-REPAIR expression backbone (Table 35) digested with KflI and Eco72I (Thermo Fisher) by Gibson assembly. Libraries were transformed into Endura Electrocompetent Cells (Lucigen) by electroporation and plated over one 22.7 cm×22.7 cm ampicillin LB agar plate. After 12-16 hours of growth, libraries were scraped from plates and DNA was extracted using the Macherey-Nagel Nucleobond Xtra Maxiprep Kit (Macherey-Nagel). Primers are listed in Table 20.

[1281] Directed Evolution of High-Specificity ADAR Mutants

[1282] Applicants performed two rounds of evolution as follows: To select for highly specific and efficient ADAR variants, Applicants engineered a yeast reporter based on simultaneous restoration of a TGA stop codon in ADE2 and negative selection of restoration of a TAG stop codon in URA3. Applicants transformed Saccharomyces cerevisiae Meyen ex E. C. Hansen (ATCC 204681) with this plasmid, which also included expression of a crRNA targeting ADE2. Yeast were transformed using the lithium acetate/single-stranded carrier DNA/PEG method (5).

[1283] Large scale transformations of mutagenesis libraries were performed as previously described (1, 6). Briefly, Applicants picked a colony from the initial transformation of the reporter plasmid, inoculated 300 mL of 2% glucose minimal media-tryptophan (Trp) for selection and grew overnight in a baffled flask at 30 C. After 12-16 hours of growth, Applicants measured the optical density (OD) of the culture and used this measurement to seed 2.5E9 cells into 500 mL of pre-warmed 2×YPAD media in a non-baffled flask. Once this culture reached an OD of 2 (approximately 4 hours), cells were harvested by centrifugation at 3000×g for 5 min, followed by two washes with water. The resulting cell pellet was then resuspended in 36 mL of transformation mix consisting of 24 mL of PEG 3350 (50% w/v), 3.6 mL of 1.0 M Lithium acetate, 5 mL of denatured single-stranded carrier salmon sperm DNA at 2.0 mg/mL (Thermo Fisher), 2.9 mL of water, and 500 μL of 1 μg/μL plasmid library. The mixture was incubated at 42C for 60 minutes with agitation, then the cells were pelleted once more and resuspended in 750 mL of 2% glucose minimal media −Trp/−leucine (Leu) and grown overnight at 30 C in a baffled flask until OD reached between 6 and 8. 6.25 mL of the culture was then seeded into 250 mL of 2% raffinose −Trp/−Leu selection media and grown until OD reached between 0.5 and 1. The culture was then induced by adding 27 mL of 30% galactose and incubated overnight at 30C for 12-15 hours.

[1284] After overnight growth, cultures were plated across 20 22.7×22.7 cm selection plates of 2% raffinose/3% galactose −Trp/−Leu with 5 mg/L adenine (Ade) and 0.1% 5-fluoroorotic acid (5-FOA). After 2-3 days of selection, we picked white colonies corresponding to an on-target edit and restoration of ADE2 and streaked these onto small selection plates of the same media base to ensure accurate colony picking. Plates were then allowed to grow again for up to 3 days. White streaks after this second selection were again picked.

[1285] To look for enriched single mutations, all picked streaks were pooled and the contained RanCas13b-REPAIR genes were amplified with NEBNext High-Fidelity 2×PCR Master Mix (NEB) for preparation of next generation sequencing libraries. Libraries were sequenced on an Illumina NextSeq. Primers for library amplification are found in Table 30. Relative enrichment of mutations in the selected library was analyzed using a custom Python script, available upon request. Identified enriched single mutants were introduced by site-directed mutagenesis to RanCas13b-REPAIR in mammalian expression vectors for validation (Table 21).

[1286] To test the candidate mutations, RNA editing assays using luciferase reporters in HEK293FT cells were performed as previously described. Specifically, after the first round of selection, RanCas13b-ADAR2dd mutants were targeted to either of 2 Cypridina luciferase reporters, one with a W85X mutation (TAG stop codon) and one with a W113X mutation (TGA stop codon) to evaluate the ability of the evolved ADAR2dd's to effectively edit at sites with both preferred and non-preferred 5′ bases (7, 8) (FIGS. 25A-25B). After the second round of evolution, this initial screening was performed using the same Cypridina luciferase W85X reporter, along with a second Cypridina luciferase W85X (TGA stop codon) reporter and a Gaussia luciferase R93H reporter for which restoration of a CAT codon to CGT reverts a catalytically-inactivating mutation (FIGS. 2A-26C). Luciferase activity of the Cypridina luciferase W85X TAG reporter in the non-targeting crRNA condition was also used as a proxy for measuring specificity, as previously described (9).

[1287] Based on this initial screening pass, top candidates were further validated for broad activity by testing again on the initial screen sites and additionally targeting the K19 and H36 codons in the endogenous CTNNB1 transcript after the first round of selection (FIGS. 28C-28F), and additionally on Gaussia luciferase reporters with G92R, R93K and R93Q catalytic mutations as well as the targeting of the T41 codon in CTNNB1 (FIGS. 29D-29J). Based on activity at all tested sites as measured by either next-generation sequencing and luciferase assays, as well as specificity measured as described, a single top candidate was identified and cloned into the RanCas13b-REPAIR yeast expression construct derived from the previous round of evolution to use as a basis for mutagenesis for the subsequent round.

[1288] After Round 1, Applicants identified the E620G mutation and after Round 2, we identified the Q696L mutation. Applicants additionally identified V505I as a mutation capable of enhancing editing at target sites with a 5′G (FIGS. 29A-29J).

TABLE 15
Accessions of contigs containing Cas13b-t orthologs

| Source | | Ortholog name | Source habitat/ | Sample collection |
|---|---|---|---|---|
| database | Contig accession | (if applicable) | organism | temperature (C) |
| JGI | Ga0246100_107590 | | Groundwater | |
| JG | Ga0265293_10004442 | | Landfill leachate | |
| JGI | Ga0315543_1000530 | | Salt marsh sediment | |
| JGI | Ga0209381_1018281 | Cas13b-t5 | Hot spring sediment | 64.7 |
| JGI | Ga0310137_000061 | | Fracking water | |
| JGI | Ga0208824_1000897 | | Anaerobic digester sludge | |
| JGI | Ga0137489_1004561 | | Basal ice | |
| JGI | Ga0315552_1001799 | | Salt marsh sediment | |
| JGI | Ga0180434_10014215 | Cas13b-t4 | Hypersaline lake sediment | |
| JGI | Ga0315532_1010951 | | Salt marsh sediment | |
| JGI | Ga0307431_1000754 | | Salt marsh sediment | |
| JGI | Ga0315541_1003536 | | Salt marsh sediment | |
| JGI | Ga0315296_10033793 | | Freshwater lake sediment | |
| JGI | Ga0307443_1009138 | | Salt marsh sediment | |
| JGI | Ga0315532_1006943 | | Salt marsh sediment | |
| JGI | Ga0315554_1005387 | | Salt marsh sediment | |
| NCBI WGS | QNBS01000103.1 | Cas13b-t3 | Planctomycetes bacterium | |
| | | | isolate B28 G16 (marine | |
| | | | sediment) | |
| JGI | Ga0315285_10018775 | | Freshwater lake sediment | |
| JGI | Ga0315294_10038294 | | Freshwater lake sediment | |
| JGI | Ga0315533_1000464 | | Salt marsh sediment | |
| JGI | Ga0209427_10000033 | Cas13b-t2 | Marine sediment | |
| JGI | Ga0114919_10002421 | Cas13b-t1 | Atlantic deep subsurface | |

JGI: Joint Genome Institute
NCBI WGS: National Center for Biotechnology Information Whole Genome Shotgun

TABLE 16
Direct repeat sequences of Cas13 orthologs used in this study

| Organism | Abbreviation key | DR sequence |
|---|---|---|
| Riemerella anatipestifer | Ran | GTTGGGACTGCTCTCACTTTGAAGGGTATTCACAAC |
| | | (SEQ ID NO: 5266) |
| Prevotella sp. P5-125 | Psp | GTTGTGGAAGGTCCAGTTTTGAGGGGCTATTACAAC |
| | | (SEQ ID NO: 5267) |
| | b-t1 | GCTGTAATCACCCCACAAATCGGAGGCTTCTTCAGC |
| | | (SEQ ID NO: 5268) |
| | b-t2 | GCTGTAATCACCCCACAAATCGGGGGCTTCTCCAGC |
| | | (SEQ ID NO: 5269) |
| | b-t3 | GCTGTAATCACCCCACAAATCGGGGGCTGCTCCAGC |
| | | (SEQ ID NO: 5270) |
| | b-t4 | GCTGTTACTTCCCCACAAATTGAGGCCCATCACAGC |
| | | (SEQ ID NO: 5271) |
| | b-t5 | GCTGTGATTACCCTGCAAATCGAGGGCTGCTCCAGC |
| | | (SEQ ID NO: 5272) |

TABLE 17
Casl3 orthologs used in this study

| Abbreviation | |
|---|---|
| key | Protein sequence |
| Ran | MEKPLLPNVYTLKHKFFWGAFLNIARHNAFITICHINEQLGLKTPSNDDKIVDVVCETWNNILNNDHDLL |
| | KKSQLTELILKHFPFLTAMCYHPPKKEGKKKGHQKEQQKEKESEAQSQAEALNPSKLIEALEILVNQLHS |
| | LRNYYSHYKHKKPDAEKDIFKHLYKAFDASLRMVKEDYKAHFTVNLTRDFAHLNRKGKNKQDNPDFN |
| | RYRFEKDGFFTESGLLFFTNLFLDKRDAYWMLKKVSGFKASHKQREKMTTEVFCRSRILLPKLRLESRY |
| | DHNQMLLDMLSELSRCPKLLYEKLSEENKKHFQVEADGFLDEIEEEQNPFKDTLIRHQDRFPYFALRYLD |
| | LNESFKSIRFQVDLGTYHYCIYDKKIGDEQEKRHLTRTLLSFGRLQDFTEINRPQEWKALTKDLDYKETS |
| | NQPFISKTTPHYHITONKIGFRLGTSKELYPSLEIKDGANRIAKYPYNSGFVAHAFISVHELLPLMFYQHLT |
| | GKSEDLLKETVRHIQRIYKDFEEERINTIEDLEKANQGRLPLGAFPKQMLGLLQNKQPDLSEKAKIKIEKLI |
| | AETKLLSHRLNTKLKSSPKLGKRREKLIKTGVLADWLVKDFMRFQPVAYDAQNQPIKSSKANSTEFWFI |
| | RRALALYGGEKNRLEGYFKQTNLIGNTNPHPFLNKFNWKACRNLVDFYQQYLEQREKFLEAIKNQPWE |
| | PYQYCLLLKIPKENRKNLVKGWEQGGISLPRGLFTEAIRETLSEDLMLSKPIRKEIKKHGRVGFISRAITLY |
| | FKEKYQDKHQSFYNLSYKLEAKAPLLKREEHYEYWQQNKPQSPTESQRLELHTSDRWKDYLLYKRWQ |
| | HLEKKLRLYRNQDVMLWLMTLELTKNHFKELNLNYHQLKLENLAVNVQEADAKLNPLNQTLPMVLPV |
| | KVYPATAFGEVQYHKTPIRTVYIREEHTKALKMGNFKALVKDRRLNGLFSFIKEENDTQKHPISQLRLRR |
| | ELEIYQSLRVDAFKETLSLEEKLLNKHTSLSSLENEFRALLEEWKKEYAASSMVTDEHIAFIASVRNAFCH |
| | NQYPFYKEALHAPIPLFTVAQPTTEEKDGLGIAEALLKVLREYCEIVKSQI (SEQ ID NO: 5273) |
| Psp | MNIPALVENQKKYFGTYSVMAMLNAQTVLDHIQKVADIEGEQNENNENLWFHPVMSHLYNAKNGYDK |
| | QPEKTMFIIERLQSYFPFLKIMAENQREYSNGKYKQNRVEVNSNDIFEVLKRAFGVLKMYRDLTNHYKT |
| | YEEKLNDGCEFLTSTEQPLSGMINNYYTVALRNMNERYGYKTEDLAFIQDKRFKFVKDAYGKKKSQVN |
| | TGFFLSLQDYNGDTQKKLHLSGVGIALLICLFLDKQYINIFLSRLPIFSSYNAQSEERRIIIRSFGINSIKLPKD |
| | RIHSEKSNKSVAMDMLNEVKRCPDELFTTLSAEKQSRFRIISDDHNEVLMKRSSDRFVPLLLQYIDYGKL |
| | FDHIRFHVNMGKLRYLLKADKTCIDGQTRVRVIEQPLNGFGRLEEAETMRKQENGTFGNSGIRIRDFEN |
| | MKRDDANPANYPYIVDTYTHYILENNKVEMFINDKEDSAPLLPVIEDDRYVVKTIPSCRMSTLEIPAMAF |
| | HMFLFGSKKTEKLIVDVHNRYKRLFQAMQKEEVTAENIASFGIAESDLPQKILDLISGNAHGKDVDAFIR |
| | LTVDDMLTDTERRIKRFKDDRKSIRSADNKMGKRGFKQISTGKLADFLAKDIVLFQPSVNDGENKITGLN |
| | YRIMQSAIAVYDSGDDYEAKQQFKLMFEKARLIGKGTTEPHPFLYKVFARSIPANAVEFYERYLIERKFY |
| | LTGLSNEIKKGNRVDVPFIRRDQNKWKTPAMKTLGRIYSEDLPVELPRQMFDNEIKSHLKSLPQMEGIDF |
| | NNANVTYLIAEYMKRVLDDDFQTFYQWNRNYRYMDMLKGEYDRKGSLQHCFTSVEEREGLWKERAS |
| | RTERYRKQASNKIRSNRQMRNASSEEIETILDKRLSNSRNEYQKSEKVIRRYRVQDALLFLLAKKTLTEL |
| | ADFDGERFKLKEIMPDAEKGILSEIMPMSFTFEKGGKKYTITSEGMKLKNYGDFFVLASDKRIGNLLELV |
| | GSDIVSKEDIMEEFNKYDQCRPEISSIVFNLEKWAFDTYPELSARVDREEKVDFKSILKILLNNKNINKEQS |
| | DILRKIRNAFDHNNYPDKGVVEIKALPEIAMSIKKAFGEYAIMK (SEQ ID NO: 5274) |
| b-t1 | MEFENIKKTSNKEVYSIEQYEGEKKWCFAIVLNRAQTNLEENPKLFEQTLTRFEKIMKQDWFNEETKKLIY |
| | EKEEENKVKEEIQIAASERLKNLANYFSAYLHAPDCLIFNRNDTIRIIMEKAYEKSRFEAKKKQQEDISIEFP |
| | ELFEEEDKITSAGVVFFVSFFIERRFLNRLMGYVQGFRKTEGEYNITRQVFSKYCLKDSYSVQAQDHDAVM |
| | FRDILGYLSRVPTEIYQHIKLTRKRSQDQLSERKTDKFILFALKYLEDYGLKDLADYTACFARSKIKRENED |
| | TKETDGNKHKFHREKPVVEIHFDKEKQDQFYIKRNNVILKAQKKGGQSNVFRMGVYELKYLVLLSLLGK |
| | AEEAIQRIDRYISSLKKQLPYLDKISNEEIQKSINFLPRFVRSRLGLLQVDDEKRLKTRLEYVKAKWTDKKE |
| | GSRKLELHRKGRDILRYINERCDRPLSRKEYNNILKFIVNKDFAGFYNELEELKRTRRLDKNIIQKLSGHTTL |
| | NALHERVCDLVLQELGSLQSENLKEYIGLIPKEEKEVTFREKVDRILEQPVVYKGFLRYEFFKEDKKSFARL |
| | VEEAIKTKWSDFDIPLGEEYYNIPSLDRFDRTNKKLYETLAMDRLCLMMARQYYLRLNEKLAEKAQHIYW |
| | KKEDGREVIIFKFQNPKEQKKSFSIRFSILDYTKMYVMDDPEFLSRLWEYFIPKEAKEIDYHKHYARAFDKY |
| | TNLQKEGIDAILKLEGRIIERRKIKPAKNYIEFQEIMNRSGYNNDQQVALKRVANALLAYNLNFEREHLKRF |
| | YGVVKREGIEKKWSLIV (SEQ ID NO: 5275) |
| b-t2 | MQVENIKKGSSQGMYSIEQYEGAKKWCFAIVLNRAQTNLQGNPKLFEETLTRFERIRKEDWFDQETKKLI |
| | YAKQEQNEVEEEIQKAADEKLRDLRNYFSHYFHTPDCLIFTQNDPVRIIMEKAYEKARFEQAKKEQEDISIE |
| | FGELFEENGRITSAGVVFFASFFAERRFLNRLMGYVQGFTRTEGEYKITRDVFSTYCLRDSYSVKTPDHDA |
| | VMFRDILGYLSRVPSESYQRIKESQMRSETQLSERKTDKFILFALNYLEDYGLEDLADYTACFARTRIKREQ |
| | DENTOGKEQKPHRKKPRVEIHFERAEGDPFYIKHNNVILRTQKKGAQTYIFRMGVYELKYLVLLSLLGKG |
| | AEAVKRIDRYVHSLRNQLPHIEKKSTEEIEGYVRFLPRFVRSHLGLLGVDDEKKIKARVDYVKAKWLEKK |
| | EKSRELQLHRKGRDILRYINERCERPLNIDEYNRILELLVTKHLDGFYRELEELKKTRRIDKNIVCNLSRHKS |
| | VNALHEKVCDLVVQELESLGREELKEYVGLIPKEEKEVSFEEKTDRVVKQPVIYKGFLRNEFFRESRKSFA |
| | RLVEEAVREKGEVYDVPLGGEYYEIVSLDTFDKDNKRLYETLAMDRLLLMIARQYHLSLNKELAKRAQQI |
| | EWKKEDGEEVIIFTLKNPAQPEQSCSVRFSLRDYTKLYVMDDAEFLARLCDYFLPKDEEQIDYHRLYTQG |
| | MNRYTNLQREGIEAILELEKKTIGPEQPRPPKNYIPFSEIMDKSAYNEDDQKALRRVRNALLHHNLNFARA |
| | DFKRFCGIMKREGIEKRWSLAV (SEQ ID NO: 5276) |
| b-t3 | MAQVSKQTSKKRELSIDEYQGARKWCFTIAFNKALVNRDKNDGLFVESLLRHEKYSKHDWYDEDTRALI |
| | KCSTQAANAKAEALANYFSAYRHSPGCLTFTAEDELRTIMERAYERAIFECRRRETEVIIEFPSLFEGDRITT |
| | AGVVFFVSFFVERRVLDRLYGAVSGLKKNEGQYKLTRKALSMYCLKDSRFTKAWDKRVLLFRDILAQLG |
| | RIPAEAYEYYHGEQGDKKRANDNEGTNPKRHKDKFIEFALHYLEAQHSEICFGRRHIVREEAGAGDEHKK |
| | HRTKGKVVVDFSKKDEDQSYYISKNNVIVRIDKNAGPRSYRMGLNELKYLVLLSLQGKGDDAIAKLYRY |
| | RQHVENILDVVKVTDKDNHVFLPRFVLEQHGIGRKAFKQRIDGRVKHVRGVWEKKKAATNEMTLHEKA |
| | RDILQYVNENCTRSFNPGEYNRLLVCLVGKDVENFQAGLKRLQLAERIDGRVYSIFAQTSTINEMHQVVC |
| | DQILNRLCRIGDQKLYDYVGLGKKDEIDYKQKVAWFKEHISIRRGFLRKKFWYDSKKGFAKLVEEHLESG |
| | GGQRDVGLDKKYYHIDAIGRFEGANPALYETLARDRLCLMMAQYFLGSVRKELGNKIVWSNDSIELPVEG |
| | SVGNEKSIVFSVSDYGKLYVLDDAEFLGRICEYFMPHEKGKIRYHTVYEKGFRAYNDLQKKCVEAVLAFE |
| | EKVVKAKKMSEKEGAHYIDFREILAQTMCKEAEKTAVNKVARAFFAHHLKFVIDEFGLFSDVMKKYGIE |
| | KEWKFPVK (SEQ ID NO: 5277) |
| b-t4 | MNIIKLKKEEAAFYFNQTILNLSGLDEIIEKQIPHIISNKENAKKVIDKIFNNRLLLKSVENYIYNFKDVAKNA |
| | RTEIEAILLKLVELRNFYSHYVHNDTVKILSNGEKPILEKYYQIAIEATGSKNVKLVIIENNNCLTOSGVLFL |
| | LCMFLKKSQANKLISSVSGFKRNDKEGQPRRNLFTYYSVREGYKVVPDMQKHFLLFALVNHLSEQDDHIE |
| | KQQQSDELGKGLFFHRIASTFLNESGIFNKMQFYTYQSNRLKEKRGELKHEKDTFTWIEPFQGNSYFTLNG |
| | HKGVISEDQLKELCYTILIEKQNVDSLEGKIIQFLKKFQNVSSKQQVDEDELLKREYFPANYFGRAGTGTLK |
| | EKILNRLDKRMDPTSKVTDKAYDKMIEVMEFINMCLPSDEKLRQKDYRRYLKMVRFWNKEKHNIKREFD |
| | SKKWTRFLPTELWNKRNLEEAYQLARKENKKKLEDMRNQVRSLKENDLEKYQQINYVNDLENLRLLSQE |
| | LGVKWQEKDWVEYSGQIKKQISDNQKLTIMKQRITAELKKMHGIENLNLRISIDTNKSRQTVMNRIALPKG |
| | FVKNHIQQNSSEKISKRIREDYCKIELSGKYEELSRQFFDKKNFDKMTLINGLCEKNKLIAFMVIYLLERLGF |
| | ELKEKTKLGELKQTRMTYKISDKVKEDIPLSYYPKLVYAMNRKYVDNIDSYAFAAYESKKAILDKVDIIEK |
| | QRMEFIKQVLCFEEYIFENRIIEKSKFNDEETHISFTQIHDELIKKGRDTEKLSKLKHARNKALHGEIPDGTSF |
| | EKAKLLINEIKK (SEQ ID NO: 5278) |
| b-t5 | MGIDYSLTSDCYRGINKSCFAVALNIAYDNCDHKGCRTLLSEVLRSKGGISDEQIKSQVVDGIQKRLKDIRN |
| | YFSHYYHAEDCLRFGDQDAVKVFLEEIYKNAESKTVGATKESDYKGVVPPLFELHNGTYMITAAGVIFLA |
| | SFFCHRSNVYRMLGAVKGFKHTGKEQLSDGQKRDYGFTRRLLAYYALRDSYSVGAEDKTRCFREILSYLS |
| | RVPQLAVDWLNEQQLLTPEEKEAFLNQPAEDEGGDISDSSSSDKNKKSKEKRRSLRRDEKFILFAIQFIEGW |
| | AAEQGLDVTFARYQKTVEKAENKNQDGKQARAVQLKYRNQGLNPDFNNEWMYYIQNEHAIIQIKLNNK |
| | KAVAARISENELKYLVLLIFEEKGNDAVQKLNCYIYSMSQKIEGEWKHRPEDERWMPSFTKRADRTVTPE |
| | AVQSRLSYIRKQLQETIEKIGQEEPRNNKWLIYKGKKISMILKFISDSIRDIQRRPNVKQYHILRDALQRLDF |
| | DGFYKELQNYVNDGRIAVSLYDQIKGVNDISGLCKKVCELTLERLAGLEAKNGSELRRYIGLEAQEKHPK |
| | YGEWNTLQEKAKRFLESQFSIGKNFLRKMFYGDCCQKRCFDEEKGYNTQAKERKSLYSIVKEKLKDIKPIH |
| | DDRWYLIDRNPKNYDNKHSRIIRQMCNTYIQDVLCMKMAMWHYEKLISATEFRNKLEWNCIGQGNMGY |
| | ERYSLWYKTGCGVVIQFTPADFLRLDIIEKPAMIENICQCFVLGNKKLNSGAEKKITWDKFNKDGIAKYRK |
| | RQAEAVRAIFAFEEGLKIQEDKWSHERYFPFCNILDEAVKQGKIKDTGKDKEALNRGRNDFFHEEFKSTED |
| | QQAIFQKYFPIVERKDDTKKRRDKKQK (SEQ ID NO: 5279) |

TABLE 18
Primers for cloning plasmids used in PFS screen

| Name | Sequence |
|---|---|
| Cas13b-t1_gene_F | TGCCGGGCCTCTTGCGGGATTTTACACTTTATGCTTCCGGCTCGTATGTTAGGAGGTC |
| | TTTATCATGGAATTCGAGAACATCAA (SEQ ID NO: 5280) |
| Cas13b-t1_gene_R | ATGCTGTCGGAATGGACGATTCACACGATCAGGGACCATT (SEQ ID NO: 5281) |
| Cas13b-t2_gene_F | TGCCGGGCCTCTTGCGGGATTTTACACTTTATGCTTCCGGCTCGTATGTTAGGAGGTC |
| | TTTATCATGCAGGTCGAGAACATCAA (SEQ ID NO: 5282) |
| Cas13b-t2_gene_R | ATGCTGTCGGAATGGACGATTCACACAGCCAGGGACCATC (SEQ ID NO: 5283) |
| Cas13b-t3_gene_F | TGCCGGGCCTCTTGCGGGATTTTACACTTTATGCTTCCGGCTCGTATGTTAGGAGGTC |
| | TTTATCATGGCCCAGGTGTCCAAGCA (SEQ ID NO: 5284) |
| Cas13b-t3_gene_R | ATGCTGTCGGAATGGACGATTCACTTCACGGGGAACTTCC (SEQ ID NO: 5285) |
| Cas13b-t4_gene_F | TGCCGGGCCTCTTGCGGGATTTTACACTTTATGCTTCCGGCTCGTATGTTAGGAGGTC |
| | TTTATCATGAACATCATCAAGCTGAA (SEQ ID NO: 5286) |
| Cas13b-t4_gene_R | ATGCTGTCGGAATGGACGATTTACTTCTTAATCTCATTGA (SEQ ID NO: 5287) |
| Cas13b-t5_gene_F | TGCCGGGCCTCTTGCGGGATTTTACACTTTATGCTTCCGGCTCGTATGTTAGGAGGTC |
| | TTTATCATGGGCATCGATTACAGCCT (SEQ ID NO: 5288) |
| Cas13b-t5_gene_R | ATGCTGTCGGAATGGACGATTTACTTCTGCTTCTTGTCTC (SEQ ID NO: 5289) |
| crRNA_expression_bac_F | TGCCGGGCCTCTTGCGGGATATCTTGACAGCTAGCTCAGTCCT (SEQ ID NO: 5290) |
| Cas13b-t1_crRNA_R | GCGTCCGGCGTAGAGGATCCGCTGTAATCACCCCACAAAT (SEQ ID NO: 5291) |
| Cas13b-t2_crRNA_R | GCGTCCGGCGTAGAGGATCCGCTGTAATCACCCCACAAAT (SEQ ID NO: 5292) |
| Cas13b-t3_crRNA_R | GCGTCCGGCGTAGAGGATCCGCTGTAATCACCCCACAAAT (SEQ ID NO: 5293) |
| Cas13b-t4_crRNA_R | GCGTCCGGCGTAGAGGATCCGCTGTTACTTCCCCACAAAT (SEQ ID NO: 5294) |
| Cas13b-t5_crRNA_R | GCGTCCGGCGTAGAGGATCCGCTGTGATTACCCTGCAAAT (SEQ ID NO: 5295) |

TABLE 19
Primers for cloning mammalian expression plasmids. Mutations
introduced by PCR are shown in lower case.

| Name | Sequence |
|---|---|
| crRNA_expression_mammalian_F | GACCGAGCGCAGCGAGTCAGTGAGCGAGGA (SEQ ID NO: 5296) |
| Cas13b-t1_crRNA_mammalian_R | AACGACGGCCAGTGAATTCGAGCTCGGTACCAAAAAAGCTGTAATCACCCC |
| | ACAAATCGGAGGCTTCTTCAGCTTGTCTTCGTCCCAGGAAGACATGGTGTTT |
| | CGTCCTTTCCACAAGATATATAAA (SEQ ID NO: 5297) |
| Cas13b-t3_crRNA_mammalian_R | AACGACGGCCAGTGAATTCGAGCTCGGTACCAAAAAAGCTGTAATCACCCC |
| | ACAAATCGGGGGCTGCTCCAGCTTGTCTTCGTCCCAGGAAGACATGGTGTTT |
| | CGTCCTTTCCACAAGATATATAAA (SEQ ID NO: 5298) |
| Cas13b-t5_crRNA_mammalian_R | AACGACGGCCAGTGAATTCGAGCTCGGTACCAAAAAAGCTGTGATTACCCT |
| | GCAAATCGAGGGCTGCTCCAGCTTGTCTTCGTCCCAGGAAGACATGGTGTTT |
| | CGTCCTTTCCACAAGATATATAAA (SEQ ID NO: 5299) |
| Cas13b-t1_gene_mammalian_F | GAGACCCAAGCTGGCTAGCGTTTAAACTTAAGCTTGCCACCATGGGATCCCT |
| | TCAACTGCCTCCACTTGAAAGACTGACACTGGGATCCGAATTCGAGAACATC |
| | AAGAAAA (SEQ ID NO: 5300) |
| Cas13b-t1_HEPN1_mut_R | CAGGTAGgcGCTGAAGTAGTTTgcCAGGTTC (SEQ ID NO: 5301) |
| Cas13b-t1_HEPN1_mut_F | GAACCTGgcAAACTACTTCAGCgcCTACCTG (SEQ ID NO: 5302) |
| Cas13b-t1_HEPN2_mut_R | GTTGTAGgcCAGCAGGGCGTTCgcCACTCTC (SEQ ID NO: 5303) |
| Cas13b-t1_HEPN2_mut_F | GAGAGTGgcGAACGCCCTGCTGgcCTACAAC (SEQ ID NO: 5304) |
| Cas13b-t1_forREPAIR_R | ACTACCGCCTGACCCTCCCACGATCAGGGACCATTTTTTCTCG (SEQ ID NO: |
| | 5305) |
| Cas13b-t3_gene_mammalian_F | GAGACCCAAGCTGGCTAGCGTTTAAACTTAAGCTTGCCACCATGGGATCCCT |
| | TCAACTGCCTCCACTTGAAAGACTGACACTGGGATCCGCCCAGGTGTCCAA |
| | GCAGACCA (SEQ ID NO: 5306) |
| Cas13b-t3_HEPN1_mut_R | TCTGTAGgCGCTGAAGTAGTTTgcCAGAGCC (SEQ ID NO: 5307) |
| Cas13b-t3_HEPN1_mut_F | GGCTCTGgcAAACTACTTCAGCgcCTACAGA (SEQ ID NO: 5308) |
| Cas13b-t3_HEPN2_mut_R | GTGGTGGgcAAAGAAGGCTCTCgcCACTTTG (SEQ ID NO: 5309) |
| Cas13b-t3_HEPN2_mut_F | CAAAGTGgcGAGAGCCTTCTTTgcCCACCAC (SEQ ID NO: 5310) |
| Cas13b-t3_forREPAIR_R | ACTACCGCCTGACCCTCCCTTCACGGGGAACTTCCATTCTTTC (SEQ ID NO: |
| | 5311) |
| Cas13b-t5_gene_mammalian_F | GAGACCCAAGCTGGCTAGCGTTTAAACTTAAGCTTGCCACCATGGGATCCCT |
| | TCAACTGCCTCCACTTGAAAGACTGACACTGGGATCCATGGGCATCGATTAC |
| | AGCCTGACCA (SEQ ID NO: 5312) |
| ADAR2_F | GGAGGGTCAGGCGGTAGTCAGCTGCATTTA (SEQ ID NO: 5313) |
| pcDNA_expression_R | GGGTTTAAACGGGCCCTCTAGACTC (SEQ ID NO: 5314) |

TABLE 20
Primers for cloning yeast constructs used in this study

| Name | Sequence |
|---|---|
| ADAR_mut_library_F | CCAGATCGGGGGTTCCGGCGGGTCC (SEQ ID NO: 5315) |
| ADAR_mut_library_R | TATTTAATAATAAAAATCATAAATCATAAGAAATTCGCCACGTGAGT |
| | CTAGGATCCTCA (SEQ ID NO: 5316) |
| URA3_F | ACTCACTATAGGGAATATTAAGCTTTTCAATTCATCATTTTTTTT (SEQ |
| | ID NO: 5317) |
| URA3_R | TTAGTTTTGCTGGCCGCATC (SEQ ID NO: 5318) |
| URA3_TAG_R | AATGTCTGCCTATTCTGCTAT (SEQ ID NO: 5319) |
| URA3_TAG_F | ATAGCAGAATAGGCAGACATT (SEQ ID NO: 5320) |
| ADE2_F | GGGCGCGTGGGGATGATCCATTCTTGAATAATACATAACT (SEQID |
| | NO: 5321) |
| ADE2_R | AAACAACAAAAGGATACTAGTCGCTATCCTCGGTTCTGCAT (SEQ ID |
| | NO: 5322) |
| ADE2_TGA_R | TTAGTAAATGGTGCTCATTTTTCGGCGTACA (SEQ ID NO: 5323) |
| ADE2_TGA_F | TGTACGCCGAAAAATGAGCACCATTTACTAA (SEQ ID NO: 5324) |
| LEU2_F | AACTGTGGGAATACTCAGGTATCGT (SEQ ID NO: 5325) |
| LEU2_R | TTAAGCAAGGATTTTCTTAACTTCTTCGGC (SEQ ID NO: 5326) |
| ADAR2_yeast_F | CCAGATCGGGGGTTCCGGCGGGTCC (SEQ ID NO: 5327) |
| ADAR2_yeast_R | GAACAAAAGCTGGAGCTCCACCG (SEQ ID NO: 5328) |
| E620G_yeast_R | GACGCCCTGCCTAACcCATCTTTGCCGGTCG (SEQ ID NO: 5329) |
| E620G_yeast_F | CGACCGGCAAAGATGgGTTAGGCAGGGCGTC (SEQ ID NO: 5330) |
| ADE2 targeting spacer | CGTCAATGGTGCcCATTTTTCGGCGTACAAAGGA (SEQ ID NO: 5331) |
| (22 bp mismatch) | |

TABLE 21
Primers for REPAIR Round 1, 2 screen mutant cloning into mammalian
Table 21-A

| Well | Name | Sequence |
|---|---|---|
| A01 | A09D_piece1R | CAGGCGTGAGACAGCGTCATCTAAAACCTGCGGTAA (SEQ ID NO: |
| | | 5332) |
| A02 | A11T_piece1R | CAGGACCAGGCGTGAGACCGTGTCAGCTAAAACCTG (SEQ ID NO: |
| | | 5333) |
| A03 | L17P_piece1R | CAGGTCACCAAACTTACCGGGGACCAGGCGTGAGAC (SEQ ID NO: |
| | | 5334) |
| A04 | G21D_piece1R | GAAGTTGTCGGTCAGGTCGTCAAACTTACCCAGGAC (SEQ ID NO: 5335) |
| A05 | T24A_piece1R | AGGGGAGGAGAAGTTGTCTGCCAGGTCACCAAACTT (SEQ ID NO: |
| | | 5336) |
| A06 | T24S_piece1R | AGGGGAGGAGAAGTTGTCGGACAGGTCACCAAACTT (SEQ ID NO: |
| | | 5337) |
| A07 | N26I_piece1R | AGCGTGAGGGGAGGAGAATATGTCGGTCAGGTCACC (SEQ ID NO: |
| | | 5338) |
| A08 | F27S_piece1R | GCGAGCGTGAGGGGAGGAGGAGTTGTCGGTCAGGTC (SEQ ID NO: |
| | | 5339) |
| A09 | R33G_piece1R | TCCAGCCAGCACTTTTCTGCCAGCGTGAGGGGAGGA (SEQ ID NO: 5340) |
| A10 | K35R_piece1R | GACGACTCCAGCCAGCACTCTTCTGCGAGCGTGAGG (SEQ ID NO: 5341) |
| A11 | L37V_piece1R | TGTCATGACGACTCCAGCTACCACTTTTCTGCGAGC (SEQ ID NO: 5342) |
| A12 | V40G_piece1R | TGTGCCTGTTGTCATGACGCCTCCAGCCAGCACTTT (SEQ ID NO: 5343) |
| B01 | T44S_piece1R | ATCTTTAACATCTGTGCCAGATGTCATGACGACTCC (SEQ ID NO: 5344) |
| B02 | K49R_piece1R | ACTTATCACCTTGGCATCTCTAACATCTGTGCCTGT (SEQ ID NO: 5345) |
| B03 | I54L_piece1R | TGTTCCTGTAGAAACACTGAGCACCTTGGCATCTTT (SEQ ID NO: 5346) |
| B04 | V56A_piece1R | ACATTTTGTTCCTGTAGATGCACTTATCACCTTGGC (SEQ ID NO: 5347) |
| B05 | V56E_piece1R | ACATTTTGTTCCTGTAGACTCACTTATCACCTTGGC (SEQ ID NO: 5348) |
| B06 | G59R_piece1R | ACCATTAATACATTTTGTCCGTGTAGAAACACTTAT (SEQ ID NO: 5349) |
| B07 | T60A_piece1R | TTCACCATTAATACATTTAGCTCCTGTAGAAACACT (SEQ ID NO: 5350) |
| B08 | T60S_piece1R | TTCACCATTAATACATTTACTTCCTGTAGAAACACT (SEQ ID NO: 5351) |
| B09 | C62F_piece1R | CATGTATTCACCATTAATAAATTTTGTTCCTGTAGA (SEQ ID NO: 5352) |
| B10 | G65D_piece1R | ACGATCACTCATGTATTCGTCATTAATACATTTTGT (SEQ ID NO: 5353) |
| B11 | L75Q_piece1R | TTCTGCATGGCAGTCATTCTGTGCAAGGCCACGATC (SEQ ID NO: 5354) |
| B12 | C78R_piece1R | AGATATTATTTCTGCATGACGGTCATTTAATGCAAG (SEQ ID NO: 5355) |
| C01 | I83T_piece1R | GAGCAAGGATCTCCGAGAGGTTATTTCTGCATGGCA (SEQ ID NO: 5356) |
| C02 | I83N_piece1R | GAGCAAGGATCTCCGAGAATTTATTTCTGCATGGCA (SEQ ID NO: 5357) |
| C03 | R86G_piece1R | AAGAAATCTGAGCAAGGAGCCCCGAGATATTATTTC (SEQ ID NO: |
| | | 5358) |
| C04 | S87N_piece1R | ATAAAGAAATCTGAGCAAATTTCTCCGAGATATTAT (SEQ ID NO: 5359) |
| C05 | L92M_piece1R | AAGCTCAAGTTGTGTATACATAAATCTGAGCAAGGA (SEQ ID NO: |
| | | 5360) |
| C06 | K103R_piece1R | GGATCTTTTTTGATCATCCCGGTTATTTAAGTAAAG (SEQ ID NO: 5361) |
| C07 | D104G_piece1R | GATGGATCTTTTTTGATCGCCTTTGTTATTTAAGTA (SEQ ID NO: 5362) |
| C08 | D105V_piece1R | AAAGATGGATCTTTTTTGCACATCTTTGTTATTTAA (SEQ ID NO: 5363) |
| C09 | D105Y_piece1R | AAAGATGGATCTTTTTTGATAATCTTTGTTATTTAA (SEQ ID NO: 5364) |
| C10 | S109G_piece1R | CTCTGATTTCTGAAAGATGCCTCTTTTTTGATCATC (SEQ ID NO: 5365) |
| C11 | F111L_piece1R | CCCTCGCTCTGATTTCTGCAAGATGGATCTTTTTTG (SEQ ID NO: 5366) |
| C12 | Q112L_piece1R | CCCCCCTCGCTCTGATTTCAGAAAGATGGATCTTTT (SEQ ID NO: 5367) |
| D01 | R116C_piece1R | CTTCAGCCTAAACCCCCCACACTCTGATTTCTGAAA (SEQ ID NO: 5368) |
| D02 | G117R_piece1R | CTCCTTCAGCCTAAACCCTCTTCGCTCTGATTTCTG (SEQ ID NO: 5369) |
| D03 | R120I_piece1R | CTGGACATTCTCCTTCAGGATAAACCCCCCTCGCTC (SEQ ID NO: 5370) |
| D04 | E123V_piece1R | CAGATGAAACTGGACATTAACCTTCAGCCTAAACCC (SEQ ID NO: 5371) |
| D05 | N124K_piece1R | GTACAGATGAAACTGGACCTTCTCCTTCAGCCTAAA (SEQ ID NO: 5372) |
| D06 | L129P_piece1R | GGGAGAGGTGCTGATGTATGGATGAAACTGGACATT (SEQ ID NO: |
| | | 5373) |
| D07 | Y130N_piece1R | ACAGGGAGAGGTGCTGATGTTCAGATGAAACTGGAC (SEQ ID NO: |
| | | 5374) |
| D08 | S134P_pieceIR | TCTGGCATCTCCACAGGGAGGGGTGCTGATGTACAG (SEQ ID NO: 5375) |
| D09 | C136R_piece1R | GAAGATTCTGGCATCTCCTCTGGGAGAGGTGCTGAT (SEQ ID NO: 5376) |
| D10 | A139T_piece1R | ATGTGGTGAGAAGATTCTTGTATCTCCACAGGGAGA (SEQ ID NO: 5377) |
| D11 | F142L_piece1R | GATTGGCTCATGTGGTGAGAGGATTCTGGCATCTCC (SEQ ID NO: 5378) |
| D12 | H145L_piece1R | TTCTTCCAGGATTGGCTCAAGTGGTGAGAAGATTCT (SEQ ID NO: 5379) |
| E01 | L149M_piece1R | TCTATCTGCTGGTTCTTCCATGATTGGCTCATGTGG (SEQ ID NO: 5380) |
| E02 | H156L_piece1R | TCTTGCTTTACGATTTGGCAGTCTATCTGCTGGTTC (SEQ ID NO: 5381) |
| E03 | P157L_pieceIR | TCCTCTTGCTTTACGATTGAGGTGTCTATCTGCTGG (SEQ ID NO: 5382) |
| E04 | P157Q_piece1R | TCCTCTTGCTTTACGATTCTGGTGTCTATCTGCTGG (SEQ ID NO: 5383) |
| E05 | N158R_piece1R | CTGTCCTCTTGCTTTACGGCGTGGGTGTCTATCTGC (SEQ ID NO: 5384) |
| E06 | N158K_piece1R | CTGTCCTCTTGCTTTACGCTTTGGGTGTCTATCTGC (SEQ ID NO: 5385) |
| E07 | K160R_piece1R | CCGTAGCTGTCCTCTTGCCCGACGATTTGGGTGTCT (SEQ ID NO: 5386) |
| E08 | K160T_piece1R | CCGTAGCTGTCCTCTTGCCGTACGATTTGGGTGTCT (SEQ ID NO: 5387) |
| E09 | A161T_pieceIR | GGTCCGTAGCTGTCCTCTTGTTTTACGATTTGGGTG (SEQ ID NO: 5388) |
| E10 | R162I_piece1R | TTTGGTCCGTAGCTGTCCTATTGCTTTACGATTTGG (SEQ ID NO: 5389) |
| E11 | R162S_piece1R | TTTGGTCCGTAGCTGTCCGCTTGCTTTACGATTTGG (SEQ ID NO: 5390) |
| E12 | Q164R_piece1R | CTCTATTTTGGTCCGTAGTCTTCCTCTTGCTTTACG (SEQ ID NO: 5391) |
| F01 | Q164E_piece1R | CTCTATTTTGGTCCGTAGTTCTCCTCTTGCTTTACG (SEQ ID NO: 5392) |
| F02 | Q164K_piece1R | CTCTATTTTGGTCCGTAGTTTTCCTCTTGCTTTACG (SEQ ID NO: 5393) |
| F03 | L165M_piece1R | AGACTCTATTTTGGTCCGCATCTGTCCTCTTGCTTT (SEQ ID NO: 5394) |
| F04 | I169T_piece1R | CGTCCCCTGACCAGACTCCGTTTTGGTCCGTAGCTG (SEQ ID NO: 5395) |
| F05 | E170G_piece1R | AATCGTCCCCTGACCAGACCCTATTTTGGTCCGTAG (SEQ ID NO: 5396) |
| F06 | Q173R_piece1R | GCGCACTGGAATCGTCCCGCGACCAGACTCTATTTT (SEQ ID NO: 5397) |
| F07 | I176M_piece1R | CGCATTGGAGCGCACTGGCATCGTCCCCTGACCAGA (SEQ ID NO: 5398) |
| F08 | V178L_piece1R | GATGCTCGCATTGGAGCGGAGTGGAATCGTCCCCTG (SEQ ID NO: 5399) |
| F09 | N181K_piece1R | CCACGTTTGGATGCTCGCTTTGGAGCGCACTGGAAT (SEQ ID NO: 5400) |
| F10 | S183G_piece1R | CCCGTCCCACGTTTGGATGCCCGCATTGGAGCGCAC (SEQ ID NO: 5401) |
| F11 | I184L_piece1R | CACCCCGTCCCACGTTTGAAGGCTCGCATTGGAGCG (SEQ ID NO: 5402) |
| F12 | Q185L_piece1R | CAGCACCCCGTCCCACGTCAAGATGCTCGCATTGGA (SEQ ID NO: |
| | | 5403) |
| G01 | Q185R_piece1R | CAGCACCCCGTCCCACGTCCGGATGCTCGCATTGGA (SEQ ID NO: 5404) |
| G02 | G189A_piece1R | CCGCTCCCCTTGCAGCACAGCGTCCCACGTTTGGAT (SEQ ID NO: 5405) |
| G03 | M191V_piece1R | GAGCAGCCGCTCCCCTTGCACCACCCCGTCCCACGT (SEQ ID NO: 5406) |
| G04 | R195I_piece1R | GCAGGACATGGTGAGCAGGATCTCCCCTTGCAGCAC (SEQ ID NO: |
| | | 5407) |
| G05 | L196Q_piece1R | ACTGCAGGACATGGTGAGCTGCCGCTCCCCTTGCAG (SEQ ID NO: 5408) |
| G06 | S200N_piece1R | TGCAATCTTGTCACTGCAGTTCATGGTGAGCAGCCG (SEQ ID NO: 5409) |
| G07 | S202P_piece1R | CCAGCGTGCAATCTTGTCGGGGCAGGACATGGTGAG (SEQ ID NO: |
| | | 5410) |
| G08 | I205T_piece1R | CACCACGTTCCAGCGTGCGGTCTTGTCACTGCAGGA (SEQ ID NO: 5411) |
| G09 | I205V_piece1R | CACCACGTTCCAGCGTGCCACCTTGTCACTGCAGGA (SEQ ID NO: 5412) |
| G10 | A206P_piece1R | GCCCACCACGTTCCAGCGAGGAATCTTGTCACTGCA (SEQ ID NO: 5413) |
| G11 | R207S_piece1R | GATGCCCACCACGTTCCAGCTTGCAATCTTGTCACT (SEQ ID NO: 5414) |
| G12 | N209I_piece1R | TCCCTGGATGCCCACCACTATCCAGCGTGCAATCTT (SEQ ID NO: 5415) |
| H01 | N209K_piece1R | TCCCTGGATGCCCACCACCTTCCAGCGTGCAATCTT (SEQ ID NO: 5416) |
| H02 | V211E_piece1R | CAGTGATCCCTGGATGCCCTCCACGTTCCAGCGTGC (SEQ ID NO: 5417) |
| H03 | G212S_piece1R | GAGCAGTGATCCCTGGATACTCACCACGTTCCAGCG (SEQ ID NO: 5418) |
| H04 | L218F_piece1R | GGGCTCCACGAAAATGCTAAACAGTGATCCCTGGAT (SEQ ID NO: |
| | | 5419) |
| H05 | V222I_piece1R | CGAGAAGTAAATGGGCTCGATGAAAATGCTGAGCAG (SEQ ID NO: |
| | | 5420) |
| H06 | I225N_piece1R | GATGATGCTCGAGAAGTAGTTGGGCTCCACGAAAAT (SEQ ID NO: |
| | | 5421) |
| H07 | Y226H_piece1R | CAGGATGATGCTCGAGAAGTGAATGGGCTCCACGAA (SEQ ID NO: |
| | | 5422) |
| H08 | S228R_piece1R | GCTGCCCAGGATGATGCTTCTGAAGTAAATGGGCTC (SEQ ID NO: 5423) |
| H09 | I230V_piece1R | GTAAAGGCTGCCCAGGATCACGCTCGAGAAGTAAAT (SEQ ID NO: |
| | | 5424) |
| H10 | I231M_piece1R | GTGGTAAAGGCTGCCCAGCATGATGCTCGAGAAGTA (SEQ ID NO: |
| | | 5425) |
| H11 | S234N_piece1R | GTGGTCCCCGTGGTAAAGGTTGCCCAGGATGATGCT (SEQ ID NO: 5426) |
| H12 | G238V_piece1R | GGCCCTGGAAAGGTGGTCGACGTGGTAAAGGCTGCC (SEQ ID NO: |
| | | 5427) |

Table 21-B

| Well | Name | Sequence |
|---|---|---|
| A01 | A09D_piece2F | TTACCGCAGGTTTTAGATGACGCTGTCTCACGCCTG (SEQ ID NO: 5428) |
| A02 | AllT_piece2F | CAGGTTTTAGCTGACACGGTCTCACGCCTGGTCCTG (SEQ ID NO: 5429) |
| A03 | L17P_piece2F | GTCTCACGCCTGGTCCCCGGTAAGTTTGGTGACCTG (SEQ ID NO: 5430) |
| A04 | G21D_piece2F | GTCCTGGGTAAGTTTGACGACCTGACCGACAACTTC (SEQ ID NO: 5431) |
| A05 | T24A_piece2F | AAGTTTGGTGACCTGGCAGACAACTTCTCCTCCCCT (SEQ ID NO: 5432) |
| A06 | T24S_piece2F | AAGTTTGGTGACCTGTCCGACAACTTCTCCTCCCCT (SEQ ID NO: 5433) |
| A07 | N26I_piece2F | GGTGACCTGACCGACATATTCTCCTCCCCTCACGCT (SEQ ID NO: 5434) |
| A08 | F27S_piece2F | GACCTGACCGACAACTCCTCCTCCCCTCACGCTCGC (SEQ ID NO: 5435) |
| A09 | R33G_piece2F | TCCTCCCCTCACGCTGGCAGAAAAGTGCTGGCTGGA (SEQ ID NO: 5436) |
| A10 | K35R_piece2F | CCTCACGCTCGCAGAAGAGTGCTGGCTGGAGTCGTC (SEQ ID NO: 5437) |
| A11 | L37V_piece2F | GCTCGCAGAAAAGTGGTAGCTGGAGTCGTCATGACA (SEQ ID NO: |
| | | 5438) |
| A12 | V40G_piece2F | AAAGTGCTGGCTGGAGGCGTCATGACAACAGGCACA (SEQ ID NO: |
| | | 5439) |
| B01 | T44S_piece2F | GGAGTCGTCATGACATCTGGCACAGATGTTAAAGAT (SEQ ID NO: 5440) |
| B02 | K49R_piece2F | ACAGGCACAGATGTTAGAGATGCCAAGGTGATAAGT (SEQ ID NO: |
| | | 5441) |
| B03 | I54L_piece2F | AAAGATGCCAAGGTGCTCAGTGTTTCTACAGGAACA (SEQ ID NO: 5442) |
| B04 | V56A_piece2F | GCCAAGGTGATAAGTGCATCTACAGGAACAAAATGT (SEQ ID NO: |
| | | 5443) |
| B05 | V56E_piece2F | GCCAAGGTGATAAGTGAGTCTACAGGAACAAAATGT (SEQ ID NO: |
| | | 5444) |
| B06 | G59R_piece2F | ATAAGTGTTTCTACACGGACAAAATGTATTAATGGT (SEQ ID NO: 5445) |
| B07 | T60A_piece2F | AGTGTTTCTACAGGAGCTAAATGTATTAATGGTGAA (SEQ ID NO: 5446) |
| B08 | T60S_piece2F | AGTGTTTCTACAGGAAGTAAATGTATTAATGGTGAA (SEQ ID NO: 5447) |
| B09 | C62F_piece2F | TCTACAGGAACAAAATTTATTAATGGTGAATACATG (SEQ ID NO: 5448) |
| B10 | G65D_piece2F | ACAAAATGTATTAATGACGAATACATGAGTGATCGT (SEQ ID NO: 5449) |
| B11 | L75Q_piece2F | GATCGTGGCCTTGCACAGAATGACTGCCATGCAGAA (SEQ ID NO: 5450) |
| B12 | C78R_piece2F | CTTGCATTAAATGACCGTCATGCAGAAATAATATCT (SEQ ID NO: 5451) |
| C01 | I83T_piece2F | TGCCATGCAGAAATAACCTCTCGGAGATCCTTGCTC (SEQ ID NO: 5452) |
| C02 | I83N_piece2F | TGCCATGCAGAAATAAATTCTCGGAGATCCTTGCTC (SEQ ID NO: 5453) |
| C03 | R86G_piece2F | GAAATAATATCTCGGGGCTCCTTGCTCAGATTTCTT (SEQ ID NO: 5454) |
| C04 | S87N_piece2F | ATAATATCTCGGAGAAATTTGCTCAGATTTCTTTAT (SEQ ID NO: 5455) |
| C05 | L92M_piece2F | TCCTTGCTCAGATTTATGTATACACAACTTGAGCTT (SEQ ID NO: 5456) |
| C06 | K103R_piece2F | CTTTACTTAAATAACCGGGATGATCAAAAAAGATCC (SEQ ID NO: 5457) |
| C07 | D104G_piece2F | TACTTAAATAACAAAGGCGATCAAAAAAGATCCATC (SEQ ID NO: |
| | | 5458) |
| C08 | D105V_piece2F | TTAAATAACAAAGATGTGCAAAAAAGATCCATCTTT (SEQ ID NO: 5459) |
| C09 | D105Y_piece2F | TTAAATAACAAAGATTATCAAAAAAGATCCATCTTT (SEQ ID NO: 5460) |
| C10 | S109G_piece2F | GATGATCAAAAAAGAGGCATCTTTCAGAAATCAGAG (SEQ ID NO: |
| | | 5461) |
| C11 | F111L_piece2F | CAAAAAAGATCCATCTTGCAGAAATCAGAGCGAGGG (SEQ ID NO: |
| | | 5462) |
| C12 | Q112L_piece2F | AAAAGATCCATCTTTCTGAAATCAGAGCGAGGGGGG (SEQ ID NO: |
| | | 5463) |
| D01 | R116C_piece2F | TTTCAGAAATCAGAGTGTGGGGGGTTTAGGCTGAAG (SEQ ID NO: 5464) |
| D02 | G117R_piece2F | CAGAAATCAGAGCGAAGAGGGTTTAGGCTGAAGGAG (SEQ ID NO: |
| | | 5465) |
| D03 | R120I_piece2F | GAGCGAGGGGGGTTTATCCTGAAGGAGAATGTCCAG (SEQ ID NO: |
| | | 5466) |
| D04 | E123V_piece2F | GGGTTTAGGCTGAAGGTTAATGTCCAGTTTCATCTG (SEQ ID NO: 5467) |
| D05 | N124K_piece2F | TTTAGGCTGAAGGAGAAGGTCCAGTTTCATCTGTAC (SEQ ID NO: 5468) |
| D06 | L129P_piece2F | AATGTCCAGTTTCATCCATACATCAGCACCTCTCCC (SEQ ID NO: 5469) |
| D07 | Y130N_piece2F | GTCCAGTTTCATCTGAACATCAGCACCTCTCCCTGT (SEQ ID NO: 5470) |
| D08 | S134P_piece2F | CTGTACATCAGCACCCCTCCCTGTGGAGATGCCAGA (SEQ ID NO: 5471) |
| D09 | C136R_piece2F | ATCAGCACCTCTCCCAGAGGAGATGCCAGAATCTTC (SEQ ID NO: 5472) |
| D10 | A139T_piece2F | TCTCCCTGTGGAGATACAAGAATCTTCTCACCACAT (SEQ ID NO: 5473) |
| D11 | F142L_piece2F | GGAGATGCCAGAATCCTCTCACCACATGAGCCAATC (SEQ ID NO: 5474) |
| D12 | H145L_piece2F | AGAATCTTCTCACCACTTGAGCCAATCCTGGAAGAA (SEQ ID NO: 5475) |
| E01 | L149M_piece2F | CCACATGAGCCAATCATGGAAGAACCAGCAGATAGA (SEQ ID NO: |
| | | 5476) |
| E02 | H156L_piece2F | GAACCAGCAGATAGACTGCCAAATCGTAAAGCAAGA (SEQ ID NO: |
| | | 5477) |
| E03 | P157L_piece2F | CCAGCAGATAGACACCTCAATCGTAAAGCAAGAGGA (SEQ ID NO: |
| | | 5478) |
| E04 | P157Q_piece2F | CCAGCAGATAGACACCAGAATCGTAAAGCAAGAGGA (SEQ ID NO: |
| | | 5479) |
| E05 | N158R_piece2F | GCAGATAGACACCCACGCCGTAAAGCAAGAGGACAG (SEQ ID NO: |
| | | 5480) |
| E06 | N158K_piece2F | GCAGATAGACACCCAAAGCGTAAAGCAAGAGGACAG (SEQ ID NO: |
| | | 5481) |
| E07 | K160R_piece2F | AGACACCCAAATCGTCGGGCAAGAGGACAGCTACGG (SEQ ID NO: |
| | | 5482) |
| E08 | K160T_piece2F | AGACACCCAAATCGTACGGCAAGAGGACAGCTACGG (SEQ ID NO: |
| | | 5483) |
| E09 | A161T_piece2F | CACCCAAATCGTAAAACAAGAGGACAGCTACGGACC (SEQ ID NO: |
| | | 5484) |
| E10 | R162I_piece2F | CCAAATCGTAAAGCAATAGGACAGCTACGGACCAAA (SEQ ID NO: |
| | | 5485) |
| E11 | R162S_piece2F | CCAAATCGTAAAGCAAGCGGACAGCTACGGACCAAA (SEQ ID NO: |
| | | 5486) |
| E12 | Q164R_piece2F | CGTAAAGCAAGAGGAAGACTACGGACCAAAATAGAG (SEQ ID NO: |
| | | 5487) |
| F01 | Q164E_piece2F | CGTAAAGCAAGAGGAGAACTACGGACCAAAATAGAG (SEQ ID NO: |
| | | 5488) |
| F02 | Q164K_piece2F | CGTAAAGCAAGAGGAAAACTACGGACCAAAATAGAG (SEQ ID NO: |
| | | 5489) |
| F03 | L165M_piece2F | AAAGCAAGAGGACAGATGCGGACCAAAATAGAGTCT (SEQ ID NO: |
| | | 5490) |
| F04 | I169T_piece2F | CAGCTACGGACCAAAACGGAGTCTGGTCAGGGGACG (SEQ ID NO: |
| | | 5491) |
| F05 | E170G_piece2F | CTACGGACCAAAATAGGGTCTGGTCAGGGGACGATT (SEQ ID NO: |
| | | 5492) |
| F06 | Q173R_piece2F | AAAATAGAGTCTGGTCGCGGGACGATTCCAGTGCGC (SEQ ID NO: 5493) |
| F07 | 1176M_piece2F | TCTGGTCAGGGGACGATGCCAGTGCGCTCCAATGCG (SEQ ID NO: 5494) |
| F08 | V178L_piece2F | CAGGGGACGATTCCACTCCGCTCCAATGCGAGCATC (SEQ ID NO: 5495) |
| F09 | N181K_piece2F | ATTCCAGTGCGCTCCAAAGCGAGCATCCAAACGTGG (SEQ ID NO: 5496) |
| F10 | S183G_piece2F | GTGCGCTCCAATGCGGGCATCCAAACGTGGGACGGG (SEQ ID NO: |
| | | 5497) |
| F11 | I184L_piece2F | CGCTCCAATGCGAGCCTTCAAACGTGGGACGGGGTG (SEQ ID NO: 5498) |
| F12 | Q185L_piece2F | TCCAATGCGAGCATCTTGACGTGGGACGGGGTGCTG (SEQ ID NO: 5499) |
| G01 | Q185R_piece2F | TCCAATGCGAGCATCCGGACGTGGGACGGGGTGCTG (SEQ ID NO: |
| | | 5500) |
| G02 | G189A_piece2F | ATCCAAACGTGGGACGCTGTGCTGCAAGGGGAGCGG (SEQ ID NO: |
| | | 5501) |
| G03 | M191V_piece2F | ACGTGGGACGGGGTGGTGCAAGGGGAGCGGCTGCTC (SEQ ID NO: |
| | | 5502) |
| G04 | R195I_piece2F | GTGCTGCAAGGGGAGATCCTGCTCACCATGTCCTGC (SEQ ID NO: 5503) |
| G05 | L196Q_piece2F | CTGCAAGGGGAGCGGCAGCTCACCATGTCCTGCAGT (SEQ ID NO: 5504) |
| G06 | S200N_piece2F | CGGCTGCTCACCATGAACTGCAGTGACAAGATTGCA (SEQ ID NO: 5505) |
| G07 | S202P_piece2F | CTCACCATGTCCTGCCCCGACAAGATTGCACGCTGG (SEQ ID NO: 5506) |
| G08 | I205T_piece2F | TCCTGCAGTGACAAGACCGCACGCTGGAACGTGGTG (SEQ ID NO: 5507) |
| G09 | I205V_piece2F | TCCTGCAGTGACAAGGTGGCACGCTGGAACGTGGTG (SEQ ID NO: 5508) |
| G10 | A206P_piece2F | TGCAGTGACAAGATTCCTCGCTGGAACGTGGTGGGC (SEQ ID NO: 5509) |
| G11 | R207S_piece2F | AGTGACAAGATTGCAAGCTGGAACGTGGTGGGCATC (SEQ ID NO: |
| | | 5510) |
| G12 | N209I_piece2F | AAGATTGCACGCTGGATAGTGGTGGGCATCCAGGGA (SEQ ID NO: |
| | | 5511) |
| H01 | N209K_piece2F | AAGATTGCACGCTGGAAGGTGGTGGGCATCCAGGGA (SEQ ID NO: |
| | | 5512) |
| H02 | V211E_piece2F | GCACGCTGGAACGTGGAGGGCATCCAGGGATCACTG (SEQ ID NO: |
| | | 5513) |
| H03 | G212S_piece2F | CGCTGGAACGTGGTGAGTATCCAGGGATCACTGCTC (SEQ ID NO: 5514) |
| H04 | L218F_piece2F | ATCCAGGGATCACTGTTTAGCATTTTCGTGGAGCCC (SEQ ID NO: 5515) |
| H05 | V222I_piece2F | CTGCTCAGCATTTTCATCGAGCCCATTTACTTCTCG (SEQ ID NO: 5516) |
| H06 | I225N_piece2F | ATTTTCGTGGAGCCCAACTACTTCTCGAGCATCATC (SEQ ID NO: 5517) |
| H07 | Y226H_piece2F | TTCGTGGAGCCCATTCACTTCTCGAGCATCATCCTG (SEQ ID NO: 5518) |
| H08 | S228R_piece2F | GAGCCCATTTACTTCAGAAGCATCATCCTGGGCAGC (SEQ ID NO: 5519) |
| H09 | I230V_piece2F | ATTTACTTCTCGAGCGTGATCCTGGGCAGCCTTTAC (SEQ ID NO: 5520) |
| H10 | I231M_piece2F | TACTTCTCGAGCATCATGCTGGGCAGCCTTTACCAC (SEQ ID NO: 5521) |
| H11 | S234N_piece2F | AGCATCATCCTGGGCAACCTTTACCACGGGGACCAC (SEQ ID NO: 5522) |
| H12 | G238V_piece2F | GGCAGCCTTTACCACGTCGACCACCTTTCCAGGGCC (SEQ ID NO: 5523) |

Table 21-C

| Well | Name | Sequence |
|---|---|---|
| A01 | D239E_piece1R | CATGGCCCTGGAAAGGTGTTCCCCGTGGTAAAGGCT (SEQ ID NO: 5524) |
| A02 | R243H_piece1R | GATCCGCTGGTACATGGCGTGGGAAAGGTGGTCCCC (SEQ ID NO: 5525) |
| A03 | R243L_piece1R | GATCCGCTGGTACATGGCGAGGGAAAGGTGGTCCCC (SEQ ID NO: |
| | | 5526) |
| A04 | R243G_piece1R | GATCCGCTGGTACATGGCCCCGGAAAGGTGGTCCCC (SEQ ID NO: 5527) |
| A05 | Y246H_piece1R | TATGTTGGAGATCCGCTGGTGCATGGCCCTGGAAAG (SEQ ID NO: 5528) |
| A06 | Q247H_piece1R | CTCTATGTTGGAGATCCGATGGTACATGGCCCTGGA (SEQ ID NO: 5529) |
| A07 | R248S_piece1R | GTCCTCTATGTTGGAGATAGACTGGTACATGGCCCT (SEQ ID NO: 5530) |
| A08 | N251Y_piece1R | AGGTGGCAGGTCCTCTATGTAGGAGATCCGCTGGTA (SEQ ID NO: 5531) |
| A09 | S267F_piece1R | TTCTGCATTGCTGATGCCGAAGAGCAAAGGCTTGTT (SEQ ID NO: 5532) |
| A10 | S270P_piece1R | CTGCCGTGCTTCTGCATTTGGGATGCCACTGAGCAA (SEQ ID NO: 5533) |
| A11 | N282Y_piece1R | CGTCCAGTTGACACTGAAGTAGGGGGCCTTCCCTGG (SEQ ID NO: 5534) |
| A12 | V285G_piece1R | GTCGCCTACCGTCCAGTTGCCACTGAAGTTGGGGGC (SEQ ID NO: 5535) |
| B01 | A293V_piece1R | GGCGTTGATGACCTCAATTACGGAGTCGCCTACCGT (SEQ ID NO: 5536) |
| B02 | I294F_piece1R | CGTGGCGTTGATGACCTCAAAAGCGGAGTCGCCTAC (SEQ ID NO: 5537) |
| B03 | N298I_piece1R | ATCCTTCCCAGTCGTGGCGATGATGACCTCAATAGC (SEQ ID NO: 5538) |
| B04 | T301S_piece1R | GCCCAGCTCATCCTTCCCGCTCGTGGCGTTGATGAC (SEQ ID NO: 5539) |
| B05 | K303N_piece1R | CGCGCGGCCCAGCTCATCATTCCCAGTCGTGGCGTT (SEQ ID NO: 5540) |
| B06 | K303I_piece1R | CGCGCGGCCCAGCTCATCTATCCCAGTCGTGGCGTT (SEQ ID NO: 5541) |
| B07 | K303R_piece1R | CGCGCGGCCCAGCTCATCGCGCCCAGTCGTGGCGTT (SEQ ID NO: 5542) |
| B08 | E305G_piece1R | GCGGGACGCGCGGCCCAGGCCATCCTTCCCAGTCGT (SEQ ID NO: 5543) |
| B09 | R308S_piece1R | CTTACACAGGCGGGACGCAGAGCCCAGCTCATCCTT (SEQ ID NO: 5544) |
| B10 | K314E_piece1R | GCGACAGTACAACGCGTGTTCACACAGGCGGGACGC (SEQ ID NO: |
| | | 5545) |
| B11 | V328E_piece1R | GCGTAGTAAGTGGGAGGGCTCCTTGCCGTGCACACG (SEQ ID NO: 5546) |
| B12 | S330P_piece1R | CTTGGAGCGTAGTAAGTGGGGGGGAACCTTGCCGTG (SEQ ID NO: |
| | | 5547) |
| C01 | I337T_piece1R | GTACACGTTGGGCTTGGTGGTCTTGGAGCGTAGTAA (SEQ ID NO: 5548) |
| C02 | T338I_piece1R | ATGGTACACGTTGGGCTTAATAATCTTGGAGCGTAG (SEQ ID NO: 5549) |
| C03 | T338E_piece1R | ATGGTACACGTTGGGCTTCTCAATCTTGGAGCGTAG (SEQ ID NO: 5550) |
| C04 | H344R_piece1R | TGCCGCCAGCTTGGACTCCCTGTACACGTTGGGCTT (SEQ ID NO: 5551) |
| C05 | A350T_piece1R | GGCGGCCTGGTACTCCTTGGTCGCCAGCTTGGACTC (SEQ ID NO: 5552) |
| C06 | E352K_piece1R | CGCCTTGGCGGCCTGGTACTTCTTTGCCGCCAGCTT (SEQ ID NO: 5553) |
| C07 | A355V_piece1R | GAACAGACGCGCCTTGGCCACCTGGTACTCCTTTGC (SEQ ID NO: 5554) |
| C08 | R359G_piece1R | GATGAAGGCTGTGAACAGTCCCGCCTTGGCGGCCTG (SEQ ID NO: 5555) |
| C09 | R359M_piece1R | GATGAAGGCTGTGAACAGCATCGCCTTGGCGGCCTG (SEQ ID NO: 5556) |
| C10 | E378G_piece1R | GAGTGAGAACTGGTCCTGCCCGGTGGGCTTCTCCAC (SEQ ID NO: 5557) |
| C11 | Q381L_piece1R | TTACGTGAGTGAGAACAGGTCCTGCTCGGTGGG (SEQ ID NO: 5558) |
| C12 | | |
| D01 | | |
| D02 | | |
| D03 | | |
| D04 | | |
| D05 | | |
| D06 | | |
| D07 | | |
| D08 | | |
| D09 | | |
| D10 | | |
| D11 | | |
| D12 | | |
| E01 | D239E_piece2F | AGCCTTTACCACGGGGAACACCTTTCCAGGGCCATG (SEQ ID NO: 5559) |
| E02 | R243H_piece2F | GGGGACCACCTTTCCCACGCCATGTACCAGCGGATC (SEQ ID NO: 5560) |
| E03 | R243L_piece2F | GGGGACCACCTTTCCCTCGCCATGTACCAGCGGATC (SEQ ID NO: 5561) |
| E04 | R243G_piece2F | GGGGACCACCTTTCCGGGGCCATGTACCAGCGGATC (SEQ ID NO: 5562) |
| E05 | Y246H_piece2F | CTTTCCAGGGCCATGCACCAGCGGATCTCCAACATA (SEQ ID NO: 5563) |
| E06 | Q247H_piece2F | TCCAGGGCCATGTACCATCGGATCTCCAACATAGAG (SEQ ID NO: 5564) |
| E07 | R248S_piece2F | AGGGCCATGTACCAGTCTATCTCCAACATAGAGGAC (SEQ ID NO: 5565) |
| E08 | N251Y_piece2F | TACCAGCGGATCTCCTACATAGAGGACCTGCCACCT (SEQ ID NO: 5566) |
| E09 | S267F_piece2F | AACAAGCCTTTGCTCTTCGGCATCAGCAATGCAGAA (SEQ ID NO: 5567) |
| E10 | S270P_piece2F | TTGCTCAGTGGCATCCCAAATGCAGAAGCACGGCAG (SEQ ID NO: |
| | | 5568) |
| E11 | N282Y_piece2F | CCAGGGAAGGCCCCCTACTTCAGTGTCAACTGGACG (SEQ ID NO: 5569) |
| E12 | V285G_piece2F | GCCCCCAACTTCAGTGGCAACTGGACGGTAGGCGAC (SEQ ID NO: |
| | | 5570) |
| F01 | A293V_piece2F | ACGGTAGGCGACTCCGTAATTGAGGTCATCAACGCC (SEQ ID NO: 5571) |
| F02 | I294F_piece2F | GTAGGCGACTCCGCTTTTGAGGTCATCAACGCCACG (SEQ ID NO: 5572) |
| F03 | N298I_piece2F | GCTATTGAGGTCATCATCGCCACGACTGGGAAGGAT (SEQ ID NO: 5573) |
| F04 | T301S_piece2F | GTCATCAACGCCACGAGCGGGAAGGATGAGCTGGGC (SEQ ID NO: |
| | | 5574) |
| F05 | K303N_piece2F | AACGCCACGACTGGGAATGATGAGCTGGGCCGCGCG (SEQ ID NO: |
| | | 5575) |
| F06 | K303I_piece2F | AACGCCACGACTGGGATAGATGAGCTGGGCCGCGCG (SEQ ID NO: |
| | | 5576) |
| F07 | K303R_piece2F | AACGCCACGACTGGGCGCGATGAGCTGGGCCGCGCG (SEQ ID NO: |
| | | 5577) |
| F08 | E305G_piece2F | ACGACTGGGAAGGATGGCCTGGGCCGCGCGTCCCGC (SEQ ID NO: |
| | | 5578) |
| F09 | R308S_piece2F | AAGGATGAGCTGGGCTCTGCGTCCCGCCTGTGTAAG (SEQ ID NO: 5579) |
| F10 | K314E_piece2F | GCGTCCCGCCTGTGTGAACACGCGTTGTACTGTCGC (SEQ ID NO: 5580) |
| F11 | V328E_piece2F | CGTGTGCACGGCAAGGAGCCCTCCCACTTACTACGC (SEQ ID NO: 5581) |
| F12 | S330P_piece2F | CACGGCAAGGTTCCCCCCCACTTACTACGCTCCAAG (SEQ ID NO: 5582) |
| G01 | I337T_piece2F | TTACTACGCTCCAAGACCACCAAGCCCAACGTGTAC (SEQ ID NO: 5583) |
| G02 | T338I_piece2F | CTACGCTCCAAGATTATTAAGCCCAACGTGTACCAT (SEQ ID NO: 5584) |
| G03 | T338E_piece2F | CTACGCTCCAAGATTGAGAAGCCCAACGTGTACCAT (SEQ ID NO: 5585) |
| G04 | H344R_piece2F | AAGCCCAACGTGTACAGGGAGTCCAAGCTGGCGGCA (SEQ ID NO: |
| | | 5586) |
| G05 | A350T_piece2F | GAGTCCAAGCTGGCGACCAAGGAGTACCAGGCCGCC (SEQ ID NO: |
| | | 5587) |
| G06 | E352K_piece2F | AAGCTGGCGGCAAAGAAGTACCAGGCCGCCAAGGCG (SEQ ID NO: |
| | | 5588) |
| G07 | A355V_piece2F | GCAAAGGAGTACCAGGTGGCCAAGGCGCGTCTGTTC (SEQ ID NO: |
| | | 5589) |
| G08 | R359G_piece2F | CAGGCCGCCAAGGCGGGACTGTTCACAGCCTTCATC (SEQ ID NO: 5590) |
| G09 | R359M_piece2F | CAGGCCGCCAAGGCGATGCTGTTCACAGCCTTCATC (SEQ ID NO: 5591) |
| G10 | E378G_piece2F | GTGGAGAAGCCCACCGGGCAGGACCAGTTCTCACTC (SEQ ID NO: |
| | | 5592) |
| G11 | Q381L_piece2F | CCCACCGAGCAGGACCTGTTCTCACTCACGTAA (SEQ ID NO: 5593) |
| G12 | | |
| H01 | | |
| H02 | | |
| H03 | | |
| H04 | | |
| H05 | | |
| H06 | | |
| H07 | | |
| H08 | | |
| H09 | | |
| H10 | | |
| H11 | | |
| H12 | | |

Table 21-D

| Well | Name | Sequence |
|---|---|---|
| A01 | Q321H_piece1R | AGCGTCAGCTAAAACGTGCGGTAAATGCAGCTG (SEQ ID NO: 5594) |
| A02 | V322A_piece1R | GACAGCGTCAGCTAAGGCCTGCGGTAAATGCAG (SEQ ID NO: 5595) |
| A03 | V327I_piece1R | CAGGACCAGGCGTGAAATAGCGTCAGCTAAAAC (SEQ ID NO: 5596) |
| A04 | S328P_piece1R | ACCCAGGACCAGGCGTGGGACAGCGTCAGCTAA (SEQ ID NO: 5597) |
| A05 | T339M_piece1R | GGAGGAGAAGTTGTCCATCAGGTCACCAAACTT (SEQ ID NO: 5598) |
| A06 | P345L_pieceIR | TTTTCTGCGAGCGTGAAGGGAGGAGAAGTTGTC (SEQ ID NO: 5599) |
| A07 | V356G_piece1R | TGTGCCTGTTGTCATCCCGACTCCAGCCAGCAC (SEQ ID NO: 5600) |
| A08 | D365E_piece1R | ACTTATCACCTTGGCCTCTTTAACATCTGTGCC (SEQ ID NO: 5601) |
| A09 | I378F_piece1R | CATGTATTCACCATTGAAACATTTTGTTCCTGT (SEQ ID NO: 5602) |
| A10 | R386W_piece1R | ATTTAATGCAAGGCCCCAATCACTCATGTATTC (SEQ ID NO: 5603) |
| A11 | N391S_piece1R | TTCTGCATGGCAGTCGCTTAATGCAAGGCCACG (SEQ ID NO: 5604) |
| A12 | I397S_piece1R | GGATCTCCGAGATATGCTTTCTGCATGGCAGTC (SEQ ID NO: 5605) |
| B01 | L404M_piece1R | TGTATAAAGAAATCTCATCAAGGATCTCCGAGA (SEQ ID NO: 5606) |
| B02 | Q410R_piece1R | TAAGTAAAGCTCAAGGCGTGTATAAAGAAATCT (SEQ ID NO: 5607) |
| B03 | Y414H_piece1R | ATCTTTGTTATTTAAGTGAAGCTCAAGTTGTGT (SEQ ID NO: 5608) |
| B04 | Y414C_piece1R | ATCTTTGTTATTTAAGCAAAGCTCAAGTTGTGT (SEQ ID NO: 5609) |
| B05 | D419N_piece1R | GGATCTTTTTTGATCATTTTTGTTATTTAAGTA (SEQ ID NO: 5610) |
| B06 | R431H_piece1R | CAGCCTAAACCCCCCGTGCTCTGATTTCTGAAA (SEQ ID NO: 5611) |
| B07 | E438A_piece1R | ATGAAACTGGACATTAGCCTTCAGCCTAAACCC (SEQ ID NO: 5612) |
| B08 | F442L_piece1R | GCTGATGTACAGATGAAGCTGGACATTCTCCTT (SEQ ID NO: 5613) |
| B09 | T448I_piece1R | ATCTCCACAGGGAGAGATGCTGATGTACAGATG (SEQ ID NO: 5614) |
| B10 | F457I_piece1R | TGGCTCATGTGGTGAGATGATTCTGGCATCTCC (SEQ ID NO: 5615) |
| B11 | A468E_piece1R | ATTTGGGTGTCTATCTTCTGGTTCTTCCAGGAT (SEQ ID NO: 5616) |
| B12 | I484V_piece1R | CCCCTGACCAGACTCCACTTTGGTCCGTAGCTG (SEQ ID NO: 5617) |
| C01 | E485V_piece1R | CGTCCCCTGACCAGAGACTATTTTGGTCCGTAG (SEQ ID NO: 5618) |
| C02 | V505I_piece1R | CCGCTCCCCTTGCAGGATCCCGTCCCACGTTTG (SEQ ID NO: 5619) |
| C03 | E509V_piece1R | CATGGTGAGCAGCCGGACCCCTTGCAGCACCCC (SEQ ID NO: 5620) |
| C04 | C516F_piece1R | TGCAATCTTGTCACTGAAGGACATGGTGAGCAG (SEQ ID NO: 5621) |
| C05 | S517Y_piece1R | GCGTGCAATCTTGTCGTAGCAGGACATGGTGAG (SEQ ID NO: 5622) |
| C06 | L532I_piece1R | CACGAAAATGCTGAGGATTGATCCCTGGATGCC (SEQ ID NO: 5623) |
| C07 | I545N_piece1R | AAGGCTGCCCAGGATGTTGCTCGAGAAGTAAAT (SEQ ID NO: 5624) |
| C08 | S549T_piece1R | GTCCCCGTGGTAAAGAGTGCCCAGGATGATGCT (SEQ ID NO: 5625) |
| C09 | Y551N_piece1R | AAGGTGGTCCCCGTGGTTAAGGCTGCCCAGGAT (SEQ ID NO: 5626) |
| C10 | G553R_piece1R | CCTGGAAAGGTGGTCTCGGTGGTAAAGGCTGCC (SEQ ID NO: 5627) |
| C11 | G553E_piece1R | CCTGGAAAGGTGGTCCTCGTGGTAAAGGCTGCC (SEQ ID NO: 5628) |
| C12 | R563G_piece1R | CTCTATGTTGGAGATGCCCTGGTACATGGCCCT (SEQ ID NO: 5629) |
| D01 | I564F_piece1R | GTCCTCTATGTTGGAAAACCGCTGGTACATGGC (SEQ ID NO: 5630) |
| D02 | N566D_piece1R | TGGCAGGTCCTCTATGTCGGAGATCCGCTGGTA (SEQ ID NO: 5631) |
| D03 | A587V_piece1R | TGGCTGCCGTGCTTCCACATTGCTGATGCCACT (SEQ ID NO: 5632) |
| D04 | G593W_piece1R | GAAGTTGGGGGCCTTCCATGGCTGCCGTGCTTC (SEQ ID NO: 5633) |
| D05 | T603A_piece1R | AGCGGAGTCGCCTACTGCCCAGTTGACACTGAA (SEQ ID NO: 5634) |
| D06 | V611A_piece1R | AGTCGTGGCGTTGATAGCCTCAATAGCGGAGTC (SEQ ID NO: 5635) |
| D07 | A614G_piece1R | ATCCTTCCCAGTCGTCCCGTTGATGACCTCAAT (SEQ ID NO: 5636) |
| D08 | D619E_piece1R | CGCGCGGCCCAGGCCTTCCTTCCCAGTCGTGGC (SEQ ID NO: 5637) |
| D09 | R626K_piece1R | CGCGTGCTTACACAGCTTGGACGCGCGGCCCAG (SEQ ID NO: 5638) |
| D10 | C634W_piece1R | CACACGCATCCAGCGCCAGTACAACGCGTGCTT (SEQ ID NO: 5639) |
| D11 | I652V_piece1R | CACGTTGGGCTTGGTAACCTTGGAGCGTAGTAA (SEQ ID NO: 5640) |
| D12 | Q696H_piece1R | TTACGTGAGTGAGAAATGGTCCTGCTCGGTGGG (SEQ ID NO: 5641) |
| E01 | Q321H_piece2F | CAGCTGCATTTACCGCACGTTTTAGCTGACGCT (SEQ ID NO: 5642) |
| E02 | V322A_piece2F | CTGCATTTACCGCAGGCCTTAGCTGACGCTGTC (SEQ ID NO: 5643) |
| E03 | V327I_piece2F | GTTTTAGCTGACGCTATTTCACGCCTGGTCCTG (SEQ ID NO: 5644) |
| E04 | S328P_piece2F | TTAGCTGACGCTGTCCCACGCCTGGTCCTGGGT (SEQ ID NO: 5645) |
| E05 | T339M_piece2F | AAGTTTGGTGACCTGATGGACAACTTCTCCTCC (SEQ ID NO: 5646) |
| E06 | P345L_piece2F | GACAACTTCTCCTCCCTTCACGCTCGCAGAAAA (SEQ ID NO: 5647) |
| E07 | V356G_piece2F | GTGCTGGCTGGAGTCGGGATGACAACAGGCACA (SEQ ID NO: 5648) |
| E08 | D365E_piece2F | GGCACAGATGTTAAAGAGGCCAAGGTGATAAGT (SEQ ID NO: 5649) |
| E09 | I378F_piece2F | ACAGGAACAAAATGTTTCAATGGTGAATACATG (SEQ ID NO: 5650) |
| E10 | R386W_piece2F | GAATACATGAGTGATTGGGGCCTTGCATTAAAT (SEQ ID NO: 5651) |
| E11 | N391S_piece2F | CGTGGCCTTGCATTAAGCGACTGCCATGCAGAA (SEQ ID NO: 5652) |
| E12 | I397S_piece2F | GACTGCCATGCAGAAAGCATATCTCGGAGATCC (SEQ ID NO: 5653) |
| F01 | L404M_piece2F | TCTCGGAGATCCTTGATGAGATTTCTTTATACA (SEQ ID NO: 5654) |
| F02 | Q410R_piece2F | AGATTTCTTTATACACGCCTTGAGCTTTACTTA (SEQ ID NO: 5655) |
| F03 | Y414H_piece2F | ACACAACTTGAGCTTCACTTAAATAACAAAGAT (SEQ ID NO: 5656) |
| F04 | Y414C_piece2F | ACACAACTTGAGCTTTGCTTAAATAACAAAGAT (SEQ ID NO: 5657) |
| F05 | D419N_piece2F | TACTTAAATAACAAAAATGATCAAAAAAGATCC (SEQ ID NO: 5658) |
| F06 | R431H_piece2F | TTTCAGAAATCAGAGCACGGGGGGTTTAGGCTG (SEQ ID NO: 5659) |
| F07 | E438A_piece2F | GGGTTTAGGCTGAAGGCTAATGTCCAGTTTCAT (SEQ ID NO: 5660) |
| F08 | F442L_piece2F | AAGGAGAATGTCCAGCTTCATCTGTACATCAGC (SEQ ID NO: 5661) |
| F09 | T448I_piece2F | CATCTGTACATCAGCATCTCTCCCTGTGGAGAT (SEQ ID NO: 5662) |
| F10 | F457I_piece2F | GGAGATGCCAGAATCATCTCACCACATGAGCCA (SEQ ID NO: 5663) |
| F11 | A468E_piece2F | ATCCTGGAAGAACCAGAAGATAGACACCCAAAT (SEQ ID NO: 5664) |
| F12 | I484V_piece2F | CAGCTACGGACCAAAGTGGAGTCTGGTCAGGGG (SEQ ID NO: 5665) |
| G01 | E485V_piece2F | CTACGGACCAAAATAGTCTCTGGTCAGGGGACG (SEQ ID NO: 5666) |
| G02 | V505I_piece2F | CAAACGTGGGACGGGATCCTGCAAGGGGAGCGG (SEQ ID NO: 5667) |
| G03 | E509V_piece2F | GGGGTGCTGCAAGGGGTCCGGCTGCTCACCATG (SEQ ID NO: 5668) |
| G04 | C516F_piece2F | CTGCTCACCATGTCCTTCAGTGACAAGATTGCA (SEQ ID NO: 5669) |
| G05 | S517Y_piece2F | CTCACCATGTCCTGCTACGACAAGATTGCACGC (SEQ ID NO: 5670) |
| G06 | L532I_piece2F | GGCATCCAGGGATCAATCCTCAGCATTTTCGTG (SEQ ID NO: 5671) |
| G07 | I545N_piece2F | ATTTACTTCTCGAGCAACATCCTGGGCAGCCTT (SEQ ID NO: 5672) |
| G08 | S549T_piece2F | AGCATCATCCTGGGCACTCTTTACCACGGGGAC (SEQ ID NO: 5673) |
| G09 | Y551N_piece2F | ATCCTGGGCAGCCTTAACCACGGGGACCACCTT (SEQ ID NO: 5674) |
| G10 | G553R_piece2F | GGCAGCCTTTACCACCGAGACCACCTTTCCAGG (SEQ ID NO: 5675) |
| G11 | G553E_piece2F | GGCAGCCTTTACCACGAGGACCACCTTTCCAGG (SEQ ID NO: 5676) |
| G12 | R563G_piece2F | AGGGCCATGTACCAGGGCATCTCCAACATAGAG (SEQ ID NO: 5677) |
| H1 | I564F_piece2F | GCCATGTACCAGCGGTTTTCCAACATAGAGGAC (SEQ ID NO: 5678) |
| H2 | N566D_piece2F | TACCAGCGGATCTCCGACATAGAGGACCTGCCA (SEQ ID NO: 5679) |
| H3 | A587V_piece2F | AGTGGCATCAGCAATGTGGAAGCACGGCAGCCA (SEQ ID NO: 5680) |
| H4 | G593W_piece2F | GAAGCACGGCAGCCATGGAAGGCCCCCAACTTC (SEQ ID NO: 5681) |
| H5 | T603A_piece2F | TTCAGTGTCAACTGGGCAGTAGGCGACTCCGCT (SEQ ID NO: 5682) |
| H6 | V611A_piece2F | GACTCCGCTATTGAGGCTATCAACGCCACGACT (SEQ ID NO: 5683) |
| H7 | A614G_piece2F | ATTGAGGTCATCAACGGGACGACTGGGAAGGAT (SEQ ID NO: 5684) |
| H8 | D619E_piece2F | GCCACGACTGGGAAGGAAGGCCTGGGCCGCGCG (SEQ ID NO: 5685) |
| H9 | R626K_piece2F | CTGGGCCGCGCGTCCAAGCTGTGTAAGCACGCG (SEQ ID NO: 5686) |
| H10 | C634W_piece2F | AAGCACGCGTTGTACTGGCGCTGGATGCGTGTG (SEQ ID NO: 5687) |
| H11 | I652V_piece2F | TTACTACGCTCCAAGGTTACCAAGCCCAACGTG (SEQ ID NO: 5688) |
| H12 | Q696H_piece2F | CCCACCGAGCAGGACCATTTCTCACTCACGTAA (SEQ ID NO: 5689) |

TABLE 22
Next-generation sequencing library preparation first round PCR primers
for PFS screen

| Name | Sequence |
|---|---|
| PFS_NGS_F1 | CTTTCCCTACACGACGCTCTTCCGATCTCGCTAGCTCAGTCCTAGGTATAATGCTAGC |
| | (SEQ ID NO: 5690) |
| PFS_NGS_F1 | CTTTCCCTACACGACGCTCTTCCGATCTACGCTAGCTCAGTCCTAGGTATAATGCTAGC |
| | (SEQ ID NO: 5691) |
| PFS_NGS_F1 | CTTTCCCTACACGACGCTCTTCCGATCTGACGCTAGCTCAGTCCTAGGTATAATGCTAGC |
| | (SEQ ID NO: 5692) |
| PFS_NGS_F1 | CTTTCCCTACACGACGCTCTTCCGATCTTGACGCTAGCTCAGTCCTAGGTATAATGCTAGC |
| | (SEQ ID NO: 5693) |
| Cas13b- | GACTGGAGTTCAGACGTGTGCTCTTCCGATCTCCACAAATCGGAGGCTTCTTCAGC |
| t1_PFS_NGS_R | (SEQ ID NO: 5694) |
| Cas13b- | GACTGGAGTTCAGACGTGTGCTCTTCCGATCTCAAATCGGGGGCTTCTCCAGC |
| t2_PFS_NGS_R | (SEQ ID NO: 5695) |
| Cas13b- | GACTGGAGTTCAGACGTGTGCTCTTCCGATCTATCGGGGGCTGCTCCAGC |
| t3_PFS_NGS_R | (SEQ ID NO: 5696) |
| Cas13b- | GACTGGAGTTCAGACGTGTGCTCTTCCGATCTCCACAAATTGAGGCCCATCACAGC |
| t4_PFS_NGS_R | (SEQ ID NO: 5697) |
| Cas13b- | GACTGGAGTTCAGACGTGTGCTCTTCCGATCTCAAATCGAGGGCTGCTCCAGC |
| t5_PFS_NGS_R | (SEQ ID NO: 5698) |

TABLE 23
gRNA spacer sequences for Gaussia luciferase knockdown in
HEK293FT cells. Relative expression is as measured by depletion of luciferase activity
compared to a GFP control.

| | | Bt1 relative | Bt3 relative | Bt5 relative |
|---|---|---|---|---|
| | | expression | expression | expression |
| Name | Spacer sequence | (FIG. 1g) | (FIG. 1g) | (FIG. 1g) |
| Gaussia luciferase spacer | TTTGTCGCCTTCGTAGGTGTGGC | 0.55062748 | 0.38468809 | 0.3397597 |
| 1 | AGCGTCC (SEQ ID NO: 5699) | | | |
| Gaussia luciferase spacer | CCAGGAATCTCAGGAATGTCGAC | 0.5538685 | 0.35529333 | 0.44593268 |
| 2 | GATCGCC (SEQ ID NO: 5700) | | | |
| Gaussia luciferase spacer | GTCGACGATCGCCTCGCCTATGC | 0.38844716 | 0.29975324 | 0.45171626 |
| 3 | CGCCCTG (SEQ ID NO: 5701) | | | |
| Gaussia luciferase spacer | CGATGAACTGCTCCATGGGCTCC | 0.74248373 | 0.7076885 | 0.62729858 |
| 4 | AAGTCCT (SEQ ID NO: 5702) | | | |
| Gaussia luciferase spacer | TCGCGAAGTTGCTGGCCACGGCC | 0.48985892 | 0.56514571 | 0.34100497 |
| 5 | ACGATGT (SEQ ID NO: 5703) | | | |
| Gaussia luciferase spacer | CAGCCCCTGGTGCAGCCAGCTTT | 0.73143084 | 0.45223832 | 0.59533757 |
| 6 | CCGGGCA (SEQ ID NO: 5704) | | | |
| Gaussia luciferase spacer | GGCCCCCTTGATCTTGTCCACCT | 0.51439053 | 0.21018064 | 0.37180078 |
| 7 | GGCCCTG (SEQ ID NO: 5705) | | | |
| Gaussia luciferase spacer | GATGTGGGACAGGCAGATCAGA | 0.65183105 | 0.46064806 | 0.51302536 |
| 8 | CAGCCCCT (SEQ ID NO: 5706) | | | |
| Gaussia luciferase spacer | CGTTGCGGCAGCCACTTCTTGAG | 0.42079237 | 0.26868947 | 0.35726081 |
| 9 | CAGGTCA (SEQ ID NO: 5707) | | | |
| Gaussia luciferase spacer | TGTCGACGATCGCCTCGCCTATG | 0.63580411 | 0.30643568 | 0.36228356 |
| 10 | CCGCCCT (SEQ ID NO: 5708) | | | |
| Gaussia luciferase spacer | CTCGGCCACAGCGATGCAGATCA | 0.57120708 | 0.42967329 | 0.31493639 |
| 11 | GGGCAAA (SEQ ID NO: 5709) | | | |
| Gaussia luciferase spacer | CCTTGAACCCAGGAATCTCAGGA | 0.58010478 | 0.27618297 | 0.4351957 |
| 12 | ATGTCGA (SEQ ID NO: 5710) | | | |
| Gaussia luciferase spacer | CCGGGCATTGGCTTCCATCTCTT | 0.57770913 | 0.33286417 | 0.30132433 |
| 13 | TGAGCAC (SEQ ID NO: 5711) | | | |
| Gaussia luciferase spacer | ACAGGCAGATCAGACAGCCCCT | 0.77305496 | 0.54830739 | 0.69564972 |
| 14 | GGTGCAGC (SEQ ID NO: 5712) | | | |
| Gaussia luciferase spacer | GTCACCACCGGCCCCCTTGATCT | 0.74591779 | 0.65311879 | 0.65571849 |
| 15 | TGTCCAC (SEQ ID NO: 5713) | | | |
| Gaussia luciferase spacer | CTTGATGTGGGACAGGCAGATCA | 0.62758078 | 0.47392894 | 0.43519874 |
| 16 | GACAGCC (SEQ ID NO: 5714) | | | |
| Gaussia luciferase spacer | CTGGCCCTGGATCTTGCTGGCAA | 0.4753283 | 0.18260215 | 0.32822212 |
| 17 | AGGTCGC (SEQ ID NO: 5715) | | | |
| Gaussia luciferase spacer | GGGCTCCAAGTCCTTGAACCCAG | 0.60092434 | 0.3810874 | 0.42402921 |
| 18 | GAATCTC (SEQ ID NO: 5716) | | | |
| Gaussia luciferase spacer | ATGAACTGCTCCATGGGCTCCAA | 0.5442858 | 0.28338889 | 0.55534371 |
| 19 | GTCCTTG (SEQ ID NO: 5717) | | | |
| Gaussia luciferase spacer | TCGAGATCCGTGGTCGCGAAGTT | 0.48568996 | 0.35394464 | 0.36567816 |
| 20 | GCTGGCC (SEQ ID NO: 5718) | | | |
| Non-targeting spacer 1 | CCTCTGAAACGATGGTGCATGGT | 0.71872993 | 0.76013732 | 0.65806897 |
| | AGTGACC (SEQ ID NO: 5719) | | | |
| Non-targeting spacer 2 | CCTACAGGTTCTGAGTGGGTGCA | 0.85589957 | 0.70637393 | 0.70777278 |
| | CGGCCGT (SEQ ID NO: 5720) | | | |
| Non-targeting spacer 3 | GAAAATGGCCTATACCTTAGGGT | 0.78372124 | 0.72463671 | 0.71052405 |
| | TCGCGCG (SEQ ID NO: 5721) | | | |
| Non-targeting spacer 4 | GTAATGCCTGGCTTGTCGACGCA | 0.7999484 | 0.72841838 | 0.72973389 |
| | TAGTCTG (SEQ ID NO: 5722) | | | |
| Gaussia luciferase guide 1 | GGGCATTGGCTTCCATCTCTTTG | | | |
| (Supplementary FIG. 2) | AGCACCT (SEQ ID NO: 5723) | | | |
| Gaussia luciferase guide 2 | GGAATGTCGACGATCGCCTCGCC | | | |
| (Supplementary FIG. 2) | TATGCCG (SEQ ID NO: 5724) | | | |

TABLE 24
gRNA spacer sequences for endogenous transcript knockdown in
HEK293FT cells. Relative expression is as measured by qPCR as compared to GFP control.

| | | Bt1 relative | Bt3 relative |
|---|---|---|---|
| | | expression | expression |
| Name | Spacer sequence | (FIG. 1h) | (FIG. 1h) |
| CXCR4 spacer 1 | AGAGGTTGACTGTGTAGATGACATGGACTG | 0.4891226 | 0.43242082 |
| | (SEQ ID NO: 5725) | | |
| CXCR4 spacer 2 | GACAGGTGCAGCCTGTACTTGTCCGTCATG | 0.52526336 | 0.4274336 |
| | (SEQ ID NO: 5726) | | |
| CXCR4 spacer 3 | AAAGAGGAGGTCGGCCACTGACAGGTGCAG | 0.55379783 | 0.4922889 |
| | (SEQ ID NO: 5727) | | |
| STAT1 spacer 1 | CAGGAAGAAGGACAGATTCCTGGGTTCCGC | 0.1702036 | 0.26428803 |
| | (SEQ ID NO: 5728) | | |
| STAT1 spacer 2 | CCCAACATGTTCAGCTGGTCCACATTGAGA | 0.19275451 | 0.28221787 |
| | (SEQ ID NO: 5729) | | |
| STAT1 spacer 3 | ATTGAGACCTCTTTTGGTGACAGAAGAAAA | 0.32015 | 0.36930278 |
| | (SEQ ID NO: 5730) | | |
| STAT3 spacer 1 | GCAGCTCCTCAGTCACAATCAGGGAAGCAT | 0.54048912 | 0.43548581 |
| | (SEQ ID NO: 5731) | | |
| STAT3 spacer 2 | CGGTCTCAAAGGTGATCAGGTGCAGCTCCT | 0.61276978 | 0.49713932 |
| | (SEQ ID NO: 5732) | | |
| STAT3 spacer 3 | CTCGGTCTCAAAGGTGATCAGGTGCAGCTC | 0.5595753 | 0.4890901 |
| | (SEQ ID NO: 5733) | | |
| HRAS spacer 1 | GCGTGCAGCCAGGTCACACTTGTTCCCCAC | 0.43228711 | 0.40269921 |
| | (SEQ ID NO: 5734) | | |
| HRAS spacer 2 | GAGCCTGCCGAGATTCCACAGTGCGTGCAG | 0.84377946 | 0.35728849 |
| | (SEQ ID NO: 5735) | | |
| HRAS spacer 3 | AGTGCGTGCAGCCAGGTCACACTTGTTCCC | 0.49958394 | 0.47062756 |
| | (SEQ ID NO: 5736) | | |
| PPIB spacer 1 | CTGTCTTGGTGCTCTCCACCTTCCGCACCA | 0.47982775 | 0.42696786 |
| | (SEQ ID NO: 5737) | | |
| PPIB spacer 2 | GGGAGCCGTTGGTGTCTTTGCCTGCGTTGG | 0.33558372 | 0.33160707 |
| | (SEQ ID NO: 5738) | | |
| PPIB spacer 3 | CGTAGATGCTCTTTCCTCCTGTGCCATCTC | 0.36443656 | 0.3902864 |
| | (SEQ ID NO: 5739) | | |

TABLE 25
TaqMan probes used for qPCR

| Gene | TaqMan assay ID |
|---|---|
| CXCR4 | Hs00607978_s1 |
| STAT1 | Hs01013996_m1 |
| STAT3 | Hs00374280_m1 |
| HRAS | Hs00978050_g1 |
| PPIB | Hs00168719_m1 |
| GAPDH | Hs99999905_m1 |

TABLE 26
gRNA spacer sequences for Cypridina luciferase W85X reporter RNA
editing. Mismatch is denoted by lower case.

| | | | Cas13b-t1 | Cas13b-t3 |
|---|---|---|---|---|
| | Mismatch | | normalized RLU | normalized RLU |
| Site | distance | Spacer sequence | (FIG. 20B) | (FIG. 20B) |
| Cypridina | 2 | GAATCTCTTTCCATAGAATGTTCTAAACcA | 0.01260676 | 0.00488241 |
| luciferase | | (SEQ ID NO: 5740) | | |
| X95W | 4 | ATCTCTTTCCATAGAATGTTCTAAACcATC | 0.0085265 | 0.01001933 |
| | | (SEQ ID NO: 5741) | | |
| | 6 | CTCTTTCCATAGAATGTTCTAAACCATCCT | 0.01200875 | 0.00755633 |
| | | (SEQ ID NO: 5742) | | |
| | 8 | CTTTCCATAGAATGTTCTAAACCATCCTGC | 0,05522275 | 0.01003733 |
| | | (SEQ ID NO: 5743) | | |
| | 10 | TTCCATAGAATGTTCTAAACCATCCTGCGG | 0.079744 | 0.01706967 |
| | | (SEQ ID NO: 5744) | | |
| | 12 | CCATAGAATGTTCTAAACCATCCTGCGGCC | 0.085725 | 0.05851067 |
| | | (SEQ ID NO: 5745) | | |
| | 14 | ATAGAATGTTCTAAACCATCCTGCGGCCTC | 0.14881 | 0.05986233 |
| | | (SEQ ID NO: 5746) | | |
| | 16 | AGAATGTTCTAAACCATCCTGCGGCCTCTA | 0.1930325 | 0.06880567 |
| | | (SEQ ID NO: 5747) | | |
| | 18 | AATGTTCTAAACCATCCTGCGGCCTCTACT | 0.93053875 | 0.573424 |
| | | (SEQ ID NO: 5748) | | |
| | 20 | TGTTCTAAACcATCCTGCGGCCTCTACTCT | 0.99714725 | 0.69095267 |
| | | (SEQ ID NO: 5749) | | |
| | 22 | TTCTAAACCATCCTGCGGCCTCTACTCTGC | 1.028434 | 0.80134633 |
| | | (SEQ ID NO: 5750) | | |
| | 24 | CTAAACCATCCTGCGGCCTCTACTCTGCAT | 0.49195525 | 0.27232267 |
| | | (SEQ ID NO: 5751) | | |
| | 26 | AAACcATCCTGCGGCCTCTACTCTGCATTC | 0.35265576 | 0.36477816 |
| | | (SEQ ID NO: 5752) | | |
| | 28 | ACcATCCTGCGGCCTCTACTCTGCATTCAA | 0.59331175 | 0.36037733 |
| | | (SEQ ID NO: 5753) | | |
| | 30 | cATCCTGCGGCCTCTACTCTGCATTCAATT | 0.01181 | 0.00410067 |
| | | (SEQ ID NO: 5754) | | |
| Non- | | GTAATGCCTGGCTTGTCGACGCATAGTCTG | 0.007946 | 0.003682 |
| targeting | | (SEQ ID NO: 5755) | | |

Table 27
Optimal gRNA spacer sequences for RNA editing of endogenous
transcripts. Mismatch is denoted by lower case.

| | Mismatch | | Editing | Cas13b-t1 editing |
|---|---|---|---|---|
| Site | distance | Spacer sequence | system | rate (FIG. 20C) |
| STAT1 | 22 | TCTTGATAcATCCAGTTCCTTTAGGGCCAT | REPAIR | 0.2551795 |
| Y701C | | (SEQ ID NO: 5756) | | |
| STAT3 | 20 | GGTCTTCAGGCATGGGGCAGCGCTACCTGG | REPAIR | 0.21902363 |
| Y705C | | (SEQ ID NO: 5757) | | |
| LATS1 | 22 | TCGGAAGGCAAATTCATAGAATGCATGTTC | REPAIR | 0.20295815 |
| T1079A | | (SEQ ID NO: 5758) | | |
| CTNNB1 | 22 | AGCTGTGGCAGTGGCACCAGAATGGATTCC | REPAIR | 0.39486936 |
| T41A | | (SEQ ID NO: 5759) | | |
| Gaussia | 14 | TTCATCTTGGGCGTGCCATTGATGTGGGAC | RESCUE | 0.47878881 |
| luciferase | | (SEQ ID NO: 5760) | | |
| C82R | | | | |
| CTNNB1 | 22 | GAGCTGTGITAGTGGCACCAGAATGGATTC | RESCUE | 0.03803724 |
| T41I | | (SEQ ID NO: 5761) | | |
| KRAS D30D | 20 | GATCATATTCITCCACAAAATGATTCTGAA | RESCUE | 0.06281841 |
| | | (SEQ ID NO: 5762) | | |
| KRAS L56L | 22 | GCTGTGTCAGAATATCCAAGAGACAGGTT | RESCUE | 0.04002 |
| | | (SEQ ID NO: 5763) | | |

TABLE 28
Gene-specific reverse transcription primers

| Gene | RT primer sequence |
|---|---|
| Cypridina luciferase | TTTGCATTCATCTGGTACTTCTAGGGTGTC (SEQ ID NO: 5764) |
| STAT1 | TTCATCATACTGTCGAATTCTACAGAGCCC (SEQ ID NO: 5765) |
| CTNNB1 | TTACAGGTCAGTATCAAACCAGGCCAG (SEQ ID NO: 5766) |
| STAT3 | TTTCTGCAGCTTCCGTTCTCAGCTCCTCAC (SEQ ID NO: 5767) |
| LATS1 | TACTAGATCGCGATTTTTAATCTCTGAGCC (SEQ ID NO: 5768) |
| Gaussia luciferase | TTGTCCACCTGGCCCTGGATC (SEQ ID NO: 5769) |
| KRAS | TCATCAACACCCTGTCTTGTCTTTGCT (SEQ ID NO: 5770) |

TABLE 29
Priming sequences for site-specific amplification of RNA editing target
sites

| Editing site | Forward priming sequence | Reverse priming sequence |
|---|---|---|
| Cypridina luciferase | TAAACCAGGAAAAACATGTTGCC | CGCCCTTGGTTCCTTGACCC |
| X85W | (SEQ ID NO: 5771) | (SEQ ID NO: 5772) |
| STAT1 Y701C | AGGAAGCACCAGAGCCAATGGA | GGGGAGCAGGTTGTCTGTGGT |
| | (SEQ ID NO: 5773) | (SEQ ID NO: 5774) |
| CTNNB1 T41A/T41I | CTGATTTGATGGAGTTGGACATGGC | GTATCCACATCCTCTTCCTCAGGAT |
| | C | TGC (SEQ ID NO: 5776) |
| | (SEQ ID NO: 5775) | |
| STAT3 Y705C | CAGAGAGCCAGGAGCATCCTGA | TCTAAAGTGCGGGGGGACATCG |
| | (SEQ ID NO: 5777) | (SEQ ID NO: 5778) |
| LATS1 T1079A | GGAAAGCATCCTGAACATGCATTC | CGACTGCTGCTCTGAGCCTTG |
| | (SEQ ID NO: 5779) | (SEQ ID NO: 5780) |
| Gaussia luciferase | GCCAATGCCCGGAAAGCTGG | GGACTCTTTGTCGCCTTCGTAGGTG |
| C82R | (SEQ ID NO: 5781) | (SEQ ID NO: 5782) |
| KRAS D30D | AGAGAGGCCTGCTGAAAATGACTG | GAGAATATCCAAGAGACAGGTTTC |
| | (SEQ ID NO: 5783) | TCCATCA (SEQ ID NO: 5784) |
| KRAS L56L | TGGACGAATATGATCCAACAATAG | CTCATGTACTGGTCCCTCATTGCAC |
| | AGGATTC (SEQ ID NO: 5785) | TG (SEQ ID NO: 5786) |
| Illumina adapters | CTTTCCCTACACGACGCTCTTCCGA | GTTCAGACGTGTGCTCTTCCGATCT |
| | TCT (SEQ ID NO: 5787) | (SEQ ID NO: 5788) |

TABLE 30
Next-generation library preparation primers for sequencing of selected
ADAR2dd mutants

| Well | | |
|---|---|---|
| Position | Name | Sequence |
| A1 | Primer set | TCCCTACACGACGCTCTTCCGATCTCgatcGGGGGTTCCGGCggGtcc |
| | 1_Fwd_1 | (SEQ ID NO: 5789) |
| A2 | Primer set | TCCCTACACGACGCTCTTCCGATCTACgatcGGGGGTTCCGGCggGtcc |
| | 1_Fwd_2 | (SEQ ID NO: 5790) |
| A3 | Primer set | TCCCTACACGACGCTCTTCCGATCTGACgatcGGGGGTTCCGGCggGtcc |
| | 1_Fwd_3 | (SEQ ID NO: 5791) |
| A4 | Primer set | TCCCTACACGACGCTCTTCCGATCTTGACgatcGGGGGTTCCGGCggGtcc |
| | 1_Fwd_4 | (SEQ ID NO: 5792) |
| A5 | Primer set | TCCCTACACGACGCTCTTCCGATCTCTGACgatcGGGGGTTCCGGCggGtcc |
| | 1_Fwd_5 | (SEQ ID NO: 5793) |
| A6 | Primer set | TCCCTACACGACGCTCTTCCGATCTACTGACgatcGGGGGTTCCGGCggGtcc |
| | 1_Fwd_6 | (SEQ ID NO: 5794) |
| A7 | Primer set | TCCCTACACGACGCTCTTCCGATCTTACTGACgatcGGGGGTTCCGGCggGtcc |
| | 1_Fwd_7 | (SEQ ID NO: 5795) |
| A8 | Primer set | TCCCTACACGACGCTCTTCCGATCTGTACTGACgatcGGGGGTTCCGGCggGtcc |
| | 1_Fwd_8 | (SEQ ID NO: 5796) |
| B1 | Primer set | TCCCTACACGACGCTCTTCCGATCTCCGGGAACCAAATGCATTAACGGCGAA |
| | 2_Fwd_1 | (SEQ ID NO: 5797) |
| B2 | Primer set | TCCCTACACGACGCTCTTCCGATCTACCGGGAACCAAATGCATTAACGGCGA |
| | 2_Fwd_2 | (SEQ ID NO: 5798)A |
| B3 | Primer set | TCCCTACACGACGCTCTTCCGATCTGACCGGGAACCAAATGCATTAACGGCGA |
| | 2_Fwd_3 | A (SEQ ID NO: 5799) |
| B4 | Primer set | TCCCTACACGACGCTCTTCCGATCTTGACCGGGAACCAAATGCATTAACGGCG |
| | 2_Fwd_4 | AA (SEQ ID NO: 5800) |
| B5 | Primer set | TCCCTACACGACGCTCTTCCGATCTCTGACCGGGAACCAAATGCATTAACGGC |
| | 2_Fwd_5 | GAA (SEQ ID NO: 5801) |
| B6 | Primer set | TCCCTACACGACGCTCTTCCGATCTACTGACCGGGAACCAAATGCATTAACGG |
| | 2_Fwd_6 | CGAA (SEQ ID NO: 5802) |
| B7 | Primer set | TCCCTACACGACGCTCTTCCGATCTTACTGACCGGGAACCAAATGCATTAACG |
| | 2_Fwd_7 | GCGAA (SEQ ID NO: 5803) |
| B8 | Primer set | TCCCTACACGACGCTCTTCCGATCTGTACTGACCGGGAACCAAATGCATTAAC |
| | 2_Fwd_8 | GGCGAA (SEQ ID NO: 5804) |
| C1 | Primer set | TCCCTACACGACGCTCTTCCGATCTCCAATTCCACCTGTACATCTCCACATCA |
| | 3_Fwd_1 | (SEQ ID NO: 5805) |
| C2 | Primer set | TCCCTACACGACGCTCTTCCGATCTACCAATTCCACCTGTACATCTCCACATCA |
| | 3_Fwd_2 | (SEQ ID NO: 5806) |
| C3 | Primer set | TCCCTACACGACGCTCTTCCGATCTGACCAATTCCACCTGTACATCTCCACATC |
| | 3_Fwd_3 | A (SEQ ID NO: 5807) |
| C4 | Primer set | TCCCTACACGACGCTCTTCCGATCTTGACCAATTCCACCTGTACATCTCCACAT |
| | 3_Fwd_4 | CA (SEQ ID NO: 5808) |
| C5 | Primer set | TCCCTACACGACGCTCTTCCGATCTCTGACCAATTCCACCTGTACATCTCCACA |
| | 3_Fwd_5 | TCA (SEQ ID NO: 5809) |
| C6 | Primer set | TCCCTACACGACGCTCTTCCGATCTACTGACCAATTCCACCTGTACATCTCCAC |
| | 3_Fwd_6 | ATCA (SEQ ID NO: 5810) |
| C7 | Primer set | TCCCTACACGACGCTCTTCCGATCTTACTGACCAATTCCACCTGTACATCTCCA |
| | 3_Fwd_7 | CATCA (SEQ ID NO: 5811) |
| C8 | Primer set | TCCCTACACGACGCTCTTCCGATCTGTACTGACCAATTCCACCTGTACATCTCC |
| | 3_Fwd_8 | ACATCA (SEQ ID NO: 5812) |
| D1 | Primer set | TCCCTACACGACGCTCTTCCGATCTCCAGGGCGAAAGATTACTAACGATGAGC |
| | 4_Fwd_1 | (SEQ ID NO: 5813) |
| D2 | Primer set | TCCCTACACGACGCTCTTCCGATCTACCAGGGCGAAAGATTACTAACGATGAG |
| | 4_Fwd_2 | C |
| | | (SEQ ID NO: 5814) |
| D3 | Primer set | TCCCTACACGACGCTCTTCCGATCTGACCAGGGCGAAAGATTACTAACGATGA |
| | 4_Fwd_3 | GC |
| | | (SEQ ID NO: 5815) |
| D4 | Primer set | TCCCTACACGACGCTCTTCCGATCTTGACCAGGGCGAAAGATTACTAACGATG |
| | 4_Fwd_4 | AGC (SE QID NO: 5816) |
| D5 | Primer set | TCCCTACACGACGCTCTTCCGATCTCTGACCAGGGCGAAAGATTACTAACGAT |
| | 4_Fwd_5 | GAGC (SEQ ID NO: 5817) |
| D6 | Primer set | TCCCTACACGACGCTCTTCCGATCTACTGACCAGGGCGAAAGATTACTAACGA |
| | 4_Fwd_6 | TGAGC (SEQ ID NO: 5818) |
| D7 | Primer set | TCCCTACACGACGCTCTTCCGATCTTACTGACCAGGGCGAAAGATTACTAACG |
| | 4_Fwd_7 | ATGAGC (SEQ ID NO: 5819) |
| D8 | Primer set | TCCCTACACGACGCTCTTCCGATCTGTACTGACCAGGGCGAAAGATTACTAAC |
| | 4_Fwd_8 | GATGAGC (SEQ ID NO: 5820) |
| E1 | Primer set | TCCCTACACGACGCTCTTCCGATCTCCCCCCGTTGTACACTCTTAACAAACCA |
| | 5_Fwd_1 | (SEQ ID NO: 5821) |
| E2 | Primer set | TCCCTACACGACGCTCTTCCGATCTACCCCCCGTTGTACACTCTTAACAAACCA |
| | 5_Fwd_2 | (SEQ ID NO: 5822) |
| E3 | Primer set | TCCCTACACGACGCTCTTCCGATCTGACCCCCCGTTGTACACTCTTAACAAACC |
| | 5_Fwd_3 | A |
| | | (SEQ ID NO: 5823) |
| E4 | Primer set | TCCCTACACGACGCTCTTCCGATCTTGACCCCCCGTTGTACACTCTTAACAAAC |
| | 5_Fwd_4 | CA |
| | | (SEQ ID NO: 5824) |
| E5 | Primer set | TCCCTACACGACGCTCTTCCGATCTCTGACCCCCCGTTGTACACTCTTAACAAA |
| | 5_Fwd_5 | CCA (SEQ ID NO: 5825) |
| E6 | Primer set | TCCCTACACGACGCTCTTCCGATCTACTGACCCCCCGTTGTACACTCTTAACAA |
| | 5_Fwd_6 | ACCA (SEQ ID NO: 5826) |
| E7 | Primer set | TCCCTACACGACGCTCTTCCGATCTTACTGACCCCCCGTTGTACACTCTTAACA |
| | 5_Fwd_7 | AACCA (SEQ ID NO: 5827) |
| E8 | Primer set | TCCCTACACGACGCTCTTCCGATCTGTACTGACCCCCCGTTGTACACTCTTAAC |
| | 5_Fwd_8 | AAACCA (SEQ ID NO: 5828) |
| F1 | Primer set | TCCCTACACGACGCTCTTCCGATCTCAAGCACGCCTTATACTGCAGATGGATG |
| | 6_Fwd_1 | (SEQ ID NO: 5829) |
| F2 | Primer set | TCCCTACACGACGCTCTTCCGATCTACAAGCACGCCTTATACTGCAGATGGAT |
| | 6_Fwd_2 | G |
| | | (SEQ ID NO: 5830) |
| F3 | Primer set | TCCCTACACGACGCTCTTCCGATCTGACAAGCACGCCTTATACTGCAGATGGA |
| | 6_Fwd_3 | TG |
| | | (SEQ ID NO: 5831) |
| F4 | Primer set | TCCCTACACGACGCTCTTCCGATCTTGACAAGCACGCCTTATACTGCAGATGG |
| | 6_Fwd_4 | AT |
| | | G (SEQ ID NO: 5832) |
| F5 | Primer set | TCCCTACACGACGCTCTTCCGATCTCTGACAAGCACGCCTTATACTGCAGATG |
| | 6_Fwd_5 | GATG (SEQ ID NO: 5833) |
| F6 | Primer set | TCCCTACACGACGCTCTTCCGATCTACTGACAAGCACGCCTTATACTGCAGAT |
| | 6_Fwd_6 | GGATG (SEQ ID NO: 5834) |
| F7 | Primer set | TCCCTACACGACGCTCTTCCGATCTTACTGACAAGCACGCCTTATACTGCAGA |
| | 6_Fwd_7 | TGGATG (SEQ ID NO: 5835) |
| F8 | Primer set | TCCCTACACGACGCTCTTCCGATCTGTACTGACAAGCACGCCTTATACTGCAG |
| | 6_Fwd_8 | ATGGATG (SEQ ID NO: 5836) |
| A9 | Primer set | AGTTCAGACGTGTGCTCTTCCGATCTCCGTTCAGTGCTAGTCCCCTGTCACT |
| | 1_Rev_1 | (SEQ ID NO: 5837) |
| A10 | Primer set | AGTTCAGACGTGTGCTCTTCCGATCTACCGTTCAGTGCTAGTCCCCTGTCACT |
| | 1_Rev_2 | (SEQ ID NO: 5838) |
| A11 | Primer set | AGTTCAGACGTGTGCTCTTCCGATCTGACCGTTCAGTGCTAGTCCCCTGTCACT |
| | 1_Rev_3 | (SEQ ID NO: 5839) |
| A12 | Primer set | AGTTCAGACGTGTGCTCTTCCGATCTTGACCGTTCAGTGCTAGTCCCCTGTCAC |
| | 1_Rev_4 | T |
| | | (SEQ ID NO: 5840) |
| B9 | Primer set | AGTTCAGACGTGTGCTCTTCCGATCTCATACGGGCGTCACCACACGG |
| | 2_Rev_1 | (SEQIDNO: 5841) |
| B10 | Primer set | AGTTCAGACGTGTGCTCTTCCGATCTACATACGGGCGTCACCACACGG |
| | 2_Rev_2 | (SEQ ID NO: 5842) |
| B11 | Primer set | AGTTCAGACGTGTGCTCTTCCGATCTGACATACGGGCGTCACCACACGG |
| | 2_Rev_3 | (SEQ ID NO: 5843) |
| B12 | Primer set | AGTTCAGACGTGTGCTCTTCCGATCTTGACATACGGGCGTCACCACACGG |
| | 2_Rev_4 | (SEQ ID NO: 5844) |
| C9 | Primer set | AGTTCAGACGTGTGCTCTTCCGATCTCCCACCTCGCGATCTTGTCGGA |
| | 3_Rev_1 | (SEQ ID NO: 5845) |
| C10 | Primer set | AGTTCAGACGTGTGCTCTTCCGATCTACCCACCTCGCGATCTTGTCGGA |
| | 3_Rev_2 | (SEQ ID NO: 5846) |
| C11 | Primer set | AGTTCAGACGTGTGCTCTTCCGATCTGACCCACCTCGCGATCTTGTCGGA |
| | 3_Rev_3 | (SEQ ID NO: 5847) |
| C12 | Primer set | AGTTCAGACGTGTGCTCTTCCGATCTTGACCCACCTCGCGATCTTGTCGGA |
| | 3_Rev_4 | (SEQ ID NO: 5848) |
| D9 | Primer set | AGTTCAGACGTGTGCTCTTCCGATCTCCTTGCCTCGGCATTGGAAATCCC |
| | 4_Rev_1 | (SEQ ID NO: 5849) |
| D10 | Primer set | AGTTCAGACGTGTGCTCTTCCGATCTACCTTGCCTCGGCATTGGAAATCCC |
| | 4_Rev_2 | (SEQ ID NO: 5850) |
| D11 | Primer set | AGTTCAGACGTGTGCTCTTCCGATCTGACCTTGCCTCGGCATTGGAAATCCC |
| | 4_Rev_3 | (SEQ ID NO: 5851) |
| D12 | Primer set | AGTTCAGACGTGTGCTCTTCCGATCTTGACCTTGCCTCGGCATTGGAAATCCC |
| | 4_Rev_4 | (SEQ ID NO: 5852) |
| E9 | Primer set | AGTTCAGACGTGTGCTCTTCCGATCTCCTAAGCAGATGGGATGGTACTTTACC |
| | 5_Rev_1 | GTG (SEQ ID NO: 5853) |
| E10 | Primer set | AGTTCAGACGTGTGCTCTTCCGATCTACCTAAGCAGATGGGATGGTACTTTAC |
| | 5_Rev_2 | CGTG (SEQ ID NO: 5854) |
| E11 | Primer set | AGTTCAGACGTGTGCTCTTCCGATCTGACCTAAGCAGATGGGATGGTACTTTA |
| | 5_Rev_3 | CCGTG (SEQ ID NO: 5855) |
| E12 | Primer set | AGTTCAGACGTGTGCTCTTCCGATCTTGACCTAAGCAGATGGGATGGTACTTT |
| | 5_Rev_4 | ACCGTG (SEQ ID NO: 5856) |
| F9 | Primer set | AGTTCAGACGTGTGCTCTTCCGATCTCattcgccAcgTgagtctaggatcc |
| | 6_Rev_1 | (SEQ ID NO: 5857) |
| F10 | Primer set | AGTTCAGACGTGTGCTCTTCCGATCTACattcgccAcgTgagtctaggatcc |
| | 6_Rev_2 | (SEQ ID NO: 5858) |
| F11 | Primer set | AGTTCAGACGTGTGCTCTTCCGATCTGACattcgccAcgTgagtctaggatcc |
| | 6_Rev_3 | (SEQ ID NO: 5859) |
| F12 | Primer set | AGTTCAGACGTGTGCTCTTCCGATCTTGACattcgccAcgTgagtctaggatcc |
| | 6_Rev_4 | (SEQ ID NO: 5860) |

TABLE 31
Plasmids used in this study

| | | Expression | |
|---|---|---|---|
| Name | Description | system | Link to map |
| pAB1865 | pACYC184 pJ23119-BsmbI-B-t1 DR | Bacterial | |
| pAB1866 | pACYC184 pJ23119-BsmbI-B-t2 DR | Bacterial | |
| pAB1867 | pACYC184 pJ23119-BsmbI-B-t3 DR | Bacterial | |
| pAB1870 | pACYC184 pJ23119-BsmbI-B-t4 DR | Bacterial | |
| pAB1869 | pACYC184 pJ23119-BsmbI-B-t5 DR | Bacterial | |
| pAB1898 | pBR322 pLac-Cas13b-t1 | Bacterial | |
| pAB1899 | pBR322 pLac-Cas13b-t2 | Bacterial | |
| pAB1900 | pBR322 pLac-Cas13b-t3 | Bacterial | |
| pAB1903 | pBR322 pLac-Cas13b-t4 | Bacterial | |
| pAB1902 | pBR322 pLac-Cas13b-t5 | Bacterial | |
| pAB1619 | U6-BpiI-Cas13b-t1-DR | Mammalian | |
| pAB1620 | U6-BpiI-Cas13b-t3-DR | Mammalian | |
| pAB1853 | U6-BpiI-Cas13b-t5-DR | Mammalian | |
| pAB1678 | CMV-HIVNES-GS-Cas13b-t1 | Mammalian | |
| pAB1679 | CMV-HIVNES-GS-Cas13b-t3 | Mammalian | |
| pAB1891 | CMV-HIVNES-GS-Cas13b-t5 | Mammalian | |
| pAB1680 | CMV-HIVNES-GS-dCas13b-t1 | Mammalian | |
| pAB1681 | CMV-HIVNES-GS-dCas13b-t3 | Mammalian | |
| pAB1676 | CMV-HIVNES-GS-dCas13bt1-(GGS)2-huADAR2dd(E488Q) | Mammalian | |
| pAB1677 | CMV-HIVNES-GS-dCas13bt3-(GGS)2-huADAR2dd(E488Q) | Mammalian | |
| pAB1322 | CMV-HIVNES-GS-dCas13b6-(GGS)2-huADAR2dd(E488Q) | Mammalian | |
| pAB1659 | CMV-HIVNES-GS-dCas13b6-(GGS)2-huADAR2dd(E488Q/E620G) | Mammalian | |
| pAB1810 | CMV-HIVNES-GS-dCas13b6-(GGS)2- | Mammalian | |
| | huADAR2dd(E488Q/E620G/Q696L) | | |
| pAB1923 | CMV-HIVNES-GS-dCas13bt1-(GGS)2- | Mammalian | |
| | huADAR2dd(E488Q/E620G/Q696L) | | |
| pAB0040 | CMV-Cluciferase(STOP85)-polyAEF1a-G-luciferase-polyA | Mammalian | Previously |
| | | | described⁹ |
| pAB1424 | CMV-Cluciferase(W113XTGA)-polyA EF1a-G-luciferase-polyA | Mammalian | |
| pAB1425 | CMV-Cluciferase-polyAEF1a-G-luciferase(C73Y)-polyA | Mammalian | |
| pAB1588 | CMV-Cluciferase-polyAEF1a-G-luciferase(R93K)-polyA | Mammalian | |
| pAB1761 | CMV-Cluciferase-polyA EF1a-G-luciferase(R93Q CAA)-polyA | Mammalian | |
| pAB1763 | CMV-Cluciferase-polyA EF1a-G-luciferase(R93H CAT)-polyA | Mammalian | |
| pAB1764 | CMV-Cluciferase-polyA EF1a-G-luciferase(G92R GAG)-polyA | Mammalian | |
| pAB1456 | pYES3/CT pADH1-HH-ADE2 T(30 bp/22 mm)-B6-DR-HDV-ADH1- | Yeast | |
| | term TGA-ADE2 TAG-URA3 | | |
| pAB1417 | pGAL-dCas13b6-(GGS)2-dADAR2(E488Q) | Yeast | |
| pAB1773 | pGAL-dCas13b6-(GGS)2-dADAR2(E488Q/E620G) | Yeast | |

### REFERENCES

[1289] 1. Abudayyeh, O. O. et al. Science 365, 382-386 (2019).
[1290] 2. Chee, M. K. & Haase, S. B. G3 2, 515-526 (2012).
[1291] 3. Voth, W. P., Jiang, Y. W. & Stillman, D. J. Yeast 20, 985-993 (2003).
[1292] 4. Joung, J. et al. Nat. Protoc. 12, 828-863 (2017).
[1293] 5. Gietz, R. D. & Schiestl, R. H. Nat. Protoc. 2, 31-34 (2007).
[1294] 6. Gietz, R. D. & Schiestl, R. H. Nat. Protoc. 2, 38-41 (2007).
[1295] 7. Matthews, M. M. et al. Nat. Struct. Mol. Biol. 23, 426-433 (2016).
[1296] 8. Eggington, J. M., Greene, T. & Bass, B. L. Nat. Commun. 2, 319 (2011).
[1297] 9. Cox, D. B. T. et al. Science 358, 1019-1027 (2017).

### Example 4—Small Cas13 Proteins Enable Compact RNA Base Editors

[1298] Applicants identified and characterized an ultra-small family of Cas13b, Cas13b-t, and showed it mediates mammalian transcript knockdown. By functionalizing Cas13b-t with adenosine and cytosine deaminase domains, Applicants engineered compact variants of REPAIR and RESCUE RNA editors, which may be more amenable for in vivo use. The systems here may be used for precise RNA editing as an attractive therapeutic strategy, e.g., when temporary changes are desirable or DNA editing is not possible.

[1299] RNA-targeting CRISPR-Cas13 systems have been harnessed for a variety of applications (1), including precision base editing (2, 3). RNA base editing is a promising therapeutic strategy that allows for installation of temporary, non-heritable edits. However, in some cases, therapeutic delivery of Cas13-based RNA editing systems remains challenging, in part because the size of cas13 genes identified so far exceed the packaging capacity of adeno-associated virus (AAV), the most widely used viral vector for gene delivery (4, 5).

[1300] To overcome this limitation, Applicants performed a computational search of prokaryotic and viral genomes and metagenomes for small Cas13 orthologs, identifying 4726 candidates. Phylogenetic analysis revealed two novel groups of ultra-small Cas13 proteins that form distinct branches within the Cas13b and c subtypes. (FIG. 31A). Unlike other Type VI-B CRISPR-Cas loci6, the genomic loci encoding Cas13b-t lack any accessory genes. Applicants focused on the new tiny Cas13b (Cas13b-t) subfamily (FIG. 31B) in this example.

[1301] To experimentally characterize Cas13b-t, Applicants first identified the required CRISPR RNA (crRNA) components. Applicants transformed E. coli with a plasmid containing the Cas13b-t2 locus (FIGS. 31B-31C) with the CRISPR array truncated to two direct repeats (DRs) and performed small RNA sequencing. Applicants found that the crRNA of Cas13b-t2 has a 3′ DR (FIG. 31D). To determine if Cas13b-t is capable of mediating nucleic acid interference, Applicants performed a negative selection screen using a library of crRNAs that consist of a spacer followed by the DR and target essential gene transcripts in E. coli (6) (FIG. 33A). Three of the five tested members of the Cas13b-t subfamily, Cas13b-t1, 3, and 5, mediate depletion of targeting spacers in E. coli (FIG. 31F). Mapping of depleted spacers to the E. coli transcriptome and analysis of the flanking sequences revealed that all three active orthologs have a permissive 5′ D (A/G/T) protospacer flanking sequence (PFS) preference (FIG. 31F and FIG. 33B). Additionally, assessment of the normalized position of depleted spacers along the target transcript indicates no positional preference within the coding region and enhanced depletion when targeting the 5′ UTR (FIG. 31F).

[1302] To evaluate Cas13b-t-mediated knockdown and the importance of the PFS for RNA targeting in human cells, Applicants tested the three active Cas13b-t's using a set of 20 guide RNAs (gRNAs) with spacer sequences targeting regions with different adjacent 5′ bases in a Gaussia luciferase reporter. Applicants found that all three proteins promoted knockdown in HEK293FT cells with varying efficiencies, from 50% to 75% for the most efficient gRNA tested (FIG. 31G). Mutation of the HEPN domains in Cas13b-t1 and 3 (dCas13b-t1 and 3) abolished the knockdown activity (34). Further, Applicants found that the PFS preference detected in E. coli was not manifested in HEK293FT cells, indicating that the PFS has little effect in mammalian cells, similar to previously studied Cas13's (2) (FIG. 31G). Applicants next targeted endogenous transcripts in mammalian cells with Cas13b-t1 and 3, the smallest and most active members of the tested Cas13b-t's. Both proteins mediated knockdown of five target transcripts for all gRNAs tested (12-68% and 27-64% knockdown compared to a non-targeting gRNA for Cas13b-t1 and 3, respectively) (FIG. 31H).

[1303] To test the capacity of Cas13b-t's for RNA editing, Applicants fused dCas13b-t1 and 3 with a hyperactive mutant of the human adenosine deaminase acting on RNA 2 (ADAR2dd(E488Q)) to create Cas13b-t1-REPAIR and Cas13b-t3 REPAIR. Applicants evaluated the ability of these fusion proteins to direct A-to-I RNA editing in HEK293FT cells by attempting to revert tryptophan (W) 85 to STOP (X) mutation in a Cypridina luciferase reporter. Site-specific RNA editing is achieved by introducing a cytidine mismatch in the gRNA spacer sequence across from the target adenosine2,7 (FIG. 32A). Spacer sequences were designed to vary the distance between this mismatch and the DR, as variability in the optional mismatch position has been observed for different Cas13b-ADAR fusion proteins and target sites (2, 3). Applicants found that both Cas13b-t1-REPAIR and Cas13b-t3-REPAIR showed optimal editing with a mismatch distance of 18-22 base pairs (bp) in a 30-bp spacer sequence. Editing efficiency was comparable to the previously described REPAIRv1 and v2 systems (2) and approximately 50% and 13% of that of the more efficient RanCas13b-REPAIR (3) for Cas13b-t1-REPAIR and Cas13b-t3-REPAIR, respectively (FIG. 32B).

[1304] Applicants additionally fused both dCas13b-t1 and dCas13b-t3 with a previously described evolved ADAR2dd capable of cytidine to uridine deamination3 (Cas13b-t1-RESCUE and Cas13b-t3-RESCUE) and directed both editors to reporter and endogenous transcripts in HEK293FT cells (FIGS. 35A-35H). Applicants found that these fusion proteins were capable of mediating both A-to-I or C-to-U editing of all targets tested at levels comparable to or better than RanCas13b-REPAIR/RESCUE (FIGS. 32C-32F and FIGS. 36A-36L).

[1305] To demonstrate the ability of Cas13b-t-REPAIR to edit functionally relevant targets, Applicants targeted previously characterized phosphorylation sites. In particular, Applicants attempted to alter activation of the Wnt/beta-catenin pathway by editing the threonine (T) 41 codon of CTNNB1, a site known to promote degradation of beta-catenin when phosphorylated (8). Applicants found that Cas13b-t1-REPAIR was able to mediate 40% editing at this site, converting the codon to alanine (A) and leading to a 51-fold increase in beta catenin activity, which may be relevant for promoting regeneration after acute liver failure (9, 10) (FIG. 32E). Cas13b-t1-REPAIR was also able to efficiently edit sites corresponding to phosphorylated residues in the STAT1, STAT3 and LATS1 transcripts (FIG. 32C).

[1306] Finally, Applicants evaluated the transcriptome-wide specificity of Cas13b-t1-REPAIR and found the number of off-target edits caused by this system was comparable to REPAIRv1 (FIGS. 39A-39B), which may be due to promiscuous activity of the ADAR deaminase domain (2, 3). To additionally accelerate the translation of REPAIR to therapeutic use, Applicants sought to improve the specificity of Cas13b-t1-REPAIR (FIG. 32G). Although higher specificity ADAR2dd variants have been engineered, they substantially reduced editing efficiency (2). Through a parallel effort to directly evolve ADAR mutants that are both highly specific and efficient in the context of fusion with dRanCas13b, Applicants identified two promising mutations in ADAR2dd (E620G and Q696L) (FIGS. 37A-37F, 38A-38J). Applicants incorporated these two mutations in Cas13b-t1-REPAIR and found that the number of off-target edits decreased while maintaining comparable on-target activity as the original Cas13b-t1-REPAIR (FIGS. 32H-32I).

[1307] The small size and high efficacy of Cas13b-t-REPAIR and RESCUE constructs makes them compatible with viral delivery, resolving a major challenge to deployment of this novel therapeutic strategy.

[1308] Methods

[1309] Data Curation and Search Pipeline

[1310] Assembled prokaryotic and phage genomic DNA contigs from metagenomes and genomes were downloaded from NCBI, WGS, and JGI, totaling 3.16 trillion bp. All open reading frames larger than 80 aa were annotated resulting in 10 billion putative proteins for further analysis. Previously developed Cas13 profiles11 were used to identify Cas13 family proteins with HMMER3.212 using a minimum bitscore threshold of 25. A group of small (˜800aa) but divergent Cas13b's were identified and used to seed a second HMMER search with the same settings to retrieve additional members of this subfamily. In total, 4726 Cas13 proteins were identified.

[1311] Phylogenetic Analysis

[1312] For phylogenetic analysis and classification, the 4726 candidate genes were clustered using MMseqs2 with a minimum sequence identity of 50% and minimum coverage of 70% (13, 14). Proteins within each cluster were clustered at 90% identity and 80% minimum coverage for redundancy reduction. Each redundancy reduced cluster was aligned using MAFFT (15) with default parameters. Proteins identified as truncated or partial and/or clusters entirely composed of them were removed from the analysis.

[1313] The aligned redundancy reduced clusters were converted into HHsuite profiles using all columns with less than 50% gaps, and each of these profiles was searched against each other with profile-profile alignment using HHsearch. The resulting pairwise bitscores between clusters, sᵢⱼ, where i,j denote clusters i and j, respectively, were used to construct a classification dendrogram. First, the asymmetric bitscores were symmetrized by setting sᵢⱼ=(sᵢⱼ+sⱼᵢ)/2. Then, pseudo-distances were calculated by setting dij=−(log sᵢⱼ−log min(sᵢᵢ, sⱼⱼ))/2 to generate a distance matrix (16). A UGPMA dendrogram was constructed using these distances. Branches and the subtrees of the dendrogram were contracted without modifying their topology, to highlight known subtypes and subgroups within each subtype. Lengths in amino acids (aa) of the redundancy reduced proteins from each subtree were used to generate protein size distributions.

[1314] Design and Cloning of Bacterial Expression Plasmid Constructs

[1315] All cloning in this study was performed using chemically competent Stb13 E. coli (NEB) unless otherwise noted. All PCR for cloning was performed using 2× Phusion Flash High-Fidelity Master Mix (Thermo Fisher) unless otherwise noted.

[1316] The Cas13b-t2 full locus was synthesized and cloned into the BamHI site of pACYC184 by GenScript.

[1317] To clone bacterial expression plasmids for the PFS screen, Cas13b-t protein coding sequences were human codon optimized using GeneArt GeneOptimizer (Thermo Fisher) and synthesized by GenScript into a pcDNA3.1(+) backbone. Genes were amplified by PCR to add a pLac promoter and cloned into a pBR322 backbone (NEB) digested with EcoRV (Thermo Fisher) by Gibson assembly.

[1318] crRNA expression cassettes for each DR corresponding to each Cas13b-t of interest were synthesized by IDT, amplified by PCR, and cloned into a pACYC184 backbone digested with EcoRV and BamHI (Thermo Fisher) by Gibson assembly. All primers are listed in Table 35 and final constructs in Table 46.

[1319] Design and Cloning of Mammalian Expression Plasmid Constructs

[1320] Mammalian gRNA expression cassettes were amplified from pC0048 (Addgene plasmid #103854; n2t.net/addgene:103854; RRID:Addgene_103854)2 using primers to add the DR for each Cas13b-t ortholog of interest and cloned into pC0048 digested with LguI and KpnI (Thermo Fisher) using Gibson assembly.

[1321] Mammalian protein expression cassettes were cloned by amplifying previously mentioned synthesized Cas13b-t genes by PCR and cloning into pC0053 (Addgene plasmid #103869; n2t.net/addgene:103869; RRID:Addgene_103869)2 digested with HindIII and NotI (Thermo Fisher), either alone or with addition of a piece including ADAR2dd(E488Q) amplified from pC0053 for REPAIR constructs and pC0078 (Addgene plasmid #130661; http://n2t.net/addgene:130661; RRID:Addgene 130661)3 for RESCUE constructs. Site directed mutagenesis was used to create catalytically inactivated Cas13b-t's. All primers are listed in Table 36 and final constructs in Table 46.

[1322] ADAR2 mutants derived from directed evolution screens were cloned by introduction of mutations via PCR primers.

[1323] gRNA spacers were cloned into expression backbones by Golden Gate assembly as previously described 17. Spacer sequences are listed in Tables 40, 41, 43 and 44.

[1324] Bacterial RNA Sequencing

[1325] Bacterial RNA sequencing was performed as previously described (18). Briefly, 5 mL overnight cultures of a Stb13 E. coli colony transformed with a plasmid containing the locus of interest was spun down and resuspended in 1 mL of TRI Reagent (Zymo Research). After a 5-minute room temperature incubation, 250 uL of 0.5 mm Zirconia beads were added and the Trizol resuspension was vortexed vigorously for 30s to 1 min. 200 uL chloroform was added, samples were inverted gently, incubated at room temperature for 3 minutes, and then spun down at 12000×g for 5 min at 4 C. Following centrifugation, the aqueous fraction was used as input to the Qiagen miRNeasy kit, as per the manufacturer's instructions.

[1326] Purified RNA was treated with DNase I (NEB), purified again using RNA Clean & Concentrate-25 (Zymo Research), and treated with T4 polynucleotide kinase (PNK) (NEB). PNK-treated RNA was again purified using RNA Clean & Concentrate-25 (Zymo Research), and ribosomal RNA was removed using the Ribominus Transcriptome Isolation Kit (Yeast and Bacteria) (Thermo Fisher Scientific). Samples were subsequently treated with RNA 5′ polyphosphatase (Epicentre) and purified again using an RNA Clean & Concentrate-5 kit (Zymo Research). Purified RNA was used as input to the NEBNext Multiplex Small RNA Library Prep Set for Illumina (NEB). Library preparation was performed as per the manufacturer's instructions, except with a final PCR of 20 cycles. Libraries were quantified by qPCR using the KAPA Library Quantification Kit for Illumina (Roche) on a StepOnePlus Real-Time PCR System (Thermo Fisher Scientific) and sequenced on an Illumina NextSeq. Reads were mapped using BWA and a custom Python script available upon request.

[1327] E. coli Essential Gene PFS Screen

[1328] Libraries were designed as previously described 6. The library of spacers was cloned into each Cas13b-t pJ23119-spacer-DR backbone containing a chloramphenicol resistance gene using Golden Gate Assembly with a 5:1 ratio of spacer library to pre-digested backbone with 210 cycles. Libraries were transformed into Endura Electrocompetent Cells (Lucigen) by electroporation and plated over five 22.7 cm×22.7 cm chloramphenicol LB agar plates. 12 hours after plating, libraries were scraped from plates and DNA was extracted using the Macherey-Nagel Nucleobond Xtra Maxiprep Kit (Macherey-Nagel). 200 ng of library plasmid and 200 ng Cas13b-t gene plasmid containing an ampicillin resistance gene were transformed into 100 uL of Endura Electrocompetent Cells (Lucigen) by electroporation as per the manufacturer's protocol and plated across four 22.7 cm×22.7 cm ampicillin/chloramphenicol LB agar plates per biological replicate, with three biological replicates per condition. 10-12 hours post-transformation, libraries of transformants were scraped from the plates and DNA was extracted using the Macherey-Nagel Nucleobond Xtra Maxiprep Kit (Macherey-Nagel). Libraries were prepared from extracted DNA for next generation sequencing using primers in Supplementary Table 38 with NEBNext High-Fidelity 2×PCR Master Mix (NEB) and sequenced on an Illumina NextSeq. Spacer abundance relative to an empty vector was analyzed using a custom Python script, available on request. A mixed Gaussian distribution was fit to the distribution of negative control spacers, and the distribution with the higher mean was used as the null distribution. Depleted spacers were selected as those greater than 5 standard deviations away from the selected null distribution mean. Weblogos were generated using weblogo.berkeley.edu/logo.cgi using the top 1% of depleted spacers.

[1329] Mammalian Cell Culture and Transfection

[1330] Mammalian cell culture experiments were performed in the HEK293FT line (American Type Culture Collection (ATCC)) grown in Dulbecco's Modified Eagle Medium with high glucose, sodium pyruvate, and GlutaMAX (Thermo Fisher Scientific), additionally supplemented with 1× penicillin—streptomycin (Thermo Fisher Scientific), 10 mM HEPES (Thermo Fisher Scientific), and 10% fetal bovine serum (VWR Seradigm). All cells were maintained at confluency below 80%.

[1331] All transfections were performed with Lipofectamine 2000 (Thermo Fisher Scientific) in 96-well plates. Cells were plated at approximately 20,000 cells/well 16-20 hours prior to transfection to ensure 90% confluency at the time of transfection. For each well on the plate, transfection plasmids were combined with OptiMEM I Reduced Serum Medium (Thermo Fisher Scientific) to a total of 25 μl. Separately, 24.5 μl of OptiMEM was combined with 0.5 μl of Lipofectamine 2000. Plasmid and Lipofectamine solutions were then combined and pipetted onto cells.

[1332] Mammalian RNA Knockdown Assays

[1333] HEK293FT cells were transfected as described with 75 ng of a plasmid encoding expression of either a Cas13b-t ortholog or GFP from a CMV promoter, 150 ng of a plasmid encoding expression of a gRNA from a human U6 promoter and, where relevant, 45 ng of reporter plasmid. After 48 h, RNA was harvested as described previously 17 with 2× the amount of recommended DNase and a 20 minute lysis step. RNA expression was measured by qPCR using commercially available TaqMan probes (Thermo Fisher Scientific) on a LightCycler 480 II (Roche) with GAPDH as an endogenous internal control in 5 uL multiplexed reactions 17. Probes and primer sets were generally selected to amplify across the Cas13 target site so as to minimize detection of cleaved transcripts. Data is the average of 4 biological replicates with fold-change calculated relative to a negative control condition with the corresponding gRNA expression plasmid co-transfected with the GFP expression plasmid rather than a Cas13b-t expression plasmid using the ddCt method 19. Error bars were calculated in GraphPad Prism 7 and represent the standard deviation, n=4.

[1334] For luciferase reporter assays, media was aspirated from cells and Cypridina and Gaussia luciferase activity in the media was measured using Gaussia and Cypridina Luciferase Assay Kits (Targeting Systems) with an injection protocol on a Biotek Synergy Neo 2 (Agilent). Each experimental luciferase measurement was normalized to the appropriate control luciferase measurement (i.e., if Cypridina luciferase was targeted, the Gaussia luciferase measurement was used as the control value and vice versa). For knockdown assays, normalized luciferase values were then again normalized to an average normalized luciferase measurement of 4 biological replicates of a negative control condition consisting of the corresponding gRNA expression plasmid co-transfected with a GFP expression plasmid rather than a Cas13 expression plasmid. Error bars were calculated in GraphPad Prism 7 and represent the standard deviation of the luciferase values normalized to negative control transfection, n=4.

[1335] Mammalian RNA Editing Assays

[1336] HEK293FT cells were transfected as described with 150 ng a plasmid encoding expression of a dCas13b ortholog-ADAR2dd(E488Q) fusion from a CMV promoter, 300 ng of a plasmid encoding expression of a gRNA from a human U6 promoter and, where relevant, 45 ng of a reporter plasmid. After 48 h, RNA was harvested as described previously and reverse transcription was performed as described 17 using gene-specific primers for the relevant target transcript (Table 19). cDNA was used as input for library preparation of next-generation sequencing libraries (Table 20) using NEBNext High-Fidelity 2×PCR Master Mix (NEB), and amplicons were sequenced on an Illumina MiSeq. Editing was quantified by counting the number of reads at which the expected edited position in the amplicon was called as a G (for A-to-I editing) or T (for C-to-U editing) and dividing by the total number of reads in the sample using a custom Python script, available upon request. Unless otherwise noted, all reported data is the average of 4 biological replicates.

[1337] Luciferase reporter assays for RNA editing were performed as described above, with the modification that normalized luciferase values were not normalized to a GFP control condition. For CTNNB1 targeting, Applicants engineered a luciferase reporter by replacing the EF1alpha promoter driving Gaussia luciferase expression in the dual luciferase reporter plasmid with a promoter derived either from an M50 Super 8× TOPFlash (TOP) or M51 Super 8× FOPFlash (FOP) reporter. M50 Super 8× TOPFlash (Addgene plasmid #12456; n2t.net/addgene:12456; RRID:Addgene 12456) and M51 Super 8× FOPFlash (TOPFlash mutant) (Addgene plasmid #12457; n2t.net/addgene:12457; RRID:Addgene 12457) were gifts from Randall Moon3,20. Luciferase activity was measured for these custom dual luciferase reporters for each protein/gRNA condition and normalized as described for a dual luciferase reporter. Fold activation was calculated by taking the ratio of the average TOP measurement and dividing by average FOP measurement, and error was calculated by a standard error propagation formula.

[1338] Optimal spacers for all target sites tested were determined by tiling spacers across the site of interest, varying the distance of the mismatch from the DR from 14 bp to 28 bp in intervals of 2 bp.

[1339] RNA Editing Specificity

[1340] HEK293FT cells were transfected as described for mammalian RNA editing assays. After 48 h, RNA was harvested using a QIAGEN RNeasy Plus 96 kit as per the manufacturer's protocol. The mRNA fraction was enriched using an NEBNext Poly(A) Magnetic Isolation Module (NEB). Libraries were prepared using an NEBNExt Ultra II Directional RNA library prep kit (NEB) as per the manufacturer's protocol and sequenced on an Illumina NextSeq. Each sample was sequenced with an average read depth of 8 million reads per sample and randomly downsampled to 5 million reads per sample. Data was analyzed using a previously described custom pipeline on the FireCloud computational framework and downstream analysis using a custom Python script2,3. Any significant edits found in eGFP-transfected conditions were considered to be SNPs or artifacts of the transfection and filtered out. An additional layer of filtering for known SNP positions was performed using the Kaviar21 method for identifying SNPs.

### REFERENCES

[1341] 1. Terns, M. P. Mol. Cell 72, 404-412 (2018).
[1342] 2. Cox, D. B. T. et al. Science 358, 1019-1027 (2017).
[1343] 3. Abudayyeh, O. O. et al. Science 365, 382-386 (2019).
[1344] 4. Dong, J. Y., Fan, P. D. & Frizzell, R. A. Hum. Gene Ther. 7, 2101-2112 (1996).
[1345] 5. Wu, Z., Yang, H. & Colosi, P. Mol. Ther. 18, 80-86 (2010).
[1346] 6. Smargon, A. A. et al. Mol. Cell 65, 618-630.e7 (2017).
[1347] 7. Matthews, M. M. et al. Nat. Struct. Mol. Biol. 23, 426-433 (2016).
[1348] 8. MacDonald, B. T., Tamai, K. & He, X. Developmental Cell vol. 17 9-26 (2009).
[1349] 9. Apte, U. et al. Am. J. Pathol. 175, 1056-1065 (2009).
[1350] 10. Bhushan, B. et al. Am. J. Pathol. 184, 3013-3025 (2014).
[1351] 11. Shmakov, S. A., Makarova, K. S., Wolf, Y. I., Severinov, K. V. & Koonin, E. V. Proc. Natl. Acad. Sci. U.S.A 115, E5307-E5316 (2018).
[1352] 12. Eddy, S. R. PLoS Comput. Biol. 7, e1002195 (2011).
[1353] 13. Steinegger, M. & Söding, J. Nat. Biotechnol. 35, 1026-1028 (2017).
[1354] 14. Steinegger, M. & Söding, J. Nat. Commun. 9, 2542 (2018).
[1355] 15. Katoh, K. & Standley, D. M. Mol. Biol. Evol. 30, 772-780 (2013).
[1356] 16. Makarova, K. S. et al. Nature Reviews Microbiology vol. 18 67-83 (2020).
[1357] 17. Joung, J. et al. Nat. Protoc. 12, 828-863 (2017).
[1358] 18. Zetsche, B. et al. Cell 163, 759-771 (2015).
[1359] 19. Schmittgen, T. D. & Livak, K. J. Nature Protocols vol. 3 1101-1108 (2008).
[1360] 20. Veeman, M. T., Slusarski, D. C., Kaykas, A., Louie, S. H. & Moon, R. T. Curr. Biol. 13, 680-685 (2003).
[1361] 21. Glusman, G., Caballero, J., Mauldin, D. E., Hood, L. & Roach, J. C. Bioinformatics 27, 3216-3217 (2011).

[1362] Additional Methods

[1363] Protein Expression and Purification of Cas13b-t3

[1364] Wild-type and HEPN mutants were expressed from a pET28-based vector with an N-terminal TwinStrep-SUMO tag transformed into chemically competent Rosetta Competent Cells (Novagen/EMD Millipore). Cells transformed with the expression plasmid were grown in 1 L of Terrific Broth at 37 C until OD 0.6. Temperature was switched to 18 C and the cultures were induced with 0.2 mM IPTG. Cultures were grown for 16-18 h, then cells were harvested with centrifugation at 5000×g at 4 C. The pellets were resuspended in 150 mL lysis buffer (150 mM NaCl, 20 mM Tris-HCl pH 7.5, 1 mM DTT, 5% glycerol) and homogenized by mixing on a magnetic plate at 4 C for 30 min. Cells were lysed by two passes through a microfluidizer at 18,000 psi and soluble fraction was separated from cell debris by centrifugation at 9,000 RPM for 30 min at 4 C. The soluble fraction was passed through Strep-Tactin resin (Qiagen). Resin was washed with 8 column volumes of lysis buffer and eluted from the column in lysis buffer supplemented with 5 mM desthiobiotin (Sigma). The tags were cleaved overnight at 4 C by addition of SUMO protease. After cleavage, the proteins were passed through a heparin column (GE Healthcare) and concentrated to approximately 500 uL. Concentrated proteins were then passed through a Superdex 200 increase column (GE Healthcare) equilibrated in storage buffer (500 mM NaCl, 20 mM Tris-HCl pH 7.5, 1 mM DTT, 5% glycerol). Peak fractions were pooled and concentrated.

[1365] Fluorescent Collateral RNA Cleavage Assay

[1366] Assays were carried out with 4 technical replicates with equimolar ratios of Cas13b-t3 wild-type or HEPN mutant protein, crRNA and RNA target in cleavage assay buffer (50 mM NaCl, 20 mM Tris-HCl pH 7.5, 5 mM MgCl2) with 10 U murine RNase inhibitor (New England Biolabs) and 500 nM RNAse Alert v2 sensor (Thermo Fisher). Samples were incubated for 3 hours at 37 C on a fluorescent plate reader equipped with a FAM filter set. Measurements were taken at 5 minute intervals and data were normalized to the first time point.

[1367] Design and Cloning of Yeast Expression Plasmid Constructs

[1368] Yeast reporter constructs were cloned into a pYES3/CT backbone (Thermo Fisher). A previously described reporter containing a crRNA expression cassette under a pADH1 terminator1 was digested with HindIII and MluI (Thermo Fisher). A URA3 gene was amplified by PCR using the selection marker from a pRSII426 backbone2 with the introduced stop codon added by site-directed mutagenesis (Table 37) and cloned via Gibson assembly This backbone was digested with BcuI (Thermo Fisher) and an ADE2 gene amplified from M3499 ura3::ADE2 Disruptor Converter, a gift from David Stillman (Addgene plasmid #51674; n2t.net/addgene:51674; RRID:Addgene_51674)3, with the introduced stop codon added by site-directed mutagenesis (Table 37) and cloned via Gibson assembly. gRNA spacers were cloned into this backbone using Golden Gate assembly 4.

[1369] Yeast REPAIR expression plasmids were derived from a previously described pRSII426 backbone2 with a pGAL promoter driving expression of the REPAIR fusion protein 1. The URA3 selection marker was replaced with a LEU2 selection marker by digesting this backbone with Eco105I and KpnI (Thermo Fisher) and inserting a LEU2 gene amplified from a synthesized gene (IDT) by Gibson assembly. ADAR2 mutants to create sequences that could be used as a basis for error-prone PCR for each subsequent evolution round were inserted by amplifying the analogous sequence from the previous round of evolution and adding the new mutation via the site-directed mutagenesis (Table 37).

[1370] Cloning of Mutagenesis Libraries for ADAR Evolution

[1371] ADAR2dd mutant libraries were generated by performing 8 error-prone PCR reactions for 20 cycles using a GeneMorph II Random Mutagenesis Kit (Agilent) with titrated template concentrations. For each round of evolution, we used a yeast codon-optimized ADAR2dd gene containing the selected mutants from all prior rounds. Resulting PCR reactions were pooled, gel purified, subjected to DpnI (Thermo Fisher) treatment and cloned into a yeast RanCas13b-REPAIR expression backbone (Supplementary Table 17) digested with KflI and Eco72I (Thermo Fisher) by Gibson assembly. Libraries were transformed into Endura Electrocompetent Cells (Lucigen) by electroporation and plated over one 22.7 cm×22.7 cm ampicillin LB agar plate. After 12-16 hours of growth, libraries were scraped from plates and DNA was extracted using the Macherey-Nagel Nucleobond Xtra Maxiprep Kit (Macherey-Nagel). Primers are listed in Table 37.

[1372] Directed Evolution of High-Specificity ADAR Mutants

[1373] Applicants Performed Two Rounds of Evolution as Follows:

[1374] To select for highly specific and efficient ADAR variants, Applicants engineered a yeast reporter based on simultaneous restoration of a TGA stop codon in ADE2 and negative selection of restoration of a TAG stop codon in URA3. We transformed Saccharomyces cerevisiae Meyen ex E.C. Hansen (ATCC® 204681™) with this plasmid, which also included expression of a crRNA targeting ADE2. Yeast were transformed using the lithium acetate/single-stranded carrier DNA/PEG method 5.

[1375] Large scale transformations of mutagenesis libraries were performed as previously described (1, 6). Briefly, Applicants picked a colony from the initial transformation of the reporter plasmid, inoculated 300 mL of 2% glucose minimal media-tryptophan (Trp) for selection and grew overnight in a baffled flask at 30C. After 12-16 hours of growth, Applicants measured the optical density (OD) of the culture and used this measurement to seed 2.5E9 cells into 500 mL of pre-warmed 2×YPAD media in a non-baffled flask. Once this culture reached an OD of 2 (approximately 4 hours), cells were harvested by centrifugation at 3000×g for 5 min, followed by two washes with water. The resulting cell pellet was then resuspended in 36 mL of transformation mix consisting of 24 mL of PEG 3350 (50% w/v), 3.6 mL of 1.0 M Lithium acetate, 5 mL of denatured single-stranded carrier salmon sperm DNA at 2.0 mg/mL (Thermo Fisher), 2.9 mL of water, and 500 μL of 1 μg/μL plasmid library. The mixture was incubated at 42 C for 60 minutes with agitation, then the cells were pelleted once more and resuspended in 750 mL of 2% glucose minimal media −Trp/−leucine (Leu) and grown overnight at 30 C in a baffled flask until OD reached between 6 and 8. 6.25 mL of the culture was then seeded into 250 mL of 2% raffinose −Trp/−Leu selection media and grown until OD reached between 0.5 and 1. The culture was then induced by adding 27 mL of 30% galactose and incubated overnight at 30C for 12-15 hours.

[1376] After overnight growth, cultures were plated across 20 22.7×22.7 cm selection plates of 2% raffinose/3% galactose −Trp/−Leu with 5 mg/L adenine (Ade) and 0.1% 5-fluoroorotic acid (5-FOA). After 2-3 days of selection, Applicants picked white colonies corresponding to an on-target edit and restoration of ADE2 and streaked these onto small selection plates of the same media base to ensure accurate colony picking. Plates were then allowed to grow again for up to 3 days. White streaks after this second selection were again picked.

[1377] To look for enriched single mutations, all picked streaks were pooled and the contained RanCas13b-REPAIR genes were amplified with NEBNext High-Fidelity 2×PCR Master Mix (NEB) for preparation of next generation sequencing libraries. Libraries were sequenced on an Illumina NextSeq. Relative enrichment of mutations in the selected library was analyzed using a custom Python script, available upon request. Identified enriched single mutants were introduced by site-directed mutagenesis to RanCas13b-REPAIR in mammalian expression vectors for validation (Table 38).

[1378] To test the candidate mutations, RNA editing assays using luciferase reporters in HEK293FT cells were performed as previously described. Specifically, after the first round of selection, RanCas13b-ADAR2dd mutants were targeted to either of 2 Cypridina luciferase reporters, one with a W85X mutation (TAG stop codon) and one with a W113X mutation (TGA stop codon) to evaluate the ability of the evolved ADAR2dd's to effectively edit at sites with both preferred and non-preferred 5′ bases7,8 (FIGS. 37A-37B). After the second round of evolution, this initial screening was performed using the same Cypridina luciferase W85X reporter, along with a second Cypridina luciferase W85X (TGA stop codon) reporter and a Gaussia luciferase R93H reporter for which restoration of a CAT codon to CGT reverts a catalytically-inactivating mutation (FIGS. 38A-38C). Luciferase activity of the Cypridina luciferase W85X TAG reporter in the non-targeting crRNA condition was also used as a proxy for measuring specificity, as previously described (9).

[1379] Based on this initial screening pass, top candidates were further validated for broad activity by testing again on the initial screen sites and additionally targeting the K19 and H36 codons in the endogenous CTNNB1 transcript after the first round of selection (FIGS. 37C-37F), and additionally on Gaussia luciferase reporters with G92R, R93K and R93Q catalytic mutations as well as the targeting of the T41 codon in CTNNB1 (FIGS. 38D-38J). Based on activity at all tested sites as measured by either next-generation sequencing and luciferase assays, as well as specificity measured as described, a single top candidate was identified and cloned into the RanCas13b-REPAIR yeast expression construct derived from the previous round of evolution to use as a basis for mutagenesis for the subsequent round.

[1380] After Round 1, Applicants identified the E620G mutation and after Round 2, Applicants identified the Q696L mutation. We additionally identified V505I as a mutation capable of enhancing editing at target sites with a 5′G (FIGS. 38A-38J).

TABLE 32
Accessions of contigs containing Cas13b-torthologs

| | | | | Sample |
|---|---|---|---|---|
| | | | | collection |
| Source | | Ortholog name | | temperature |
| database | Contig accession | (if applicable) | Source habitat/organism | (C) |
| JGI | Ga0246100_107590 | | Groundwater | |
| JG | Ga0265293_10004442 | | Landfill leachate | |
| JGI | Ga0315543_1000530 | | Salt marsh sediment | |
| JGI | Ga0209381_1018281 | Cas13b-t5 | Hot spring sediment | 64.7 |
| JGI | Ga0310137_000061 | | Fracking water | |
| JGI | Ga0208824_1000897 | | Anaerobic digester sludge | |
| JGI | Ga0137489_1004561 | | Basal ice | |
| JGI | Ga0315552_1001799 | | Salt marsh sediment | |
| JGI | Ga0180434_10014215 | Cas13b-t4 | Hypersaline lake sediment | |
| JGI | Ga0315532_1010951 | | Salt marsh sediment | |
| JGI | Ga0307431_1000754 | | Salt marsh sediment | |
| JGI | Ga0315541_1003536 | | Salt marsh sediment | |
| JGI | Ga0315296_10033793 | | Freshwater lake sediment | |
| JGI | Ga0307443_1009138 | | Salt marsh sediment | |
| JGI | Ga0315532_1006943 | | Salt marsh sediment | |
| JGI | Ga0315554_1005387 | | Salt marsh sediment | |
| NCBI WGS | QNBS01000103.1 | Cas13b-t3 | Planctomycetes bacterium | |
| | | | isolate B28_G16 (marine | |
| | | | sediment) | |
| JGI | Ga0315285_10018775 | | Freshwater lake sediment | |
| JGI | Ga0315294_10038294 | | Freshwater lake sediment | |
| JGI | Ga0315533_1000464 | | Salt marsh sediment | |
| JGI | Ga0209427_10000033 | Cas13b-t2 | Marine sediment | |
| JGI | Ga0114919_10002421 | Cas13b-t1 | Atlantic deep subsurface | |

JGI: Joint Genome Institute
NCBI WGS: National Center for Biotechnology Information Whole Genome Shotgun

TABLE 33
Direct repeat sequences of Cas13 orthologs used in this example

| Organism | Abbreviation key | DR sequence |
|---|---|---|
| Riemerella anatipestifer | Ran | GTTGGGACTGCTCTCACTTTGAAGGGTATTCACAA |
| | | C |
| | | (SEQ ID NO: 5861) |
| Prevotella sp. P5-125 | Psp | GTTGTGGAAGGTCCAGTTTTGAGGGGCTATTACAA |
| | | C |
| | | (SEQ ID NO: 5862) |
| | b-t1 | GCTGTAATCACCCCACAAATCGGAGGCTTCTTCAG |
| | | C |
| | | (SEQ ID NO: 5863) |
| | b-t2 | GCTGTAATCACCCCACAAATCGGGGGCTTCTCCAG |
| | | C |
| | | (SEQ ID NO: 5864) |
| | b-t3 | GCTGTAATCACCCCACAAATCGGGGGCTGCTCCAG |
| | | C |
| | | (SEQ ID NO: 5865) |
| | b-t4 | GCTGTTACTTCCCCACAAATTGAGGCCCATCACAG |
| | | C |
| | | (SEQ ID NO: 5866) |
| | b-t5 | GCTGTGATTACCCTGCAAATCGAGGGCTGCTCCAG |
| | | c |
| | | (SEQ ID NO: 5867) |

TABLE 34
Cas13 orthologs used in this example

| Abbreviation | |
|---|---|
| key | Protein sequence |
| Ran | MEKPLLPNVYTLKHKFFWGAFLNIARHNAFITICHINEQLGLKTPSNDDKIVDVVCETWNNIL |
| | NNDHDLLKKSQLTELILKHFPFLTAMCYHPPKKEGKKKGHQKEQQKEKESEAQSQAEALNP |
| | SKLIEALEILVNQLHSLRNYYSHYKHKKPDAEKDIFKHLYKAFDASLRMVKEDYKAHFTVN |
| | LTRDFAHLNRKGKNKQDNPDFNRYRFEKDGFFTESGLLFFTNLFLDKRDAYWMLKKVSGF |
| | KASHKQREKMTTEVFCRSRILLPKLRLESRYDHNQMLLDMLSELSRCPKLLYEKLSEENKKH |
| | FQVEADGFLDEIEEEQNPFKDTLIRHQDRFPYFALRYLDLNESFKSIRFQVDLGTYHYCIYDK |
| | KIGDEQEKRHLTRTLLSFGRLQDFTEINRPQEWKALTKDLDYKETSNQPFISKTTPHYHITDN |
| | KIGFRLGTSKELYPSLEIKDGANRIAKYPYNSGFVAHAFISVHELLPLMFYQHLTGKSEDLLK |
| | ETVRHIQRIYKDFEEERINTIEDLEKANQGRLPLGAFPKQMLGLLQNKQPDLSEKAKIKIEKLI |
| | AETKLLSHRLNTKLKSSPKLGKRREKLIKTGVLADWLVKDFMRFQPVAYDAQNQPIKSSKA |
| | NSTEFWFIRRALALYGGEKNRLEGYFKQTNLIGNTNPHPFLNKFNWKACRNLVDFYQQYLE |
| | QREKFLEAIKNQPWEPYQYCLLLKIPKENRKNLVKGWEQGGISLPRGLFTEAIRETLSEDLML |
| | SKPIRKEIKKHGRVGFISRAITLYFKEKYQDKHQSFYNLSYKLEAKAPLLKREEHYEYWQQN |
| | KPQSPTESQRLELHTSDRWKDYLLYKRWQHLEKKLRLYRNQDVMLWLMTLELTKNHFKEL |
| | NLNYHQLKLENLAVNVQEADAKLNPLNQTLPMVLPVKVYPATAFGEVQYHKTPIRTVYIRE |
| | EHTKALKMGNFKALVKDRRLNGLFSFIKEENDTQKHPISQLRLRRELEIYQSLRVDAFKETLS |
| | LEEKLLNKHTSLSSLENEFRALLEEWKKEYAASSMVTDEHIAFIASVRNAFCHNQYPFYKEA |
| | LHAPIPLFTVAQPTTEEKDGLGIAEALLKVLREYCEIVKSQI (SEQ ID NO: 5868) |
| Psp | MNIPALVENQKKYFGTYSVMAMLNAQTVLDHIQKVADIEGEQNENNENLWFHPVMSHLYN |
| | AKNGYDKQPEKTMFIIERLQSYFPFLKIMAENQREYSNGKYKQNRVEVNSNDIFEVLKRAFG |
| | VLKMYRDLTNHYKTYEEKLNDGCEFLTSTEQPLSGMINNYYTVALRNMNERYGYKTEDLA |
| | FIQDKRFKFVKDAYGKKKSQVNTGFFLSLQDYNGDTQKKLHLSGVGIALLICLFLDKQYINIF |
| | LSRLPIFSSYNAQSEERRIIIRSFGINSIKLPKDRIHSEKSNKSVAMDMLNEVKRCPDELFTTLS |
| | AEKQSRFRIISDDHNEVLMKRSSDRFVPLLLQYIDYGKLFDHIRFHVNMGKLRYLLKADKTC |
| | IDGQTRVRVIEQPLNGFGRLEEAETMRKQENGTFGNSGIRIRDFENMKRDDANPANYPYIVD |
| | TYTHYILENNKVEMFINDKEDSAPLLPVIEDDRYVVKTIPSCRMSTLEIPAMAFHMFLFGSKK |
| | TEKLIVDVHNRYKRLFQAMQKEEVTAENIASFGIAESDLPQKILDLISGNAHGKDVDAFIRLT |
| | VDDMLTDTERRIKRFKDDRKSIRSADNKMGKRGFKQISTGKLADFLAKDIVLFQPSVNDGEN |
| | KITGLNYRIMQSAIAVYDSGDDYEAKQQFKLMFEKARLIGKGTTEPHPFLYKVFARSIPANA |
| | VEFYERYLIERKFYLTGLSNEIKKGNRVDVPFIRRDQNKWKTPAMKTLGRIYSEDLPVELPR |
| | QMFDNEIKSHLKSLPQMEGIDFNNANVTYLIAEYMKRVLDDDFQTFYQWNRNYRYMDML |
| | KGEYDRKGSLQHCFTSVEEREGLWKERASRTERYRKQASNKIRSNRQMRNASSEEIETILDK |
| | RLSNSRNEYQKSEKVIRRYRVQDALLFLLAKKTLTELADFDGERFKLKEIMPDAEKGILSEIM |
| | PMSFTFEKGGKKYTITSEGMKLKNYGDFFVLASDKRIGNLLELVGSDIVSKEDIMEEFNKYD |
| | QCRPEISSIVFNLEKWAFDTYPELSARVDREEKVDFKSILKILLNNKNINKEQSDILRKIRNAF |
| | DHNNYPDKGVVEIKALPEIAMSIKKAFGEYAIMK (SEQ ID NO: 5869) |
| b-t1 | MEFENIKKTSNKEVYSIEQYEGEKKWCFAIVLNRAQTNLEENPKLFEQTLTRFEKIMKQDWFN |
| | EETKKLIYEKEEENKVKEEIQIAASERLKNLANYFSAYLHAPDCLIFNRNDTIRIIMEKAYEKSR |
| | FEAKKKQQEDISIEFPELFEEEDKITSAGVVFFVSFFIERRFLNRLMGYVQGFRKTEGEYNITRQ |
| | VFSKYCLKDSYSVQAQDHDAVMFRDILGYLSRVPTEIYQHIKLTRKRSQDQLSERKTDKFILF |
| | ALKYLEDYGLKDLADYTACFARSKIKRENEDTKETDGNKHKFHREKPVVEIHFDKEKQDQFY |
| | IKRNNVILKAQKKGGQSNVFRMGVYELKYLVLLSLLGKAEEAIQRIDRYISSLKKQLPYLDKIS |
| | NEEIQKSINFLPRFVRSRLGLLQVDDEKRLKTRLEYVKAKWTDKKEGSRKLELHRKGRDILRY |
| | INERCDRPLSRKEYNNILKFIVNKDFAGFYNELEELKRTRRLDKNIIQKLSGHTTLNALHERVC |
| | DLVLQELGSLQSENLKEYIGLIPKEEKEVTFREKVDRILEQPVVYKGFLRYEFFKEDKKSFARL |
| | VEEAIKTKWSDFDIPLGEEYYNIPSLDRFDRTNKKLYETLAMDRLCLMMARQYYLRLNEKLA |
| | EKAQHIYWKKEDGREVIIFKFQNPKEQKKSFSIRFSILDYTKMYVMDDPEFLSRLWEYFIPKEA |
| | KEIDYHKHYARAFDKYTNLQKEGIDAILKLEGRIIERRKIKPAKNYIEFQEIMNRSGYNNDQQV |
| | ALKRVANALLAYNLNFEREHLKRFYGVVKREGIEKKWSLIV (SEQ ID NO: 5870) |
| b-t2 | MQVENIKKGSSQGMYSIEQYEGAKKWCFAIVLNRAQTNLQGNPKLFEETLTRFERIRKEDWF |
| | DQETKKLIYAKQEQNEVEEEIQKAADEKLRDLRNYFSHYFHTPDCLIFTQNDPVRIIMEKAYE |
| | KARFEQAKKEQEDISIEFGELFEENGRITSAGVVFFASFFAERRFLNRLMGYVQGFTRTEGEYK |
| | ITRDVFSTYCLRDSYSVKTPDHDAVMFRDILGYLSRVPSESYQRIKESQMRSETQLSERKTDKF |
| | ILFALNYLEDYGLEDLADYTACFARTRIKREQDENTDGKEQKPHRKKPRVEIHFERAEGDPFYI |
| | KHNNVILRTQKKGAQTYIFRMGVYELKYLVLLSLLGKGAEAVKRIDRYVHSLRNQLPHIEKK |
| | STEEIEGYVRFLPRFVRSHLGLLGVDDEKKIKARVDYVKAKWLEKKEKSRELQLHRKGRDILR |
| | YINERCERPLNIDEYNRILELLVTKHLDGFYRELEELKKTRRIDKNIVCNLSRHKSVNALHEKV |
| | CDLVVQELESLGREELKEYVGLIPKEEKEVSFEEKTDRVVKQPVIYKGFLRNEFFRESRKSFAR |
| | LVEEAVREKGEVYDVPLGGEYYEIVSLDTFDKDNKRLYETLAMDRLLLMIARQYHLSLNKEL |
| | AKRAQQIEWKKEDGEEVIIFTLKNPAQPEQSCSVRFSLRDYTKLYVMDDAEFLARLCDYFLPK |
| | DEEQIDYHRLYTQGMNRYTNLQREGIEAILELEKKTIGPEQPRPPKNYIPFSEIMDKSAYNEDD |
| | QKALRRVRNALLHHNLNFARADFKRFCGIMKREGIEKRWSLAV (SEQ ID NO: 5871) |
| b-t3 | MAQVSKQTSKKRELSIDEYQGARKWCFTIAFNKALVNRDKNDGLFVESLLRHEKYSKHDWY |
| | DEDTRALIKCSTQAANAKAEALANYFSAYRHSPGCLTFTAEDELRTIMERAYERAIFECRRRE |
| | TEVIIEFPSLFEGDRITTAGVVFFVSFFVERRVLDRLYGAVSGLKKNEGQYKLTRKALSMYCLK |
| | DSRFTKAWDKRVLLFRDILAQLGRIPAEAYEYYHGEQGDKKRANDNEGTNPKRHKDKFIEFA |
| | LHYLEAQHSEICFGRRHIVREEAGAGDEHKKHRTKGKVVVDFSKKDEDQSYYISKNNVIVRID |
| | KNAGPRSYRMGLNELKYLVLLSLQGKGDDAIAKLYRYRQHVENILDVVKVTDKDNHVFLPR |
| | FVLEQHGIGRKAFKQRIDGRVKHVRGVWEKKKAATNEMTLHEKARDILQYVNENCTRSFNP |
| | GEYNRLLVCLVGKDVENFQAGLKRLQLAERIDGRVYSIFAQTSTINEMHQVVCDQILNRLCRI |
| | GDQKLYDYVGLGKKDEIDYKQKVAWFKEHISIRRGFLRKKFWYDSKKGFAKLVEEHLESGG |
| | GQRDVGLDKKYYHIDAIGRFEGANPALYETLARDRLCLMMAQYFLGSVRKELGNKIVWSND |
| | SIELPVEGSVGNEKSIVFSVSDYGKLYVLDDAEFLGRICEYFMPHEKGKIRYHTVYEKGFRAY |
| | NDLQKKCVEAVLAFEEKVVKAKKMSEKEGAHYIDFREILAQTMCKEAEKTAVNKVARAFFA |
| | HHLKFVIDEFGLFSDVMKKYGIEKEWKFPVK (SEQ ID NO: 5872) |
| b-t4 | MNIIKLKKEEAAFYFNQTILNLSGLDEIIEKQIPHIISNKENAKKVIDKIFNNRLLLKSVENYIYNF |
| | KDVAKNARTEIEAILLKLVELRNFYSHYVHNDTVKILSNGEKPILEKYYQIAIEATGSKNVKLV |
| | IIENNNCLTDSGVLFLLCMFLKKSQANKLISSVSGFKRNDKEGQPRRNLFTYYSVREGYKVVP |
| | DMQKHFLLFALVNHLSEQDDHIEKQQQSDELGKGLFFHRIASTFLNESGIFNKMQFYTYQSNR |
| | LKEKRGELKHEKDTFTWIEPFQGNSYFTLNGHKGVISEDQLKELCYTILIEKQNVDSLEGKIIQF |
| | LKKFQNVSSKQQVDEDELLKREYFPANYFGRAGTGTLKEKILNRLDKRMDPTSKVTDKAYD |
| | KMIEVMEFINMCLPSDEKLRQKDYRRYLKMVRFWNKEKHNIKREFDSKKWTRFLPTELWNK |
| | RNLEEAYQLARKENKKKLEDMRNQVRSLKENDLEKYQQINYVNDLENLRLLSQELGVKWQE |
| | KDWVEYSGQIKKQISDNQKLTIMKQRITAELKKMHGIENLNLRISIDTNKSRQTVMNRIALPK |
| | GFVKNHIQQNSSEKISKRIREDYCKIELSGKYEELSRQFFDKKNFDKMTLINGLCEKNKLIAFM |
| | VIYLLERLGFELKEKTKLGELKQTRMTYKISDKVKEDIPLSYYPKLVYAMNRKYVDNIDSYAF |
| | AAYESKKAILDKVDIIEKQRMEFIKQVLCFEEYIFENRIIEKSKFNDEETHISFTQIHDELIKKGR |
| | DTEKLSKLKHARNKALHGEIPDGTSFEKAKLLINEIKK (SEQ ID NO: 5873) |
| b-t5 | MGIDYSLTSDCYRGINKSCFAVALNIAYDNCDHKGCRTLLSEVLRSKGGISDEQIKSQVVDGIQ |
| | KRLKDIRNYFSHYYHAEDCLRFGDQDAVKVFLEEIYKNAESKTVGATKESDYKGVVPPLFEL |
| | HNGTYMITAAGVIFLASFFCHRSNVYRMLGAVKGFKHTGKEQLSDGQKRDYGFTRRLLAYY |
| | ALRDSYSVGAEDKTRCFREILSYLSRVPQLAVDWLNEQQLLTPEEKEAFLNQPAEDEGGDISD |
| | SSSSDKNKKSKEKRRSLRRDEKFILFAIQFIEGWAAEQGLDVTFARYQKTVEKAENKNQDGKQ |
| | ARAVQLKYRNQGLNPDFNNEWMYYIQNEHAIIQIKLNNKKAVAARISENELKYLVLLIFEEKG |
| | NDAVQKLNCYIYSMSQKIEGEWKHRPEDERWMPSFTKRADRTVTPEAVQSRLSYIRKQLQETI |
| | EKIGQEEPRNNKWLIYKGKKISMILKFISDSIRDIQRRPNVKQYHILRDALQRLDFDGFYKELQ |
| | NYVNDGRIAVSLYDQIKGVNDISGLCKKVCELTLERLAGLEAKNGSELRRYIGLEAQEKHPKY |
| | GEWNTLQEKAKRFLESQFSIGKNFLRKMFYGDCCQKRCFDEEKGYNTQAKERKSLYSIVKEK |
| | LKDIKPIHDDRWYLIDRNPKNYDNKHSRIIRQMCNTYIQDVLCMKMAMWHYEKLISATEFRN |
| | KLEWNCIGQGNMGYERYSLWYKTGCGVVIQFTPADFLRLDIIEKPAMIENICQCFVLGNKKLN |
| | SGAEKKITWDKFNKDGIAKYRKRQAEAVRAIFAFEEGLKIQEDKWSHERYFPFCNILDEAVKQ |
| | GKIKDTGKDKEALNRGRNDFFHEEFKSTEDQQAIFQKYFPIVERKDDTKKRRDKKQK |
| | (SEQ ID NO: 5874) |

TABLE 35
Primers for cloning plasmids used in PFS screen

| Name | Sequence |
|---|---|
| Cas13b-t1_gene_F | TGCCGGGCCTCTTGCGGGATTTTACACTTTATGCTTCCGGCTCGTATGTTA |
| | GGAGGTCTTTATCATGGAATTCGAGAACATCAA (SEQ ID NO: 5875) |
| Cas13b-t1_gene_R | ATGCTGTCGGAATGGACGATTCACACGATCAGGGACCATT (SEQ ID NO: |
| | 5876) |
| Cas13b-t2_gene_F | TGCCGGGCCTCTTGCGGGATTTTACACTTTATGCTTCCGGCTCGTATGTTA |
| | GGAGGTCTTTATCATGCAGGTCGAGAACATCAA (SEQ ID NO: 5877) |
| Cas13b-t2_gene_R | ATGCTGTCGGAATGGACGATTCACACAGCCAGGGACCATC |
| | (SEQ ID NO: 5878) |
| Cas13b-t3_gene_F | TGCCGGGCCTCTTGCGGGATTTTACACTTTATGCTTCCGGCTCGTATGTTA |
| | GGAGGTCTTTATCATGGCCCAGGTGTCCAAGCA (SEQ ID NO: 5879) |
| Cas13b-t3_gene_R | ATGCTGTCGGAATGGACGATTCACTTCACGGGGAACTTCC |
| | (SEQ ID NO: 5880) |
| Cas13b-t4_gene_F | TGCCGGGCCTCTTGCGGGATTTTACACTTTATGCTTCCGGCTCGTATGTTA |
| | GGAGGTCTTTATCATGAACATCATCAAGCTGAA (SEQ ID NO: 5881) |
| Cas13b-t4_gene_R | ATGCTGTCGGAATGGACGATTTACTTCTTAATCTCATTGA |
| | (SEQ ID NO: 5882) |
| Cas13b-t5_gene_F | TGCCGGGCCTCTTGCGGGATTTTACACTTTATGCTTCCGGCTCGTATGTTA |
| | GGAGGTCTTTATCATGGGCATCGATTACAGCCT (SEQ ID NO: 5883) |
| Cas13b-t5_gene_R | ATGCTGTCGGAATGGACGATTTACTTCTGCTTCTTGTCTC |
| | (SEQ ID NO: 5884) |
| crRNA_expression_ | TGCCGGGCCTCTTGCGGGATATCTTGACAGCTAGCTCAGTCCT |
| bac_F | (SEQ ID NO: 5885) |
| Cas13b-t1_crRNA_R | GCGTCCGGCGTAGAGGATCCGCTGTAATCACCCCACAAAT |
| | (SEQ ID NO: 5886) |
| Cas13b-t2_crRNA_R | GCGTCCGGCGTAGAGGATCCGCTGTAATCACCCCACAAAT |
| | (SEQ ID NO: 5887) |
| Cas13b-t3_crRNA_R | GCGTCCGGCGTAGAGGATCCGCTGTAATCACCCCACAAAT |
| | (SEQ ID NO: 5888) |
| Cas13b-t4_crRNA_R | GCGTCCGGCGTAGAGGATCCGCTGTTACTTCCCCACAAAT |
| | (SEQ ID NO: 5889) |
| Cas13b-t5_crRNA_R | GCGTCCGGCGTAGAGGATCCGCTGTGATTACCCTGCAAAT |
| | (SEQ ID NO: 5890) |

TABLE 11
Primers for cloning mammalian expression plasmids. Mutations
introduced by PCR are shown in lower case.

| Name | Sequence |
|---|---|
| crRNA_expression_ | GACCGAGCGCAGCGAGTCAGTGAGCGAGGA (SEQ ID NO: 5891) |
| mammalian_F | |
| Cas13b- | AACGACGGCCAGTGAATTCGAGCTCGGTACCAAAAAAGCTGTAATCACCCCAC |
| t1_crRNA_mammalian_ | AAATCGGAGGCTTCTTCAGCTTGTCTTCGTCCCAGGAAGACATGGTGTTTCGTC |
| R | CTTTCCACAAGATATATAAA (SEQ ID NO: 5892) |
| Cas13b- | AACGACGGCCAGTGAATTCGAGCTCGGTACCAAAAAAGCTGTAATCACCCCAC |
| t3_crRNA_mammalian_ | AAATCGGGGGCTGCTCCAGCTTGTCTTCGTCCCAGGAAGACATGGTGTTTCGT |
| R | CCTTTCCACAAGATATATAAA (SEQ ID NO: 5893) |
| Cas13b- | AACGACGGCCAGTGAATTCGAGCTCGGTACCAAAAAAGCTGTGATTACCCTGC |
| t5_crRNA_mammalian_ | AAATCGAGGGCTGCTCCAGCTTGTCTTCGTCCCAGGAAGACATGGTGTTTCGT |
| R | CCTTTCCACAAGATATATAAA (SEQ ID NO: 5894) |
| Cas13b- | GAGACCCAAGCTGGCTAGCGTTTAAACTTAAGCTTGCCACCATGGGATCCCTT |
| t1_gene_mammalian_ | CAACTGCCTCCACTTGAAAGACTGACACTGGGATCCGAATTCGAGAACATCAA |
| F | GAAAA (SEQ ID NO: 5895) |
| Cas13b- | CAGGTAGgcGCTGAAGTAGTTTgcCAGGTTC (SEQ ID NO: 5896) |
| t1_HEPN1_mut_R | |
| Cas13b- | GAACCTGgcAAACTACTTCAGCgcCTACCTG (SEQ ID NO: 5897) |
| t1_HEPN1_mut_F | |
| Cas13b- | GTTGTAGgcCAGCAGGGCGTTCgcCACTCTC (SEQ ID NO: 5898) |
| t1_HEPN2_mut_R | |
| Cas13b- | GAGAGTGgcGAACGCCCTGCTGgcCTACAAC (SEQ ID NO: 5899) |
| t1_HEPN2_mut_F | |
| Cas13b- | ACTACCGCCTGACCCTCCCACGATCAGGGACCATTTTTTCTCG |
| t1_forREPAIR_R | (SEQ ID NO: 5900) |
| Cas13b- | GAGACCCAAGCTGGCTAGCGTTTAAACTTAAGCTTGCCACCATGGGATCCCTT |
| t3_gene_mammalian_ | CAACTGCCTCCACTTGAAAGACTGACACTGGGATCCGCCCAGGTGTCCAAGCA |
| F | GACCA (SEQ ID NO: 5901) |
| Cas13b- | TCTGTAGgcGCTGAAGTAGTTTgcCAGAGCC (SEQ ID NO: 5902) |
| t3_HEPN1_mut_R | |
| Cas13b- | GGCTCTGgcAAACTACTTCAGCgcCTACAGA (SEQ ID NO: 5903) |
| t3_HEPN1_mut_F | |
| Cas13b- | GTGGTGGgcAAAGAAGGCTCTCgcCACTTTG (SEQ ID NO: 5904) |
| t3_HEPN2_mut_R | |
| Cas13b- | CAAAGTGgcGAGAGCCTTCTTTgcCCACCAC (SEQ ID NO: 5905) |
| t3_HEPN2_mut_F | |
| Cas13b- | ACTACCGCCTGACCCTCCCTTCACGGGGAACTTCCATTCTTTC |
| 13_forREPAIR_R | (SEQ ID NO: 5906) |
| Cas13b- | GAGACCCAAGCTGGCTAGCGTTTAAACTTAAGCTTGCCACCATGGGATCCCTT |
| t5_gene_mammalian_ | CAACTGCCTCCACTTGAAAGACTGACACTGGGATCCATGGGCATCGATTACAG |
| F | CCTGACCA (SEQ ID NO: 5907) |
| ADAR2_F | GGAGGGTCAGGCGGTAGTCAGCTGCATTTA (SEQ ID NO: 5908) |
| pcDNA_expression_ | GGGTTTAAACGGGCCCTCTAGACTC (SEQ ID NO: 5909) |
| R | |

TABLE 37
Primers for cloning yeast constructs used in this example

| Name | Sequence |
|---|---|
| ADAR_mut_library_F | CCAGATCGGGGGTTCCGGCGGGTCC (SEQ ID NO: 5910) |
| ADAR_mut_library_R | TATTTAATAATAAAAATCATAAATCATAAGAAATTCGCCACGTGAGTCTA |
| | GGATCCTCA (SEQ ID NO: 5911) |
| URA3_F | ACTCACTATAGGGAATATTAAGCTTTTCAATTCATCATTTTTTTT |
| | (SEQ ID NO: 5912) |
| URA3_R | TTAGTTTTGCTGGCCGCATC (SEQ ID NO: 5913) |
| URA3_TAG_R | AATGTCTGCCTATTCTGCTAT (SEQ ID NO: 5914) |
| URA3_TAG_F | ATAGCAGAATAGGCAGACATT (SEQ ID NO: 5915) |
| ADE2_F | GGGCGCGTGGGGATGATCCATTCTTGAATAATACATAACT |
| | (SEQ ID NO: 5916) |
| ADE2_R | AAACAACAAAAGGATACTAGTCGCTATCCTCGGTTCTGCAT |
| | (SEQ ID NO: 5917) |
| ADE2_TGA_R | TTAGTAAATGGTGCTCATTTTTCGGCGTACA (SEQ ID NO: 5918) |
| ADE2_TGA_F | TGTACGCCGAAAAATGAGCACCATTTACTAA (SEQ ID NO: 5919) |
| LEU2_F | AACTGTGGGAATACTCAGGTATCGT (SEQ ID NO: 5920) |
| LEU2_R | TTAAGCAAGGATTTTCTTAACTTCTTCGGC (SEQ ID NO: 5921) |
| ADAR2_yeast_F | CCAGATCGGGGGTTCCGGCGGGTCC (SEQ ID NO: 5922) |
| ADAR2_yeast_R | GAACAAAAGCTGGAGCTCCACCG (SEQ ID NO: 5923) |
| E620G_yeast_R | GACGCCCTGCCTAACcCATCTTTGCCGGTCG (SEQ ID NO: 5924) |
| E620G_yeast_F | CGACCGGCAAAGATGgGTTAGGCAGGGCGTC (SEQ ID NO: 5925) |
| ADE2 targeting spacer | CGTCAATGGTGCcCATTTTTCGGCGTACAAAGGA (SEQ ID NO: 5926) |
| (22 bp mismatch) | |

TABLE 38
Next-generation sequencing library preparation first round PCR primers
for PFS screen

| Name | Sequence |
|---|---|
| PFS_NGS_F1 | CTTTCCCTACACGACGCTCTTCCGATCTCGCTAGCTCAGTCCTAGGTA |
| | TAATGCTAGC (SEQ ID NO: 5927) |
| PFS_NGS_F1 | CTTTCCCTACACGACGCTCTTCCGATCTACGCTAGCTCAGTCCTAGGT |
| | ATAATGCTAGC (SEQ ID NO: 5928) |
| PFS_NGS_F1 | CTTTCCCTACACGACGCTCTTCCGATCTGACGCTAGCTCAGTCCTAGG |
| | TATAATGCTAGC (SEQ ID NO: 5929) |
| PFS_NGS_F1 | CTTTCCCTACACGACGCTCTTCCGATCTTGACGCTAGCTCAGTCCTAG |
| | GTATAATGCTAGC (SEQ ID NO: 5930) |
| Cas13b-t1_PFS_NGS_R | GACTGGAGTTCAGACGTGTGCTCTTCCGATCTCCACAAATCGGAGGC |
| | TTCTTCAGC (SEQ ID NO: 5931) |
| Cas13b-t2_PFS_NGS_R | GACTGGAGTTCAGACGTGTGCTCTTCCGATCTCAAATCGGGGGCTTCT |
| | CCAGC (SEQ ID NO: 5932) |
| Cas13b-t3_PFS_NGS_R | GACTGGAGTTCAGACGTGTGCTCTTCCGATCTATCGGGGGCTGCTCCA |
| | GC (SEQ ID NO: 5933) |
| Cas13b-t4_PFS_NGS_R | GACTGGAGTTCAGACGTGTGCTCTTCCGATCTCCACAAATTGAGGCC |
| | CATCACAGC (SEQ ID NO: 5934) |
| Cas13b-t5_PFS_NGS_R | GACTGGAGTTCAGACGTGTGCTCTTCCGATCTCAAATCGAGGGCTGC |
| | TCCAGC (SEQ ID NO: 5935) |

TABLE 39
gRNA spacer sequences for Gaussia luciferase knockdown in
HEK293FT cells. Relative expression is as measured by depletion of luciferase activity
compared to a GFP control.

| | | Bt1 relative | Bt3 relative | Bt5 relative |
|---|---|---|---|---|
| | | expression | expression | expression |
| Name | Spacer sequence | (FIG. 1g) | (FIG. 1g) | (FIG. 1g) |
| Gaussia luciferase | TTTGTCGCCTTCGTAGGTGTG | 0.55062748 | 0.38468809 | 0.3397597 |
| spacer 1 | GCAGCGTCC | | | |
| | (SEQ ID NO: 5936) | | | |
| Gaussia luciferase | CCAGGAATCTCAGGAATGTC | 0.5538685 | 0.35529333 | 0.44593268 |
| spacer 2 | GACGATCGCC | | | |
| | (SEQ ID NO: 5937) | | | |
| Gaussia luciferase | GTCGACGATCGCCTCGCCTAT | 0.38844716 | 0.29975324 | 0.45171626 |
| spacer 3 | GCCGCCCTG | | | |
| | (SEQ ID NO: 5938) | | | |
| Gaussia luciferase | CGATGAACTGCTCCATGGGC | 0.74248373 | 0.7076885 | 0.62729858 |
| spacer 4 | TCCAAGTCCT | | | |
| | (SEQ ID NO: 5939) | | | |
| Gaussia luciferase | TCGCGAAGTTGCTGGCCACG | 0.48985892 | 0.56514571 | 0.34100497 |
| spacer 5 | GCCACGATGT | | | |
| | (SEQ ID NO: 5940) | | | |
| Gaussia luciferase | CAGCCCCTGGTGCAGCCAGC | 0.73143084 | 0.45223832 | 0.59533757 |
| spacer 6 | TTTCCGGGCA | | | |
| | (SEQ ID NO: 5941) | | | |
| Gaussia luciferase | GGCCCCCTTGATCTTGTCCAC | 0.51439053 | 0.21018064 | 0.37180078 |
| spacer 7 | CTGGCCCTG | | | |
| | (SEQ ID NO: 5942) | | | |
| Gaussia luciferase | GATGTGGGACAGGCAGATCA | 0.65183105 | 0.46064806 | 0.51302536 |
| spacer 8 | GACAGCCCCT | | | |
| | (SEQ ID NO: 5943) | | | |
| Gaussia luciferase | CGTTGCGGCAGCCACTTCTTG | 0.42079237 | 0.26868947 | 0.35726081 |
| spacer 9 | AGCAGGTCA | | | |
| | (SEQ ID NO: 5944) | | | |
| Gaussia luciferase | TGTCGACGATCGCCTCGCCTA | 0.63580411 | 0.30643568 | 0.36228356 |
| spacer 10 | TGCCGCCCT | | | |
| | (SEQ ID NO: 5945) | | | |
| Gaussia luciferase | CTCGGCCACAGCGATGCAGA | 0.57120708 | 0.42967329 | 0.31493639 |
| spacer 11 | TCAGGGCAAA | | | |
| | (SEQ ID NO: 5946) | | | |
| Gaussia luciferase | CCTTGAACCCAGGAATCTCA | 0.58010478 | 0.27618297 | 0.4351957 |
| spacer 12 | GGAATGTCGA | | | |
| | (SEQ ID NO: 5947) | | | |
| Gaussia luciferase | CCGGGCATTGGCTTCCATCTC | 0.57770913 | 0.33286417 | 0.30132433 |
| spacer 13 | TTTGAGCAC | | | |
| | (SEQ ID NO: 5948) | | | |
| Gaussia luciferase | ACAGGCAGATCAGACAGCCC | 0.77305496 | 0.54830739 | 0.69564972 |
| spacer 14 | CTGGTGCAGC | | | |
| | (SEQ ID NO: 5949) | | | |
| Gaussia luciferase | GTCACCACCGGCCCCCTTGAT | 0.74591779 | 0.65311879 | 0.65571849 |
| spacer 15 | CTTGTCCAC | | | |
| | (SEQ ID NO: 5950) | | | |
| Gaussia luciferase | CTTGATGTGGGACAGGCAGA | 0.62758078 | 0.47392894 | 0.43519874 |
| spacer 16 | TCAGACAGCC | | | |
| | (SEQ ID NO: 5951) | | | |
| Gaussia luciferase | CTGGCCCTGGATCTTGCTGGC | 0.4753283 | 0.18260215 | 0.32822212 |
| spacer 17 | AAAGGTCGC | | | |
| | (SEQ ID NO: 5952) | | | |
| Gaussia luciferase | GGGCTCCAAGTCCTTGAACC | 0.60092434 | 0.3810874 | 0.42402921 |
| spacer 18 | CAGGAATCTC | | | |
| | (SEQ ID NO: 5953) | | | |
| Gaussia luciferase | ATGAACTGCTCCATGGGCTCC | 0.5442858 | 0.28338889 | 0.55534371 |
| spacer 19 | AAGTCCTTG | | | |
| | (SEQ ID NO: 5954) | | | |
| Gaussia luciferase | TCGAGATCCGTGGTCGCGAA | 0.48568996 | 0.35394464 | 0.36567816 |
| spacer 20 | GTTGCTGGCC | | | |
| | (SEQ ID NO: 5955) | | | |
| Non-targeting spacer 1 | CCTCTGAAACGATGGTGCAT | 0.71872993 | 0.76013732 | 0.65806897 |
| | GGTAGTGACC | | | |
| | (SEQ ID NO: 5956) | | | |
| Non-targeting spacer 2 | CCTACAGGTTCTGAGTGGGT | 0.85589957 | 0.70637393 | 0.70777278 |
| | GCACGGCCGT | | | |
| | (SEQ ID NO: 5957) | | | |
| Non-targeting spacer 3 | GAAAATGGCCTATACCTTAG | 0.78372124 | 0.72463671 | 0.71052405 |
| | GGTTCGCGCG | | | |
| | (SEQ ID NO: 5958) | | | |
| Non-targeting spacer 4 | GTAATGCCTGGCTTGTCGACG | 0.7999484 | 0.72841838 | 0.72973389 |
| | CATAGTCTG | | | |
| | (SEQ ID NO: 5959) | | | |
| Gaussia luciferase | GGGCATTGGCTTCCATCTCTT | | | |
| guide 1 (Supplementary | TGAGCACCT | | | |
| FIG. 2) | (SEQ ID NO: 5960) | | | |
| Gaussia luciferase | GGAATGTCGACGATCGCCTC | | | |
| guide 2 (Supplementary | GCCTATGCCG | | | |
| FIG. 2) | (SEQ ID NO: 5961) | | | |

TABLE 40
gRNA spacer sequences for endogenous transcript knockdown in
HEK293FT cells. Relative expression is as measured by qPCR as compared to GFP control.

| | | Bt1 relative | Bt3 relative |
|---|---|---|---|
| | | expression | expression |
| Name | Spacer sequence | (FIG. 1h) | (FIG. 1h) |
| CXCR4 spacer 1 | AGAGGTTGACTGTGTAGATGACATGGACTG | 0.4891226 | 0.43242082 |
| | (SEQ ID NO: 5962) | | |
| CXCR4 spacer 2 | GACAGGTGCAGCCTGTACTTGTCCGTCATG | 0.52526336 | 0.4274336 |
| | (SEQ ID NO: 5963) | | |
| CXCR4 spacer 3 | AAAGAGGAGGTCGGCCACTGACAGGTGCAG | 0.55379783 | 0.4922889 |
| | (SEQ ID NO: 5964) | | |
| STAT1 spacer 1 | CAGGAAGAAGGACAGATTCCTGGGTTCCGC | 0.1702036 | 0.26428803 |
| | (SEQ ID NO: 5965) | | |
| STAT1 spacer 2 | CCCAACATGTTCAGCTGGTCCACATTGAGA | 0.19275451 | 0.28221787 |
| | (SEQ ID NO: 5966) | | |
| STAT1 spacer 3 | ATTGAGACCTCTTTTGGTGACAGAAGAAAA | 0.32015 | 0.36930278 |
| | (SEQ ID NO: 5967) | | |
| STAT3 spacer 1 | GCAGCTCCTCAGTCACAATCAGGGAAGCAT | 0.54048912 | 0.43548581 |
| | (SEQ ID NO: 5968) | | |
| STAT3 spacer 2 | CGGTCTCAAAGGTGATCAGGTGCAGCTCCT | 0.61276978 | 0.49713932 |
| | (SEQ ID NO: 5969) | | |
| STAT3 spacer 3 | CTCGGTCTCAAAGGTGATCAGGTGCAGCTC | 0.5595753 | 0.4890901 |
| | (SEQ ID NO: 5970) | | |
| HRAS spacer 1 | GCGTGCAGCCAGGTCACACTTGTTCCCCAC | 0.43228711 | 0.40269921 |
| | (SEQ ID NO: 5971) | | |
| HRAS spacer 2 | GAGCCTGCCGAGATTCCACAGTGCGTGCAG | 0.84377946 | 0.35728849 |
| | (SEQ ID NO: 5972) | | |
| HRAS spacer 3 | AGTGCGTGCAGCCAGGTCACACTTGTTCCC | 0.49958394 | 0.47062756 |
| | (SEQ ID NO: 5973) | | |
| PPIB spacer 1 | CTGTCTTGGTGCTCTCCACCTTCCGCACCA | 0.47982775 | 0.42696786 |
| | (SEQ ID NO: 5974) | | |
| PPIB spacer 2 | GGGAGCCGTTGGTGTCTTTGCCTGCGTTGG | 0.33558372 | 0.33160707 |
| | (SEQ ID NO: 5975) | | |
| PPIB spacer 3 | CGTAGATGCTCTTTCCTCCTGTGCCATCTC | 0.36443656 | 0.3902864 |
| | (SEQ ID NO: 5976) | | |

TABLE 41
TaqMan probes used for qPCR

| Gene | TaqMan assay ID |
|---|---|
| CXCR4 | Hs00607978_s1 |
| STAT1 | Hs01013996_m1 |
| STAT3 | Hs00374280_m1 |
| HRAS | Hs00978050_g1 |
| PPIB | Hs00168719_m1 |
| GAPDH | Hs99999905_m1 |

TABLE 42
gRNA spacer sequences for Cypridina luciferase W85X reporter RNA
editing. Mismatch is denoted by lower case.

| | | | Cas13b-t1 | Cas13b-t3 |
|---|---|---|---|---|
| | Mismatch | | normalized RLU | normalized RLU |
| Site | distance | Spacer sequence | (FIG. 2b) | (FIG. 2b) |
| Cypridina | 2 | GAATCTCTTTCCATAGAATGTT | 0.01260676 | 0.00488241 |
| luciferase | | CTAAACcA (SEQ ID NO: 5977) | | |
| X95W | 4 | ATCTCTTTCCATAGAATGTTCT | 0.0085265 | 0.01001933 |
| | | AAACcATC (SEQ ID NO: 5978) | | |
| | 6 | CTCTTTCCATAGAATGTTCTAA | 0.01200875 | 0.00755633 |
| | | ACcATCCT (SEQ ID NO: 5979) | | |
| | 8 | CTTTCCATAGAATGTTCTAAA | 0.05522275 | 0.01003733 |
| | | CcATCCTGC (SEQ ID NO: 5980) | | |
| | 10 | TTCCATAGAATGTTCTAAACCA | 0.079744 | 0.01706967 |
| | | TCCTGCGG (SEQ ID NO: 5981) | | |
| | 12 | CCATAGAATGTTCTAAACcATC | 0.085725 | 0.05851067 |
| | | CTGCGGCC (SEQ ID NO: 5982) | | |
| | 14 | ATAGAATGTTCTAAACCATCCT | 0.14881 | 0.05986233 |
| | | GCGGCCTC (SEQ ID NO: 5983) | | |
| | 16 | AGAATGTTCTAAACcATCCTGC | 0.1930325 | 0.06880567 |
| | | GGCCTCTA (SEQ ID NO: 5984) | | |
| | 18 | AATGTTCTAAACcATCCTGCGG | 0.93053875 | 0.573424 |
| | | CCTCTACT (SEQ ID NO: 5985) | | |
| | 20 | TGTTCTAAACcATCCTGCGGCC | 0.99714725 | 0.69095267 |
| | | TCTACTCT (SEQ ID NO: 5986) | | |
| | 22 | TTCTAAACcATCCTGCGGCCTC | 1.028434 | 0.80134633 |
| | | TACTCTGC (SEQ ID NO: 5987) | | |
| | 24 | CTAAACcATCCTGCGGCCTCTA | 0.49195525 | 0.27232267 |
| | | CTCTGCAT (SEQ ID NO: 5988) | | |
| | 26 | AAACcATCCTGCGGCCTCTACT | 0.35265576 | 0.36477816 |
| | | CTGCATTC (SEQ ID NO: 5989) | | |
| | 28 | ACcATCCTGCGGCCTCTACTCT | 0.59331175 | 0.36037733 |
| | | GCATTCAA (SEQ ID NO: 5990) | | |
| | 30 | cATCCTGCGGCCTCTACTCTGC | 0.01181 | 0.00410067 |
| | | ATTCAATT (SEQ ID NO: 5991) | | |
| Non- | | GTAATGCCTGGCTTGTCGACG | 0.007946 | 0.003682 |
| targeting | | CATAGTCTG (SEQ ID NO: 5992) | | |

TABLE 43
Optimal gRNA spacer sequences for RNA editing of endogenous
transcripts. Mismatch is denoted by lower case.

| | Mismatch | | Editing | Cas13b-t1 editing |
|---|---|---|---|---|
| Site | distance | Spacer sequence | system | rate (FIG. 2c) |
| STAT1 | 22 | TCTTGATAcATCCAGTTCCTT | REPAIR | 0.2551795 |
| Y701C | | TAGGGCCAT | | |
| | | (SEQ ID NO: 5993) | | |
| STAT3 | 20 | GGTCTTCAGGCATGGGGCAG | REPAIR | 0.21902363 |
| Y705C | | CGCTACCTGG | | |
| | | (SEQ ID NO: 5994) | | |
| LATS1 | 22 | TCGGAAGGcAAATTCATAGA | REPAIR | 0.20295815 |
| T1079A | | ATGCATGTTC | | |
| | | (SEQ ID NO: 5995) | | |
| CTNNB1 | 22 | AGCTGTGGcAGTGGCACCAG | REPAIR | 0.39486936 |
| T41A | | AATGGATTCC | | |
| | | (SEQ ID NO: 5996) | | |
| Gaussia | 14 | TTCATCTTGGGCGTGCCATT | RESCUE | 0.47878881 |
| luciferase | | GATGTGGGAC | | |
| C82R | | (SEQ ID NO: 5997) | | |
| CTNNB1 | 22 | GAGCTGTGtTAGTGGCACCA | RESCUE | 0.03803724 |
| T41I | | GAATGGATTC | | |
| | | (SEQ ID NO: 5998) | | |
| KRAS | 20 | GATCATATTCtTCCACAAAA | RESCUE | 0.06281841 |
| D30D | | TGATTCTGAA | | |
| | | (SEQ ID NO: 5999) | | |
| KRAS | 22 | GCTGTGTCtAGAATATCCAA | RESCUE | 0.04002 |
| L56L | | GAGACAGGTT | | |
| | | (SEQ ID NO: 6000) | | |

TABLE 44
Gene-specific reverse transcription primers

| Gene | RT primer sequence |
|---|---|
| Cypridina luciferase | TTTGCATTCATCTGGTACTTCTAGGGTGTC (SEQ ID NO: 6001) |
| STAT1 | TTCATCATACTGTCGAATTCTACAGAGCCC (SEQ ID NO: 6002) |
| CTNNB1 | TTACAGGTCAGTATCAAACCAGGCCAG (SEQ ID NO: 6003) |
| STAT3 | TTTCTGCAGCTTCCGTTCTCAGCTCCTCAC (SEQ ID NO: 6004) |
| LATS1 | TACTAGATCGCGATTTTTAATCTCTGAGCC (SEQ ID NO: 6005) |
| Gaussia luciferase | TTGTCCACCTGGCCCTGGATC (SEQ ID NO: 6006) |
| KRAS | TCATCAACACCCTGTCTTGTCTTTGCT (SEQ ID NO: 6007) |

TABLE 45
Priming sequences for site-specific amplification of RNA editing target
sites

| Editing site | Forward priming sequence | Reverse priming sequence |
|---|---|---|
| Cypridina | TAAACCAGGAAAAACATGTTGCC | CGCCCTTGGTTCCTTGACCC |
| luciferase | (SEQ ID NO: 6008) | (SEQ ID NO: 6009) |
| X85W | | |
| STAT1 Y701C | AGGAAGCACCAGAGCCAATGGA | GGGGAGCAGGTTGTCTGTGGT |
| | (SEQ ID NO: 6010) | (SEQ ID NO: 6011) |
| CTNNB1 | CTGATTTGATGGAGTTGGACATOGCC | GTATCCACATCCTCTTCCTCAGGATTGC |
| T41A/T41I | (SEQ ID NO: 6012) | (SEQ ID NO: 6013) |
| STAT3 Y705C | CAGAGAGCCAGGAGCATCCTGA | TCTAAAGTGCGGGGGGACATCG |
| | (SEQ ID NO: 6014) | (SEQ ID NO: 6015) |
| LATS1 T1079A | GGAAAGCATCCTGAACATGCATTC | CGACTGCTGCTCTGAGCCTTG |
| | (SEQ ID NO: 6016) | (SEQ ID NO: 6017) |
| Gaussia | GCCAATGCCCGGAAAGCTGG | GGACTCTTTGTCGCCTTCGTAGGTG |
| luciferase C82R | (SEQ ID NO: 6018) | (SEQ ID NO: 6019) |
| KRASD30D | AGAGAGGCCTGCTGAAAATGACTG | GAGAATATCCAAGAGACAGGTTTCTCCA |
| | (SEQ ID NO: 6020) | TCA (SEQ ID NO: 6021) |
| KRAS L56L | TOGACGAATATGATCCAACAATAGAGGATTC | CTCATGTACTGGTCCCTCATTGCACTG |
| | (SEQ ID NO: 6022) | (SEQ ID NO: 6023) |
| Illumina | CTTTCCCTACACGACGCTCTTCCGATCT | GTTCAGACGTGTGCTCTTCCGATCT |
| adapters | (SEQ ID NO: 6024) | (SEQ ID NO: 6025) |

TABLE 46
Plasmids used in this example

| | | Expression | |
|---|---|---|---|
| Name | Description | system | Link to mop |
| pAB1865 | pACYC184 pJ23119-BsmbI-B-t1 DR | Bacterial | benchling.com/soumvakannan/f/lib_ |
| | | | DpBKgseF-case13b-t- |
| | | | paper/seq_62xVVPFv-pab1865- |
| | | | pacyc184-bsmbi-sites-eliminated- |
| | | | pab1497-pj23119-bsmbi-bt1dr/edit |
| pAB1866 | pACYC184 pJ23119-BsmbI-B-t2 DR | Bacterial | benchling.com/soumvakannan/f/lib_ |
| | | | DpBKgseF-case13b-t- |
| | | | paper/seq_bnxEAxUE-pab1866- |
| | | | pacyc184-bsmbi-sites-eliminated- |
| | | | pab1497-pj23119-bsmbi-bt1dr/edit |
| pAB1867 | pACYC184 pJ23119-BsmbI-B-t3 DR | Bacterial | benchling.com/soumvakannan/f/lib_ |
| | | | DpBKgseF-case13b-t- |
| | | | paper/seq_Ax8ivqt7-pab1867- |
| | | | pacyc184-bsmbi-sites-eliminated- |
| | | | pab1497-pj23119-bsmbi-bt1dr/edit |
| pAB1870 | pACYC184 pJ23119-BsmbI-B-t4 DR | Bacterial | benchling.com/soumvakannan/f/lib_ |
| | | | DpBKgseF-case13b-t- |
| | | | paper/seq_Zfceg3uN-pb1870- |
| | | | pacyc184-bsmbi-sites-eliminated- |
| | | | pab1497-pj23119-bsmbi-bt1dr/edit |
| pAB1869 | pACYC184 pJ23119-BsmbI-B-t5 DR | Bacterial | benchling.com/soumvakannan/f/lib_ |
| | | | DpBKgseF-case13b-t- |
| | | | paper/seq_OOlfwpI0-pab1869- |
| | | | pacyc184-bsmbi-sites-eliminated- |
| | | | pab1497-pj23119-bsmbi-bt1dr/edit |
| pAB1898 | pBR322 pLac-Cas13b-t1 | Bacterial | benchling.com/soumvakannan/f/lib_ |
| | | | DpBKgseF-case13b-t- |
| | | | paper/seq_VfSVjMoz-pad1898- |
| | | | pbr322-plac-cas13b-t1/edit |
| pAB1899 | pBR322 pLac-Cas13b-t2 | Bacterial | benchling.com/soumvakannan/f/lib_ |
| | | | DpBKgseF-case13b-t- |
| | | | paper/seq_N24UIrcJ-pab1899- |
| | | | pbr322-plac-cas13b-t2/edit |
| pAB1900 | pBR322 pLac-Cas13b-t3 | Bacterial | benchling.com/soumvakannan/f/lib_ |
| | | | DpBKgseF-case13b-t- |
| | | | paper/seq_YIuQqfDy-pad1900- |
| | | | pbr322-plac-cas13b-t3/edit |
| pAB1903 | pBR322 pLac-Cas13b-t4 | Bacterial | benchling.com/soumvakannan/f/lib_ |
| | | | DpBKgseF-case13b-t- |
| | | | paper/seq_YOqWhMJu-pad1903- |
| | | | pbr322-plac-cas13b-t6/edit |
| pAB1902 | pBR322 pLac-Cas13b-t5 | Bacterial | benchling.com/soumvakannan/f/lib_ |
| | | | DpBKgseF-case13b-t- |
| | | | paper/seq_MSspKrlM-pad1902- |
| | | | pbr322-plac-cas13b-t5/edit |
| pAB1619 | U6-BpiI-Cas13b-t1-DR | Mammalian | benchling.com/soumvakannan/f/lib_ |
| | | | DpBKgseF-case13b-t- |
| | | | paper/seq_TGWYY9lg-pad1619- |
| | | | pab0001-bt1-crma-bpii- |
| | | | backbone/edit |
| pAB1620 | U6-BpiI-Cas13b-t3-DR | Mammalian | benchling.com/soumvakannan/f/lib_ |
| | | | DpBKgseF-case13b-t- |
| | | | paper/seq_rFtcYTlY-pad1620- |
| | | | pab0001-bt3-crma-bpii- |
| | | | backbone/edit |
| pAB1853 | U6-BpiI-Cas13b-t5-DR | Mammalian | benchling.com/soumvakannan/f/lib_ |
| | | | DpBKgseF-case13b-t- |
| | | | paper/seq_lutVJcwS-pab1853- |
| | | | pab0001-bt5-crma-bpii- |
| | | | backbone/edit |
| pAB1678 | CMV-HIVNES-GS-Cas13b-t1 | Mammalian | benchling.com/soumvakannan/f/lib_ |
| | | | DpBKgseF-case13b-t- |
| | | | paper/seq_PRzQ8zsn-pad1678-cmv- |
| | | | hivnes-gs-cas13b-t1/edit |
| pAB1679 | CMV-HIVNES-GS-Cas13b-t3 | Mammalian | benchling.com/soumvakannan/f/lib_ |
| | | | DpBKgseF-case13b-t- |
| | | | paper/seq_3eOvCOsW-pad1679-cmv- |
| | | | hivnes-gs-cas13b-t3/edit |
| pAB1891 | CMV-HIVNES-GS-Cas13b-t5 | Mammalian | benchling.com/soumvakannan/f/lib_ |
| | | | DpBKgseF-case13b-t- |
| | | | paper/seq_UxTccZab-pad1891-cmv- |
| | | | hivnes-gs-cas13b-t5/edit |
| pAB1680 | CMV-HIVNES-GS-dCas13b-t1 | Mammalian | benchling.com/soumvakannan/f/lib_ |
| | | | DpBKgseF-case13b-t- |
| | | | paper/seq_KQz5fCQV-pad1680-cmv- |
| | | | hivnes-gs-dcas13b-t1/edit |
| pAB1681 | CMV-HIVNES-GS-dCas13b-t3 | Mammalian | benchling.com/soumvakannan/f/lib_ |
| | | | DpBKgseF-case13b-t- |
| | | | paper/seq_pzAsYd2F-pad1676-cmv- |
| | | | hivnes-gs-dcas13b-t3/edit |
| pAB1676 | CMV-HIVNES-GS-dCas13bt1-(GGS)2- | Mammalian | benchling.com/soumvakannan/f/lib_ |
| | huADAR2dd(E488Q) | | DpBKgseF-case13b-t- |
| | | | paper/seq_byu4bYwb-pad1676-cmv- |
| | | | hivnes-dcas13b-t1-ggs2- |
| | | | huadar2dde488q/edit |
| pAB1677 | CMV-HIVNES-GS-dCas13bt3-(GGS)2- | Mammalian | benchling.com/soumvakannan/f/lib_ |
| | huADAR2dd(E488Q) | | DpBKgseF-case13b-t- |
| | | | paper/seq_DGoRU6JG-pad1677-cmv- |
| | | | hivnes-dcas13b-t3-ggs2- |
| | | | huadar2dde488q/edit |
| pAB1322 | CMV-HIVNES-GS-dCas13b6-(GGS)2- | Mammalian | benchling.com/soumvakannan/f/lib_ |
| | huADAR2dd(E488Q) | | DpBKgseF-case13b-t- |
| | | | paper/seq_7yvwljoN-pad1322-cmv- |
| | | | hivnes-dcas13b6-ggs2- |
| | | | huadar2dde488q/edit |
| pAB1659 | CMV-HIVNES-GS-dCas13b6-(GGS)2- | Mammalian | benchling.com/soumvakannan/f/lib_ |
| | huADAR2dd(E488Q/E620G) | | DpBKgseF-case13b-t- |
| | | | paper/seq_jA4gCw66-pad1659-cmv- |
| | | | hivnes-dcas13b6-ggs2- |
| | | | huadar2dde488q/edit |
| pAB1810 | CMV-HIVNES-GS-dCas13b6-(GGS)2- | Mammalian | benchling.com/soumvakannan/f/lib_ |
| | huADAR2dd(E488Q/E620G/Q696L) | | DpBKgseF-case13b-t- |
| | | | paper/seq_YctRWMAR-pad1810-cmv- |
| | | | hivnes-dcas13b6-ggs2- |
| | | | huadar2dde488qe620gq6961/edit |
| pAB1923 | CMV-HIVNES-GS-dCas13bt1-(GGS)2- | Mammalian | benchling.com/soumvakannan/f/lib_ |
| | huADAR2dd(E488Q/E620G/Q696L) | | DpBKgseF-case13b-t- |
| | | | paper/seq_CUCH3Mno-pab1923-cmv- |
| | | | hivnes-dcas13b6-ggs2- |
| | | | huadar2dde488qe620gq6961/edit |
| pAB0040 | CMV-Cluciferase(STOP85)-polyAEF1a- | Mammalian | Previously described⁹ |
| | G-luciferase-polyA | | |
| pAB1424 | CMV-Cluciferase(W113XTGA)-polyA | Mammalian | benchling.com/soumvakannan/f/lib_ |
| | EFla-G-luciferase-polyA | | DpBKgseF-case13b-t- |
| | | | paper/seq_cbalO5Gr-pab1424-cmv- |
| | | | c-luciferasew113x-tga-polya-ef1a-g- |
| | | | luciferase-polya/edit |
| pAB1230 | pYES3/CTpADHl-HH-BsmBI-B6-DR- | Yeast | benchling.com/soumvakannan/f/lib_ |
| | HDV-ADH1-termTGA-ADE2TAG- | | DpBKgseF-case13b-t- |
| | URA3 | | paper/seq_m2cbleab-pad1230- |
| | | | pves3ct-padb1-bh-bsmbi-bsmbi-b6- |
| | | | dr-bdv-adh1-term-tga-ade2-tag-ura3- |
| | | | reporter/edit |
| pAB1417 | pGAL-dCas13b6-(GGS)2- | Yeast | benchling.com/soumvakannan/f/lib_ |
| | dADAR2(E488Q) | | DpBKgseF-case13b-t- |
| | | | paper/seq_gYojaefG-pab1417-pgal- |
| | | | dcas13b6-ggs2-dadar2e488q-leu2- |
| | | | selection/edit |
| pAB1773 | pGAL-dCas13b6-(GGS)2- | Yeast | benchling.com/soumvakannan/f/lib_ |
| | dADAR2(E488Q/E620G) | | DpBKgseF-case13b-t- |
| | | | paper/seq_5f5JRSA6-pad1773-pgal- |
| | | | dcas13b6-ggs2-dadar2e488qe620g- |
| | | | len2-selection/edit |

### ADDITIONAL REFERENCES

[1381] 1. Abudayyeh, O. O. et al. Science 365, 382-386 (2019).
[1382] 2. Chee, M. K. & Haase, S. B. G3 2, 515-526 (2012).
[1383] 3. Voth, W. P., Jiang, Y. W. & Stillman, D. J. Yeast 20, 985-993 (2003).
[1384] 4. Joung, J. et al. Nat. Protoc. 12, 828-863 (2017).
[1385] 5. Gietz, R. D. & Schiestl, R. H. Nat. Protoc. 2, 31-34 (2007).
[1386] 6. Gietz, R. D. & Schiestl, R. H. Nat. Protoc. 2, 38-41 (2007).
[1387] 7. Matthews, M. M. et al. Nat. Struct. Mol. Biol. 23, 426-433 (2016).
[1388] 8. Eggington, J. M., Greene, T. & Bass, B. L. Nat. Commun. 2, 319 (2011).
[1389] 9. Cox, D. B. T. et al. Science 358, 1019-1027 (2017).

[1390] FIG. 40 shows Cas13b-t had collateral activity. Applicants evaluated fluorescence of a collateral RNAse cleavage reporter with active (WT) and catalytically inactivated (HEPN mutant) Cas13b-t3 and no protein negative control in the presence of a target or nontarget RNA species and found that, like other Cas13b, Cas13b-t cleaves RNA collaterally specifically in the presence of a target RNA species, and this collateral activity was mediated by the HEPN residues. Thus, it may be used for applications predicated upon Cas13 collateral activity, such as SHERLOCK-based diagnostics.

[1391] FIG. 41 shows that Cas13b-t-REPAIR mediated RNA editing via AAV delivery of a single AAV vector containing the REPAIR protein and guideRNA packaged together. Applicants packaged the construct shown in the schematic in AAV2 and delivered this to HEK293FT cells. After 2 days, Applicants evaluated RNA editing efficiency at the targeted site, the T41A codon of the CTNNB1 transcript and found that Cas13b-t-REPAIR delivered by AAV mediated RNA base editing.

[1392] Various modifications and variations of the described methods, pharmaceutical compositions, and kits of the invention will be apparent to those skilled in the art without departing from the scope and spirit of the invention. Although the invention has been described in connection with specific embodiments, it will be understood that it is capable of further modifications and that the invention as claimed should not be unduly limited to such specific embodiments. Indeed, various modifications of the described modes for carrying out the invention that are obvious to those skilled in the art are intended to be within the scope of the invention. This application is intended to cover any variations, uses, or adaptations of the invention following, in general, the principles of the invention and including such departures from the present disclosure come within known customary practice within the art to which the invention pertains and may be applied to the essential features herein before set forth.

What is claimed is:

1. A non-naturally occurring or engineered composition comprising:
(a) a Cas protein that comprises at least one HEPN domain and is less than 900 amino acids in size; and
(b) a guide sequence capable of forming of complex with the Cas protein and directing the complex to bind to a target sequence.

2. The composition of claim 1, wherein the Cas protein is a Type VI Cas protein.

3. The composition of claim 1, wherein the Cas protein is Cas13.

4. The composition of claim 1, wherein the Cas protein is selected from
(a) SEQ ID NOs. 4102-4298;
(b) SEQ ID NOs. 4299-4654;
(c) SEQ ID NOs. 2771-2772, 4655-4768, or 5260-5265;
(d) SEQ ID NOs. 4769-4797; or
(e) SEQ ID NOs. 4798-5203.

5. A non-naturally occurring or engineered system comprising:
(a) a Cas protein selected from:
(i) SEQ ID NOs. 1-1323,
(ii) SEQ ID NOs. 1324-2770,
(iii) SEQ ID NOs. 2773-2797, or
(iv) SEQ ID NOs. 2798-4092;
(b) a guide sequence capable of forming of complex with the Cas protein and directing the complex to bind to a target sequence.

6. The composition of any one of the proceeding claims, wherein the Cas protein exhibits collateral nuclease activity and cleaves a non-target sequence.

7. The composition of any one of the proceeding claims, which comprises two or more guide sequences capable of hybridizing to two different target sequences or different regions of a target sequence.

8. The composition of any one of the proceeding claims, wherein the guide sequence is capable of hybridizing to one or more target sequences in a prokaryotic cell.

9. The composition of any one of the proceeding claims, wherein the guide sequence is capable of hybridizing to one or more target sequences in a eukaryotic cell.

10. The composition of any one of the proceeding claims, wherein the Cas protein comprises one or more nuclear localization signals.

11. The composition of any one of the proceeding claims, wherein the Cas protein comprises one or more nuclear export signals.

12. The composition of any one of the proceeding claims, wherein the Cas protein is catalytically inactive.

13. The composition of any one of the proceeding claims, wherein the Cas protein is a nickase.

14. The composition of any one of the proceeding claims, wherein the Cas protein is associated with one or more functional domains.

15. The composition of claim 14, wherein the one or more functional domains is heterologous functional domains.

16. The composition of claim 14, wherein the one or more functional domains cleaves the one or more target sequences.

17. The composition of claim 16, wherein the one or more functional domains modifies transcription or translation of the target sequence.

18. The composition of any one of the proceeding claims, wherein the Cas protein is associated with an adenosine deaminase or cytidine deaminase.

19. The composition of any one of the proceeding claims, further comprising a recombination template.

20. The composition of claim 19, wherein the recombination template is inserted by homology-directed repair (HDR).

21. The composition of any one of the proceeding claims, further comprising a tracr RNA.

22. The composition of any one of the proceeding claims, wherein the Cas protein comprises two HEPN domains.

23. A non-naturally occurring or engineered composition comprising:
(a) an mRNA encoding the Cas protein of any one of the proceeding claims, and
(b) a guide sequence capable of forming of complex with the Cas protein and directing the complex to bind to a target sequence.

24. A non-naturally occurring or engineered composition for modifying nucleotides in a target nucleic acid, comprising:
(a) the composition of any one of claims 1-22; and
(b) a nucleotide deaminase associated with the Cas protein.

25. The composition of claim 24, wherein the Cas protein is a dead Cas protein.

26. The composition of any one of claims 24-25, wherein the Cas protein is a nickase.

27. The composition of any one of claims 24-26, wherein the nucleotide deaminase is covalently or non-covalently linked to the Cas protein or the guide sequence, or is adapted to link thereof after delivery.

28. The composition of any one of claims 24-27, wherein the nucleotide deaminase is a adenosine deaminase.

29. The composition of any one of claims 24-28, wherein the nucleotide deaminase is a cytidine deaminase.

30. The composition of any one of claims 24-29, wherein the nucleotide deaminase is a human ADAR2 or a deaminase domain thereof.

31. The composition of claim 28, wherein the adenosine deaminase comprises one or more mutations.

32. The composition of claim 31, wherein the one or more mutations comprise E620G or Q696L based on amino acid sequence positions of human ADAR2, and corresponding mutations in a homologous ADAR protein.

33. The composition of claim 32, wherein the adenosine deaminase comprises (i) E488Q and E620G, (ii) E488Q and Q696L, or (iii) E488Q and V505I, based on amino acid sequence positions of human ADAR2, or corresponding mutations in a homologous ADAR protein.

34. The composition of claim 31, wherein the adenosine deaminase has cytidine deaminase activity.

35. The composition of any one of claims 24-34, wherein the nucleotide deaminase protein or catalytic domain thereof has been modified to increase activity against a DNA-RNA heteroduplex.

36. The composition of any one of claims 24-35, wherein the nucleotide deaminase protein or catalytic domain thereof has been modified to reduce off-target effects.

37. The composition of any one of claims 24-36, wherein modification of the nucleotides in the target nucleic acid remedies a disease caused by a G→A or C→T point mutation or a pathogenic SNP.

38. The composition of claim 37, wherein the disease comprises cancer, haemophilia, beta-thalassemia, Marfan syndrome, and Wiskott-Aldrich syndrome.

39. The composition of any one of claims 24-38, wherein modification of the nucleotides in the target nucleic acid remedies a disease caused by a T→C or A→G point mutation or a pathogenic SNP.

40. The composition of any one of claims 24-39, wherein modification of the nucleotide at the target locus of interest inactivates a target gene at the target locus.

41. The composition of any one of claims 24-40, wherein modification of the nucleotide modifies gene product encoded at the target locus or expression of the gene product.

42. An engineered adenosine deaminase comprising one or more mutations: E488Q, E620G, Q696L, or V505I based on amino acid sequence positions of human ADAR2, or corresponding mutations in a homologous ADAR protein.

43. The engineered adenosine deaminase of claim 42, wherein the adenosine deaminase comprises (i) E488Q and E620G, (ii) E488Q and Q696L, or (iii) E488Q and V505I based on amino acid sequence positions of human ADAR2, or corresponding mutations in a homologous ADAR protein.

44. A system for detecting presence of one or more target polypeptides in one or more in vitro samples comprising:
a Cas protein of any one of claims 1 to 41;
one or more detection aptamers, each designed to bind to one of the one or more target polypeptides, each detection aptamer comprising a masked promoter binding site or masked primer binding site and a trigger sequence template; and
an oligonucleotide-based masking construct comprising a non-target sequence.

45. The system of claim 44, further comprising nucleic acid amplification reagents to amplify the target sequence or the trigger sequence.

46. The system of claim 45, wherein the nucleic acid amplification reagents are isothermal amplification reagents.

47. A system for detecting the presence of one or more target sequences in one or more in vitro samples, comprising:
a Cas protein of any one of claims 1 to 41;
at least one guide polynucleotide comprising a guide sequence designed to have a degree of complementarity with the one or more target sequences, and designed to form a complex with the Cas protein; and
an oligonucleotide-based masking construct comprising a non-target sequence,
wherein the Cas protein exhibits collateral nuclease activity and cleaves the non-target sequence of the oligo-nucleotide based masking construct once activated by the one or more target sequences.

48. A non-naturally occurring or engineered composition comprising the Cas protein of any one of claims 1 to 41 that is linked to an inactive first portion of an enzyme or reporter moiety, wherein the enzyme or reporter moiety is reconstituted when contacted with a complementary portion of the enzyme or reporter moiety.

49. The composition of claim 48, wherein the enzyme or reporter moiety comprises a proteolytic enzyme.

50. The composition of claim 48, wherein the Cas protein comprises a first Cas protein and a second Cas protein linked to the complementary portion of the enzyme or reporter moiety.

51. The composition of claim 48, further comprising
i) a first guide capable of forming a complex with the first Cas protein and hybridizing to a first target sequence of a target nucleic acid; and
ii) a second guide capable of forming a complex with the second Cas protein, and hybridizing to a second target sequence of the target nucleic acid.

52. A non-naturally occurring or engineered composition comprising one or more polynucleotides encoding the Cas protein and the guide sequence in any one of claims 1 to 41.

53. A vector system, which comprises one or more vectors comprising:
a first regulatory element operably linked to a nucleotide sequence encoding a Cas protein of any one of claims 1 to 41, and
a second regulatory element operably linked to a nucleotide sequence encoding the guide sequence.

54. The vector system of claim 53, wherein the nucleotide sequence encoding the Cas protein is codon optimized for expression in a eukaryotic cell.

55. The vector system of claim 53, which is comprised in a single vector.

56. The vector system of claim 53, wherein the one or more vectors comprise viral vectors.

57. The vector system of claim 53, wherein the one or more vectors comprise one or more retroviral, lentiviral, adenoviral, adeno-associated or herpes simplex viral vectors.

58. A delivery system comprising the composition of any one of claims 1 to 52, or the system of any one of claims 53 to 57 and a delivery vehicle.

59. The delivery system of claim 58, which comprises one or more vectors, or one or more polynucleotide molecules, the one or more vectors or polynucleotide molecules comprising one or more polynucleotide molecules encoding the Cas protein and one or more nucleic acid components of the non-naturally occurring or engineered composition.

60. The delivery system of claim 58, wherein the delivery vehicle comprises a ribonucleoprotein complex, one or more particles, one or more vesicles, or one or more viral vectors, liposomes, nanoparticles, exosomes, microvesicles, nucleic acid nanoassemblies, a gene gun, an implantable device, or a vector system.

61. The delivery system of claim 58, wherein the one or more particles comprises a lipid, a sugar, a metal or a protein.

62. The delivery system of claim 58, wherein the one or more particles comprises lipid nanoparticles.

63. The delivery system of claim 58, wherein the one or more vesicles comprises exosomes or liposomes.

64. The delivery system of claim 58, wherein the one or more viral vectors comprises one or more adenoviral vectors, one or more lentiviral vectors, or one or more adeno-associated viral vectors.

65. A cell comprising the composition of any one of claims 1 to 52, or the system of any one of claims 53 to 64.

66. The cell of claim 65 or progeny thereof is a eukaryotic cell, preferably a human or non-human animal cell, optionally a therapeutic T cell or antibody-producing B-cell or wherein the cell is a plant cell.

67. A non-human animal or plant comprising the cell of claim 65 or 66, or progeny thereof.

68. The composition of any one of claims 1 to 52, or the system of any one of claims 53 to 64, or the cell of claim 65 or 66, for use in a therapeutic method of treatment.

69. A method of modifying one or more target sequences, the method comprising contacting the one or more target sequences with the composition of any one of claims 1 to 52.

70. The method of claim 69, wherein modifying the one or more target sequences comprises increasing or decreasing expression of the one or more target sequences.

71. The method of claim 69, wherein the system further comprises a recombination template, and wherein modifying the one or more target sequences comprises insertion of the recombination template or a portion thereof.

72. The method of claim 69, wherein the one or more target sequences is in a prokaryotic cell.

73. The method of claim 69, wherein the one or more target sequences is in a eukaryotic cell.

74. A method of modifying one or more nucleotides in a target sequence, comprising contacting the target sequences with the composition of any one of claims 1 to 52.

75. The method of any one of claims 69-74, wherein the target sequence is RNA.

76. A method for detecting a target nucleic acid in a sample comprising:
contacting a sample with:
the composition of any one of claims 1 to 52; and
a RNA-based masking construct comprising a non-target sequence;
wherein the Cas protein exhibits collateral RNase activity and cleaves the non-target sequence of the detection construct; and
detecting a signal from cleavage of the non-target sequence, thereby detecting the target nucleic acid in the sample.

77. The method of claim 76, further comprising contacting the sample with reagents for amplifying the target nucleic acid.

78. The method of claim 76, wherein the reagents for amplifying comprises isothermal amplification reaction reagents.

79. The method of claim 76, wherein the isothermal amplification reagents comprise nucleic-acid sequence-based amplification, recombinase polymerase amplification, loop-mediated isothermal amplification, strand displacement amplification, helicase-dependent amplification, or nicking enzyme amplification reagents.

80. The method of claim 76, wherein the target nucleic acid is DNA molecule and the method further comprises contacting the target DNA molecule with a primer comprising an RNA polymerase site and RNA polymerase.

81. The method of claim 76, wherein the masking construct:
suppresses generation of a detectable positive signal until the masking construct cleaved or deactivated, or
masks a detectable positive signal or generates a detectable negative signal until the masking construct cleaved or deactivated.

82. The method of claim 76, wherein the masking construct comprises:
a. a silencing RNA that suppresses generation of a gene product encoded by a reporting construct, wherein the gene product generates the detectable positive signal when expressed;
b. a ribozyme that generates the negative detectable signal, and wherein the positive detectable signal is generated when the ribozyme is deactivated;
c. a ribozyme that converts a substrate to a first color and wherein the substrate converts to a second color when the ribozyme is deactivated;
d. an aptamer and/or comprises a polynucleotide-tethered inhibitor;
e. a polynucleotide to which a detectable ligand and a masking component are attached;
f. a nanoparticle held in aggregate by bridge molecules, wherein at least a portion of the bridge molecules comprises a polynucleotide, and wherein the solution undergoes a color shift when the nanoparticle is disbursed in solution;
g. a quantum dot or fluorophore linked to one or more quencher molecules by a linking molecule, wherein at least a portion of the linking molecule comprises a polynucleotide;
h. a polynucleotide in complex with an intercalating agent, wherein the intercalating agent changes absorbance upon cleavage of the polynucleotide; or
l. two fluorophores tethered by a polynucleotide that undergo a shift in fluorescence when released from the polynucleotide.

83. The method of claim 82, wherein the aptamer:
a. comprises a polynucleotide-tethered inhibitor that sequesters an enzyme, wherein the enzyme generates a detectable signal upon release from the aptamer or polynucleotide-tethered inhibitor by acting upon a substrate;
b. is an inhibitory aptamer that inhibits an enzyme and prevents the enzyme from catalyzing generation of a detectable signal from a substrate or wherein the polynucleotide-tethered inhibitor inhibits an enzyme and prevents the enzyme from catalyzing generation of a detectable signal from a substrate; or
c. sequesters a pair of agents that when released from the aptamers combine to generate a detectable signal.

84. The method of claim 82, wherein the nanoparticle is a colloidal metal.

85. The method of claim 76, wherein the at least one guide polynucleotide comprises a mismatch.

86. The method of claim 85, wherein the mismatch is upstream or downstream of a single nucleotide variation on the one or more guide sequences.

87. A method of treating or preventing a disease in a subject, comprising administering the composition of any one of claims 1 to 52, or the system of any one of claims 53 to 64, or the cell of claim 65 or 66 to the subject.

The application's sequence listing, which the Patent Office published only in electronic form, follows.

SEQUENCE LISTING (6066 sequences)

SEQ ID NO: 1 - protein, 1222 aa, Artificial
  Synthetic
MRITKVKVEAGKPDENKGKMVLIHRKIKQGNLILEDFSKSERTGTSHKELPDCTKSVLYEYKNESFELSLSKQTIAGDKELKTPRCKQCQDRTDCKACKDRTKAIKELRKKVEGLIKEVIHVAVEKQEKTEYSARFNTATSEDDMRCCLKTKFQGILRYKSTTGESFELNLPKCLAAYSQTKDAKTLTPYRDWIDSYLQKKRSFLEKSILNNRIVVNCSNEDTEQLSKRKQALHLWANEYETKKKIELGTLCSKYNINALSTSLNNKFNSLLQSGKGIKKSKFPHRGPDLVDANTNFELKKELQLHQSSVFGTKATLVINNIFKENRENVQLAIYNLEVVKYLEHYFPIKRKKQLLTVDQVRYYLKETTIRERVQMQLENAIRMHLLQQGKLENHNLKEDVDSNALSVIKRDEFFMLNFVEMCAFAANNIRNIIDKEQVNDILGKSDFERSLAKGNFDENRYKLFYGVDLKSDTSHSAFDIQALWAMRGAVQQIRNEVIHYHTDTLNKIFKLDKFEYKDDANAEECKYTNTVFQTLLESSIHQLDEYFIEQLRSNNVLSYYALDSLNHLLGYCTISLRKSSIPFAPGFKNVYALGANLQYGNTSMNLKNYLLKDEKGQSIDPTKTKSSHAYPAFRFILKLVYNHIFLSRFLDNTQQDAFKEAVTFVLQNNREEAAKATKPTKGKPNFHSHQDKQEPEKYAFKEIREMQVGETISSYMSYIYSYSVQEKERKGDENDNTRHNTDKFIEKVFTKGFDSFLSTLPTAFLYSPEDEQEVENEDYQALAIGQQVQHCIKSDNGTHILFFTFCKLLDGNHLSDLRNEWLKYYASDRTDSFHYDFALDIIELCLLGKDKEIVPTKEDIICYINTFVEGNEKSNRAWTEFYFQSDQNPVEYASINLLRKHGTLELLKLIVGDTYKVTQRDYDEWKTLKESIENDVNEREIIHKEWVELENKRTEWYKKNGRPSNKAEKDKINRMFQLPDSRLNKYKELCIRIERYNWLDNKLHLVHLKKLHNLIVQLLSRMARFVALWDRDFVHLDASRTEDEYRLTSFVNLRNLKYEADNKKFMDNYQDSIYRKDGSKIEEHDIPLIKTCVNNIKQPLYRETFFMKNDNAFSDRNFIAHFNYITKSAEHSMVDLVNRLRMLMAYDRKLRNAVSKSIIHVFEQNGMELKFKCITRGETEHKLELESIKSKKMSLLKGKLEIDQVSEEYCRLCKRLLEMKK

SEQ ID NO: 2 - protein, 1245 aa, Artificial
  Synthetic
MKISKVNHVKTGVSAKPAIEGGMLYDYPSKEGGSKDLRKHIEEVNRKAQILYNVFNQVKEKDKKQNSVKDALKIANAYINSTVIFGIKKEFPENKICNNFSYAVNRPIRLGKENVFITSISVSVKEKSAKESAEYIVNNYLRNSLRRDKRAAETIVRILTALYDGKNYEKLIKKIEREDLAAVVSAVSRDYLKDGELEKIAVSIEKQKVLVQVGKDGYLIPSGAEHEKKAYIFNFMKKYAESDEEGQRKMLNHMKDLIRLYYTEEEVVSSEILDLINSRDNTPFSQKDIIRSYNEQIAEKVSAFLVERYQKTLKDAKSEDEEGWVRYISDKAEKLLSVKNLTQDRIHCDYLFKKTWEEWTSFIAKKYIDLGKATYNFAMGDISKVSKGESVAFGTVNEGFETGISSFDYERMKAEDSLNRAMIKYISFAVNIFDASVRNPEQRTGGKEDILLLKPENIVMYEDAVKRVLRYFGGISKFSESSLDVSDKNGFFTALKDELYAARNYAFHYVTGEAEKREKPVVTTLLDTEYMLVGSIFRKKYFSNNVPMFYRTADIDNLMSRLYKSNRVILAQMPSFNKVLSRNAVVDFANAYLAGDSKREMSQPEISEQFRSSFYFLLKEIYYYDFILKEDLLERFKNGVECAQASAIKKENNSRKHVAMKNAYRDFMSRADKLTKTKGITFGQFCQEIMTEYNQQNSQKQKKPSAVEKTYVVKGQTRTSVREVEDKEQIYKHYRTLLYAGIREAFLIYLKEEAAFGFLRSPKDGREKFRDLKEEDFSQGWTTECYTKLKDAIIEDKELSSWYVTAHFMNQKHLNHLIGEIKNYVQFIDDIEKRAKVTGNRVCSTEEKMGKFTSLLEVLEFCKLFCGQVSNNLEDYFANNEEYAKYVAGFVDYGGTSAALLQAFCRENKELNYYDELNPIPNRNIILSLLYGNTAVLSSSMKKVTLQEVKGYQKNKESLSGVFKNGACKDENEQRKMSNYQKQKNRIEFVDVLTLTELLNDLYGQLISYSYLRERDLMFMQLGFYYTKLFHTSSVPAQDKLRVLSGDCDIKDGAVLYQIAAMYSYDLPIYGISKQGVAVRKKSGVSTGAKLNQFSTEYCGGKWDIYTNGLYFFEDVDGRHKDYVEVRNYIEHFKYFADHKKSILDLYSDLYNGFFSYDTKLKKSMSFVLPNILLSHFVNAKLSYEKDVVQKNSESYRRARIVIREKDIKSDFLTYKNKENSKAFYVPARNDVFLKEVLDMISFKR

SEQ ID NO: 3 - protein, 1425 aa, Artificial
  Synthetic
MKLSKVDRIRVAVGKTGKTENGNSQGRGVLYRSPKGNKTVAVDAVVEERIRNANRLYSAFFRCAYPEEPERHFEEIIKRMATGKKSGAQILKEYIGYEGQKNRKPYTFYVNKCAYRPAGKELGQVLRLFVKERLGQNWQNPEAAEAAVALLTCLCEGKTNRYTENTADGPVLTELSEQTVTQLEQVSRLGGSILVPKTERLETIVTVILRLTAEQCNTSLYVNGGTKEAQDADLEKQIALLKSLQTKPLLLKERFDKVTKQTIRDEQKLSEFSYKDATKERMEAVVVRMRKTLKKGASREVAVELLQALAQYDGKTWDGWLTQMLETEASKKKLKDFILAVNKDFHHFHVIKSVKNTAVAVSHSEDNTLQLSGAKKKTKGAMQDALFAYAQSEESSDETLHRIKRILFTYVLGGRQDNTLRLTEKTHLAKELLWKFRGTGAGLFDADFVPEEERAGESGRKAGSYTDLGCLFAEDDGIRNQRRIADRINYVNYGNYLRMRKAAEDEFTLFWCAYIKDYIEENYVTKIREAKRTGGKRRLKETDCEAERMMEKCWHDIIRYICGKYIHIGKAVYHFAIPEDLLANPGEVRSFGDVHAKYADGITSFDYEDIKAEENLQKSIFNVLVSAVANYSRSVVDLSSERAEELRRLPGNERLNEDVLMMKETHLKELLLPDAKKRLLRYFGGYSACEGLSGVTSEELAWEMRTVLSTLRNESFHYTFGKKKKLDYKVAKQLWMQAIRANRQLILDKYYSNNTCRYYSPNSIKALIEQGYRSYEEREAQIPAFKTVWKKAELAKYLADKKVMPAEISGEEKERVIFQGAFYFLLKEIYYREFTVGNTAAKYFFDAVERYCKENETGPYKNPAKSFNDYVNGAFNNKGVKVQKGLSDLYREGKITFGVVCQTIMAEYTQQNEKSEGEAIYQHFKMLFPLCMRKGFQKYVEEKHKELLQPVIREMGSREDFLTNIHIGCFDDFCREDGMYEYDWFVVAHLIHPKRLNELVGNLKDYMQFKQDILRRADYVEQFTKEELAAMKARTEEKLQKISGILRVAEFVRGIAGRVSNTFSDYYESEEAYASYLEQYIEFPRIKGSTVFESFRDFCVNTLPGGAVMDVYMDEKNPRILRNVEVARMYAGGDIGLRTRKKVTAEELKRYYQNEAEVAALLKAGLCATAEDQKRVKAQQELRNRITLTDVTEIQEVINDLLSQLVTFSYFRERDEMYLLLGFYYMALQSDGDWGEELRVFDGKKLQVENGFVLYQLLSAFTYGLNMYSEAAPDGKGGSQAGKIGEFIKAHPNSWDRALRLFVDDGACEEVSRKARNYVDHFRYYVKPDRSIMDLYAVYHEYFFDYSTKMRKSVLQNFASILERYFVLTKFKLGGERGAQTLEAELSGDKFTYKLSDTKAKPVVLPARNKEFLENLKNELNYRQE

SEQ ID NO: 4 - protein, 1177 aa, Artificial
  Synthetic
LKVSKVNNVRFAVVNKADDQKSEHMGVLYKSPKNTIKTSDLRNVVKERVKKASIKKKTSDNGPQKRYDIDSLTKSIKNQNLVVQTKTLENDKDVNNNDESGESTHIIGLSERTGGSKAKLDKAFGDFLKEYATLDKEYRKECLDKIRNIVKYFYYGGSAFYQTEDKYDHFVVLPEELKKTGEDNNEDNVKKITQYVLRISRKRYDKCIVHIVKNKRNPGCFFDNEDLNVFWIRHIQACFENLLNNKIAKKGKYYRFDDKKLFDATYREAINYLCVKYIAIGKMVYKVINDRLSEDDHNTTNKKDIDLIGVNDRYKDGFDSFMLEDMKAEEELQRNISVYCSFAINNLREALDVKGDILFDKNKGSEDTELNTTRILQYFGGKSRWQKFFDMSDMNADDLCKEVKSSLSRLRNSSFHYFTNESKEDSDALSTNTIIGEMLKWDAKAADMQIVEKIYSNNLPMFYNKEDLREAIGTIYSKTSERKSQVPAFNTVIVRKNLKSFLADYCNIPVDKLLRENKVDEEMGNKWLSAVYYLLKEIYYSHFLRDAGCINSKGISYTMTLFNKNISKLSNASNNSWAVNDFKEYVKSVKEGRSLSEICQMINTEYERQNNSSRKIKSADGLATGKIPKNAFPHFKIFLNQTLMGAFSDFLKSYKKSKDSKKNIYSFLARPRFNKVNPDKDEFINFILGGEGENAFEYYSKNSEVLNNISVLEDWYVLGRMLSPKCLNNLSGSLRRYIQYKTDISNRKKTLKKYDGETELELGKIGRIKIVLGIFDICSRLSGAVSNNLKDYFADEEEYAKFIYKFFDYQFDGHSYASSLNNFCNYEDVKRIGIYYDGNNPIINKNIILAKLYGNAEKIAAVLENDKVDIDDIKSLNKAAGKLQSYRLNGKVKNDEEQNELNRYQHLKNHVEFRDIVDYAELINDLQANLIEWACLRERDLMFFHLGFHYSVLSKKRDVPAEYYLLKDNGRYIKGGILYQIFAMYSYDMEMYCGDIDKQGNEKKKKGSVGNKVKLFCTWSGKLTNKRNNKGYYDEDIYTAGLELFEMIEDHDKYIELRRFIDHFHYYYEETKSMIELYGEVFDGFFSYDNKLRKNVPVVLYNILMRYLVNVTFRFEDDPANGIINIRNAKSEKFTYLINNKKRLLYARQKEYILNVLRMLYYPFIPEDLKKRIKVKD

SEQ ID NO: 5 - protein, 962 aa, Artificial
  Synthetic
  misc_feature (943)..(946): Xaa can be any naturally occurring amino acid
MKVTKIDGLSHKKFEVEGKLVKFRDNKNINEMKERLKKLKELKLDNYIKNPENVKNKDKDAEKETKKRRTNLKKYFSEIILRKEDEKYILKKTKKFKNINQEIDYYDVKSKKNQQEIFDVLKEIKIKETEKEEIITFDSEKLKKVFGEDFVKKEAKIKAIEKSLKINKANYKKDSIKIGDDKYSNVKGENKRSRIYEYYKKSENLKKFEENIREAFEKLYTEENIKELYSKIEEVLKKTHLKSIVREFYQNEIIGESEFSKKNGDGISILYNQIKDSIKKEENFIEFIENIGNLELKDLTKSQIFYKYFLENEELNDENIKFAFCYFVEIEVNNLLKENVYKIKRFNEGNKKRIKNIFEYGKLKKLIVYKLENKLNNYVRNCGKYNYHMENGDIATSDINMRNRQTEAFLRSIIGVSSFGYFSLRNILGVNDDDFYEIEEGLTEEERKNESNVLKKAKEDITSKSIFEKVVDKSFEKKGIRSIKENLKMFYGDSFDKANGDELKQFFVNMLNAITSIRHSVVHYDMNTNSENIFNFSDIEVSRLLKSIFEKETDKRELKLKIFRQLNSAGVFDYWENWKIKKYLENIKFEFVNKNVPFVPSFTKLYNRIDNLKGSNALNLGYINIPKRKEARDSQIYLLKNIYYGEFVEEFIKNNDNFEKIFREIIEINKNAGRNKQTNFYKLEKFEKLKANTPTEYLEKLQSLHKINYDREKIEEDKDIYVDFVQKIFLKGFINYLQKSNSLKPLNLLNLKKDEAVANKKSFYDEKLKQWENNGSNLSEMPKEIYKYIKEININKINYSNRMSIFYLLLKLIDHRELTNLRGNLEKYESMNKNKIYSEELNIVNLVSLDNNKVRTNFSVEAEDIGKFLKTETSIKNNKQLNNFSEIFADGENVIKHRSFYNIKKYGILDLLEKIVTKADLKITKEEIKKYKNLQKELEKNDXXXXIKFRKRFIENIIKNQI

SEQ ID NO: 6 - protein, 1425 aa, Artificial; identical to SEQ ID NO: 3
  Synthetic

SEQ ID NO: 7 - protein, 1222 aa, Artificial; identical to SEQ ID NO: 1
  Synthetic

SEQ ID NO: 8 - protein, 1149 aa, Artificial
  Synthetic
MGAGKYRITKIPRNWKENEKKVILKRVVNNGEVKYINENDNVDVDITETYYGILSNNKAKFLGSNEQFIFKVNKMKRNIENGCVIIKNYTEEEYEKFDKKIFSKRRIKVTNKNIEKICRNFYEDEEEIMKKRFEEAKNFNNIIFKICSEIFELEYINYTDEKLYKIFQNKIKVKDVKNLKEAFKQQEKGLETDKLLAISFNKKRNNALLEFIQQIVKQKFENEKELENWFSHSGEKYCKEIFKIYSNMSQKEKYSKLLGHRNKSFASISEKKETLQRRLKLGNYSNYNLRKYYQKDYKEEAIKELKDKSKEKLEKEIEEIIKENYKIDKLCEEISNLEFSFAESKKENKDKMSEIIVKIKEHYKNNVNVEEELENKEKYILSMIHNYIKGRYRKCLELQQKENVDFENLEKRIKEIFDSNEVTKKLKKLILNKVNNYKIFETKFQNPNIESSDDLEILKAEETFLNKLSTAVSKVGYTLNTLLEVSPEKDILEKYEEVEKLCTSNSIKNLCTVYSEINNNEKLLKGMIYFIQGLRQQVLHPKILWEKNVHKAEKVKEKEKIVIRFQNEGKAYNKKRIEEYFENILEKIPDYFIEKYESNNVFNIYRNFIDEIFEIIDKFDFKESNSISYLFPKFHKIYKRICKSENINDRQNGARKYLLQTIYYYYFQYEIENNKNDIFKYLNLYKSKIKAKKISYSHIIDNKDVNNKNIEILYRNIQREGMLNNRLLQMNNEWIEFIMIQFIEFISTKKLNWILDDLSEYRKKEKLDEKNKNKLLENLKQKMNKNITYSNDSYVFISLAQFLDLKEISNLIHDIKKFVQFREKNISKYKPEKNKVYIEELRKISYILKVMLEHKERVIQKHYLESYDEGISIMYGKDIEKKGIKDIKIKIKNENQEVINQPLYKSGNDENSSWIVLYGIEQAKRNGTFKFFKEFFNTNEDIKLCKEDIQKYEHLYNEKEENQRKVDEYISSEENNNIEEIKEINNNKKQLFYYYKNMINGDGLKKGYDFINDIYSHCLSWAYRIERDCSIYKVEAYNGKIKNFRNEIAHFNYFQKTDKSLLDLLNDFYNIFDYNLKYQRDVQKVINNIFEKYQVVREDGGPVIFYCKVDKKLKLSENLVPKKHSKYPEIELVHKKYVIFFKKLFEHKK

SEQ ID NO: 9 - protein, 1100 aa, Artificial
  Synthetic
MDRNIKNDYVIIKDYNDEEFEKFDKKIFFSRKIKVNNEDREKICRNFYEDEREIMKKRLEEAKNFNNIIFNICNKIFKLEYLDCTDEKVYKIFQNEIKVKDVKNLKEAFKQQEKGLETDKLLAISFNKKRNNILLEFIQQIVKQKFEKEKELENWFSHEGEKYCKEIFKIYSNMSQKEKYSKLLGHNDKSTASYSEKRETLQRRLKLGDYSKYDLKKYYQKDYKEEAIIELKDKNKEELEREIEELIKKNYKIDKLCDEISNLEFSFVESRKENKYKMSEIIVKIKEHYKKNVNVEEELKNKEKYILSIIHNYVKGRYRKCLELQQKENVDFENLGKRIKEIFDSNQVTKKLKKSILNKVNNYKIFETKFQNPNIESSNDLEILKAEETFLNKLSTAVSKVGYTLNTLLEVSPEKDILENYNMVVELCNNNSTTEIYKVYPELEKNEKLLQGMIHFIQGLRQQSLHPKISWNFETKNLKPEKLERLKEKKNIKMRDCVVHEDNLDKKEKSEVEIKRYFEKIEEKLPDYFIEKYESNNVFNIYRNFVDKIMEAIKNFNFKENNTIDYLFPKFHKIYKRMYKSENIDDRQNGARKYLLQTIYYYYFQYKIENDKNDIFKYLNLYKNKIKAKKISYSYIIDNKNVNNKNIEILYKNIQREGILNNRLSQMNNEWIEFIVVQFSEFLTNKKLNWILDDLSEYKKKEKLDNSDKDKLREMLKLKMNKKLIYSNDSYVFISLAQFLDLKEISNLIHDIKKFIQFREKNVSKYKPEKNKLYIEELKKILYILKVMLEHKERVIQKHYLESYDENISIMYGKDIEKKDIKDIEIKIKNKNQEVINQPLYKSGNDEKSSWIVLYGIEQAKRNGTFKFFEGFFNLNDDIKLCKKDIKRYEKLYNEKEDSQKVVDDYISLNEHSSIPTKELIKKNCKKQLFYYYKNMIYGDGLKKGYDFINDIYSHYLSWAYRIERDCKIYKIKKYENKKNSNEYKFKEYKSIQNFRNKIAHFNYFQKTDKSLLDLLNDFYSIFDYNLKYQRDVQKVINNIFEKYQVVREDEGPVIFYCKVDKKLKLSENLVPKKHSKYQEIKLIHEKYVVFFKKLFEYKK

SEQ ID NO: 10 - protein, 1214 aa, Artificial
  Synthetic
MKVTKIDGLSHKKFEDKGKLVRFNSENKEEKSNNDTNKETKTEMEKRIEKLKELKLDNYIKNPENVKNEDKDAEKETKIRRTNLKKYFSEIILREEGKKYILVKSKKFKNINQEIDYYDIKKKENQQEIFNVLKEILELKIKNNEKEEYINFDSEKLKEAFEKDFVKKVLKIEAVKKSLEINRANYKKTLVEIGNDKYENVKGENKRSCIYEYYKKSETHEKFRKNIIEAFEKLYTEENIKELYSKIEEVFKKTHLKSIVREFYQNEIIRESEFSEKGEDGISILYNQITKSNEKKEKFVEFLENIENLQLKELTKSQIFYKYFLKNEELNDENIKFAFCYFVEIEVNNLLKENVYEIKRFNESNKKRIENIFEYDKLKKLIVYKLENKLNNYVRNCGKYNYHMENADIATSDINMRNRQTEAFLRSMIGVSSFGYFSLRNILGVNDDDFYEIEEDLTEDERKEQSNTLKKAKEDITSTNKSIFEKVVGKSFEKKGIYSIKENLKMFYGDSFDDTNEDELKQFFVNMLNAIISIRHRVVHYNMNTNSENIFNFSDIEVSRLLKNIFEKETDKRELKLKIFRQLNSAGVFDYWESWKIKKYLENIEFKFVNKNIPFVPSFTKLYNRIDNLKGNNALNLGYINIPKRKEARDSQIYLLKNIYYGEFVEKFVNNNDNFEKIFREIIEINKKAGINTKTKFYKLEKFETLKANAPIEYLEKLQSLHQINYNREKVEEDKDIYVDFVQKIFLKGFINYLQESDSLKSLNLLNLKKDEAIANKKSFYDEKLKLWKNNGSNLSKMLEEIYEYIKKIKINKINYSDRMSIFYLLLKLIDYRELTNLRGNLEKYESMNKNKIYSEELNIVNLVSLDNNKVRANFNLKPEDIGKFLKTETSIRNINQLNKFSEIFADGENVIKHRSFYNIKKYGILDLLEKIVDKADLKITKEEIKEYKNLQKELEKNDFYKIQENIHRKYNQKSNWISRIENKKDFNDYKKAIENIQNYTQLKNKIEFNDLNLLQSLLFRILHRLAGYTSLWERDLQFKLKGEFPEDKYIDEIFNSDGNNNQKYKNGGIADKYADFLIEKEEEKSGEILKKNQRIKRKKKIKEDLEIRNYIAHFNYFPDATKSILELLEELRELLKYDRKLKNAVMKSVKDIFKEYGFIVEFEISHESNSKKIKVCDVKSEEIKHLKNNGLVTTRNSEDLCELIKVMLEYKKS

SEQ ID NO: 11 - protein, 1143 aa, Artificial
  Synthetic
MRVSKVKVKDGGKDKMVLVHRKTTGAQLVYSGQPVSNETCNILPEKKRQSFDLSIENKTLKRRDDVDKTKKGKYDIVRKIIKYGELPQSINDVDILEFLNHKFQKPVKYWKNGKEESFNLTLLIVEAVKTQDRQKLQPYYDWKTWYIQTKSDLLKKSIENNRIDLTENLSKRKKALLAWETEFTTSGKIDLTHYHKVYMTDVLCTALQKVEPSTDKKGKINTNAYHRGLKKALQTHQPAIFGTRQAPNNVNRADDRLSIYHLEVVKYLEHYFPIKTSKRRNTADDIEHYLKTQTLKTTIEKQLVNAIRANIIQQGKTNHHELKADTTSNDLIRIKTNEAFVLNLTGTCAFAANNIRNMVDNEQTNDILGKGDFIKSLLKDNTNGQLYSFFFGESLSTNKAEKETQLWGIRGAVQQIRNNVNHYKKDALKTVFNISNFENPTITDPKQQTNYADTIYKALFIKELEKIPNAFAQQLKTGGALSYYTIENLKSLLTTFQFSLCRSTIPFAPGFKKVFNGGINYQNAKQDESFYELMLERYLRKENFAEEAYNARYFLLKLIYNNLFLPGFTRDRKAFADSVGFVQMQNKKQAEKVNPKKREAYAFEAVRPMTAADSIADYMAYVQSELMQEQNKKEEKATDETRINFEKFVLQVFVKGFDSFLRAKEFDFVQVPQPQLTATASNQQKADKLNQLEASITADCKLTPQYAKADNATHIAFYVFCKLLDAGHLSNLRNELIKFRESVNEFKFHHLLEIIEICLLSADVVPTDYRDLYSSEADCLARLRPFIEQGADITNWSDLFVQSDKHSPVIHANIELSVKYGTTKLLEQIINKDPQFKTTEANFTAWNTAQKSIEQLIKQREDHHEQWVKAKNADDKEKQERKREKSNFAQKFIEKHGDDYLDICDYINTYNWLDNKMHFVHLNRLHGLTIELLGRMAGFVALFDRDFQMLDAKRISDLYQLKSFISFREITSELDKNNDITEINLIKDKEIIKRDGTPITEADRNSLKSCIQSKREYYQKTYFKEHTNPFTDRNYIAHFNYLSTNTGNHSLIKLINKLRDLLHYDRKLKNAVSKAFIDLFDKHGMILKLKLNTDHQLEVESLEPKKIYHLGSSAKDKPEYQYCTNQVMMAYCNMCRSLLEMKK

SEQ ID NO: 12 - protein, 985 aa, Artificial
  Synthetic
LEKNKAHFKKESVNNTTDRVKGNNKKSLFYEYYRNSSKHQEYVNNIFEAFDKLYSNSHEDINNLFLEITKGSNNRNIRKIREVYHEILNKNKTEFEEELYKKIQDSISNFDKLLEIEPEIKELTKSQIFYKYYIDKVNLNEINIKYCFCHLVEIEVNQLLKNYVYSKRNVNKEKLENIFEYCKLKNLIKNKLVNKLNSYIRNCGKYNGYINNNNIIDSKKISEIRIKEAFLRSIIGVSSSAYFSLRNILNTDNTQDITNKVKGEVDKLYQENKKIELEERLKLFFGNHFDINNQQEIEDFLINIDKIISSIRNEIIHFKIEANACSIFDFNNVILGNKAKKILNEEINKEKIKFKIFKQLNSANVFDYLSNEDITEYMGKAVFSFTNRNIPFVPSFTKIYNRVQDLANSLKIEEWKIPEESEKKDAQIYLLKNIYYGKFLDKFLNQEDEIFISTKDKIIELNKNQNKRTGFYKLEKFEKIEETNPKKYLEIIQSLYMINIEEIDSEEKNIFLDFIQKIFLKGFFEFIKNDYNYLLKLERVQDKKNVFDKEMSKYTAGEKTLGDMEEINEITQKIKVAEIDKILNQTDKINCFYLLLKLLNYKEITELKGNLEKYQILSNTNIYKKELILLNIVNLDNNKVKIEDFEISAEEIGKFIEKISRNKKIKTFEELRNFEKRENTGEYYNVYSDDKNIKNMRNLYNIKKYGMLDLLERISEKANYFIKKEDLKEYSELRKQLEDEKTDFYKIQKDLHYEYQKKYKNFSKKNNTEDYEKYKESIENIEKYVHLKNKIEFNELNLLQSLLLKILHRLVGFTSIWERDLRFRLIGEFPDELDVEDIFDHRKRYRGTRGQICKKYDQFISVHIEYQNNKKMKNIKFDDNNPIRNYIAHFNYLPTPKYSILKMLGKLRELLDYDRKLKNAVMKSIKDILEEYGFKAEFVINPDKEIILNSVKSVEIIHLKKNDLNSHRNSEDLCKLVKAMLEYSE

SEQ ID NO: 13 - protein, 1168 aa, Artificial
  Synthetic
MKVTKVDGISHKKYIEEGKLVKSTSEENRTGERLSELLSIRLDIYIKNPDNASEEENRIRRENLKKFFSNKVLHLKDSVLYLKNRNEKNAVQDKNYSEEDISEYDLKNKNSFSVLKKILLNEDINSEELEIFRKDVEAKLNKINSLKYSFKENKANYQKINENNVEKVGGKSKRNIIYDYYRESAKRNDYINNVQEAFDKLYKKEDIEKLFFLIENSKKHEKYKIRECYHKIIGRKNDKENFAKIIYEEIQNVNNIKELIEKVPDMSELKKSQVFYKYYLDKEELNDKNIKYAFCHFVEIEMSQLLKNYVYKRLSNISNDKIKRIFEYQNLKKLIENKLLNKLDTYVRNCGKYNYYLQDGEIATSDFIARNRQNEAFLRNIIGVSSVAYFSLRNILETENENDITGRMRGKTVKNNKGEEKYVSGEVDKIYNENKQNEVKENLKMFYSYDFNMDNKNEIEDFFANIDEAISSIRHGIVHFNLELEGKDIFAFKNIAPSEISKKMFQNEINEKKLKLKIFRQLNSANVFRYLEKYKILNYLKRTRFEFVNKNIPFVPSFTKLYSRIDDLKNSLGIYWKTPKTNDDNKTKEIIDAQIYLLKNIYYGEFLNYFMSNNGNFFEISREIIELNKNDKRNLKTGFYKLQKFEDIQEKIPKEYLANIQSLYMINAGNQDEEEKDTYIDFIQKIFLKGFMTYLANNGRLSLIYIGSDEETNTSLAEKKQEFDKFLKKYEQNNNIKIPYEINEFLREIKLGNILKYTERLNMFYLILKLLNHKELTNLKGSLEKYQSANKEETFSDELELINLLNLDNNRVTEDFELEGNEIGKFLDFNGNKIKDRKELKKFDTNKIYFDGENIIKHRAFYNIKKYGMLNLLEKISDEAKYKISIEELKNYSNKKNEIEKNHTTQENLHRKYARPRKDEKFTDEDYKKYEKAIRNIQQYTHLKNKVEFNELNLLQSLLLRILHRLVGYTSIWERDLRFRLTGEFPENQYIEEIFNFDNSKNVKYKNGQIVEKYINFYKELYKDDTEKISIYSDKKVKELKKEKKDLYIRNYIAHFNYIPNAEISLLEMLENLRKLLSYDRKLKNAIMKSIVDILKEYGFVVTFKIEKDKKIRIESLKSEEVVHLKKLKLKDNDKKKEPIKTYRNSKELCKLVKVMFEYKIKEKKSEN

SEQ ID NO: 14 - protein, 923 aa, Artificial
  Synthetic
LKQIYNLELKKYIENNFSYKKQKSKSKNGKNDYLYLNFLKKIMFIEEVDEKKEINKEKFKNKINSNFKNLFVQHILDYGKLLYYKENDEYIKNTGQLETKDLEYIKTKETLIRKMAVLVSFAANSYYNLFGRTENNILTQEISDDLLLGKIENEIYIKGEKNRRYVFKEKMLNYFFNPEIFGDNKIVEVLSAISSSIYNIRNGVNHFDKMVLGKYNNELDLKDSDTIKDYFNFKKKEIQQDLKDRFISNNLQYYYTENEIKKYFEKYKFEILKTKASFAPNFKRILIKGENLSISESNNSYEFFKTYSESSDKNTEYNEFMKTRNFLLKELYYNNFYTEFLNNKAKFREAVEKVKKNKKRRGGKSYDVIGNYNFSDSISEYISYIHKSEMERIEINTEKNRKDTSKHIRDFIEEIFLEGFIEYLNNNNFKFLKNRNEVDKEREEIVRNLNIRIEGLDILNEDDSEILNLYLFFNMIDNKRISEFRNDMIKYKQFLAKRQNIDSKFLKIDIEKIEAIIEFVIITKEKLEILEGETKEQKKDNMNALFNKFYSSESEYDEKLKKFIEEAILGDKKNTPFYSTDGKTPIVHSKLEKMRKYGTENFLSKVLKNSKYTLNNMTAKEKFEAEVSDELKEYKILEKVSRFKEKGKPKKVIEYYNDCRCYLHKKWIEKKKSEEEFEHKEIYKKIIEEIRKYNYLENKEKLQNVYLLHEMLSDLLARNVAFFNKWERDFKFIVIAIKQFLRENDKEKVNEFLNPHKSDGSRDNFSVTNYRSKMKSIINNIHENFMSLLFLNNNLATGGIQVGRNNNFTWGALRNYIAHFEYLHEEKDTISFIGQANLLIKLFSYDKKVQNHILKSIKTLLEKYNIQINFEIPKDEDKNETFRYKIKNQLYSKKGKMLGKNNEFEILEKEFLENVKAMLEYLE

SEQ ID NO: 15 - protein, 1425 aa, Artificial; identical to SEQ ID NO: 3
  Synthetic

SEQ ID NO: 16 - protein, 1212 aa, Artificial
  Synthetic
MKITKIDGVSHYKKQDKGILKKKWRDLDEGKQREKIEARYNKQIESKIYKEFFRLKSGKDSERITKEKNEGIKSLYYLIKELYEGKENDLWELKNINLEILGDKERIIKGYKFKEDVYFFKEGDKEYYLRTLFNNLIEKVQNENREKVRKNKEFLDLKEIFKKYKDRKIDLLLKSINNNKINLEYKKENVNEEIYGINPTNDREMIFYELLKEIIEKKDEQKSILEEKLDNFDITNFLENIEKIFNEETEINIIKGKVLNELREYIKEKEENNSDNKLKQIYNLELKKYIENNFSYKKQKSKSKNGKNDYLYLNFLKKIMFIEEVDEKKEINKEKFKNKINSNFKNLFVQHILDYGKLLYYKENDEYIKNTGQLETKDLEYIKTKETLIRKMAVLVSFAANSYYNLFGRTENNILTQEISDDLLLGKVENERYIKGERNRRYVFKEKILNYFFNSEIFGDNKIVEVLNAISSSIYNIRNGVNHFDKMILGKYNNGLDLKDSDTIKDYFNFKKKEIQQDLKDRFISNNLQYYYTENEIKKYFEKYKFEILKTKASFAPNFKRILIKGENLSISESNNSYEFFKAYSESSDKNTEYNEFMKTRNFLLKELYYNNFYTEFLNDKAKFREAVEKVKKNKKRRGGKSYDVIGNYNFSDSISEYISYIHKSEMERIEINTEKNRKDTSKHIRDFIEEIFLEGFIEYLDNNNFKFLKNRNEVNKEREEIVRNLNIQIEGLDILNEDDSEILNLYLFFNMIDNKRISEFRNDMIKYKQFLAKRQNIDSKFLKIDIEKIEAIIEFVIITKEKLEILEGETKEQKKDNMNALFNKFYSSESEYDESLKKFIEEIVLNDKKNTPFYSTDGKTPIVHSNLEKMRKYGTENFLSKVLKDSKYILNNMTTKEKFEAEVSDELKEYKILEKVSRFKENEKPKKVIEYYNDCRCYLHKEWIEKKKSKEKFEHKEWIENKKNKEEFEHKEIYKKIIEEIRKYNYLENKEKLQNVYLLHEMLSDLLARNVAFLNKWERDFKFIVIAIKQFLRENDKEKVDEFLNPYKSDGSRDNFSVTNYRSKMRLVINNIHENFMSLLFLNDNLAIREITANNFTWVNLRNYIAHFEYLHEEKDTISFIVQANLLIKLFSYDKKVQNHILKSIKTLLEKYNIQISFKIPKDEDKNETFRYEIKNQLYSKKGKMLGKNNKFEILENEFLENVKAMLEYSK

SEQ ID NO: 17 - protein, 1405 aa, Artificial
  Synthetic
LFLWIIEEVIYEIIKLYKNLEEEIIMGNLFGYKRWYEVRDKEDYKIKRKVKVKRNYDGNKYILNINENNNKEKIDDNKFIREFINYKKNDNVLREFKKKFHAGNILFKLKGKEKIRRIENDDDFLETEEVVLYIEVYGQSEKLKNEEEITKKDILKEINKQKIDNSVKKISMNTNSGKTIVINFSDKLKKDKDDYQITLNIISEDELERKRKIYDIFKMINMDLYQIIKEIIENEVQKVFENRYYEEYLREKLLKDDKIDVILTNFMEIREKIKSNLEIMGFVKFYLNVGGDKKKSENKKMFVEKILNINVDLTVEDIVDFIVKELKFWNITKRIEKVKEFNNKFLENKRNRTYIKSYVLLDKHEKFKIERENKKDKIVKFFVENIKNNSIKEKIEKILTEFKIDELTKKLEKELKKGNCDTEIFGIFKKHYKVNFDSKKFSNKSDEEKELYKIIYRYLKGRIEKILINEQKVRLKKMEKIEVEKILNESILSEKILKRVKQYTLEHIIYLGKLRHNDIVKMTVNTNDFSRLHAKEELDLELITFFASTNMELNKIFNGKEKITDFFGFNLNGQKITLKEKVPNFKLNILKKLNFINNENNIDEKLSHFYSFQKEGYLLRNRILHNSYGNTQETKNLEGEYENVENLIKELKVNDEEISKSLNLDIIFEGKVDIINKINNLKIGEYKDKKYLPSFSKIVPEITRKFREINKDKSFDIESEKIILNAVQYVNKILYKKITSNEENEFIKTLPDKLVKKNNNKENKNSLSIEEYYKNAQISSSKGDKKAIKKYQNKVTNAYIEYLENTFAKVIDFSNFNLNFDEIKTKIEERKYSKSKITVDSISTNINITNDIEYIISIFALLNSNTYINKIRNRFFATSVWLNTQKYENIIDILDKILSINLLRENNIADILDLKNTIIEAKIVENNEECIKNYIFENNEEELKKRLFCEELINKEDVLKIFEDKNFKFKNFIKKTGNENFTIDFDILFNLECNSELNAKKVIGQNSQRLNLFIKNTIDEYKSKIKTSFSSEFLEKYKKEIDNLVEDTESENKNKFEKIYYPEEHKNELYIYKKNLFLNIGNPNFDKIYELISKDIKNANTEILFNDDIRKNKIAEIDVILKNLNDKLNGYSKEYKEKYIKKLKENQENNDFFAKNIQNENYSSFREFKEDYNKVSEYKKIRDLVEFNYLNKIESYLIDINWKLAIQMARFERDMHYIVNGLRELGIIKLNGYNTGISRAYPKRDGSDDFYATTAYYKFFDEESYKKFEKICYKFGIDLSENSEINKPENESIRNYISHFYIVRNPFADYSIAEQIDRVSNLLSYSTRYNNSTYASVFEVFKKDVDLDYDELKKKFKLIGNNDILERLMKPKKVSVLELESYNSNYVKNLIIKLLTKKENTNDTL

SEQ ID NO: 18 - protein, 1194 aa, Artificial
  Synthetic
MKVTKIDGLSHKKFEDEGKLVKIEDASQKNETLERLENLKGIKLGNYIKNTDKTKNKDNKKRRKGLKEYFSEITLRKENEKYVLLKGKKLKKINNDIKDTDIKAKDKKEEVFDILKEILKLNLLANDAEEKIQFDSIKLKNVFGKDFVKKELQIKSIEESLEKNKADYRKEFIETENHKYGNVKGKNKRSHIYEYYKKSENHKKFEDNIREAFEKLYTEENIKELYSKIEQVLKKTHLKSIVWEFYKNEIIGESEFSKKNGDGISILYNQIKDSIKKEENFIEFIENIGNLELKDLTKSQIFYKYFLENEELNDENIKFVFCYFVEIEVSDLLKGNVYKASKIYENKIKNIFEYGKLKKLIVYKLENKLNNYVRNCGKYNYHMENGDIATSDINMRNRQTEAFLRSMIGVSSFGYFSLRNILGVNDDDFYEIEEDLTEEERKNESNALKKAKEDITSKSIFEKVVDKSFEKKGIYSIKENLKMFYGDSFDKANEDELKQFFVNMLNAITSIRHRVVHYNMNTNSENIFNFSDIEVSRLLKNIFEKETDKRELKLKIFRQLNSAGVFDYWESWKIKKYLENIEFKFVNKNIPFVPSFTKLYNRIDNLKGNNALKLGNYITIPKRKEARDSQIYLLKNIYYGEFVEKFVNNNDNFEKIFREIIEINKNAGTNTKTKFYKLEKFETLKANTPTEYLEKLQSLHQINYDREKIEEAKDIYVDFVQKIFLKGFINYLQKSNSLKPLNLLNLKKDEVINSEKSSYDEKLKQWENNGSKLSEMPKEIYKYIKEININKINYSNRMSIFYLLLKLIDHRELTNLRGNLEKYESMNKNKIYSEELNIVNLVSLDNNKVRTNFSVEAEDIGKFLKTETSIKNNKQLNNFSEIFADGENVIKHRSFYNIKKYGILDLLEKIVTKADLKITKEEIKKYKNLQKELEKNDFYKIQENIHRKYNQKPNLISRTENKKDFNDYKKAIENIQNYTQLKNKIEFNDLNLLQSLLFRILHRLAGYTSLWERDLQFKLKGEFPEDKYIDEIFNSDRNNNQKYKSGGIAYKYVDFLIEKEEGKRAGKNKVKKRSEKEGSFIIRNYIAHFNYIPDAEKSILEILEELRELLKYDRKLKNAVMKSVKDIFKEYGFIVEFGISHESNNKKITINKVYSEKIEHLKKAKLEKEDKLETTRNSEDLCKLVKVMLEYKKS

SEQ ID NO: 19 - protein, 1242 aa, Artificial
  Synthetic
MKITKIDGVSHYKEKEKGVLKGKDILNGKIEKIVKKRYDATIESKIYKEFIKLRKNRIEQNNEKSILKLIKLNIDKNEKEIKTLLLNKFKIKEKNKKYDKYMLDENKLDNDIKIYESVESLYFLIKEIYLGQNNKKWNISKIDLEKIMEEDNNLIMLGYKLKKNITENDYPYLYSDKNGQESTSVYKLLKKLIEENKDRNQDIRKSQEYEKIRKNFEEYKNRKINLLVKSIKNNKINIQYINNEIKSHNNSREENIIKFFKKMIEEKNKPILKDKLKLFRLKVFFDEEFLEEIKKLLDSDDLDKSDNKKISELRGKIFSRIREKIKENRDRDILENIYFLELKKYIENNLSHKKENNKKNNNIGEEKSKKLYLKFLKKVLFIDDNNRINIEKLKSRIDDNFKNLLIQHVIEYGKIKYYVENDDYIKNIVKNGELKLETENLEYIRIRETLIRKMAVLVSFAANSYYNLFGRTENNILTQEISDDLLLGKIENEIYIKGEKNRRYVFKEKMLNYFFNPEIFGDNKIVEVLSAISSSIYNIRNGVNHFDKINLGQYNNLDLSEIKKYFIEKRDKIKEKVKEKFSSNNLQYYYAKKEIENYFKAYEFEILKEKIPFAPNFKRIIKKGEDLFNNKKNKKYEYFKNFDKNIAEEKKEFLKTRNFLLKELYYNNFYKEFLSKKEEFKKVVIEVKEEKKNRGNINNKKSGVSFQSIDDYDTKINISDYIASIHKKEMERVEKYNEEKQKDTAKYIRDFVEEIFLTGFINYLEKDKRLHFLKEEFSILCNNNNNVVDFNININEEKIKEFLKENDSKTLNLYLFFNMIDSKRISEFRNELIKYKQFTKRRLDEKKEFLGIEIELYETLIEFVILTREKLDTKKSEEIDAWLVDKLYVKDNNEYKEYEEILKLFVDEKILSSKEAPYYATDNKTPILLSNFEKTRKYGTQSFLSEIQSNYKYNKVEKENIEDYNKKEEIEQKKKSNIEKLQDLKVELHKKWEQNKITEREIKKYNDTIKEIREYNYLKNKEELQNVYLLHEILSDLLARNVAFFNKWERDFKFIVIAIKQFLRENDKEKVNEFLNPHKSDGSRDNFSVTNYRSKMKSIINNIHENFMSLLFLNNNLATGGIQMGRNNNFTWGNLRNYIAHFEYLHKEKDTISFLNQANLLIKLFSYDKKVQNHIIKSMKTLLEKYNIEIGFEISNDSEEIFEYKIKYINSKKGKMLGKNNEFKILENEFVRNVKALLEYSK

SEQ ID NO: 20 - protein, 1169 aa, Artificial
  Synthetic
MKITKIDGISHKKYIKEGKLVKSTSEENKTDERLSELLSIRLDTYIKNPDNASEEENRIRRENLKEFFSNKVLHLEDGILYLKDRREKNAVQNKNYSEQDISEYDLKNKNSFSVLKKILLNEDINSEELEMFRKDIDKKLDKINSLKYSLEENKANYQKINENNIKKVEGKSKRNIFYNYYKDSAKRNDYINNIQEAFDKLYKKEDIENLFFLIENSKKHEKYKIRECYHKIIGRKNDKENFATIIYEEIQNVNNMKELIEKVPNVSELKKSQVFYKYYLSKEKLNDENIKYVFCHFVEIEMSKLLKNYVYKKPSNISNDKVKRIFEYQSLKKLIENKLLNKLDTYVRNCGKYSFYLQDGEIATSNFIVGNRQNEAFLRNIIGVSSVAYFSLRNILETENKDDITGKMRGKTRIDSKTREEKYIPGEVDQIYYENKQNEVKNKLKMFYGYDFDMDNKNEIEDFFANIDEAISSIRHGIVHFNLDLDGKDIFAFKNIVPSEISKKMFQNEINEKKLKLKIFRQLNSANVFRYLEKYKILNYLKRTRFEFVNKNIPFVPSFTKLYSRIDDLKNSLGIYWKTPKTNDDNKTKEIIDAQIYLLKNIYYGEFLNYFMSNNGNFFEISKEIIELNKNDKRNLKTGFYKLQKFEDIQEKIPKEYLANIQSLYMINAGNQDEEEKDTYIDFIQKIFLKGFMTYLANNGRLSLIYIGSDEETNTSLAEKKQEFDKFSKKYEQNNNIKIPYEINEFVREIKLGKILKYTERLNMFYLILKLLNHKELTNLKGSLEKYQSANKEETFSDQLELINLLNLDNNRVTEDFELEADEIGKFLNFNGNKVKDRKELKKFDTKKIYFDGENIIKHRAFYNIKKYGMLNLLEKISDEAKYKISIEELKKYSNKKNKIEKNHKMQENLYRKYARPRKDEKFTDEDYESYKQAIKNIEEYTHLKNKVEFNELNLLQSLLLRILHRLVGYTSIWERDLRFRLKGEFPENQYIEEIFNFENKKNVKYKSGQIVEKYIKFYKELHQNDEVKINKYSSANIKVLKQEKKDLYIRNYIAHFNYIPHAEISLLEVLENLRKLLSYDRKLKNAVMKSVVDILKEYGFVVKFKIGADKKIEIQSLKSEEIVHLKKLKLKDNDKKKEPIKTYRNSKELCKLVKVMFEYKMEEKKSEN

SEQ ID NO: 21 - protein, 1186 aa, Artificial
  Synthetic
MKVTKIDGLSHKKFEDEGKLVKIEDASQKNETLERLEKLKEIKLGNYIKNPDKTKDKDNKKRRKGLKEYFSEITLRKENEKYVLLKGKKLKKINNDIKDTDIKVKYKKEEVFDVLKKILKLNLLANDVEEKIQFDSIKLKNVFGKDFVKKELQIKSIEESLEKNKADYRKEFIEIENDKYGNVKGENKKNRIYEYYKKSETHEKFRKNIIEAFEKLYKKDDIEKLYTQIIEISKKMHLKSKVRELYKNVIIKRSCDDFSKKNKEGISVLYSQIMNSVKKNEKFVKFVKNIELKDLTKSQIFYKYFLENEELNDENIKNIFCYFVEIEVSDLLKGNVYKVSKIYENKIKNIFEYNKLKKLVINKLENKLNNYVRNCGKYNYHMENGDIATSDINMRNRQTEAFLRSMIGVSSFGYFSLRNILGVNDDDFYEIEEDLTEEERKNESNVLKKAKEDITSKSIFEKVVDKSFEKKGIHSIRENVKMFYGDSFDKANEDELKQFFVNMLNAITSIRHRVVHYNMNTNSENIFNFSDIEVSRLLKSIFEKETDKRKLKLKIFRQLNSAGVFDYWENWKIKKYLENMKFEFVNKNIPFVPSFTKLYNRIDNLKGSNALNLGYINIPKRKEARDSQIYLLKNIYYGKFVEEFIKNNDNFEKIFREIIEINKNAGTNKQTNFYKLEKFEKLKANTPTEYLEKLQSLHKINYNREKIEEDKDIYVDFVQKIFLKGFISYLQKSNSLKPLNLLNLKKDEVINSEKSFYDEKLKQWENNGSNLSEMPKEIYKYIKEIKINKTNYSDRMSIFYLLLKLIDHKELTNLRGNLEKYESMNKNKIYSEELNIVNLVSLDNNKVRTNFSVEAEDIGKFLKTETSIKNINQLNNFSGIFADGENVIKHRSFYNIKKYGILDLLEKIVAKADLKIAKEEIKKYENLQKELEKNDFYKIQEKIHRKYNQKPNLISRTENKKDFNDYKKAIENIQNYTQLKNKIEFNDLNLLQGLLFRILHRLTGYTSLWERDLQFKLKGEFPEDKYIDEIFNSDRNNNQKYKSGGIAYKYVDFLIEKEEGKRAGKNKVKKRSERERSFIIRNYIAHFNYIPDAEKSILEILEELRELLKYDRKLKNAVMKSIKDIFKEYGFIIEFGISHESNSKKIKVLNVESEKIKHLKNNGLVTTRNSKDLCKLVKVMLEYKKS

SEQ ID NO: 22 - protein, 1415 aa, Artificial
  Synthetic
MKMGNLFGYKKWYKVDKIIKGKEVKVEVRIKRKYLDNESKYVLNINKQKEEYDENKITDKEFIDQFIEYKTNNDIFEKFKRKFHMGNILFKLKAKELTEKTIKEIRNYNDFLEKEKAILEIEIYQQSEKLIEEENITKKDIIDKAIKEKITEDSNEIKMQIKSKENKSKEIKISINKETEEYHIKLKSINNDELNLKREIYEILKSINANLYTITKNTISNADFKKRNYENFLRENIMEHLKKNIREKSKMTFLKSLSNSLKKIQGNIKENDEIINFIKYYSNINGSKTVSENKKNFLEKILNTEVSVSENDIIDFIIGELKFYGIIKRIEKLQEKTADRTDEDIENTYIESYVLLDKHEKFKKYNRNKKDEIVKLFVKDIHNNTMEEKINQILSKFKIKELTEKLKENPKNKNFDTEIFGIFKIHYKKIFSSEKFENKSDEEKELYKIIYRYLKGRIEKILINEEKVRLKKMEKILINGEKIRLNKIEKIEIEKILNESVLSEKILKRVKQYTLEHIMYLGKLIHNDVNMITVNTNDFSRLHAKEELDLELITFFASTNMELNKIFSKEKINDDENIDFFGFNLNGQKITLKEKVPSFKLNILKKLNFINNENNIDEKLSHFYSFQKEGYLLRNRILHNYYGNIQETKNLEGEYENVENLIKELKVSDEEISKSLNLDIIFEGKVDIINKINNLKIGEYKDKKYLPSFSKIVPEITRKFREINKDKSFDIESEKIILNAVKYVNKILYEKITSNEENEFIKTLPDKLVKKNNNKENKNSLSIEEYYKNAQVSSSKGDKKAIKKYQNKVTNAYLEYLENTFAEVINFSNFNLNFDEIKTKIEERKYSKSKITVDSISTNINITNDIEYIISIFALLNSNTYINKIRNRFFATSVWLEKQNSTKEYDYENIIDILDKVLSINLLRENNIADILDLKNTIIETKIVENNEECIRNYIFENNEEKLKKRLFCEELVDEEDIRKIFEDKNFKFKNFIKKTENENFTINFDNLFNLECNSELNVKKVIGQNSQRLNLFIKNTIDEYKSKIKTSFSSEFLEKYKGIIDNLIENENKFEKIYYPEEHKNELYIYKKNLFLNIGNPNFDKIYRIISEDIKNVNTEILFDNDIRNNKIAKIDVILKNLNDKLNGYSQGYKEKYIEKLKENSDFFTKNIQNENYNSFEEFKEDYNKVSEYKRIRDLVEFNYLNKIESYLIDINWKLAIQMARFERDMHYIVNGLDYLYIIRLEKNRNQDRSSPYPKYKNGVLDYTKSYYNFKDYQEFMDICSKFGIDLSENSEINKPENESIRNYISHFYIVRNPFADYSIAEQIDRVSNLLSYSTRYNNSTYASVFEVFKKDVDLDYDELKKKFKLIGNNDILERLMKPKKVSVLELESYNSNYIKNLIIELLTKVENKDEIFS

SEQ ID NO: 23 - protein, 1169 aa, Artificial
  Synthetic
MGSGKYRITKIARDWDENKKRIILKRIVSDGEVKYVNENNNVDIDITETYYRILSNNKAKFLGSNEQFIFKVNKMKRNIKNDCVIIKDYTEEEFEKLDKKIFFSRKIKVNNKDREKICRNFYEDEREIMKKRLEEAKKFNNIIFNICNKIFKLEYLDYTDEKVYKIFQNEIKVKDVKNLKEAFKQQEKGLETDKLLAISFNKKRNNILLEFIQQIAKQEFENQKELENWFSYGGEKYCKEIFKIYSNMSQKEKYFKLLGHRNQGIASIYDEKKETLQRRLKLGDYSKYDLKRYYQKDYKEEAIKELKDKNKEGLEREIEELIKKNYKIDKLCDEISNLEFSFVESKKENKDKMSEIIVKIKEHYKKNVNVEEELENKEKYILSIIHNYVKGRYRKCLELQQKENVDFENLEKRIKEIFDSNEVTKKLKKSIINKVNSYKIFEMKFQNPNVESSDDLEILKAEETFLNKLSTAVSKVGYILNILLEIHFRNDILQDYNQVEKLWKSDSFQKICAIYPEINNDEKLLKGMIYFIQGLRQQVLHPKILWEKQNIYNAENIKEKEKIVSVKLQNEGEAYNKKGIQNYFENVLKKIPDYFIEKYESNNVFNIYRNSVDKIMEVVKNFNFKENNTIDYLFPKFHKIYKRMCKSENIDDRQNGARKYLLQTIYYYYFQYEIENDKNNMSKYLNLYRNKIKVKKISYSYIIDNKAVNNKNIEILYRNIQREGMLNNRLLQMNNEWIEFIVVQFSEFLTKKKLNWILDDLSEYKKKEKLDENDKNELLKIFKQKMNKNITYSNDSYAFISLAQFLDLKEISNLIHDIKKFVQFREKNILKYNPEKNKIYIEELRKILYILKVMLEHKERVIQKHYLGSYDEDISIMYGKDIEKKDIKDIEIKIKNKNQEVINQPLYKSGNDENSSWIILYGIEQAKRNGTFKFFEGFFNLNDDIKLCKEDIEKYEKLYNEKEENQKKVDEYISKLNNDIEKINNDINIEKTNDNKQLFYYYKNMIYGDGLKKGYDFINDIYSHYLSWAYRIERDCKIYKIKEYENKKNFNEYKFKEYKSIKYFRNEIAHFNYFQKTNKSLLELLNNFYDIFDYNLKYQRDVQKVINNIFEKYQVIREDGGPVIFYCKIDKKLKLSENIIPKKHLKCSKIKLIHEKYVEFFRKLFEYKK

SEQ ID NO: 24 - protein, 1165 aa, Artificial
  Synthetic
MGSGKYRITKIARKWDKNENWEKIILKRIVDNKKIKYVNENNNKDVDITDTYYSILSKNNSKFLGSEEQFIFKVNKMKRNIKNDCVIIKDYTEEEFEKFDKKIFFSRKIKVNNEDREKICRNFYEDEREIMKKRLEEAKNFNNIIFNICNKIFKLEYIDYTDEKVYEIFQKEIKFEDIKNLKEAFKQQENGLETDKLLTISFNKKRSNVLLEFIQQIVKQNFENEKELENWFSHDGEKYCKEIFKIYSNMSQKEKYSKLLGHNDKSIASNSEKRETLQRRLKLGDYSKYDLKKYYQKDYKEEAIKELEDKSKEELEKEVEEIIKKNYKIDKLCDEISNLEFSFVDSKKENKDKMSEIIVKIKEHYKNNVNVEEELENKEKYILSVIHNYIKGRYRKCLELQQKENVDFENLGKRIKEIFDSNKVTEKLKKSILNKVNNYKIFETKFQNPNIESSDDLEILKAEETFLNKLSTAVSKVGYILNILLEIHFRNDILQDYNQVEKLWKSDSFQKICAIYPEINNDEKLLKGMIYFIQGLRQQVLHPKILWEKQNIYNAENIKEKEKIVSVRLQNEGEAYNKKGIQNYFENVLKKIPDYFIEKYESSNVFNIYRNFVDKIMEVVKNFNFKENNTIDYLFPKFHKIYKRMCKLENIDDRQNGARKYLLQIIYYYYFQYEIENDKNNISKYLNLYRNKIKVKKISYSYITDNKAVNNKNIEILYRNIQREGMLNNKLSQMNKEWIEFIVVQFSEFLTNKKLNWILDNLSEYKKKEKLDENDKNRLLKILKQKMNKKIIYSNDSYAFISLAQFLDLKEISNLIHDIKKFIQFREKNVSKYKPEKNKLYIKELRKVLYILKVMLEHKERVIQKHYLESYDENISIIYGKDIERKDIKDIKIKIKNENQEIINQPLYKSGNDENSSWIVLYGIEQAKRNGTFKFFEGFFNLNDDIKLCKENIEKYEELYNEKEENQRKVDEYISSEENNNIDEIKEINNNKQLFYYYKNMIYGDGLKKGYNFINDIYSHYLSWAYRVERDCKIYKIKEYENKKNFNEYKFKEYKSIKNFRNEIAHFNYFQKTNKSLLELLNDFYDIFDYNLKYQRDVQNVINNIFEKYQIVRKDGGPVVFYCKTDKKLKLSENLVPKKHSKYPEIKLIHEKYVMFFRKLFEYKK

SEQ ID NO: 25 - protein, 1095 aa, Artificial
  Synthetic
MKVTKIDGLSHKKFEDEGKLVKIEDASQKNETLERLEKLKEIKLGNYIKNPDKTKDKDNKKRRKGLKEYFSEITLRKENEKYVLLKGKKLKKINNDIKDTDIKVKYKKEEVFDVLKKILKLNLLANDVEEKIQFDSIKLKNVFGKDFVKKELQIKSIEESLEKNKADYRKEFIEIENDKYGNVKGENKKNRIYEYYKKSETHEKFRKNIIEAFEKLYKKDDIEKLYTQIIEISKKMHLKSKVRELYKNVIIKRSCDDFSKKNKEGISVLYSQIMNSVKKNEKFVKFVKNIELKDLTKSQIFYKYFLENEELNDENIKNIFCYFVEIEVSDLLKGNVYKVSKIYENKIKNIFEYNKLKKLVINKLENKLNNYVRNCGKYNYHMENGDIATSDINMRNRQTEAFLRSMIGVSSFGYFSLRNILGVNDDDFYEIEEDLTEEERKNESNVLKKAKEDITSKSIFEKVVDKSFEKKGIHSIRENVKMFYGDSFDKANEDELKQFFVNMLNAITSIRHRVVHYNMNTNSENIFNFSDIEVSRLLKSIFEKETDKRKLKLKIFRQLNSAGVFDYWENWKIKKYLENMKFEFVNKNIPFVPSFTKLYNRIDNLKGSNALNLGYINIPKRKEARDSQIYLLKNIYYGKFVEEFIKNNDNFEKIFREIIEINKNAGTNKQTNFYKLEKFEKLKANTPTEYLEKLQSLHKINYNREKIEEDKDIYVDFVQKIFLKGFISYLQKSNSLKPLNLLNLKKDEVINSEKSFYDEKLKQWENNGSNLSEMPKEIYKYIKEIKINKTNYSDRMSIFYLLLKLIDHKELTNLRGNLEKYESMNKNKIYSEELNIVNLVSLDNNKVRTNFSVEAEDIGKFLKTETSIKNINQLNNFSGIFADGENVIKHRSFYNIKKYGILDLLEKIVAKADLKIAKEEIKKYENLQKELEKNDFYKIQEKIHRKYNQKPNLISRTENKKDFNDYKKAIENIQNYTQLKNKIEFNDLNLLQGLLFRILHRLTGYTSLWERDLQFKLKGEFPEDKYIDEIFNSDRNNNQKYKSGGIAYKYVDFLIEKEEGKRAGKNKVKKRSERERSFIIRNYIAHFNYIPDAEK

SEQ ID NO: 26 - protein, 1161 aa, Artificial
  Synthetic
MKVTKVDGISHKKYIEEGKLVKSTSEENRTSERLSELLSIRLDIYIKNPDNASEEENRIRRENLKKFFSNKVLHLKDSVLYLKNRNEKNAVQDKNYSEEDISEYDLKNKNSFSVLKKILLNEDINSEELEIFRKDVEAKLNKINSLKYSFEENKANYQKINENNVEKVGGKSKRNIIYDYYRESAKRNDYINNVQEAFDKLYKKEDIENLFFLIENSKKHEKYKIRECYHKIIGRKNDKENFAKIIYEEIQNVNNIKELIEKVPDMSELKKSQVFYKYYLDKEELNDENIKYAFCHFVEIEMSKLLKNYVYKKPSNISNDKVKRIFEYQSLKKLIENKLLNKLDTYVRNCGKYNYYLQDGEIATSDFIARNRQNEAFLRNIIGVSSVAYFSLRNILETENENDITGRMRGKTVKNNKGEEKYVSGEVDKIYNENKQNEVKENLKMFYSYDFNVDNKNEIEDFFANIDEAISSIRHGIVHFNLELEGKDIFAFKNIAPSEISKKMFQNEINEKKLKLKIFRQLNSANVFRYLEKYKILNYLKRTRFEFVNKNIPFVPSFTKLYSRIDDLKNSLGIYWKTPKTNDDNKTKEIIDAQIYLLKNIYYGEFLNYFMSNNGNFFEISREIIELNKNDKRNLKTGFYKLQKFEDIQEKTPKEYLANIQSLYMINAGNQDEEEKDTYIDFIQKIFLKGFMTYLANNGRLSLIYIGSDEETNTSLAEKKQEFDKFLKKYEQNNNIEIPHEINEFVREIKLGNILKYTERLNMFYLILKLLNHKELTNLKGSLEKYQSANKEETFSDELELINLLNLDNNRVTEDFELEADEIGKFLDFNGNKIKDRKELKKFDTNKIYFDGENIIKHRAFYNIKKYGMLNLLEKISDEAKYKISIEELKNYSNKKNEIEKNHTTQENLHRKYARPRKDEKFTDEDYKEYEKAIGNIQKYTHLKNKVEFNELNLLQGLLLKILHRLVGYTSIWERDLRFRLKGEFPENQYIEEIFNFDNSKNVKYKSGQIVEKYINFYKELYKDNVEKRSIYSDKKVKKLKQEKKDLYIRNYIAHFNYIPHAEISLLEVLENLRKLLSYDRKLKNAVMKSVVDILKEYGFVATFKIGADKKIGIQTLESEKIVHLKNLKKKKLMTDRNSEELCKLVKVMFEYKMEEKKSEN

SEQ ID NO: 27 - protein, 1388 aa, Artificial
  Synthetic
MGNLFGHKRWYEVRDKENYKVRRKVKIKRNYDGNKYILNINENSNKEKINNNEFIREFVNYKKNDNVFKEFKRKFHAGNILFKLKGNKRSIEDSNDFLETKEVVLDKEVYGQSEKLKNEEGITKKDILKEINKQKIDNSVKKISMNTNSGKTIVINFSDKLKKDKDDYQITLNIISEDELERKRKIYDIFKMINMDLYQIIKEIIENEVQKVFKNRYYEEHLREKLLKDDKIDVILTNFMKIREKIENNPEIMGFVKFYLNVGGDKKKSENKKIFVEKILNTNVDLTVEDVVDFIVKELKFWNITKRIEKVKEFNNKSLENKRNRTYIKSYVSLDKHEKFKRDRENKKDKIVKLFVKDIHNNTMEEKINQILNKFKIKELIEKLKENTENKNFDTEIFGIFKTHYQNIFSSEKFSNKSDEEKELYKIIYRYLKGRIEKILINEEKVRLKKMEKIEIEKILNESILSEKILKRVKQYTLEHIMYLGKLIHNKINMATVNTNDFSRLHAKEELDLELITFFASTNMELNKIFNGKEKVTDFFGSNLNGQKITLKEKVPSFKLNILKKLNFINNENNIDEKLSHFYSFQKEGYLLRNKILHNSYGNIQETKNLEEKYKNVKNLIDELKVSDEEISKSLNLDVIFEGKNNIIIEINKLQTGKYKDKKYLPSFSKIVPEIMRKFREINKDKSFDIESEKIILNAVQYVNKILYEKITSNEENEFIKTLPDKLVKKNNNKENKNSLSIEEYYKNAQVSSSKGDKKAIKKYQIKVTNAYLEYLENTFTEVIDFSNFNLNFDEIKTKIEERKYSKSKITIDSISTNINITNDIEYIISIFALLNSNTYINKIRNRFFATSVWLEKQNGIKEYDYENIISILDEVLLTNLLRENNVTDILDLKNAIIDAKIAENDETYIKNYIFESNEEKLKKRLFCEEFVDKEDIRKIFEDKNFKFKNFIKKNEIGNFKINFDVLLNLECNSEVEVKKVIGQNSKKLESFIQNTIDEYKSNIRTLFSSEFLEKYKEEIDNLVEDTESENKNKFEKIYYPKEHKNELYIYKKNLFLNIGNPNFDKIYGIISKDIKNANTEILFDDDIRKNKISKIDVILKNLNNKLNGYSNDYKEKYVNKLKENNDFFTKNIQNENYNSFEEFKEDYNKVSEYKKIRDLVEFNYLNKIESYLIDINWKLAIQMARFERDMHYIVNGLRELGIIKLNGYNTGISRAYPKRDGSDDFYTTTAYYKFFDEESYKKFEKICYKFGIDLSENSEINKPENESIRNYISHFYIVRNPFADYSIVEQIDRVSNLLSYSTRYNNSTYASVFEVFKKDVDLDYDKLKTKFKLFDDEKNNDIKILKIKDLIESKKVSVLELESYNSNYVKNLIIKLLTKIENTNDTL

SEQ ID NO: 28 - protein, 1199 aa, Artificial
  Synthetic
MKVTKIDGISHKKFENEGKLVKSTDNQGKNNEMKERLNKLKELKLSNYIKNPENVKNEDENVEKETKQRRKNLKNFFSEIILRKENEKYVLIKTKKFKNTNQEIDFYDIKSKEKRQEIFDALNGILVYIEENEKEETINFDSKKLEKAFEDDFIKKEAKIKAIEKSLEINRANYEKDYVEIENDKYSDVKGTNKKSCVYEYYKKPETHQKFIENIKEAFEKLYTEKNIKELLSKIEEIFNKTHLKSKVREFYQNEIIGKSEFNKKNEEGVSILYNQIITSTEKKEKFTEFLKNIELKDLTKSQVFYKYFLENEELNDENIKYIFCHFVEIEVNKLLKENIYKVGKFDEVNKNRIKNIFEYRKLENLIVYKLENKLNTYIRNCGKYNYHMENGKMATSDINMKNRQTEAFLRSIIGVSSFSYFSLRNILGVNDDDFYEIEENSKEDERKNESNILKKAKEDITSKSIFEKVVDKSFEKKGIHNLKENLKMFYGNSFDEANEEELKQFFVNMLNAITSIRHSIVHYDMNTNSENIFNFFDIEVSKLLKSIFEKETDKRELKLKVFRQLNSAGVFDYWENWKIKKYLKNIEFKFANKNIPFVPSFTKLYNRIDNLKGSNALNLGYINIPKRKEARDSQIYLLKNIYYGEFVEKFVNNNDDFEKIFREIIKINKNAGTNTKTKFYKLEKFEVLKANTPTEYLEKLQSLHQINYDREKIEEDKDIYIDFVQKIFLKGFINYLQESDLLKPLNLLNLRKGEAITNKKSFYDEKLKLWQNNGSNLSKMPKEIYDYIKKIKINKINYSDRMSIFYLLLKLIDYRELTNLRGNLEKYESMNKNEIYSEELNIVNLVSLDNNKVRANFNLEPEDIGKFLKTGTSIKNINQLNNFSGIFADRENVIKHRSFYNIKKYGILDLLEKIVAKADLKITKEEIKKYKNLQKELEKNDFYKIQEKIHRKYNQKPNLISKTENEKDFNDYEKAIENIQNYTQLKNKIEFNDLNLLQSLLFRILHRLAGYTSLWERDLQFKLKGEYPEDKYIDEIFNFDNSKNKKYKEGSVIFKYADFLIEKEEEKSGEILKKNKRNKRRKEIIEKEGLEIRNYIAHFNYIPDAEKSILEMLEELRNLLKYDRKLKNAVMKSIKDIFKEYGFIVEFEISHESNSKKIKLLNVKSEKIKHLKNNKLETTRNSEDLCKLVKVMLEYKKS

SEQ ID NO: 29 - protein, 1161 aa, Artificial
  Synthetic
MKITKIDGISHKKYIKEGKLVKSTSEENKTDERLSELLTIRLDTYIKNPDNASEEENRIRRENLKKFFSNKVLHLKDSVLYLKNRKEKNAVQDKNYSEEDISEYDLKNKNSFSVLKKILLNEDINSEELEIFRKDVEAKLNKINSLKYSFEENKANYQKINENNVEKVGGKSKRNIIYDYYRESAKRNDYINNVQEAFDKLYKKEDIEKLFFLIENSKKHEKYKIREYYHKIIGRKNDKENFAKIIYEEIQNVNNIKELIEKVPDMSELKKSQVFYKYYLDKEELNDENIKYAFCHFVEIEMSKLLKNYVYKKPSNISNDKVKRIFEYQNLKKLIENKLLNKLDTYVRNCGKYNYYLQDGEIATSDFIARNRQNEAFLRNIIGVSSVAYFSLRNILETENENDITGRMRGKTVKNNKGEEKYVSGEVDKIYNENKQNEVKENLKMFYSYDFNMDNKNEIEDFFANIDEAISSIRHGIVHFNLELEGKDIFAFKNIAPSEISKKMFQNEINEKKLKLKIFRQLNSANVFRYLEKYKILNYLKRTRFEFVNKNIPFVPSFTKLYSRIDDLKNSLGIYWKTPKINDDNKTKEIIDAQIYLLKNIYYGEFLNYFMSNNGNFFEISREIIELNKNDKRNLKTGFYKLQKFEDIQEKTPKEYLANIQSLYMINAGNQDEEEKDTYIDFIQKIFLKGFMTYLANNGRLSLIYIGSDEETNTSLAEKKQEFDKFLKKYEQNNNIKIPYEINEFLREIKLGNILKYTERLNMFYLILKLLNHKELTNLKGSLEKYQSANKEETFSDELELINLLNLDNNRVTEDFELEANEIGKFLDFNGNKIKDRKELKKFDTNKIYFDGENIIKHRAFYNIKKYGMLNLLEKISDEAKYKISIEELKNYSNKKNEIEKNHTTQENLHRKYARPRKDEKFNDKDYKEYEKAIGNIQKYTHLKNKVEFNELNLLQGLLLKILHRLVGYTSIWERDLRFRLKGEFPENQYIEEIFNFDNSKNVKYKSGQIVEKYINFYKELYKDNVEKRSIYSDKKVKKLKQEKKDLYIRNYIAHFNYIPHAEISLLEVLENLRKLLSYDRKLKNAVMKSVVDILKEYGFVATFKIGADKKIGIQTLESEKIVHLKNLKKKKLMTDRNSEELCELVKVMFEYKMKEKKSEN

SEQ ID NO: 30 - protein, 1168 aa, Artificial
  Synthetic
MGTGKYRITKIGRNWKENEETVILKRVVSNGKVKYINENDNVDVNITETYYRILSNNKARFLGSKEQFIFKVNKMERNIENDCVIIKNYTEEEYEKFDKKIFFKKRIKVNNKNIEKIYRDFYEDEKQIMKKRLEEAKNFNNIIFNICNKIFKLKYLDYTNEKVYKIFQNEIKVKDIKNLKEAFKQQEKGLETDKLLAISFNKKRNNVLLEFIQQITKQEFKNQRELENWFSHSGKKYCKEIFKIYSNMSQKEKYSKLLGHRNKNIASISEKKETLQRRLKLENYSDYDLRKYYQKDYKEEAIKELKDKNKEELEREIEELIKKNYKIDKLCDEISNLEFSFVESKKENKDKMSEIIVKIKEHYKKNVNVEEELKNKEKYILSLIHNYVKGRYRKCLELQQKENADFENLGKRIKEIFDSNEVTKKLKKSIINKVNSYKIFEMKFQNPNIESSDDLEILKAEETFLNKLSTAVSKVGYTLNTLLEVSPEKDILENYKAVEKLCNSNSTIEIYKVYPELEKNEKLLQGMIHFIQGLRQQSLHPKILWNFETKNLKPEKLERLKEKKNIKMRDCVVHEENLDKKEKNEGEIKKYFEKIEGKLPDYFIEKYESNNVFNIYRNFVDKIMEVVENFNFKENNTIDYLFPKFHKIYKRMCKLENIMCKSENIDDKRNGARKYLLQTIYYYYFQYEIENNKNNISKYLNLYRNKIETEKNSYSYIIDNIDDSNKNIEILYRNLQREGMLNNKLLQINNEWIEFITVQFSEFLTDKKLNWISDELLEYEEKEKLDDNNKNKLLEILEKKLNKKIAHSNDSYAFISLAQFLDLKEISNLIHNIKKFVQFREKNISKYKPEKNKVYIEELRKISYILKIMLEHKERVIQKRYLESYAEDISIIYGKDIEKKDIKALEIEIKKENQGVIGQPLYKSGNDENNSWITLYGIEQAKRNGTFKFFEGFFNLNDDIKLCKKDIKRYEKLYNEKEDSQKVVDDYISLNEHSSISTKELIKKNCKKQLFYYYKNMIYGDGLKKGYDFINDIYSHYLSWAYRIERDYSIYKVEVYNGKIKNFRNEIAHFNYFQKTDKSLLDLLNDFYNIFDYNLKYQRDIQKVINNIFEKYQVVREDGGPVIFYCKVDKKLKLSENLVPKKHSKYPEIELIHKKYVIFFRKLFEYKK

SEQ ID NO: 31 - protein, 1372 aa, Artificial
  Synthetic
MGNLFGHKKWYKADKIIKDKKGKESTIKQEVRIKRNYSVDRYTLNTNNKEKNNINNEDFVNQFIEYKTNNDIFKKFTRKFHMGNILFKLKGNKRSIEDSNDFLKTEEIILDKEVYGQSEKLRNEKGITKQGILKEINYRGINESNDSILIKTKFGKEIKINFTDEAKKNKNEYQITLKIIPENELKIKREVYDVFKMINMDLYQIIKEIIENEVQKVFKNRYYEEYLREKLLKDDKTGVILTNFIEIREKIKSNLEIMGFVKFYLNVGGDKKKSENKKIFVEKILNINVDLTVEDIVDFIVKELKFWNITKRIEKLQEKTVNRADEDIENTYINTYVLLDKHEKFKKYNRNKKDTIVKSFIKDIKDNTMKQKINQILRKFKIDELIKKTEKELKRGNCDTEIFGIFKVHYQEMFSSEKFEKKSDEEKELYKIIYRYLKGRIEKILVNEQKVRLKKIEKILNESILSEKILKRVKQYTLEYIMYLGKLVHNKINMATVNTNDFFRLHAKEELDLELITFFASTNMELNKIFNGKEKVTDFFGFNLNGQKITLKEKVPSFKLNILKKLNFINNENNIDEKLSHFYSFQKKGYLLRNKILHNSYGNIQETINLKGEYENVENLIKELKVSNEEISKSLNLDIIFEGKVDIINKINSLEIGEYKDKKYLPSFSKIVPEIMRKFREINKDKSFDIESEKIILNAVQYVNKILYEKITSNEENEFIKTLPDKLVKKNNNKENNNSLSIEEYYKNAQISSSKGDKKAIKKYQNKVTNAYIEYLENTFAEVIDFSNFNLNFDEIKTKIEERKYSKSKITVDSISTNINITNDIEYIISIFALLNSNTYINKIRNRFFATSVWLDKQNSTKEYDYENIIDILDKILSINLLRENNIADILDLKNTIIEAKIVENNEECIKNYIFENNEEELKKRLFCEELVNKEDVLKIFEDKNFKFKNFIKKTGNENFTINFDILFNLECNSELNVKKVMGQNSQRLNLFIKNTIDEYKSKIKTSFSSEFLENKNKFEKIYYPKEHKNELYIYKKNLFLNIGNPNFDKIYELISKDIKNANTEILFDDDIRKNKISEIDAILKNLNDKLNGYSNDYKAKYVNKLKENDDFFAKNMKNENYSSFGEFEKDYNKVSEYKKIRDLVEFNYLNKIESYLIDINWKLAIQMARFERDMHYIVNGLRELGIIKLSGYNTGISRAYPKRNGSDGFYTTTAYYKFFDEESYKKFEKICYGFGIDLSENSEINKPENESIRNYISHFYIVRNPFVDYSIAEQIDRVSNLLSYSTRYNNSTYASVFEVFKKDVNLDYDKLKTKFKLFDDEKNDNIKILKIENLIESKKVSVLELESYNSDYIKNLIIELLTKIENTNDTL

SEQ ID NO: 32 - protein, 1161 aa, Artificial
  Synthetic
MKVTKVDGISHKKYIEEGKLVKSTSEENRTGERLSELLSIRLDIYIKNPDNASEEENRIRRENLKKFFSNKVLHLKDSVLYLKNRNEKNAVQDKNYSEEDISEYDLKNKNSFSVLKKILLNEDINSEELEIFRKDVEAKLNKINSLKYSFKENKANYQKINENNVEKVGGKSKRNIIYDYYRESAKHNDYINNVQEAFDKLYKKEDIEKLFFLIENSKKHEKYKIRECYYKIIGRKNDKENFAKIIYEEIQNVNNIKELIEKVPDMSELKKSQVFYKYYLDKEELNDENIKYAFCHFVEIEMSKLLKNYVYKKPSNISNDKVKRIFEYQNLKKLIENKLLNKLDTYVRNCGKYNYYLQDGEIATSDFIARNRQNEAFLRNIIGVSSVAYFSLRNILETENENDITGRMRGKTVKNNKGEEKYVSGEVDKIYNENKQNEVKENLKMFYSYDFNMDNKNEIEDFFANIDEAISSIRHGIVHFNLELEGKDIFAFKNIAPSEISKKMFQNEINEKKLKLKIFRQLNSANVFRYLEKYKILNYLKRTRFEFVNKNIPFVPSFTKLYSRIDDLKNSLGIYWKTPKTNDDNKTKEIIDAQIYLLKNIYYGEFLNYFMSNNGNFFEISKEIIELNKNDKRNLKTGFYKLQKFEDIQEKTPKEYLANIQSLYMINAGNQDEEEKDTYIDFIQKIFLKGFMTYLANNGRLSLIYIGSDEETNTSLAEKKQEFDKFLKKYEQNNNIKIPHEINEFLREIKLGNILKYTERLNMFYLILKLLNHKELTNLKGSLEKYQSANKEEAFSDELELINLLNLDNNRVTEDFELEADEIGKFLDFNGNKIKDRKELKKFDTNKIYFDGENIIKHRAFYNIKKYGMLNLLEKIADKAKYKISLKELKEYSNKKNEIEKNYRMQQNLHRKYARPKKDEKFNDKDYKEYEKAIGNIQKYTHLKNKVEFNELNLLQGLLLKILHRLVGYTSIWERDLRFRLKGEFPENQYIEEIFNFDNSKNVKYKSGQIVEKYINFYKELYKDNVEKRSIYSDKKVKKLKQEKKDLYIRNYIAHFNYIPHAEISLLEVLENLRKLLSYDRKLKNAVMKSVVDILKEYGFVATFKIGADKKIGIQTLESEKIVHLKNLKKKKLMTDRNSEELCELVKVMFEYKMKEKKSEN

SEQ ID NO: 33 - protein, 1208 aa, Artificial
  Synthetic
MKVTKIDGISHKKFEDEGKLVRFTGNFNIKNEMKERLEKLKELKLSNYIKNPENVKNKDKNKEEETKSRRKNLKKYFSEIILRKKEEKYLLKKTRKFKDITEEINYDDIKKGENQQKIFDVLKELLEQRINENDKEEILNFDSVKLKEAFGEDFIKKESKIKAIEESLEKNRADYRKDYVELENEKYEDVKGQNKRSLVFEYYKNPENREKFKENIKYAFENLYTEENIKNLYSEIEEIFEKVHLKSKVRDFYQNGIIGESEFSEKDEEGISILYKQIINSVEKKEKFVEFLQKVKIKDLTRSQIFYKYFLENEKLNNENIKYVFSYFVEIEVNKLLKENVYKTKKFNEGNKYRVKNIFNYDKLKNLVVYKLENKLNNYIRNCGKYNYHIENGCVATSDTNMKNRQIEAFLRSILGVSSFGYFSLRNILGVNDNDFYEMEEELTEDERKNENSILKEDSILKEAKKDITSKDDIFKKVVDKSFEKKGIYQIKENLKMFYGNSFDKVDKDELKKFFVNMLEAITSVRHRIVHYNINTNSENIFDFSNIEVSKLLKNIFEKEIDTRELKLKIFRQLNSAGVFDYWESWVIKKYLENVKFEFVNKNVPFVPSFKKLYDRIDDLKGWNALKLGNNINIPKRKEAKDSQIYLLKNIYYGEFVEKFVNDNKNFEKIVEEIIEINRGAGTNKRTGFYKLEKFETLKANTPTEYLEKLQSLHKISYDKEKIEEDKDIYVDFVQKIFLKGFVNYLKKLDSLKSLNLLNLRKDETITDKKSVHDEKLKLWENSGSNLFKMPEEIYEYVKKIKISNINYNDRMSIFYLLLKLIDYRELTNLRGNLEKYESMNKNKIYSEELTIINLVNLDNNKVRTNFSLEAEDIGKFLKSSIPIKNIAQLNNFSKIFADGENVIKHKSFYNIKKYGILDLLEKIVAKADLKIAKEEIKKYENLQKELEKNDFYKIQEQIHRNYNQNPFSIKKIENKKDFEKYKKVIEKIQDYTQLKNKIEFNDLNLLQSLIFRILHRLAGYTSLWERDLQFKLKGEFPEDKYIDEIFSFDNNKNEKYKDGSIVFKYADFLIEKEEEKLGEVLKKNKRNKRKKEIIEKDGLEIRNYIAHFNYLPNAEKSILEILEELRELLKHDRKLKNAVMKSIKDIFKEYGFIVEFTISHTKNGKKIKVCSVKSEKIKHLKNNELITTRNSKDLCELVKIMLEYKEA

SEQ ID NO: 34 - protein, 1403 aa, Artificial
  Synthetic
MGNLFGYKKWYKVDKIIKDKKGKKSTIKQEVRIKRNYLTNRYILNTNNKDKNNINNEDFVDQFIEYKTKNDIFEKFTRKFHMGNILFKLKGNKRSIEDSNDFLKTEEVVLDKEIYGQSEKLRNEKGITKQGILKEIIDKGINESNDSILIKTKFGKEIKINFTDESKKNKNEYQITLKVIPENELKIKREVYDVFKMINMDLYQIIKEIIENEVQKVFKNRYYEEYLREKLLEDNQINVILTNFMKIREKTKSNSEIMGFVKFYLNVGGDKKKSENKKMFVEKILNINVDLTEEDIVDFIVKELKFYGIIKRIEKLQEKKADRTDKDIKKTYINTYVSLDKHEKFKKYNRNKKDTIVKSFIKDIKDNTMKQKINQILRKFKIEELINKLRIENKNFDTEIFRIFKEHYQEIFNSEKFEEKSDEEKELYKIIYRYLKGRIEKILINEQKVRLKKMEKIEVEKILNESILSEKILKRVKQYTLEHVMYLGKLVHNDIDRSIVNTNDFSRLHAKEELDLELITFFASTNMELNKIFSRKDEYEENTDFFGEGAFSNKKREKITLNKKSLNSKIKMIRELDFIDNKNEIIRENFFEKFIKIGANERNRILHASNKRRVPQGTQDDYNKVINIIQNLKISDEEVSKALNLDVVFKDKKNIITKINDIEISEENNSIIKYLPSFSKVLPEILNLYKNENKNNPFDTIETEKIIQNALIYVNKELYKKLISEKNLEENESKNKFLKELKKNLSGTDETDENIIENYYKNAQISASKGNNKAIKKYQKKVIECYVGYLRKNYEELFDFSDFKMNIQEIKKQIKDISDNKTYERITIKTSDKSIVINDDFEYIISIFALLNSNAVINKIRNRFFATSVWLNTSEYQNIIDVLDEIMQLNTLRNECITENWNLNLEEFIQKMKDIEKEFEDFKIQTKKDIFNTNYEGIKNSVLNKFIEFSDVQKILEGKLNELIEFENDNEIKKKINLNSLDIDERKNLMSNIDQKKLIKEIDKLIVTEKNNIEKNILLKLIFNSNFLEKYKKEIDNLIEDTESENENKFEKIYYPEEHKNELYIYKKNLFLNIENPNFDKIYGIISEDIKNVDTKILFADDIRNNKIVETDGILKNLNNKLNGYSKEYKEKYVNKLKENNDFFIKNVQNENYKSFEGFEEDYNRVSEYKKIRDLVEFNYLNKIESYLIDINWKLAIQMTRFERDMHYIVNGLDYLYILRLERDRNQNISSPYPKYKYIDKEDKIKGRKLDYSTSYYNFKDYQEFMEICSKFGIDLSENSEINKPENESIRNYISHFYIVRNPFADYSIAEQIDRVSNLLSYSTRYNNSTYASVFEVFKKDVDLDYDELKKKFKLIGNTDILKRLMKPKKVSVLELESYNSNYIKNLIIELLTKVENKDEIFS

SEQ ID NO: 35 - protein, 1161 aa, Artificial
  Synthetic
MKVTKVDGISHKKYIEEGKLVKSTSEENRTSERLSELLSIRLDIYIKNPDNASEEENRIRRENLKKFFSNKVLHLKDSVLYLKNRNEKNAVQDKNYSEEDISEYDLKNKNSFSVLKKILLNEDINSEELEIFRKDVEAKLNKINSLKYSFEENKANYQKINENNVEKVGGKSKRNIIYDYYRESAKRNDYINNVQEAFDKLYKKEDIEKLFFLIENSKKHEKYKIRECYHKIIGRKNDKENFAKIIYEEIQNVNSIKELIEKVPDMNELKKSQVFYKYYLDKEELNDENIKYAFCHFVEIEMSKLLKNYVYKKPSNISNDKVKRIFEYQSLKKLIENKLLNKLDTYVRNCGKYNYYLQDGEIATSDFIARNRQNEAFLRNIIGVSSAAYFSLRNILETENENDITGRMRGKTVKNNKGEEKYVSGEVDKIYNENKQNEVKENLKMFYSYDFNLDNKNEIEDFFVNIDEAISSIRHGIVHFNLELEGKDIFAFKNIAPSEISKKMFQNEINEKKLKLKIFRQLNSANVFRYLEKYKILNYLKRTRFEFVNKNIPFVPSFTKLYSRIDDLKNSLGIYWKTPKTNDDNKTKEIIDAQIYLLKNIYYGEFLNYFMSNNGNFFEISREIIELNKNDKRNLKTGFYKLQKFEDIQEKTPKEYLANIQSLYMINAGNQDEEEKDTYIDFIQKIFLKGFMTYLANNGRLSLIYIGSDEETNTSLAEKKQEFDKFLKKYEQNNNIKIPYEINEFLREIKLGNILKYTERLNMFYLILKLLNHKELTNLKGSLEKYQSANKEETFSDELELINLLNLDNNRVTEDFELEVNEIGKFLDFNGNKIKDRKELKKFDTNKIYFDGENIIKHRAFYNIKKYGMLNLLEKISDEAKYKISIEELKNYSNKKNEIEKNHTTQENLHRKYARPRKDEKFTDEDYKKYEKAIRNIQQYTHLKNKVEFNELNLLQSLLLRILHRLIGYTSIWERDLRFRLKGEFPENRYIEEIFNFDNSKNVKYKNGQIVEKYISFYKELYKDDTEKISIYSDKKVKELKKEKKDLYIRNYIAHFNYIPNAKVSLLEVLENLRKLLSYDRKLKNAVMKSVVDILKEYGFVATFKIGADKKIGIQTLESEKIVHLKNLKKKKLMTDRNSEELCELVKVMFEYKMKEKKSEN

SEQ ID NO: 36 - protein, 1249 aa, Artificial
  Synthetic
MKITKIDGVSHYKEKEKGVLKGKDILNGKIEKIVKKRYDATIESKIYKEFIKLRKNRIEQNNEKSILKLIKLNIDKNEKEIKTLLLNKFKIKEKNKKYDKYMLDENKLDNDIKIYESVESLYFLIKEIYLGQNNKKWNISKIDLEKIMEEDNNLIMLGYKLKKNITENDYPYLYSDKNGQESTSVYKLLKKLIEENKDRNQDIRKSQEYEKIRKNFEEYKNRKINLLVKSIKNNKINIQYINNEIKSHNNSREENIIKFFKKMIEEKNEPILKDKLKLFKLEVFFDEEFLEEIKKLLDSDDFDKSYNKKISELRGKIFNRIREKIKNNKNRDELENIYFLELKKYIENNLSHKKEKNKNNNNTGEEKSKELYLKFLKKVLFIDDNNRISIEKLKSRIDDNFKNLLIQHVIEYGKIKYYVENDDYIRNIVKNGELKLETKDLEYIKTKETLIRKMVVLVSFAANSYYNLFGSVSEDILGTEVVKNRRTNVIKVKSYIFKEKMLNYFFDSEDFDINKTIEVLESISYSIYNIRNGVGHFNKLVLGKYKKKDINTNKRVEEDLNNNEEIKGYFIQKRGEIEKKIKERFLSNNLQYYYAKERIENYFEVYEFEILKEKIPFAPNFKRIIKKGEDLFNNKKNKKYEYFKNFDKNSAEEKKEFLKTRNFLLKELYYNNFYKEFLSKKEELKKIVIEVKEEKKNRGNNKKSGVSFQNIDDYDTKINISDYIASIHKKEMERVEKYNEEKQKDTAKYIRDFVEEIFLTGFINYLEKDERLHFLKEEFSVLCNSNNNVIDFNVNINEEKIKEFLKENDSKTLNLYLFFNMIDSKRISEFRNELIKYKQFTKKRLDEEKEFLGIKIELYETLIEFVILTREKLDTKKSEETDAWLVDKLYVKEKNECNEYEYKEYEEILKLFVDEKILISKEAPYYATNNKTPIILSNFEKTRKYGTQNLLAKIQSSYKYNEIEKQKIENYNEKKESEKKKKSNIEKLQDLKVELHKKWEQNKITEKEIKKYNDTIKEIREYNYLKNKEELQNVYLLHEILSDLLARNVAFFNKWERDFKFIVIAIKQFLRENDKEKVNEFLNPHKSDGSRDNFSVTNYRSKMKSIINNIHENFMSLLFLNNNLATGGIQMGRNNNFTWGNLRNYIAHFEYLHKEKDTISFIGQANLLIKLFSYDKKVQNHIIKSMKTLLEKYNIEIRFEISNDSEEIFEYKIKYINSKKGKMLGKNNEFEILENEFVRNVKALLEYSK

SEQ ID NO: 37 - protein, 1194 aa, Artificial
  Synthetic
MKVTKIDGISHKKFEDEGKLVKFTGHFNIKNEMKERLEKLKELKLSNYIKNPENVKNKDKNKEKETKSRRENLKKYFSEIILRKKEEKYLLKKTRKFKNITEEINYDDIKKRENQQKIFDVLKELLEQRINENDKEEILNFDSVKLKEAFEEDFIKKELKIKAIEESLEKNRADYRKDYVELENEKYEDVKGQNKRSLVFEYYKNPENREKFKENIKYAFENLYTEENIKNLYSEIKEIFEKVHLKSKVRYFYQNEIIGESEFSEKDEEGISILYKQIINSVEKKEKFIEFLQKVKIKDLTRSQIFYKYFLENEELNDENIKYVFSYFVEIEVNKLLKENVYKTKKFNEGNKYRVKNIFNYDKLKNLVVYKLENKLNNYVRNCGKYNYHMENGDIATSDINMKNRQTEAFLRSILGVSSFGYFSLRNILGVNDDDFYKIEKDERKNENFILKKAKEDFTSKNIFEKVVDKSFEKKGIYQIKENLKMFYGNSFDKVDKDELKKFFVNMLEAITSVRHRIVHYNINTNSENIFDFSNIEVSKLLKNIFEKEIDTRELKLKIFRQLNSAGVFDYWESWVIKKYLENVKFEFVNKNVPFVPSFKKLYDRIDNLKGWNALKLGNNINIPKRKEAKDSQIYLLKNIYYGEFVEKFVNDNKNFEKIVKEIIEINRGAGTNKKTGFYKLEKFETLKANTPTKYLEKLQSLHKISYDKEKIEEDKDVYVDFVQKIFLKGFVNYLKKLDSLKSLNLLNLRKDETITDKKSVHDEKLKLWENSGSNLSKMPEEIYEYVKKIKISNINYNDRMSIFYLLLKLIDYRELTNLRGNLEKYESMNKNKIYSEELTIINLVNLDNNKVRTNFSLEAEDIGKFLKSSITIKNIAQLNNFSKIFADGENVIKHRSFYNIKKYGILDLLEKIVAKADLKITKEEIKKYENLQNELKRNDFYKIQEQIHRNYNQKPFSIKKIENKKDFEKYKKVIEKIQDYTQLKNKIEFNDLNLLQSLIFRILHRLAGYTSLWERDLQFKLKGEFPEDKYIDEIFNSDGNNNQKYKHGGIADKYANFLIEKKEEKSGEILNKKQRKKKIKEDLEIRNYIAHFNYLPNAEKSILEILEELRELLKHDRKLKNAVMKSIKDIFREYGFIVEFTISHTKNGKKIKVCSVKSEKIKHLKNNELITTRNSEDLCELVKIMLEHKELQK

SEQ ID NO: 38 - protein, 1186 aa, Artificial; identical to SEQ ID NO: 21
  Synthetic

SEQ ID NO: 39 - protein, 1149 aa, Artificial
  Synthetic
MKITKIDGISHKKYKEKGKLIKSNEIEKDVTEERFYDIKTKTTELFLKTLDFYVKNYEQCEEQNKERREKAKNYFSKVKLIIENRKITIFNENTEKIEIEGFNEYDVRDEKYFNVLNKILKEENCTEEDLEVFENDLQKKLNQIQSIKNSLEENKAHFKKESVNNTADRVKGNNKKSLFYEYYRISSKHQEYANNIFEAFDKLYSNSHEAMNNLFSEITKDSKDRNIRKIREAYHEILNKNKTEFGEELYKKIQDNRNNFDKLLEIEPEIKELTKSQIFYKYYIDKVNLDETSIKHCFCHLVEIEVNQLLKNYVYSKRNINKEKLENIFEYCKLRNLVKNKLVNKLNNYIRNCGKYNAYISNNDVVVNSEKISEIRTKEAFLRSIIGVSSSAYFSLRNILNTDNTQDITNKVDKEVDKLYQENKKIELEEILKLFFGNYFDINNQQEIKVFLMNIDKIISSIRHEIIHFKMETNAQNIFDFNNVNLGNTAKNIFSNEINEEKIKFKIFKQLNSANVFDYLSNKDITEYMDKVVFSFTNRNVSFVPSFTKIYNRVQDLANSLEIKEWKIPDESEGKDAQIYLLKNIYYGKFLDKFLNEENGIFISIKDKIIELNRNQNKRTGFYKLEKFEKIEETNPKKYLEIIQSLYMINIEEIDSEGKNIFLDFIQKIFLKGFFEFIKNDYNYLLELKKVQDKKNIFDSKMSEYIAGEKTLEDMEEINEIIQDIKITEIDKILNQTDKINCFYLLLKLLNYKEITELKGNLEKYQILSKTNVYEKELMLLNIVNLDNNKVKIENFKISAEEIGKFIEKINIEEINKKIKTFGELRNFEKGENTGEYYNIYSDDKNIKNIRNLYNIKKYGMLDLLEKISEKTNYCIKKKDLKEYSKLRKQLEDKKKENEKIEDEKTNFYKIQEYLHSKYQQEPKKILWKKNKNDYEKYKKSIENIEKYVHLKNKIEFNELNLLQSLLLKILHRLAGFTSIWERDLRFRLTGEFPDELDVEDIFNHRKRYKGTGKGICKKYDRFINTHTEYKNNNKMKNVKFVDDNPVRNYIAHFNYLPTPKYSILKMMEKLRKLLDYDRKLKNAVMKSIKDILEEYGFKAEFIINSDKEIILNSVKSVEIIHLGKEDLKSHRNSEDLCKLVKAMLEYSE

SEQ ID NO: 40 - protein, 1208 aa, Artificial; identical to SEQ ID NO: 33
  Synthetic

SEQ ID NO: 41 - protein, 1403 aa, Artificial; identical to SEQ ID NO: 34
  Synthetic

SEQ ID NO: 42 - protein, 1161 aa, Artificial; identical to SEQ ID NO: 32
  Synthetic

SEQ ID NO: 43 - protein, 949 aa, Artificial
  Synthetic
MPHQKKMAERIKFVNYGYYLRLKKNCADSFEYYWCDYIKEFIEENYVTKIKEAKGKNGRQLTEENCNSEAMLSKCWHDMIRHMCAKYMDLGKAVYHFMLPGKAEGNDLCLDRLNDSFSKGITSFDYENIKAEENLQKAMFGVLVSGTFNFSRSVADYSGPAAAKLAKELRAEGKTLNEDVLMVDEAHLKAILYSDAKRKLLRYFGGSSACEALGLDKDKMVLEFRQIFRGLRNSAFHYTDGKKADIKFDVTRQLWIQDVQANKQLILDKYYSNNVCRYYKPEMVKKLIGNLYHGYVEQEAQIPAFRTVWKRKDFAKYLNDSNFLPVNIKNDVKERTVFEGALYFLLKEIYYRKYTVGQDAPKYFFEAVRAYSDEHAKNKQDPYANQAKNFWDYVEKLQKSYEKGTLTFGAVCQTIMTEFVQQNSKATEKEGEIYQHFKVLFPLCMQRGFEKYVKEKHGYLLKPWLDTVVRENVLQDAAITCFDDLMRDAEDREYSWYVVAHFIHPKKLNHFVGALKDYLQFKQDIFRRCSFANIYSEGELSQKKAMLAEKEAEISEILRVMEFVRGITGRVSKTFSDYYENEEVYANYLGKYIDFPKTDGISVFESFRDFCTNTLPDGNVLDVYMDEKNPRLLKNVELARMYAGGDVALKKRKRITAKDLQRYYGNEVAVQKILQKGLCSTREEQQRVLEQQNLRGRITLNDVTEIQEIISDMLSQLVTFSYFRERDQMYLLLGFYYMALQTNRGSSWGNETIDFCAGKKISIKQGWVLHQVRSVFTYGLKLYSELDEKGVGGQLSSKIVAFERVHRTSLACALRLFMDENCSRRAVDVRNYVDHFKYYFKADRSIMELYSAYYDCFFDYSTKMRKSVLLNFISILERHFVVSKLRVNCLEERCSVSFAESLKSEKFTYKLEADANKKSKEQTVEFPARDKEFLESLQAELEYKEGYNS

SEQ ID NO: 44 - protein, 949 aa, Artificial; identical to SEQ ID NO: 43
  Synthetic

SEQ ID NO: 45 - protein, 1143 aa, Artificial; identical to SEQ ID NO: 11
  Synthetic

SEQ ID NO: 46 - protein, 1425 aa, Artificial; identical to SEQ ID NO: 3
  Synthetic

SEQ ID NO: 47 - protein, 1185 aa, Artificial
  Synthetic
MKVTKIDGLSHKKFEDEGKLVKIEDASQKNETLERLENLKGIKLGSYIKNPDKTKNKDNKKRRKGLKEYFSEITLRKENEKYVLLKGKKLKKINNDIKDTDIKAKDKKEEVFDILKEILKLNLLANDAEEKIQFDSIKLKNVFGKDFAKKELQIKSIEESLEKNRADYRKEFIEIENHKYGNVKGKNKRSRIYGYYKKSENHKKFEDNIREAFEKLYTEENIKKLYSKIEEVLKKTHLKSIVREFYKNEIIGESEFSKKNGDGISILYNQIKDSIKKEENFIEFIENIGNLELKDLTKSQIFYKYFLENEELNDENIKFVFCYFVEIEVSDLLKGNVYKASKIYENKIKNIFEYDKLKKLVINKLENKLNNYVRNCGKYNYHMENGDIATSDINMRNRQTEAFLRSMIGVSSFGYFSLRNILGVNDDDFYEIEEDLTKDERKKESSTLKKVKEDIASKSIFEKVVDKSFQKKGIYNIKENLKMFYGDSFDDADEDELKQFFVNMLNGITSIRHRVVHYNMNTNSENIFNFSDIEVSRLLKNIFEKETDKRELKLKIFKQLNSAGVFDYWESWKIKKYLENIEFKFVNKNIPFVPSFTKLYNRIDNLKGSNALNLGYINIPKRKEVRDSQIYLLKNIYYGEFVEEFVNNNDNFEKIFREIIEINKNAGTNTKTKFYKLEKFETLKANTPTEYLEKLQSLHQINYDREKIEEDKDIYVDFVQKIFLKGFINYLQESGSLKYLLNLEKNEVIANKKSSYDEKLKLWQNNGSDLSKMPEEIYEYIKKIKINKINYSDRMSIFYLLLKLIDYKELTNLRGNLEKYESMNKNKIYSEELNIVNLVSLDNNKVRANFELEAEDVRKFLKTETLIKDARQLNNFSERFSDGENVIKHRSFYNIKKYGILDLLEKIVAKADLKITKEEIKKYENLQKELEKNDFYKIQEKIHKKYNQKPNLILRTENKKDFNDYKKAIENIQNYTQLKNKIEFNDLNLLQSLLFRILHRLAGYTSLWERDLQFKLKGEFPEDKYIDEIFNSDRNNNQKYKSGGIAYKYVDFLIEKEEGKRAGKNKVKKRSEKEGSFIIRNYIAHFNYIPDAEKSILEMLEELRALLKYDRKLKNAVMKSVKDIFKEYGFIVEFGISHESNSKKIKVVNVESEKIKHLKNNGLVTKRNSEDLCNLVKVMLEYKKS

SEQ ID NO: 48 - protein, 1252 aa, Artificial
  Synthetic
MKITKIDDVSHYKKQDKGVLKSKNVLKGEIEKIVKKRYDVTIESKIYKEFIKLRKNRIEQNNEKSILKLIKLNIDKNEKEIKTLLLNKFKIKEKNKKYDKYMLDENKLDNDIKIYESVESLYFLIKEIYLGQNNKKWNISKIDLEKIMEEDNNLIMLGYKLKKNITENDYPYLYSDKNGQESTSVYKLLKKLIEENKDRNQDRNQDIRKSQEYEKIRKNFEEYKNRKINLLVKSIKNNKINIQYINNEIKSHNNSREENIIKFFKKMIEEKNEPILKDKLKLFKLEVFFDEEFLEEIKKLLDSDDFDKSYNKKISELRGKIFNRIREKIKNNKNRDELENIYFLELKKYIENNLSHKKEKNKNNNNTGEEKSKELYLKFLKKVLFIDDNNRISIEKLKSRIDDNFKNLLIQHVIEYGKIKYYVENDDYIRNIVKNGELKLETKDLEYIKTKETLIRKMAVLVSFAANSYYNLFGSVSEDILGTEVVKNRRTNVIKVKSYIFKEKMLNYFFDSEDFDINKTIEVLESISYSIYNIRNGVGHFNKLVLGKYKKKDINTNKRVEEDLNNNEEIKGYFIQKRGEIEKKIKERFLSNNLQYYYAKERIENYFEVYEFEILKEKIPFAPNFKRIIKKGEDLFNNKKNKKYEYFKNFDKNSAEEKKEFLKTRNFLLKELYYNNFYKEFLSKKEELKKIVIEVKEEKKNRGNNKKSGVSFQNIDDYDTKINISDYIASIHKKEMERVEKYNEEKQKDTAKYIRDFVEEIFLTGFINYLEKDERLHFLKEEFSVLCNSNNNVIDFNVNINEEKIKEFLKENDSKTLNLYLFFNMIDSKRISEFRNELIKYKQFTKKRLDEEKEFLGIKIELYETLIEFVILTREKLDTKKSEETDAWLVDKLYVKEKNECNEYEYKEYEEILKLFVDEKILISKEAPYYATNNKTPIILSNFEKTRKYGTQNLLAKIQSSYKYNEIEKQKIENYNEKKESEKKKKSNIEKLQDLKVELHKKWEQNKITEKEIKKYNDTIKEIREYNYLKNKEELQNVYLLHEILSDLLARNVAFFNKWERDFKFIVIAIKQFLRENDKEKVENFLNPPDNSKGKKVYFSVSKYKNTVENIDGIHKNFMNLIFLNNKFMNRKIDKMNCTIWVYFRNYIAHFLHLHTKNEKISLINQMNLLIKLFSYDKKVQNHILKSTKTLLEKYNIQINFEISNDKNEVFKYKIKNRLYSKKGKMLGKNNKFEILENEFLENVKTLLEYSK

SEQ ID NO: 49 - protein, 1258 aa, Artificial
  Synthetic
MRGGHMKITKIDGISHYKEKEKGVLKAKDVLLNGEIKEIVKKRYDATIESKIYKEFIKLRKNRVEHNNEKSVLELIKSNIDKNEKEIKTLLLDEFKIKEKNKKYDKYMSDKNELDNDIQIYESVESLYFFIKEVYSGKNNDKWDISKIDLEKIMEKDNNLIMLGYKLKKNIKEDEYPYLYKNENREKSTPLYTLLKKLIEENKDSNQNIRESQEYRKIQKDFKEYKNIKINLLVKSILNNKVNIKYNTSNNNIEDSNSKREKEIIEFFKKMIEEKNKPILEDRLKLFKLEVFFDEEFLEEIKKLLDSDNLDKSDNKKIAELRGKIFSRIREKIKEDKNRYILKNIYFLELKKYIENNLSHKKENNKNNSNIGEEKSKELYLKFLKKILFIDDNNRISIEKLKSRIDDNFKNLLIQHVIEYGKIKYYVENDDYIKNIVKNGELKLETENLEYIRIRETLIRKMAVLVSFAANSFYNLFENITSDILTANINLDSGVIKIGNNRLKEKFLNYFFYSEEISDKEDFLKALKDSIYNVRNGVNHFDKMILGKYNNGLDLKDSDTIKDYFNFKKKEIQQDLKDRFISNNLQYYYTENEIKKYFEKYKFEILKTKASFAPNFKRILRKGENLSISEISDIYDFFKRYSENSDKSSEYNEFTKTRNFLLKELYYNNFYREFLSDGTKFEEAVKKVKNNKKNRIIGNKKSAGKSYDVIEDYNSSDDVLEYISRIHKSEMERIEINTEKNRKDTSKYIRDFIEEVFLEGFIKYLDNNNLNFLKNRNKADKERKEIVRNLNIEIEGLDILNQNDSEILNLYLFFNMIDNKRISEFRNEMIKYKQFLTKRQNIKSKFLEIDIEKIEAIIEFVIITRGKLEILEGETKEQKKDNMNALFNKFYSSESEYDESLKKFIEETVLNDKKNTPFYSTDGKTPIVHSNLEKMRKYGTENFLSKVLKDEKYTLDNMKIKEKFETEVNDKFKEQKILEKVDKIKGNEKHKKLIEYYNDCRCYLHKEWIENKKNKEEFEYKEIYEKIIEEIRKYNYLENKEKLQNVYLLHEITSDLMARNVAFINKWERDFKFLSIAIKENLKDSNDIQKIEEFLNPSLDITSDEEHFNVKNYASKLKNIQGLHNNIISLIFIKHLDGWSNKIDNFKWLGFRNYISHFNHINGENSKESFINQLNRLVLLFSYDKKVQNHITKSIKTILEKYNIDIEFKISDDSKNFFEYQISNINSKKGKMLGKENYFELLDEEFVQNVKKMLEYED

SEQ ID NO: 50 - protein, 1425 aa, Artificial
  Synthetic
LFLWIIEEVIYEIIKLYKNLKEEIIMGNLFGYKKWYKVDKTIKDKKGKESTIKQEVRIKRNYTVDRYTLNTNNKEKNNINNEHFVNQFIEYKTKNDIFEKFTRKFHMGNILFKLKGKSQKGKIINDKDFFETKKIVLDKEVYGQSEKLRNEKGITKQDILKEIINKGINESNDKILVKTKFGKEITINFTDEDKKNKNEYQITLKIIPENELKIKREVYGVFKIINMDLYQIIKEIIKNEVQKVFGNRYYEEYLREKLLKDDKIGDILTNFMEIRKKTKSNLEIMGFVKFYLNVGGDKKKSENKKIFVEKILNINVDLTVEDIVDFIVKELKFWNITKRIEKLQEKTVNRADEDIKNTYVNTYVLLDKHEKFKKYNRNKKDTIVKSFIKDIKDNTMKQKINQILRKFKIEELIEKLRIENKNFDTEIFRIFKDHYQEMFSSEKFEEKSDEEKELYKIIYRYLKGRIEKILINEQKVRLKKMEKIEVEKILNESVLSEKILKRVKQYTLEHIMYLGKLVHNNIDMTTVNTNDFSRLHAKEELDLELITFFASTNMELNKIFSRENINNDENIDFFGGDREKNYVLDKKNLNSKIEIIRDLDFIDNKNNITNNFISKFTKIGTNERNRILHASSKERDLQGTQDDYNKVINIIQNLKISDEEVSKALNLDVVFKDKKNIITKINDIEISEENNSVIKYLPSFSKVLPEILNLYKNKNKNNPFDTTETERIMLNALIYVNKELYKKLILEKNLEENESKNKFLKELKKNLGGTDEIDENIIESYYKNTQISASKGNNKAIKKYQKKIIECYIKYLEENYRELFDFSDFKMNIQEIKKQIKEINDNKTYKRITIKTSDKSIVINNDFEYIISIFALLNNNIFINKIRNRFFATSVWLNTSEYQNIIDILDEIMQLNTLRNECITENWNLNLEEFIQKMKEIEKDFDDFKIQTKKEIFNNYYEDIKNNILTEFKDDINGCDVLEKKLEKIVIFDDETKFEIDKKSNILQDEQRKLSNINKKDLKKKVDQYIKDKDQEIKSKILCRIIFNSDFLKKYKKEIDNLVESTESKNENKFEKIYYPEEHKNELYIYKKNLFLNIGNPNFDKIYGLISKDIKITDAKFLFNSDGKNIRNNKIAEIDVILKKLNNKLNGYSKEYKEKYIEKLKENNDFFAKNIQNENYNSFEEFKEDYNKVSEYKKIRDLVEFNYLNKIESYLIDINWKLAIQMARFERDMHYIVNGLKKLNFINLNGYNTGISRTYPKYNDSDSNKNCKKFYETTAYYKFFDDKSYREFEDICYEFGIDLRKNSNIQAKEERNIRNYISHFYIVRNPFADYSIAEQIDRVSNLLSYSTRYNNSTYASVFEVFKKDVDLDYDELKKKFKLIGNNDILERLMKPKKVSVLELESYNSNYVKNLIIKLLTKIEKTNDTL

SEQ ID NO: 51 - protein, 1172 aa, Artificial
  Synthetic
MGSGKYRITKIAREWKENKKKIALKRIVRKGEIKYIDENNDENIDITDAYYKILSSNRFPGTKEQFIFKVNKMERNIENDCVIIKNYTEEEYEKFKENNNKIFIKSIAVKEHGKEMNKNKICRPFYEKEKEIMSKRMKESQKFNNIVYNICKKIYYLKYGDNSDRKIYEIFQNEIKVKDVKNLKEAFKQQEKGLETDKLLAISFNKKRNNVLLEFIQQITKQEFKNQKELENWFSQSGEKYCKEIFKIYSNMSQKEKYFKLLGHRNQGIASIYDEKKETLQRRLKIGNYSDYDLKKYYQKDYKEEAIKELKDKNKEGLEREIEELIKKNYKIDKLCDEISNLEFSFVESKKENKDKMSEIIVKIKEHYKKNVNVEKELKNKEKYILSLIHNYVKGRYRKCLELQQKENVDFKNLGKRIKEIFDSNEVTKKLEKSIINKVNSYKIFEMKFQNPNIESSDDLEILKAEETFLNKLSTAVSKVGYTLNILLEVSSEKDILENYNMVGELCNNNSTTEIYKVYPELEKNEKLLQGMIHFIQGLRQQSLHPKILWNFETKNLKPEKLERLKEKKSIKMRDCVVHEDSLDKKEKNEVEIKKYFEKIEEKLPDYFIEKYESNNVFNIYRNFIDKVMEVVKNFNFKENNTIDYLFPKFHKIYKRMCNSENIDDRQNGARKYLLQTIYYYYFQYEIENDKNNMSKYLNLYRNKIKVKKISYSYITDNKAVNNKNIEILYRNIQREGMLNNRLLQMNNEWIEFIVVQFSEFLTNKKLNWILDDLSEYKKKEKLDENNKNKLLKILKQKMNKKITYSNDSYVFISLTQFLDLKEISNLIHDIKKFIQFREKNVSKYKPEKNKLYIEELRKILYISKVVLEHKERVMQKHYLESYDEDISIMYGKGIEKKDIKDIEIKIKNKNQEVINQPLYKSGNDENNSWIILYGIEQAKRNGTFKFFEGFFNLNDDIKLCKEDIEKYEKLYNEKEENQKKVDEYISKLNNDIEKINNDNNDINIEKTNNNKQLFYYYKNMIYGDGLKKGYDFINDIYSHYLSWAYRIERDYSIYKVEEYNGKIKNFRNEVAHFNYFQKTDKSLLDLLNDFYSIFDYNLKYQRDVQKVINNIFEKYQVIREDGGPVIFYCKIDKKLKLSENIIPKKHSKYPEIKLIHEKYVEFFKKLFEYKK

SEQ ID NO: 52 - protein, 1107 aa, Artificial
  Synthetic
MRVSKVKVKDGGKDKMVLVHRKTTGAQLVYSGQAISNETNNILPEKKRQSFDLSIENKTLKRRDDVDKTKKDKYDIVRKIIKYGELPQSISEVDVLEFLNHKFQEPVKYWKGDKEESFNLTMLILEAVKTQDKQKLQPYNEWKKWYVTTKSDLLKKSIDNNRIDLTENLSKRKKALLAWETEFTTSGNIDLTHYHKVYMTDVLCKMLQEVKPLTDERGRINSNAYHRGLKKALQNHQPAMFGTREAPNDANRADNQLSIYHLEVVKYLEHYFPIKTSKRRNTTDDISHYLKAQTLKTTIEKQLVNAIRSNIIQQGKTNHHELKADTTSNDLIRIKTNEAFVLNLIGTCAFAANNIRNMVDNEQTSDILGKGDFSKSLLKDSASTQLYSFFFEENLSTNKVEKETQLWAIRGAVQQIRNNVNHYKKDALKTVFNISNFENPTTTDPKQQTNYADTIYKARFINELEKIPEAFAQQLKTGGALSYYTLENLKTLLTTFQFSLCRSTIPFAPGFKKVFNGGINYQNAKQDESFYELMLERYLRKENFAEEAYNARYFLLKLIYNNLFLPKFTTYRKAFADSVGFVQLQNRKQAEKVNPKKKEAYAFEAVRPMTAADSIADYMAYVQSELMQEQNKKEEKATDETRINFEKFVLQVFIKGFDSFLRAKEFDFVQVPQQQLTTTDSNQQKADKLNGLEASITADCKLTPQYAKADDATHIAFYVFCKLLDAAHLSNLRNELIKFRGSVNEFKFHHLLEIIEICLLSADVVPTDYRDLYTNEADCLARLSPFIEQGADIKNWSDLYVQTDKQTPVVHAGIELSVKYGTTALLEQLIARNPKFRIMEDNFTKWSNQKKEIEEKVNIHTKLHKEWVEAKEKDDKERTDRVKSKTNFARKFVSKNEVDYINNCIEINNYNWLDNKLHFVHLNHLHHLTIEILGRMAGFVALWERDFQYITKYTAAKEGTDALSFDGGLPRLKDKQKYYDKLFLSDKYTKVRNHIAHFNYLTKDAADFSLIDLINELRELLHYDRKLKNAVSKAFIKLFEKHGMILKLKLNDGHQLELESIEPKKIYHLGSSAKDKPEYQYCTNQVMTAYCNMCRSLLEMKKEQIGL

SEQ ID NO: 53 - protein, 1412 aa, Artificial
  Synthetic
MKLSKEKHTRSAVANNGDIKSAEVNNGNTKSEEVNNGDIRSAVANEEQNIGGILYRFPGKSIDGVKDQMLRRDKEVKKLYNVFNQIQVGTKPKKWNNDEKLSPEENERRAQQKNIKMKNYKWREACSKYVESSQRIINDVIFYSYRKAENKLRYMRKNEDILKKMQEAEKLSKFSGGKLEDFVAYTLRKSLVVSKYDTQEFDSVAAMVVFLECIGKNNISDHEREIVCKLLELIRKDFSKLDPNVKGSQGANIVRSVRNQNMIVQPQGDRFLFPQVYAKENETVTNKNVEKEGLNEFLLNYANLDDEKRAESLRKLRRILDVYFSAPNHYEKDMDITLSDNIEKEKFNVWEKHECGKKETGLFVDIPDVLMEAEAENIKLDAVVEKRERKVLNDRVRKQNIICYRYTRAVVEKYNSNEPLFFENNAINQYWIHHIENAVERILKNCKAGKLFKLRKGYLAEKVWKDAINLISIKYIALGKAVYNFALDDIWKDKKNKELGIVDERIRNGITSFDYEMIKAHENLQRELAVDIAFSVNNLARAVCDMSNLGNKESDFLLWKRNDIADKLKNKDDMASVSAVLQFFGGKSSWDINIFKEAYKGKKKYNYEVRFIDDLRKAIYCARNENFHFKTALVNDEKWNTELFGKIFERETEFCLNVEKDRFYSNNLYMFYQVSELRNMLDHLYSRSVSRAAQVPSYNSVIVRTAFPEYITNVLGYQKPGYDADTLGKWYSACYYLLKEIYYNSFLQSDRALQLFEKSVKTLSWDDKKQQRAVDNFKDHFSDIKSACTSLAQVCQIYMTEYNQQNNQIKKVRSSNDSIFDQPVYQHYKVLLKKAIANAFADYLKNNKDLFGFIGKPFKANEIREIDKEQFLPDWTSRKYEALCIEVSGSQELQKWYIVGKFLNAMSLNLMVGSMRSYIQYVTDIKRRAASIGNELHVSVQDVEKVEKWVQVIEVCSLLASRTSNQFEDYFNDKDDYARYLKSYVDFSNVDMPSEYSALVDFSNEEQSDLYVDPKNPKVNRNIVHSKLFAADHILRDIVEPVSKDNIEEFYSQKAEIAYCKIKGKEITAEEQKAVLKYQKLKNRVELRDIVEYGEIINELLGQLINWSFMRERDLLYFQLGFHYDCLRNDSKKPEGYKNIKVDENSIKDAILYQIIGMYVNGVTVYAPEKDGDKLKEQCVKGGVGVKVSAFHRYSKYLGLNEKTLYNAGLEIFEVVAEHEDIINLRNGIDHFKYYLGDYRSMLSIYSEVFDRFFTYDIKYQKNVLNLLQNILLRHNVIVEPILESGFKTIGEQTKPGAKLSIRSIKSDTFQYKVKGGTLITDAKDERYLETIRKILYYAENEEDNLKKSVVVTNADKYEKNKESDDQNKQKEKKNKDNKGKKNEETKSDAEKNNNERLSYNPFANFDFKLLN

SEQ ID NO: 54 - protein, 1425 aa, Artificial; identical to SEQ ID NO: 3
  Synthetic

SEQ ID NO: 55 - protein, 1169 aa, Artificial; identical to SEQ ID NO: 23
  Synthetic

SEQ ID NO: 56 - protein, 1148 aa, Artificial
  Synthetic
MKVTKIDGISHKKYEEKGKLVKINNEKKDITEERFNDIEVKTMELFQKTLDFYVKNYEKCEEQNKERREKAKNYFSKVKLIVDNKKIKICNENPEKMEIEDFNEYDVRNRKYFNILNKILNEENRTEEDLEVFENDLQKKLNQIQSIKNSLEENKAHFKKESINNTTDRVKGNNKKSLFYEYYRNSSKHQEYVNNIFEAFDKLYSNSHEDINNLFLEITKDSNDRNIRKIREAYHEILNKNKTEFGEELYKKIQDNISNFDKLLEIEPEIKELTKSQIFYKYYIDKVSLDGTNVKHCFSHLVEIEVNQLLKNYVYSKRSTNKEKLENIFEYCKLRNLVKNKLVNKLNSYIRNCGKYNSYINNNDVVNSEKISEIRTKEAFLRSIIGVSSSAYFSLRNILNTDNTQDITNKVDKEVDKLYQENKKIELEERLKLFFGNYFDINNQQEIEDFLMNIDKIISSIRHEIIHFKMEANAQNIFDFNNINLGNTAKNIFNNEINEEKIKFKIFKQLNSANVFDYLSNKDITEYMDKVVFSFTNRNVSFVPSFTKIYNRVQDLANSLEIKEWKIPDESEGKDAQIYLLKNIYYGKFLDKFLNEENGIFISIKDKIIELNRNQNKRTGFYKLEKFEKIEETNPKKYLEIIQSLYMINIEEIDSEGKNIFLDFIQKIFLKGFFEFIKNDYNYLLELKKVQDKKNIFDSKMSEYIAGEKTLEDMEEINEIIQDIKITEIDKILNQTDRINCFYLLLKLLNYKEITELKGNLEKYQILSKTNIYEKELMLLNIVNLDNNKVKIENFKISAEEIGKFIEKINIEEINKKIKTFEELRNFEKGENTGEYYNIYSDDKNIKNIRNLYNIKKYGMLDLLEKISEKTNYCIKKKDLEEYSKLRKQLEDKKKENEKIEDEKTNFYKIQEYLHSKYQQEPKKILWKNNKNDYEKYKKSIENIEKYVHLKNKIEFNELNLLQSLLLKILHRLVGFTSIWERDLRFRLIGEFPDELDVEDIFDHRKRYKGTGKGICKKYDRFINTHTEYKNNNKMENVKFADNNPVRNYIAHFNYLPTPKYSILKMIEKLRKLLDYDRKLKNAVMKSIKDILEEYGFKAEFIINSDKEIILNSVKSVEIIHLGKEDLKSHRNSEDLCKLVKAMLEYSK

SEQ ID NO: 57 - protein, 1161 aa, Artificial
  Synthetic
MKVTKVDGISHKKYIEEGKLVKSTSEENRTSERLSELLSIRLDIYIKNPDNASEEENRIRRENLKKFFSNKVLHLKDSVLYLKNRNEKNTVQDKNYSEEDISEYDLKNKNSFSVLKKILLNEDINSEELEIFRKDVEAKLNKINSLKYSFEENKANYQKINENNVEKVGGKSKRNIIYDYYRESAKRNDYINNVQEAFDKLYKKEDIEKLFFLIENSKKHEKYKIRECYHKIIGRKNDKENFAKIIYEEIQNVNSIKELIEKVPDMNELKKSQVFYKYYLDKEELNDENIKYAFCHFVEIEMSKLLKNYVYKKPSNISNDKVKRIFEYQSLKKLIENKLLNKLDTYVRNCGKYNYYLQDGEIATSDFIARNRQNEAFLRNIIGVSSVAYFSLRNILETENENDITGRMRGKTVKNNKGEEKYVSGEVDKIYNENKQNEVKENLKMFYSYDFNVDNKNEIEDFFANIDEAISSIRHGIVHFNLELEGKDIFAFKNIAPSEISKKMFQNEINEKKLKLKIFRQLNSANVFRYLEKYKILNYLKRTRFEFVNKNIPFVPSFTKLYSRIDDLKNSLGIYWKTPKTNDDNKTKEIIDAQIYLLKNIYYGEFLNYFMSNNGNFFEISREIIELNKNDKRNLKTGFYKLQKFEDIQEKTPKEYLANIQSLYMINAGNQDEEEKDTYIDFIQKIFLKGFMTYLANNGRLSLIYIGSDEETNTSLAEKKQEFDKFLKKYEQNNNIEIPHEINEFVREIKLGNILKYTERLNMFYLILKLLNHKELTNLKGSLEKYQSANKEETFSDELELINLLNLDNNRVTEDFELEADEIGKFLDFNGNKIKDRKELKKFDTNKIYFDGENIIKHRAFYNIKKYGMLNLLEKISDEAKYKISIEELKNYSNKKNEIEKNHTTQENLHRKYARPRKDEKFTDEDYKEYEKAIGNIQKYTHLKNKVEFNELNLLQGLLLKILHRLVGYTSIWERDLRFRLKGEFPENQYIEEIFNFDNSKNVKYKSGQIVEKYINFYKELYKDNVEKRSIYSDKKVKKLKQEKKDLYIRNYIAHFNYIPHAEISLLEVLENLRKLLSYDRKLKNAVMKSVVDILKEYGFVATFKIGADKKIGIQTLESEKIVHLKNLKKKKLMTDRNSKELCELVKVMFEYKMEEKKSEN

SEQ ID NO: 58 - protein, 1186 aa, Artificial
  Synthetic
MKVTKIDGLSHKKFEDEGKLVKIEDASQKNETLERLEKLKEIKLGNYIKNPDKTKDKDNKKRRKGLKEYFSEITLRKENEKYVLLKGKKLKKINNDIKDTDIKVKYKKEEVFDVLKKILKLNLLANDVEEKIQFDSIKLKNVFGKDFVKKELQIKSIEESLEKNKADYRKEFIEIENDKYGNVKGENKKNRIYEYYKKSETHEKFRKNIIEAFEKLYKKDDIEKLYTQIIEISKKMHLKSKVRELYKNVIIKRSCDDFSKKNKEGISVLYSQIMNSVKKNEKFVKFVKNIELKDLTKSQIFYKYFLENEELNDENIKNIFCYFVEIEVSDLLKGNVYKVSKIYENKIKNIFEYNKLKKLVINKLENKLNNYVRNCGKYNYHMENGDIATSDINMRNRQTEAFLRSMIGVSSFGYFSLRNILGVNDDDFYEIEEDLTEEERKNESNVLKKAKEDITSKSIFEKVVDKSFEKKGIHSIRENVKMFYGDSFDKANEDELKQFFVNMLNAITSIRHRVVHYNMNTNSENIFNFSDIEVSRLLKSIFEKETDKRKLKLKIFRQLNSAGVFDYWENWKIKKYLENMKFEFVNKNIPFVPSFTKLYNRIDNLKGSNALNLGYINIPKRKEARDSQIYLLKNIYYGKFVEEFIKNNDNFEKIFREIIEINKNAGTNKQTNFYKLEKFEKLKANTPTEYLEKLQSLHKINYNREKIEEDKDIYVDFVQKIFLKGFISYLQKSNSLKPLNLLNLKKDEVINSEKSFYDEKLKQWENNGSNLSEMPKEIYKYIKEIKINKTNYSDRMSIFYLLLKLIDHKELTNLRGNLEKYESMNKNKIYSEELNIVNLVSLDNNKVRTNFSVEAEDIGKFLKTETSIKNINQLNNFSGIFADGENVIKHRSFYNIKKYGILDLLEKIVAKADLKIAKEEIKKYENLQKELEKNDFYKIQEKIHRKYNQKPNLISRTENKKDFNDYKKAIENIQNYTQLKNKIEFNDLNLLQGLLFRILHRLTGYTSLWERDLQFKLKGEFPEDKYIDEIFNSDRNNNQKYKSGGIAYKYVDFLIEKEEGKRAGKNKVKKRSERERSFIIRNYIAHFNYIPDAEKSILEILEELRELLKYDRKLKNAVMKSIKDIFKEYGFIIEFGISHESNSKKIKVLNVESGKIKHLKNNGLVTTRNSKDLCKLVKVMLEYKKS

SEQ ID NO: 59 - protein, 1144 aa, Artificial
  Synthetic
MRISKVKVTTDDKKQKMVLMHRTIKEGSLVYEKETDNQTNNILPRKKKDSFNLSILNKTLINEKHIKAPYTKDFNEKAKKEKELKSKYSGLKKILQAQGDNYMQIKNITEGEITPFLSSKFKGDFTYRTKSDVYTFNLTQLIINVVKKQNIRELKPYNDWKDWYIQNKSKQLAKSVEQNKIYTQDGNSKRQLALQEWEKEFLKNGKIDIDQLHKAYKTDELAAALAVENPKNDDEKNKRPGVYHSALKNILQAHQRRTEIFGTRECPNSANRADNLFVVYHNEVVKYLEHYFPVKQSNRKNSETDIKYYLNADTIKQTIKNQIENALRANLIRKGKYIQHQLAGSDTVSSKELITMKTNEAFVLKLIDACAFAANNIRNIIDITQNRDILVKENLIYSISQYSISQKNANIELFNQFFPYNTNALSAIDLWALRGAVQKIRNNINHYKANALSIIFNVVEFEYQPLKKVINEKFEKSIYKSFFEKDIEKLPTVFALQLKSGGVLSHYPKQELKNLLGEIKIELCRSVTPFAPGFKKVMKAGVNYQFAKKEDFYDLGLSAYREKEEFKEENRNARYFLLKQLYNYVFLPQFMNDKAQFHQIVKFVLDQNKAFAREILRKKSADKKNLNPNARPKAYAFAEVREMGEEEDINTYMAYLQSDWMLESSKKEEKKNAEEETLNFEKFVLQVFVKAFDEFLKAPKYTFIQTPENQWAPESTPEQQANALNSLEEEIREYCHINTEFLKPDNNADIAFYVFCKLLDTNHLSDVRNELIKYRAVKEDDKIFKHLVSIVELCLLSADTVSADAVRKQNDRQYFKRIQPFFATDCDPSKLGELYLQSDNATAVLHSGIKISEKYGTLPLMEKIIQTDNLFLISKKNADDWHTGKSIIEKVIKEREKLHNEWVKAKETDEKERKEHVRIKSKSAENFINNKGNEYAEICEYIDTYNWLDNKLHFIHLKRLHNLTVEILGRLAGFVAVWERDFQYLEKRRAKTLGLTPLSFDKGLPSYKNNSKNVLDEFEAYHLKTFLCKDYRNIRNRIAHYEYLNASVKAYSLIDLINQVRQLLSYDRKLKNAVAKSIITLFEKHGMQLKLTVSNTKHQLEIQELIPVTLNHLGTNAGSRLPISTNRVHKQYCAMCRALLQYRE

SEQ ID NO: 60 - protein, 1225 aa, Artificial
  Synthetic
MKITKRKWGEHHPPLYFYRDEDSGRLLAQNDRKQDYTDTLFNDIAQDTFERSLRNRLLKTPEKGDKRFYSNEIVKLVEKLCQGADVAEIMKSMERSEKLRPKNEKEIKNLKKQLDGTLSEYGKRYTAPEGAMTLNDALFYLVEGNPLKQAMAKAELGKIREALIKEKENRINRVRYSIKNNKIPLRIQEDGGITPNNDRAAWLLGLMKPADPAKGITDCYPLLGELEEVFDFDKLSKTLHEKISRCQGRPRSIAMAVDEALKQYLRELWEKSPSRQQDLKYYFQAVQEYFKDNFPIRTKRMGARLRQELLKDKTSLSRLLEPKHMANAVRRRLINQSTQMHILYGKLYAYCCGEDGRLLVNSETLQRIQVHEAVKKQAMTAVLWSISRLRYFYQFEDGDILSNKNPIKDFRDKFLRDTNKYTHEDVEACKEKLQDFFPLKELQEKIKEDAKGLQETDNKQADTTDFKAIGHIVRDDRKLCNQLLAECVSCIGELRHHIFHYKNVTLIQALKRIADKVKPEDLSVLRAIYLLDRRNLKKAFAKRISSMNLPLYYREDLLSRIFKKEGTAFFLYSAKIQMTPSFQRVYERGKNLRREFECERMKAEASNGQNGQDGDRLKWFRQLAAGDSADTHFNWAVEAYAESAADVENNVEFDTDVDAQRALRNLLLLIYRHHFLPEVQKDETLVTGKIHKVLERNRQLSEGQGPNQGKAHGYSVIEELYHEGMPLSDLMKQLQRRISETERESRELAQEKTDYAQRFILDIFAEAFNDFLEAHYGEEYLEIMSPRKDAEAAKKWVKESKTVDLKTSIDEKEPEGHLLVLYPVLRLLDERELGELQQQMIRYRTSLASWQGESNFSEEIRIAGQIEELTELVKLTEPEPQFAEEVWGKRAKEAFEDFIEGNMKNYEAFYLQSDNNTPVYRRNMSRLLRSGLMGVYQKVLASHKQALKRDYLLWSEKHWNVKDENGADISSAEQAQCLLQRLHRKYAESPSRFTEEDCKLYEKVLRRLEDYNQAVKNLSFSSLYEICVLNLEILSRWVGFVQDWERDMYFLLLAWVRQGKLDGIKEENVRDIFSEGNIIRNLVDTLKGENMNAFESVYFPENKGSKYLGVRNDVAHLDLMRKNGWRLEAGKTCSVMEDYINRLRFLLSYDQKRMNAVTKTLQQIFDRHKVKIRFTVEKGGMLKIEDVTADKIVHLKGSRLSGIEIPSHGERFIDTLKALMVYPRG

SEQ ID NO: 61 - protein, 1146 aa, Artificial
  Synthetic
MRLPELVENLCKDADIQSIDKIKGSKSDMKALCDKTLTAYGKSFAAEEGGTTLYEAILNLANGNAIQKAMAEAELKKIQKALKKEKEDRINRVRNSIRKNKIPLKVNADGTISANNDRAAWLLELLKPVASEHDKDDRYPVLTEMEEIVSFDKLCEEVRKKIQSCKSGARSRAMLADEAVKEYLKALWEKHTDRHRDMRYYFQAVKEYFNKNFPIRTKQRGASIRQRLLMEETVVTRLLNPKHMAKAVRRKLINQSTQMHILYGKLYEYCCRKGRNLPVNSETLQLIQVLEAVKKQLMTAVSWSVSRLCYFYEFYIGDILLAGKYRRDFLIKQNNNRKDIQACKEKLQDFFQLAELQEKIKESADEDINLTETITNDALVCNKLLEECAFCISKLRNNIFHYKNLGFTQALKHIANEIKKEDVPVLLRLYKQDCENLNNAFASRISSMNIPLYYSTEFLLRIFKKQGVELSLYSAKYQMTPSFKRVYERGKNLRLEYERESMRSNIANEDGNDLQNGNWLRWFSQLEAGIVDTDAGMKGDIGDYPDTSADLGIEAETGTNTDAQRAMRNLLQLIYKYHFLPEVQKNENIVTDLIPKVLERNRKLSEVRNRSDKTYGYKEIEELYKKNKGKKDSLSELLKDLQRKVSETEKENQELAREKTDYAQRFILDIFAEAFSNFMDDRYEDEYQEIMNPKKDEEKAKKWAELFTEKADKDNRKDEPLVLKTSFDKDNIEKFLLVLYPLMRLLDDKELSELQQQMLRFRASVSGWQGSTDFNEDIAMAEKIEELAELVKLTEPESQCAEVSWKNRAIEVFEQFVEGKMAEYGAFYLQSDTLTPVPRRNMKELLRSGIMGVFKKVLLSHMQATKKDYGVYSGEHWNIDDPAGNPIKSAEQAHALLQRLHNKYTESPSQFSYEDYKLYDRTIRQLDEYNQAKKNLSFGSLYEVCRILLDMLSRWVGFVQDWERDMYFLLLAWAKQGKLHNVTETDVLEVFNEGRVICKLNKKLKDGDWHAFASIYCNNSGEKLEFLQVRNFIAHLHLLRESEWNGDEKTGCSAIEDYINKLRFLLSYDQKRMNAVTKAMQQIFGKHKTKIIFTVEKGGKIKIEDVVSDNVIHLKQYKPKDIIKVPCHGERFIGSLLALMKYQEKA

SEQ ID NO: 62 - protein, 1216 aa, Artificial
  Synthetic
MKGVPNMKITKRKWEDVPPLFFHRDKDSGRLIRQDDREHDYTDELFRKTTVDSIFIRSLQNRLLRSQDKEGNKIGRNEITELVENLCKGAEIQKSIDEIKDSKSNVKALCDKTLTDYGKSFAAEEGRTTLYEAILNLAKGNAIQKAMAEAELKQIHEALKKEKEDRINRVQNSIKNNKIPLKVNEDGTISANNDRASWLLELLKPVASEHDKGDRYPVLTEMEGIVSFDKLCEEVRNKIHGRKGRTRSIAMSVDEAVKEYLKELWKKHADRHRDMRYYFQAVKEYFKENFPIRTKQKGAGIRQSLLKEDTVVARLLDPKHMAKAVRRKLINQSTQMHILYGKLYEYCCREDRNLPVNSETLQLIQVLEAVKKQLMTAVLWSVSRLCYFYEFYSGDILLAEEYRRDFLNQKNDHKDIQACKEKLQDFFPLAELQEKIRECADKDINNIKDKITNDVLACNNLLEECVFCISKLRNNIFHYKNLSFTQALKHIANEIKEEDIPIILRLYKQDCENVNKAFANRISSMNLPLYYSTEFLLRIFKKQGAELSLYSTKNQMTPSFKRVYERGKNLRLEYEREPMRSNIANEYDKDPQSDYWMRWFSQFATGTVDTNAGIKGEMEDYPHASVNLGIEIEAGTNIDAQRAMRNLLQLIYKHHFLPEVQKDETVVTDVIPKVLERNRKLSEVRNRSDKTYGYKEIEELCKKNKGKKDSLSELMKDLQRKVSETEKEKRELAREKTDYAQRFILDIFAEAFCNFMDERYEDEYQEIMSPIKNEEEAKKWTEMFTDKADKDNKDKLLVLKTSFDKDNVEKYLLVLYPLMRLLDDKELSELQQQMLRFRASVSGWQGGTDFSEDIAMAEKIEELAELVKLTEPESQYAEEAWKNRAIGVFEQFVEGKMAEYGTFYIQNDSLTQVPRGNMRKLLRSGVIGVYNKVLASCKQATKADYGAYSGDHWSIEDPDGNPIKSAEQAQALLQRLHKKYTESPSQFSDDDHKLYDKTLRQLDAYNRAMKNLSFGSLYEICRIHMETLSRWVGFVQDWERDMYFLLLAWTKQGKLLNVTETDVIEIFEKGSVIYKMNKKLKNGDRYAFTSIYRNNNDEKLEFLQIRNFIAHLHLLRKSEWKGDKKAGYSVIEDYINKLRFLLSYDQKRMNAVTKAMQQIFEKHKVIVKFMVEKGGMLKVKDVKPGIIEHLKQTKRIEIPCHGERFTDSLLVLMKYQ

SEQ ID NO: 63 - protein, 1284 aa, Artificial
  Synthetic
MIIGGINMKLTRRRISQERKNQKLTAAFYRDMDHGLLYVDSEDEDRTEYVVSSMDFERSWRGRILKNGEDNKNPFYEFVKGLVGSNEIICKPITNDNNTDINEKIKKYITEFGRNLKAPGSEVTLEKLILNIQSGTSENEVRPELEKIKDMIKKDIEKRKDELIKSITNNHIPFMLDEDKLVPSTKKMKWLYKFLNGPDKSLNLQMFDEYWTKYGYKNLEEKIIKEINSLPEKNARSISRAVSKTVREYNRNFRINYMVPENENAEADSDYEGFLLFLKAVEQHFKKYYPVKSKDSNEVRDKNLCEEKNYKFYCSYNFVKNEVKRSIINQLVSGLIQQGKLLHYFYKDGIWQQDFLNSYGLSYIQVEESFKKSLMTSLSWGINRLTSFFIDVGTDENEEKTVQNKKQKNNRKIDDILSDKSNLRAIFNDLRSNTELQKHFKEKLAFCYPIFIKVKKEKMFDDIEKLIKLVEEARESVAYLRHRCFHYKDVTITEMLKALNNNTETDKTEDIDYSVAAEYFLRDINNLYDAFREQIRSSGIADYYPADIISGCFKKCGLQFVLYSPQNSLMPSFKNIYKRGSNLYKAYQEEKEQKDKEYKRHNTNIVQEESKELSWYIEVSDTEQGKTAYRNLLQLIYYHAFLPEVRENESLITVYFAKTKEWNRKVAETKAKKKNAGKTYKDKPIRAYRYEAIPDYVGERLDDYFKILQREQMAKAKDVNEGNAENNNYIQFIRDVVVWAFGAYLEERLEKYKKDLQSSHSQKDKKDVNDALKELFPDDKDKRQFFMKCKFTDVLINDVGENNQITEMEDLETSKEQQNREIKRKDLLCFYLFLRLLDEREISGLKHQFVRYRCSLKERRLPDNRKDVDEEIVLLEELEELMELVSYTMPSVPELSGKAESGLDLVISKYFKDFFEKSALKNQDIMKLYYQSDNKTPVFRKYMALLMRSAPLQLYKDMFRNYYIITEKECQEYIKTSQDIDAFQCKLNELHKELEHVRLKTVEDKKGKIFYYLAGSDAERVKEYEDTLSKVVRYKRLQHKLTFESLYTIFKIHVDIAARMVGYTEDWERDMLFLFKSLEYNEKLNEGVVEKIFNNKDEKGHIVKKLKDNLNSEDKEKIGILCWHKEITDKNFVEIIWIRNPIAHLNHFMQTVKNPKRSLEKMINALCVLLSYDRKRQNSVTKTINDLLLNEYHVKIKWKRWVDKNCNIYYYIDEQNIENEPILHIKHLHMGEKCHVNRNADMFDRQKEWLRNGITEEVYDKSMLGCICRLFKFDYNDLYGANRQ

SEQ ID NO: 64 - protein, 1235 aa, Artificial
  Synthetic
MKITKRKWENKPPVFFYRDDESGKLITQGSRHDQTDILFREESSVSDVFEKSLQNRLLKMQKDGKRIKKNEITELVACLCKSTGSRNNACIESIINKIQKLSPGVATEKCNETLSEYGKCFAAEGSNMTLYKALLYLIDGNDIEKAMAKAGLVKIQQALQKEREYRKRRVFNSIKKNKIPLIVKDDGTIEANNDRTAWLLELLTPVKSSSEDHDYDFYPVLTEIKKIISYERLSNDIKKQIEQCDGKARSIAKAADEVLKKHLKDLWERYPENHRNMKYYFQAVHEYFKDNFPIKAKMAGAKKRQELLTKDKAALLRLLEPDHIAKTVHRKLINQSTQMHILYGKLYEYCCKGDNKLPVNSDTLQLIQVSEAVKKQVMTAVLWSISRLKYFYEYYDGDILSEHELVKEYRRKFLVVNKQYTNDFVQACKEKIKYFFPLEEIQERYGAGMSSKYIVPAKMAWDDREICNKLLAECVFCVNKLRTNIFHYKNMSLTQMLKNMSDEVGKELIEKGSILLQLYINDVENRNKAFAQRIRSMNLPLYYSKDLLNRIFTKYGAEFTLYSPNNQMTPSFRRVYEKGKNLRKEYERKFKSAHSRKQLNSESEYILRWFRQHDYADEAAEAGTRSVSNSDSDIDIETGIIDYIDESNEIDSDDYSSESENINDVSKDIDTQRVIRNLLQLIYKHQFLPEVLRNETIVTGKIRKVLDRNRMIADERSKFSAARNFGYSAVEEIYHDGITLAELLKELQRKISETEKENKELERSKTDYVQRFIRELFAVAFESFMNEQYGEVYDEIMHPKRNEDEAKKWSEESVKLGTSLNESKTEGYLLVFYTVMRLLDENELSELQQQMLRYRASMSRWNGETDFDEDVKIIEKIEELAELVKLTEPVPSNTEVWNKRIKEEIKQLIEGDLTDYGEFYLQSDKTSPVLRRNMMRLIRSGITEVYKKVLHNQKQATRRDYDVYCRSQHENLPGINSVEQAQKVLQQLHRTYAVSPSNFSADDYRKYKNILQWLEEYNRAVRNLSFETLYEVCVINMEILSRWIGLIQDWERDMYFILLAWVKQGKLYGLTEKDVTDIFERGRVVGRLKKKLKGNNMAAFMSIYRTEKDDKDMEFAEVRNRIAHLELLRESGWSIDTKDRDLSVIEWYLNKLRLLLSYDQKRMNAVSSVMKTIFQKHNTEAVFRIERGGELKFDSVKPVMIEHLKDSEFKKGINVPSRGKTFLNDLERLMKYKDI

SEQ ID NO: 65 - protein, 1225 aa, Artificial
  Synthetic
MKITKRKWGEHHPPLYFYRDEDSGRLLAQNDRKQDYTDTLFNDIAQDTFERSLRNRLLKTPEKGDKRFYSNEIVKLVEKLCQGADVAEIMKSMERSEKLRPKNEKEIKNLKKQLDGTLSEYGKRYTAPEGAMTLNDALFYLVEGNPLKQAMAKAELGKIREALIKEKENRINRVRYSIKNNKIPLRIQGDGGITPNNDRAAWLLGLMKPADPAKGITDCYPLLGELEEVFDFDKLSKTLHEKISRCQGRPRSIAMAVDEALKQYLRELWEKSPSRQQDLKYYFQAVQEYFKDNFPIRTKRMGARLRQELLKDKTSLSRLLEPKHMANAVRRRLINQSTQMHILYGKLYAYCCGEDGRLLVNSETLQRIQVHEAVKKQAMTAVLWSISRLRYFYQFEDGDILSNKNPIKDFRDKFLRDTNKYTHEDVEACKEKLQDFFPLKELQEKIKEDAKGLQETDNKQADTTDFKAIGHIVRDDRKLCNQLLAECVSCIGELRHHIFHYKNVTLIQALKRIADKVKPEDLSVLRAIYLLDRRNLKKAFAKRISSMNLPLYYREDLLSRIFKKEGTAFFLYSAKIQMTPSFQRVYERGKNLRREFECERMKAEASNGQNGQDGDRLKWFRQLAAGDSADTHFNWAVEAYAESAADVENNVEFDTDVDAQRALRNLLLLIYRHHFLPEVQKDETLVTGKIHKVLERNRQLSEGQGPNQGKAHGYSVIEELYHEGMPLSDLMKQLQRRISETERESRELAQEKTDYAQRFILDIFAEAFNDFLEAHYGEEYLEIMSPRKDAEAAKKWVKESKTVDLKTSIDEKEPEGHLLVLYPVLRLLDERELGELQQQMIRYRTSLASWQGESNFSEEIRIAGQIEELTELVKLTEPEPQFAEEVWGKRAKEAFEDFIEGNMKNYEAFYLQSDNNTPVYRRNMSRLLRSGLMGVYQKVLASHKQALKRDYLLWSEKHWNVKDENGADISSAEQAQCLLQRLHRKYAESPSRFTEEDCKLYEKVLRRLEDYNQAVKNLSFSSLYEICVLNLEILSRWVGFVQDWERDMYFLLLAWVRQGKLDGIKEEDVRDIFSEGNIIRNLVDTLKGENMNAFESVYFPENKGSKYLGVRNDVAHLDLMRKNGWRLEAGKTCSVMEDYINRLRFLLSYDQKRMNAVTKTLQQIFDRHKVKIRFTVEKGGMLKIEDVTADKIAHLKGSRLSGIEIPSHGERFIDTLKALMVYPRG

SEQ ID NO: 66 - protein, 1276 aa, Artificial
  Synthetic
MVENLARNFNAVINNALRSIRNPKEKKERRVEKEVAFILNLSKKSIKMKKDVFVKSTDLIVKFPENNKYNKKNDKGTGSKEAYIQKMISDLVLRKLKNTLRKEVKLENGYRMQMTEIIISLMSAICLYGNAESFDPAILKAFFEKVDSDYTKYKYVEQIVKSIESQSAKLKVVEKDGRHLLISANADHRKKKYVFEFMRMYAAADEKEKRELTEHIQDLIGLYLCGKAGYENAENRFSDMTESHNCICGKIEEILNELEKPENLSQKKKENLKNTTVKVMALKYRAAVNYLADEVGKTVLGEIREKKVRSCADLYWIEYIDSTVEKLLLKSRNKDGYRYEIGFLSKHIWKEWTQYISGKYIEMGKGVYHFAIPDLSGALEGESVSICEVKPEYRNGVSGFDYERIRAEESLEREMEKYVLFAVNNFARAVTPEEEREKSGHEDVLLMKTLSEIEESQTKEERQKKHDNNVKNAITLYADADRRILQFFGGQSRFREKEDSLVNLYSGEDLYKEIRKELYAIRNITFHYTTKADKDQTQKHDLAEYLFEEEFSDITELFREKYYANNVWKYYDVEVINTIMENIYCGRKYRAAQVPAFKNIISRPELPQVMNGFVKGNSLRRLMNCPDRDVINKYWSALFFVLKELYYYDFLQEQKKPEDNVKERFFRAIKKLSRQEKGDKEQKAWESFENRIDQIGRDRSFGAICQGLMIEYMLQNSDISMVQTETDNGKANNKKQIYKHYRTLLYNCIREAFIEYLREKWEGLRTPVLTVKEWSKEEFCRADGLKHLSLFDHLKETFNDAESGSSWYMAAHFINQKYLNHLLGSIRNYLQFTEDIEDRAISLGDCVDNKREEKNLRYRNTVEILEFVAQFCERTTNVMEDYFESNQEYAEYLSGFVDYNTTKKETDIEKALYSFCKQKFKVDGKEYMAGIYYDGENLIPNRNIIRANMYGTTSCLKPCMDRITLKEIRTMYADQNKLDLVLKEGVCHTEEEQKAYREYQNEKNRIELFDVCTYTQILNDMQARLIGWSYMRERDLMYYQLGYYYTKLFWTDSISEEDARRRLVGNLVNVEDGAILYQILAFNSYNLPIIANKNNTVTLLKDEGSIGGKAITAFFKNYENAEMIYEEALDLFENMDEHAAIINTRNYIEHFKYFIKSDRSMMDLYSEIYDRFFRHDHNRKKNVPDSLKNVLADNFMIVDIDMELGSKKVGEKKKGFREHKAARIEFTDSGIRSTDMTYTIKPDIKDNKKVLVPARSEVFLKQFRKILEYRIQDKTQ

SEQ ID NO: 67 - protein, 1432 aa, Artificial
  Synthetic
MQMKISKIKNSRSGISVFENKSEEQFSKQSLLYYAPRKNGKVRLKSNDLRKHVMDCNKNAQNLYNVINPEFDFCKDKNRKKVFEDLAKNFNLVLCSALRSVDTSISDPKERAKEETAFILNMDKEGIKTKKDSMKSEDLIVEFPPSDEDNGTEKTKKAESPELKEQRRKEQEAEILKMTEELVLRKLKKTLRRNATLDDESKMQMTEIAISLMKAICVHGNAGSFDPVILKAFFKEIDKDYMKNEQMEEIVRSIESQSVKVKVAEKDGKYLLLPANADHRKKKYAFEFMRKYAAAEAEGKQELTEHIQALIGLYLCGESEYQDAKNCFYDMVENHECMSGEIEEIYNTIKELKNLSRQKREERKEIKEKIREIEKSGKGDKRIPNNNSNKSCKNDKKDNDNKENDINLNENDLKKAIEEIDKELAKIPLEICINNEKLNNAVIKTMSVKYRAAVKYLVSKVKKTVLGEIKEKKDCSCADLYWIDYIDNTVKKLLLDSRNKGMYRYEISFLSNHIWKEWTQYISGKYIELGKGVYHFAIPDLSGALEGKPVSVCEVKPEYRKGISGFDYERIKAEESLDREMEEYVLFAVNNFARAAAPENEREKPGHEDVLIMKTSDELIAENKKNQEPIVLYKDADRRILQFFGGQSRFREKEDSFINLYSGEDLYKEIRNELYTVRNITFHYTTKAEKGQIQKHEMAEYFFEEELADISGVFRKKYYSNNVWKFYDMEVINDLMDKIYSGRKYRAAQIPAFNNIISRPALPQIINGFVKGNSLKKIMNYPDREIIKQYWSALFFVLKELYYYDFLQEQENPEENIRERFLRVLARKLEETSDAKEQKAWESFDKRISEIGRKRSFGEICQGLMIEYMLQNNDSPMVRKENIHKRTQSRDTQIYKHYRTLLYICIRDAFIEYLKEKWQGLREPVLIKKEWSEEEFCHSDNVEHLSLYDHLKDLFHSTASGPSWYIAAHFINPKYLNHLIGSIRNYLQFTEDIERRAVSLGKCVDNEREEKNLRYRNTLEILEFVLQFCGKTTKVMEDYFESNEVYAAYLSDFVDYKTPKNITDIETALHIFCEQKVNVDGKESMVGIYYDGGNLIPNRNIIRANMYGNVSCLKASMDKIKYAEIRKMYIDKSKLDSVLKEGVCRTKEDQKALKEFQNEKNRIELLDLSTYTEILNDMQAILIGWTYMRERDLMYYQLGYYYTKLFWTDSISEEDELRRLTGDEVNIEDGAILYQILAFNTYHLPVISNKKNTVSFVKDNGSIGGKALRAFFRNFENAIPIYLEGLNLFENTDEHDDIIDTRNYIEHFKYFIKSDRSMMDLYSEVYDRFFRYDHKLKKSVPEVLINVLARNFMDARIYMKLGSKQVVKEKTGVSREHKASKIAFTDKGIESTALTYTIKPDSKDNKKEAKILVDARSEVFLKQFQKILEYRG

SEQ ID NO: 68 - protein, 1025 aa, Artificial
  Synthetic
MLSFLSGKYIATGKAVWHFAMKEGIEDETKDLNLLRIREDVRRGLTSFDYEQIKAEEVLQRDMAVYVAFASNHLSSATVDLSILDGEEGKEDFLLLKREDLEKSRRPYLRRNLLQFFGGESTWQDFSFEKYYQEYSSANSTQYDDLSLLSDLQQIVYAARNESFHFDTRRRNPGNWNQSLISAMFAHDCKTASTLQKEKFYSNNLPMFYGEKDLLDLLRVLYGKQTARASQVPSFNKVVVRRNFSNFISDNLNWKNINFTGEGSVALKEQFDSALYYLLKEIYYNLFLQGRGSGAAFDVKGEFIKWCLDEKNGKQNAEAFKSFKSRVEEIISSKKDITLPEICQRIMTDYNIYNNGTRKVKSDSVKQNMPDSYDHFKMLLLKGLREVFASYICAEFVVLKNPRYREKPDADAFLPDYSSPTYSTLIERVKGNPELQKWYVVGRLLNPRQANFFVGVLRQYIQYTGQIRRRAVETGSRMVDTASAKALKGYANVLEVCIQLAGMTTNCLTDYFDDKDDYARHISRYLDFEGIYPGISISAQLENFCNENATDIDQSGVAGSNSANESGSDELKRLGVFYDAENPILNRNILLSKIYGTEKILVNIEKNRKITRDEIRAFYEQREKIGDYRLTGKCSTEEQQRALKKYQEIKNRVEFRDLVEYEEIVDEMQAQMIDWCYLRERDLMYFQLGFHYMCLCNSSSKAELYRGIEKDGRKIDGAILYQIAAMYINGLPIYAVEKGKIKRKSESMSAGGKIRVFLNYAGACVEQAASSKEAEAPISADAAERFYLAGMELFENTQEHDNIVALRNYIEHFHYYVHQDRSLLDLYGEIFDRFFTYDMKYQKNVCNILYNILMHHFVRPAFTFSKAEKQVGKITKDRASISLVEKKGLSSEKMTYKLASPNKKQQGNTSSADIGSAEEAKKMDLPAKSRDFLEGVAVLLSYPDEPGDVVSEERHNNRQSYTTTKTEENDNSRGKDQRRNNSGTQETNWKGRGANADNRPSGGQGKSGSFGTSLADLLKDFKFDE

SEQ ID NO: 69 - protein, 1182 aa, Artificial
  Synthetic
MYMKITKIDGVSHYKKQDKGILKKKWKDLDERKQREKIEARYNKQIESKIYKEFFRLKNKKRIEKEEDQNIKSLYFFIKELYLNEKNEEWELKNINLEILDDKERVIKGYKFKEDVYFFKEGYKEYYLRILFNNLIEKVQNENREKVRKNKEFLDLKEIFKKYKNRKIDLLLKSINNNKINLEYKKENVNEEIYGINPTNDREMTFYELLKEIIEKKDEQKSILEEKLDNFDITNFLENIEKIFNEETEINIIKGKVLNELREYIKEKEENNSDNKLKQIYNLELKKYIENNFSYKKQKSKSKNGKNDYLYLNFLKKIMFIEEVDEKKEINKEKFKNKINSNFKNLFVQHILDYGKLLYYKENDEYIKNTGQLETKDLEYIKTKETLIRKMAVLVSFAANSYYNLFGRVSGDILGTEVVKSSKTNVIKVGSHIFKEKMLNYFFDFEIFDANKIVEILESISYSIYNVRNGVGHFNKLILGKYKKKDINTNKRIEEDLNNNEEIKGYFIKKRGEIERKVKEKFLSNNLQYYYSKEKIENYFEVYEFEILKRKIPFAPNFKRIIKKGEDLFNNKNNKKYEYFKNFDKNSAEEKKEFLKTRNFLLKELYYNNFYKEFLSKKEEFEKIVLEVKEEKKSRGNINNKKSGVSFQSIDDYDTKINISDYIASIHKKEMERVEKYNEEKQKDTAKYIRDFVEEIFLTGFINYLEKDKRLHFLKEEFSILCNNNNNVVDFNININEEKIKEFLKENDSKTLNLYLFFNMIDSKRISEFRNELVKYKQFTKKRLDEEKEFLGIKIELYETLIEFVILTREKLDTKKSEEIDAWLVDKLYVKDSNEYKEYEEILKLFVDEKILSSKEAPYYATDNKTPILLSNFEKTRKYGTQSFLSEIQSNYKYSKVEKENIEDYNKKEEIEQKKKSNIEKLQDLKVELHKKWEQNKITEKEIEKYNNTTRKINEYNYLKNKEELQNVYLLHEMLSDLLARNVAFFNKWERDFKFIVIAIKQFLRENDKEKVNEFLNPPDNSKGKKVYFSVSKYKNTVENIDGIHKNFMNLIFLNNKFMNRKIDKMNCAIWVYFRNYIAHFLHLHTKNEKISLISQMNLLIKLFSYDKKVQNHILKSTKTLLEKYNIQINFEISNDKNEVFKYKIKNRLYSKKGKMLGKNNKFEILENEFLENVKAMLEYSE

SEQ ID NO: 70 - protein, 1197 aa, Artificial
  Synthetic
MKVTKIDGLSHKKFEDEGKLVKFRNNKNINEIKERLKKLKELKLDNYIKNPENVKNKDKDAEKETKIRRTNLKKYFSEIILRKEDEKYILKKTKKFKDINQEIDYYDVKSKKNQQEIFDVLKEILELKIKETEKEEIITFDSEKLKKVFGEDFVKKEAKIKAIEKSLKINKANYKKDSIKIGDDKYSNVKGENKRSRIYEYYKKSENLKKFEENIREAFEKLYTEENIKELYSKIEEILKKTHLKSIVREFYQNEIIGESEFSKKNGDGISILYNQIKDSIKKEENFIEFIENTGNLELKELTKSQIFYKYFLENEELNDENIKFAFCYFVEIEVNNLLKENVYKIKRFNESNKKRIENIFEYGKLKKLIVYKLENKLNNYVRNCGKYNYHMENGDIATSDINMRNRQTEAFLRSIIGVSSFGYFSLRNILGVNDDDFYETEEDLTKKERRNLEKAKEDITIKNTFDEVVVKSFQKKGIYNIKENLKMFYGDSFDNADKDELKQFFVNMLNAITSIRHRVVHYNMNTNSENIFNFSGIEVSKLLKSIFEKETDKRELKLKIFRQLNSAGVFDYWENRKIDKYLENIEFKFVNKNIPFVPSFTKLYNRIDNLKGNNALNLGYINIPKRKEARDSQIYLLKNIYYGEFVEKFVNNNDNFEKIFREIIEINKKDGTNTKTKFYKLEKFETLKANAPIEYLEKLQSLHQINYNREKVEEDKDIYVDFVQKIFLKGFINYLQGSDLLKSLNLLNLKKDEAIANKKSFYDEKLKLWQNNGSNLSKMPEEIYDYIKKIKINKINYSDRMSIFYLLLKLIDHKELTNLRGNLEKYVSMNKNKIYSEELNIVNLVSLDNNKVRANFNLKPEDIGKFLKTETSIRNINQLNNFSEIFADGENVIKHRSFYNIKKYGILDLLEKIVDKADLKITKEEIKKYENLQNELKRNDFYKIQERIHRNYNQKPFLIKNNEKDFNDYKKAIENIQNYTQLKNKIEFNDLNLLQSLLFRILHRLAGYTSLWERDLQFKLKGEYPENKYIDEIFNFDNSKNKIYNEKNERGGSVVSKYGYFLVEKDGEIQRKNARDKKKNKIIKKEGLEIRNYIAHFNYIPDATKSILEILEELRNLLKYDRKLKNAVMKSIKDIFKEYGLIIEFKISHVNNSEKIEVLNVDSEKIKHLKNNGLVTTRNSEDLCELIKMMLEYKKS

SEQ ID NO: 71 - protein, 1403 aa, Artificial
  Synthetic
MKIVRGYGRSVVGKFAEEDGADIKDLKIRKLHKTGGDEDLSFAAFARTEGEFILALWVSVIDKIVAKATKNAEKGNEKAKNAIAKKLRQKIGAAAWQKLLRANRLELAAIWNWKIGAESSSRQSENFPQGNWYPAFLGNAAPEGLSDPQITELVHDIDTHIHKAMRQIGGVEGKDKNRLRSEGLLADIVAAVEKNTLKSAHEKQFPQGKKRDCAFSKEDWQVYRDAANKAVGGDFVADLKGAVLNTADKDKPYHKAIEYLKKVVWPQIFCDENGAVLGRKQATEQMPKLLVVHDAITAYYKKLLKDRGSIAGYKVKEKGENYEKATGIKRQGEKAPAKLELLLPASVNKLKWILCKQHENRDVNHYIRLGKVLHYTASQFSNENQDSAAYIIGNWDKAVEALPTSPYWTSEGQTQIKQNEAFIRVWRRVLAFAVHSLKNWADPDNKVAGDPTIKPTWGEIQKNFADSSFAQKFAQKYELFFGKIWQGSKQLELLDYLQERLMELRGSVFHFKGLRKFTSELKAKNPPQLMRDFYEDDCQAYRAKPLKIMQGAKFERFFSKEQIEEMLEAAQAWDAVSVTAPKGDDGQQLPLPTLKRLLVRVKNTWSEDGEGNIALPPYDSAAKKNEKADKAAENEVSVETKAAETDDEKREKARHAQYIAIKQLYELPFRAWLAKLSPEKVNDYIDRAVKRAKAAAQENEPDEEVKKCIVARAASLPRLKAKERIDGFFYNLMAETASEMRVQKDYSSDGEQAKKQAKYIENLKCDVIAYALADYLQAKHEVEEKGKQTKLVCFKYVLGEGEAKGSAEKAYLLPARPDAPQDKEKVKVFWAGITTGQITTDKNEAWNKLTEEGKFLPWLYFLLHLAPVEEVAGLRQQIRKWQIVVTKLEIDKTGDEDSGKKQAGKKAEAAKVRSLLCALNLYIELHDEQFNQGGQNKREFSPEDREKLRDYYIGEQDYKSVVNRQKDNADNEQMIRGLREMRRFGGDTALDKILEEKEHQISPDHIKAWKENSDKIAAAQNTRKERHKEWAKLENKVNKEWWDSKKKGKNTNYKLGDKGQVYAAALETIIKHSEAVAQIELHNQLNLHKLLLAVLGRLVDFSGLFERDLYFTMLALFYENKVERLEDKFEDSGALLKQGRIPEAFAEQLKEGKEKEDLKKIFSNKKLAGKDVLMWIRNRFAHLAVLESKDIDVTRELNFARALMSYDRKLKNAVTKSVAEMLARHKLEILWQMGKEQHSAGSGDSKDSVAIADKKIKVKSGHYLHGAKVEPRIIHHLGDNKAEDLQESLQNKEFTSMVQMLFGGGNKLKADKEAKEKAEAEKKKRTEEAQKKGKQSGVVKFFNADKGFGFIKPDNGSADIFVHVSAVQASGLMSLQEGQKVSYETEADKRGKGPKAVKLSIIE

SEQ ID NO: 72 - protein, 1163 aa, Artificial
  Synthetic
MLVIKPYGRSNVKKAAAGEKAENCWRAIRTVEKNSGQSKIVERPIAGFIAERDEAVIAQWVSIIDKIIAKPGEKDSNNKAQELRKILAAAAWAVIKSKNLLAKLAGTPAERQEIEKIWQWKMAATQPKEPRALEGRWYEAFAAGIPCDTQHIKADAAKIADRIYIHLYRQAYRFPLKSKTAQGSAAGDSRCHQKGLIQHRASAIAENILHIPAFLMCAADKEDYSDSDKEAYSEDDKKDYSAAAGNFAAEIKRAILVSEKLSRTDYKDRPYEIAARIMRETGDRLFACLGDKAQKPGLLALHSQIKSGYKALLKGRKQLKARLEYLLPQDNAALFQLVEAQQQNRYINHLIRLGKIVHYTAIVPDTASLAALQSSPKTIINNWPQKEAVEGSRFWSSAGQTEIKQNEAFVRVWRGALAFAARTVKDWVDPQDKIPGDILLNQTTALDNFDADYFEQKYQILFGNKWEAEEDKKALLEFSLSNLYALRNAAFHFSNLRLFVEALMPKKALEAEKLDKFLATFYTDACHNYQLKQKAIMQGAQFHDFFSEAEIETIWQALTSAQASPLPVPRLKRVLERAADAWKGWDNRLQVPPYSTAEEREASAWARCQYTAAKLLYDGPFKNWLEGLGQAALSGYINRALEHTSQAAKKIKNGDKEFEEFIISKAGKIAELGDENDFRDFFSTLTAATATEMRVQNFYQSDGKAAKKQADYIEKFKCDIVALAFADYVRKVIGLRNIAAFCNKERTEKPGSSRIYDRLPVSVKQNSTGAPWQSRLYFLLHLMPVEEAGSLRQQLKKWEIITDKSHGKGSRGGTVLTQLLAVFDLYIAMHDAQFVGAELASLESDKETAQALFENEGDFRQIFPEKKDGIEDEHLPIRGLREMQRFGTSLLHNFYEKHQISEASVARWQKLEKIIAQEQRKLKKLHQDWVNSKKRKNNIKWKEENAYEAALKLVTEHRHLTARVMLQSHVRLHRLLIKILGRLVDFAGLWERDLYFVLLAQLYCKGVEDIEEQFKDKGAKLGTGQIVAALRKLKDTGLQAKIASLLNQQETQEIRNGFDHFDTLKKKYFPVNLTAEVNKARRLMAYDRKLKNAVTKSVIDLLRRENIELKWSMGADHELEGVLSIFSAKACHLAKEYGNNKIAEELCDAHYVAMIESLLNGNS

SEQ ID NO: 73 - protein, 1101 aa, Artificial
  Synthetic
MRISKVKVKDGGKDKMVLVHRKTTGAQLIYSEQAVSNETNNILPVKKMDSFNLSILNKTIIKFETVKKQKLNLDQYKIVEKIFKYPKQELPKQINAEEILQFLNHKFQEPVKYWKNGKEESFNLTLLIVEAVKTQEKRKLQPYYDWKTWYIQTKSDLLKKSIENNRIDLTENLSKRKKALLAWETEFTTSGSIDLTHFHKVYMTDVLCTALQKVEPSADERGKMNSNAYHRGLKKALQNHQPAIFGTREAPNEVNRADNQLSIYHLEVVKYLEHYFPIKTSKRRNTADDISHYLKAQTLKTTIEKQLVNAIRANIIQQGKTNHHELKADTTSNDLIRIKTNEAFVLNLIGTCAFAANNIRNMVDKEQISDILGKREFIDSLTKSRISSQLYSFFFGENLSTNKAEKETQLWGIRGAVQQIRNNVNHYKKDALTTIFNICKFENPTDADPKQQTNYVDSIYKTLFIKELEKIPEAFAQQLKTGGALSYYTVENLKTLLTTFQFSLCRSTIPFAPGFKKVLNGGINYQNAKQDESFYELMLERYLRKENFAEEAYNARYFLLKLIYNNLFLPKFTADRKAFADSVGFVQLQNRKQAENSKRPKAFAFEAVRPMTAADSIADYMAYVQSELMQEQNKKEEKATDETRINFEKFVLQVFIKGFDSFLRAKEFDFVQVPQPQLTTTDSNQQKADKLNQLEASITADCKLTAQYAKTDDATHIAFYVFCKLLDAGHLSNLRNELIKFRGSVKDFDFHHLLEIIEICLLSADVVPTDYRDLYSSGADCLARLRPFIEQGADIKNWSDLYVQTDKQTPVIHAGIELSVKYGTTALLEQLITCNPKFRVMEDNFTKWSAQKKEIEEKVNKHTNLHQQWVEAKEKDDRERVKSKKNFVREYVKKNYVDYINNCIEINNYNWLDNKLHFVHLNHLHHLTIDILGRMAGFVALWERDFQYITKYTAAKEGTDALSFDGGLPRLKDKQEYYNKLFLSDKYTKVRNHIAHFNYLTKDAADFALLDLINELRELLHYGRKLKNAVSKAFIDLFEKHGMILKLKLNTDHQLVVESIEPKKIYHLGSTAKDKPEYQYTTNQVMTVYCNMCRSLLEMKK

SEQ ID NO: 74 - protein, 1360 aa, Artificial
  Synthetic
MQMKISKIKNSRPGISVTENKNEEQLSRQSLLYYAPVKDGKIRLESKDLEQHVTECNEKAQKLYNVITPEINFYRDENRQKMVENLARNFNAVINNALRSIRNPKEKKEQRVEKEVAFILNLSKKSIKLKKNVFVKSTDLIVKFPENNKYNKKNSKGTGSKEAYIQKMISDLVLRKLKNTLRKEVKLENGCRMQMTEITISLMSAICLYGNAESFDPAILKAFFEKVDSDYTKYKYVEQIVKSIESQSAKLKVVEKDGRHLLISANADHRKKKYVFEFMRMYAAADEKEKRELTEHIQDLIGLYLCGKAGYENAENRFSDMIESHNCICGKIEEILNELEKPENLSQQKKENLKNTTVKVMALKYRAAVNYLADEVGKTVLGEIREKKVRSCADLYWIEYIDSTVEKLLLKSRNKKRYRYEIGFLSKHIWKEWTQYISGKYIEIGKGVYHFAIPDLSGALEGESVSICEVKPEYRNGVSGFDYERIRAEESLEREMEKYVLFAVNNFARAVTPEEEREKSGHEDVLLMKTLSEIEESQTKEERQKKHDNNVKNAITLYADADRRILQFFGGQSRFREKEDSLINLYSGEDLYKEIRKELYAIRNITFHYTTKAEKDQTQKHDLAEYLFEEEFSDITELFREKYYANNVWKYYDAEVINTIMENIYCGRKYRAAQVPAFKNIISRPELPQVMNGFVKGNSLRRLMNCPDRDVINKYWSALFFVLKELYYYDFLQEQKKPEDNVKERFFRAIKKLSGQEKDDEKQKAWESFGNRIDQIGRDRSFGAICQGLMIEYMLQNSDISMVQTETDNGKANNKKQIYKHYRTLLYNCISEAFIEYLREKWKELRTPVLTAKEWSKEEFCRVDGLKHLSLFDHLKETFNDAESGSSWYMAAHFINQKYLNHLLGSIRNYLQFTEDIEDRAISLGDCVDNKREEKNLRYRNTLEILEFVAQFCERTTNVMEDYFESNQEYAEYLSGFVDYNTTKKETDIEKALYSFCKQKFKVDGKEYMAGIYYDGENLIPNRNIIRANMYGNTSCLKPCMDRITLKEIRTMYADQNKLDLVLKEGVCHTEEEQKAYREYQNEKNRIELFDVCTYTQILNDMQARLIGWSYMRERDLMYYQLGYYYTKLFWTDSISEEDARRRLVGNLVNVEDGAILYQILAFNSYNLPIIANKNNTVTLLKDEGSIGGKAITAFFKNYENAEMIYKEALDLFENMDEHAAIINTRNYIEHFKYFIKSDRSMMDLYSEIYDRFFRHDHNRKKNVPDSLKNVLADNFMIVDIDMELGSKKVGEKKKGFREHKAARIEFTDSGIRSTDMTYTIKPDIKDNKKDKKVLVPARSEVFLKQFRKILEYRIQDKIQ

SEQ ID NO: 75 - protein, 1360 aa, Artificial
  Synthetic
MQMKISKIKNSRPGISVTENKNEEQLSRQSLLYYAPVKDGKIRLESKDLEQHVTECNEKAQKLYNVITPEINFYRDENRQKMVENLARNFNAVINNALRSIRNPKEKKERRVEKEVAFILNLSKKSIKLKKNVFVKSTDLIVKFPENNKYNKKNDKGTGSKEAYIQKMISDLVLRKLKKTLRKEVKLENGCRMQMTEIIISLMSAICLYGNAESFDPAILKAFFEKVDSDYTKYKYVEQIVKSIESQSAKLKVVEKDGRHLLISANADHRKKKYVFEFMRMYAAADEKEKRELTEHIQDLIGLYLCGKAGYENAENRFSDMIESHNCICGKIEEILNELEKPENLSQQKKENLKNTTVKVMALKYRAAVNYLADEVGKTVLGEIREKKVRSCADLYWIEYIDSTVEKLLLKSRNKDGYRYEIGFLSKHIWKEWTQYISGKYIEMGKGVYHFAIPDLSGALEGESVSICEVKPEYRNGVSGFDYERIRAEESLEREMEKYVLFAVNNFARAVTPEEEREKSGHEDVLLMKTLSEIEESQTKEERQKKHDNNVKNAITLYADADRRILQFFGGQSRFREKEDSLINLYSGEDLYKEIRKELYAIRNITFHYTTKAEKDQTQKHDLAEYLFEEEFSDITELFREKYYANNVWKYYDAEVINTIMENIYCGRKYRAAQVPAFKNIISRPELPQVMNGFVKGNSLRRLMNCPDRDVINKYWSALFFVLKELYYYDFLQEQKRPEDNVKERFFRAIKKLSGQEKGDKEQKAWESFENRIDQIGRDRSFGAICQGLMIEYMLQNSDISMVQTETDNGKANNKKQIYKHYRTLLYNCISEAFIEYLREKWKELRTPVLTVKEWSKEEFCRADGLKHLSLFDHLKETFNDAESGSSWYMAAHFINQKYLNHLLGSIRNYLQFTEDIEDRAISLGDCVDNKREEKNLRYRNTVEILEFVAQFCERTTNVMEDYFESNQEYAEYLSGFVDYNTTKKETDIEKALYSFCKQKFKVDGKEYMAGIYYDGENLIPNRNIIRANMYGNTSCLKPCMDRITLKEIRTMYADQNKLDLVLKEGVCHTEEEQKAYREYQNEKNRIELFDVCTYTQILNDMQARLIGWSYMRERDLMYYQLGYYYTKLFWTDSISEEDARRRLVGNLVNVEDGAILYQILAFNSYNLPIIANKNNTVTLLKDEGSIGGKAITAFFKNYENAEMIYEEALDLFENMDEHAAIINTRNYIEHFKYFIKSDRSMMDLYSEIYDRFFRHDHNRKKNVPDSLKNVLADNFMIVDIDMELGSKKVGEKKKGFREHKAARIEFTDSGIRSTDMTYTIKPDIKDNKKDKKVLVPARSEVFLKQFRKILEYRIQDKTQ

SEQ ID NO: 76 - protein, 1268 aa, Artificial
  Synthetic
MKVSKVNHRRAAVAVNKKSVTVNGILYDAPVKKNVKTGNMSAYVSSKYVIDNVVKNSSRLYSPFSSKRIVIDREKIRIADRLKQCYVNFVKYYLSNGSLNEQQMRFNPNNTYMADSRVHFCVPSGIDIESLINSIVDSSLRKSLKRTYRFETNYGEKNTFNLPDLVKKSIKIYCTDEKRKLNDREEQEMYVLFSYMYEDKYKDRQKVLIANSISNQATKVKVCDDESRLIKLSIADTKKKPLWDFIVDYANSDKNGQYTILRNIRKSIVLFVCGVDVYRNIENNDNLDIWKWEEYGIQESQLFVKIENCYTTKGEDIALNEIRNVNLDHYMKAIGVLDDERSKFWFQHYENTIEALFSKKSKRKIERIKTAYLCEYLWKNFCSYVALKYVDLGKGVYHFTMSDKLSLMNKNTNENGIKFGEVDSRFNKGISSFDYERIKAEETIDRNISTYTTFATNIFAKSVIKDSYRQKKAGNSDALQYDDETYYNRKAMNPYALKRVLRYWGGQSRWKSELEELNVAELCIDIKNRLSKIRNSGVHYTSTSALKGNDDDSIVGMLIKKDFDDIKDVYASKYYSNNVWMFYNTDKISKMMEYLYQDDSNIRDAQIPAFNSVIKRKDMAEVIEKIVKKNSYKTIKEPYQREKYRSCLYFMLKEIYYNRFIKQDNLKDQVIQIIDSNTELIGDNSRAVDNLKKRIHDVDSQTMSFGELCQVIMTDYNMQNQENKSIKSKERQDKDRKNGIDNSYKHFPLLLHHLIKVSFLKFIKTDEKLAFIREPRITEWDKTLEQFEAQIQTVDIYNSLKMMVAENKSLLDWYTLAHFLMPKQLNHLIGDVKNYIQYLSNIDKRAGSVKNNKSASTEVKIRQYSEIVRILDFSLQYIGRVSNDVTDYFVDEDEYAAFLSKYVEFSGNDIVSMKAFCQSRTANGKHTIGLYCDGANPIMNRNIAYAKMYGNDEILSYIYNKVTKKDIEKYYVSQDNLEKVFADGKCQDVQQQNALCDFQKMKNHIELTEVSIYTDILNDFMAQFISWAYLRERDLMYFQLGLNYIRMFYGTYELEEKYYKLHGENINIEKGALLYQIVAMYSHELPIYKVDESGIAILAEKQGSSGASIKSFVTEYCKEEMKKAYTYENGLELFEDVNQHDDLSKLRNDFAHMRYMSARDKSIMDIVSEIYNGFFIYDTKLKKSVSFIFKNILMRYAVDVNIEFCHKGDNEDTNNLIRIKDEVGLYSDKYTYKVEDNDTVDIEVRNSEFLEQLKKLLEYKKESEGSEL

SEQ ID NO: 77 - protein, 1163 aa, Artificial; identical to SEQ ID NO: 72
  Synthetic

SEQ ID NO: 78 - protein, 1403 aa, Artificial; identical to SEQ ID NO: 71
  Synthetic

SEQ ID NO: 79 - protein, 1172 aa, Artificial
  Synthetic
MKLTKVEKARIAVSREKKDSGRIILYTNPEDVKKTSVTTMEQQVSKRIDQANKLYQVFFKSVIPVELNKHFAEISKIAAKCRNTEEFYKKACGYSGYEWTDAKQKKRTSQISRFSYTSSGKNMYVVMDNFVKEYMVQIWQEKDFRNAAVKILCCICDGKKFASKLEKVKKESPDTLKKFIEISGKCEGNPFVDYDTSFLEKVFTLVISQMVKNCDRKSYEQDDKEKIKKSIQKEIQWLSHVQSVTERSFGREGKTYLLFKIRNPYATEERLQTVLIRMRKTLKRGRNRDIAIVLLQGLAQMNQVTFTDTVKHLYQEEEKAFCDFIDAVNRDYYRVNIVKSVRNMDVKVQPDLNDNSILKLSGLGNIKKEALSDTLLRYAASADESDQVLLDIKKLLFEYFLPENSKETSKYTTVQNLWNIPYLPKIFFDYGFENEDSDDDNECAEDIETLCDVEPQYKINQHSLKRRIRYVNYGKYLQMTKNESDRERRYWIHYIKEFVEKNYVDSGRTLSEKNCYASSMMLNCWKEIIRYLCGKYIDIGKAVFHFTNLTAMPKPKDKIIYGQLEEQYKKGISSFDYEAIKAEETLQRDIVQSVVAAAFAFSKSVIDETKMEECQETNKEDILFLSENVLGSLLKENTIKLILRFYGGESSVAQKEYFDQQEIVQEMISHLKSIRNENFHYLDGAKKDNPHKYASILWKNDEMAYQKLTKQRYYANNVGLFYRAEEIQELVQELYSQKNITEAQIPAFRTVLKRKDLPGYMEELGILFPDNTQEKSKGDFEGTLYFLMKEIYYRDFIVKDKAAAYFFKAVDQNKEQSKKEDKHTERAAENFHRYVKSLEKKYNKKEISFGTVCQYIMMEYNQQNTTKQETEIYKHFKMLISLCIRKAFGNYIKETYRFLFHPIYSKQQGEPEYLDTLELESGVKEKNYEWFTLAHFLHPVQLNHLVGDLKSYIQYREDILRRIVFAEQRVYADQQKEVQQKVKTAKEILEVLEFVREVSGRVSNEYTDYYENEEEYAEFLYQYIDFRKREGKSAFESLKYFCQNILDSGTVVDLYADTENPKVLRNIELTRMYAGSNVKIPEYEKITEDEIKMYYQEKNSVALILSRGLCRNEKEQKKVIEFNWKKKRLTLNEITDVFSLVNDLLGKMISFSYLRERSNVSSSWILLYGIMC

SEQ ID NO: 80 - protein, 1357 aa, Artificial
  Synthetic
MQMKISKIKNSRPGISVAENKNEEPLSRQSLLYYAPVKDGKIRLESKDLEQHVTECNEKAQKLYNVITPEINFYRDENRQKMVENLAKNFNAVINNALRSIRNPKEKKEQRVEKEVAFILNLSKKSIKMKKDVFVKSTDLIVKFPENNKYNKKNDKGTGSKEADIQKIISDLVLRKLKKTLRKEVKLENGCRMQMTEITISLMSAICLYGNAESFDPAILKAFFEKVDSDYTKYKYVEQIVKSIESQSAKLKVVEKDGRHLLISANADHRKKKYVFEFMRMYAAADEKEKRELTEHIQDLIGLYLCGKAGYENAENRFSDMTESHNCICGKIEEIFNGLEELENLSQQKKEKLKNTTVKVMALKYRAAVNYLADEVRKTVLGEIREKKVCSCADLYWIEYIDSTVEKLLLKSRNKKRYRYEIGFLSKHIWKEWTQYISGKYIEMGKGVYHFAIPDLSGALEGESVSICEVKPEYRNGVSGFDYERIRAEESLEREMEKYVLFAVNNFARAVTPEEEREKSGHEDVLLMKTLSEIEESQTKEERQKKHDNNVKNAITLYADADRRILQFFGGQSRFREKEDSLINLYSGEDLYKEIRKELYAIRNITFHYTTKAEKDQTQKHDLAEYLFEEEFSDITELFREKYYANNVWKYYDAEVINTIMENIYCGRKYRAAQVPAFKNIISRPELPQVMNGFVKGNSLRRLMNCPDRDVINKYWSALFFVLKELYYYDFLQEQKRPEDNVKERFFRAIKKLSGQEKGDKEQKAWESFENRIDQIGRDRSFGAICQGLMIEYMLQNSDISMVQTETDNGKANNKKQIYKHYRTLLYNCISEAFIEYLREKWKELRTPVLTAKEWSKEEFCRVDGLKHLSLFDHLKETFNDAESGSSWYMAAHFINQKYLNHLLGSIRNYLQFTEDIEDRAISLGDCVDNKREEKNLRYRNTLEILEFVAQFCERTTNVMEDYFESNQEYAEYLSGFVDYNTTKKETDIEKALYSFCKQKFKVDGKEYMAEIYYDGENLIPNRNIIRANMYGNTSCLKPCMDRITLKEIRTMYADQNKLDMVLKEGVCHTEEEQKAYREYQNEKNRIELFDVCTYTQILNDMQARLIGWSYMRERDLMYYQLGYYYTKLFWTDSISEEDARRRLVGNLVNVEDGAILYQILAFNSYNLPIIANKNNTVTLLKDEGSIGGKAITAFFKNYENAEMIYEEALDLFENMDEHAAIINTRNYIEHFKYFIKSDRSMMDLYSEIYDRFFRHDHNRKKNVPDSLKNVLADNFMIVDIDMELGSKKVGEKKKGFREHKAARIEFTDSGIRSTDMTYTIKPDIKDNKKVLVPARSEVFLKQFRKILEYRIQDKTQ

SEQ ID NO: 81 - protein, 1389 aa, Artificial
  Synthetic
MKLSKVTYRVKDKNAKYKKEYNVRAAVANNSENAGGVLYHVPGVDLIDLKEQMLDRDRSVRFLYNIFNQIQTGTKPKEWGNDETLSVDENERKAKEQNIKIMNYKWREACSEYIKKSQSTINSVLFYSYEESGYKTKRMNDNEAIIVKMQYENRLSHFTGGKLEDFVAYTLRNSLVVSRYDNQEFDSVNAMVVFINNIGNGNISDKDKKTICKLADLIRNDFSKLNPNVQSSQGANMVRSVRNQNMVVQPQGDKVSFPLVSDEGKNTVTNKNVEKKGLNEFLLNYANLDDEERMENLRKLRRIIDVYFSSPSHYQKDMDISLSDNIDKTKFDVWKKHETGKKNTELFVDIPDELLTAETEKIKLDAVLEKQARKRLTDSIRKQNMVCYRYTRAVVEKYNLTENLFFENDYINQYWIHHIENAVERILKSCKAETLFKLRMGYLTEKVWKDAINLISIKYIALGKVIYNFAVGDIWKDKKVKNLGSIDEKIKHGITSFDYEMIKAQEALQRELAVNVAFAANNLARAVCDMTNLKDKESDFLIWNKKDIANKLKNKDDMASVSVVLQFFGGKSSWDIDAFREAYKGNKYNYEVCFIDDLRKAVYAARNESFHFKTALVNNDIWNTEFFGKLFIKETEICLDIEKDRFYSNNLPVFYSDNDLKKMLDLLYNNKVSRAAQVPAYNSVMVRKYFPENITSTLKYQKPGYDEDTLEKWYSACYYLLKEIYYNSFLQSDEALALFEESVNNLKGDNKDQELAVKNFRNNYKNIKSSCTSYSQVCQMYMTEYNQQNNQFKKVRSSKDSIFDKPIYQHYKLLLKKVIANAFALYLQNNKELFGFIGKPLKVNCLKEIDKEQFLPEWTSKKYVSLCEEVRKSPELQKWYIVGKFLNSRSLNLMAGSMRSYIQYVNDIKRRADGIGNELHVIAQNLDVVDKWVQVIEVCLLLSSRVSNEFEDYFYDKDDYAAYLKSYVDFDNSDMPSEYSALVEFSDQGKVDLYVDPSNPKVNRNIVQSKLFAADYILRDIIEPVSKDEIEDFYNQKDEITTCKIKGAELTDEEQKKILKYQKLKNRVELRDVVEYGEIINELLGQLINWSFMRERDLLYFQLGFHYNCLRNDSAKPEEYKNLVLDDISIKDAILHQIIGMYVNGVAIYAPGKDKNKLESQCVKGRVGGKIGAFCGYSLYLKLAADTLYNAGLEVFEVLPEHEDIINLRNGIDHFKFYLGGYRSIISLYSEIFDRFFTYDMKYQKNVLNLLQNILLRHNVIIEPIFESGIKKIGKDTKPCAKLCISSIKSDSFEYKIKDGTLITDAKDKRYLETIKKLLYYPDIESNVKILLRKDNFNQNKDKKNVNNRKTKNNNKNGNRNRDKNRDKNSGGDGLTYNPFLNLIFDLPE

SEQ ID NO: 82 - protein, 1425 aa, Artificial; identical to SEQ ID NO: 3
  Synthetic

SEQ ID NO: 83 - protein, 1249 aa, Artificial
  Synthetic
MKITKIDGVSHYKEKEKGVLKGKDILNGKIEKIVKKRYDATIESKIYKEFIKLRKNRIEQNNEKSILKLIKLNIDKNEKEIKTLLLNKFKIKEKNKKYDKYMLDENKLDNDIKIYESVESLYFLIKEIYLGQNNKKWNISKIDLEKIMEEDNNLIMLGYKLKKNITENDYPYLYSDKNGQESTSVYKLLKKLIEENKDRNQDIRKSQEYEKIRKNFEEYKNRKINLLVKSIKNNKINIQYINNEIKSHNNSREENIIKFFKKMIEEKNEPILKDKLKLFKLEVFFDEEFLEEIKKLLDSDDFDKSYNKKISELRGKIFNRIREKIKNNKNRDELENIYFLELKKYIENNLSHKKEKNKNNNNTGEEKSKELYLKFLKKVLFIDDNNRISIEKLKSRIDDNFKNLLIQHVIEYGKIKYYVENDDYIRNIVKNGELKLETKDLEYIKTKETLIRKMAVLVSFAANSYYNLFGSVSEDILGTEVVKNRRTNVIKVKSYIFKEKMLNYFFDSEDFDINKTIEVLESISYSIYNIRNGVGHFNKLVLGKYKKKDINTNKRVEEDLNNNEEIKGYFIQKRGEIEKKIKERFLSNNLQYYYAKERIENYFEVYEFEILKEKIPFAPNFKRIIKKGEDLFNNKKNKKYEYFKNFDKNSAEEKKEFLKTRNFLLKELYYNNFYKEFLSKKEELKKIVIEVKEEKKNRGNNKKSGVSFQNIDDYDTKINISDYIASIHKKEMERVEKYNEEKQKDTAKYIRDFVEEIFLTGFINYLEKDERLHFLKEEFSVLCNSNNNVIDFNVNINEEKIKEFLKENDSKTLNLYLFFNMIDSKRISEFRNELIKYKQFTKKRLDEEKEFLGIKIELYETLIEFVILTREKLDTKKSEETDAWLVDKLYVKEKNECNEYEYKEYEEILKLFVDEKILISKEAPYYATNNKTPIILSNFEKTRKYGTQNLLAKIQSSYKYNEIEKQKIENYNEKKESEKKKKSNIEKLQDLKVELHKKWEQNKITEKEIKKYNDTIKEIREYNYLKNKEELQNVYLLHEILSDLLARNVAFFNKWERDFKFIVIAIKQFLRENDKEKVNEFLNPHKSDGSRDNFSVTNYRSKMKSIINNIHENFMSLLFLNNNLATGGIQMGRNNNFTWGNLRNYIAHFEYLHKEKDTISFIGQANLLIKLFSYDKKVQNHIIKSMKTLLEKYNIEIRFEISNDSEEIFEYKIKYINSKKGKMLGKNNEFEILENEFVRNVKALLEYSK

SEQ ID NO: 84 - protein, 1160 aa, Artificial
  Synthetic
MKITKIDGISHKKYIKEGKLVKSTSEENKTDERLSELLTIRLDTYIKNPDNASEKENRIRRENLKEFFSNKVLYLKDGILYLKDRREKNQLQNKNYSEEDISEYDLKNKNSFLVLKKILLNGDINSEELEIFRNDFEKKLDKINSLKYSLEENKANYQKINENNIKKVEGKSKRNIFYNYYKDSAKRNDYINNIQEAFDKLYKKEDIENLFFLIENSKKHEKYKIRECYHKIIERKNDKENFATIIYEEIQNVNNMKELIEKVPNVSELKKSQVFYKYYLNKEKLNDENIKYVFCHFVEIEMSKLLKNYVYKKPSNISNDKVKRIFEYQSLKKLIENKLLNKLDTYVRNCGKYSFYLQDGEIATSNFIVGNRQNEAFLRNIIGVSSTAYFSLRNILETENENDITGRIKGKTVKNNKGEEKYISGEIDKLYDNNKQNEVKKNLKMFYSYDFNMNSKKEIEDFFSNIDEAISSIRHGIVHFNLELEGKDIFTFKNIVPSQISKKMFHDEINEKKLKLKIFKQLNSANVFRYLEKYKILNYLNRTRFEFVNKNIPFVPSFTKLYSRIDDLKNSLCIYWKIPKANDNNKTKEITDAQIYLLKNIYYGEFLNYFMSNNGNFFEIIKEIIELNKNDKRNLKTGFYKLQKFENLQEKTPKEYLANIQSFYMIDAGNKDEEEKDAYIDFIQKIFLKGFMTYLANNGRLSLMYIGNDEQINTSLAGKKQEFDKFLKKYEQNNNIEIPHEINEFVREIKLGKILKYTESLNMFYLILKLLNHKELTNLKGSLEKYQSANKEEAFSDQLELINLLNLDNNRVTEDFELEADEIGKFLDFNGNKVKDNKELKKFDTNKIYFDGENIIKHRAFYNIKKYGMLNLLEKISDEAKYKISIEELKNYSKKKNEIEENHTTQENLHRKYARPRKDEKFTDEDYKKYEKAIRNIQQYTHLKNKVEFNELNLLQSLLLRILHRLVGYTSIWERDLRFRLKGEFPENQYIEEIFNFDNSKNVKYKNGQIVEKYISFYKELYKDDTEKISIYSDKKVKELKKEKKDLYIRNYIAHFNYIPNAEISLLEMLENLRKLLSYDRKLKNAIMKSIVDILKEYGFVVTFKIEKDKKIRIESLKSEEVVHLKKLKLKDNDKKKEPIKTYRNSKENFGILVCIIKKI

SEQ ID NO: 85 - protein, 1158 aa, Artificial
  Synthetic
MKVTKVGGISHKKYTSEGRLVKSESEENRTDERLSALLNMRLDMYIKNPSSTETKENKKRIGKLKKFFSNKMVYLKDNTLSLKNGKKENIDREYSETDISEYDVRDSKNFAVLKKIYLNENVNSEELEVFRKDIKKKLNKINSLKYSFEKNKANYQKINENNIEKVEGKSKRNIIYDYYRESAKRDAYVSNVKEAFDKLYKEEDIAKLVLKIENLTKLEKYKIREFYHEIIGRKNDKENFAKIIYEEIQNVNNMKELIEKVPDMSELKKSQVFYKYYLDKEELNDENVKYVFCHFVEIEMSQLLKNYVYKRLSNISNDKIKRIFEYQNLKKLIENKLLNKLDTYVRNCGKYNYYLQVGEIATSDFIARNRQNEAFLRNIIGVSSVSYFSLRNILETENKDDITGKMRGKTRIDSKTGEEKYIPGEVDQIYYENKQNEVKNKLKMFYGYDFDMDNKKEIEDFFANIDEAISSIRHGIVHFNLELEGKDIFAFKNIVPSEISKKIFQNEINEKKLKLKIFRQLNSANVFNFYEKDVIIKYLKNTKFNFVNKNIPFVPSFTKLYNKIDDLRNTLKFSWKIPKDKEEKDAQIYLLKNIYYGEFLNKFVKNSKDFFKITDEVIKINKQRNQKTGYYKYQKFENIEKTVPVEYLAIIQSRDMINNQDKEEKNTYIDFVQQIFLKGFIDYLNKNNLKYIENNNNNDIFSRIKIKKDSKERYDKILKNYEKNNRNKEIPYEINEFVREIKLGKILKYTERLNMFYLILKLLNHKELTNLKGSLEKYQSANKEETFSDELELINLLNLDNNRVTEDFELEADEIGKFLDFNGDKVKDRKELKKFDTKKIYFDGENIIKHRAFYNIKKYGMLNLLEKIADKAKYKISIEELRNYSNKKNEIEKNHTTQENLHRKYARPRKDEKFTDEDYKKYEKAIRNIQQYTHLKNKVEFNELNLLQGLLLRILHRLVGYTSIWERDLRFRLKGEFPENQYIEEIFNFENKKNVKYKGGQIVEKYIKFYKELYQNDETKINKYSSANIKVLKQEKKDLYIRNYIAHFNYIPHAEISILEVLENLRKLLSYDRKLKNAVMKSVVDILKEYGFVAKFKIGADKKIEIQSLKSEEIVHLKKLKLKDNDKKKEPIKTYRNSKELCKLVKVMFEYKYGRKKF

SEQ ID NO: 86 - protein, 1148 aa, Artificial
  Synthetic
MKVTKIDGLSHKKFEDEGKLVKIEDASQKNETLERLEKLKEIKLGNYIKNPDKTKDKDNKKRRKGLKEYFSEITLRKENEKYVLLKGKKLKKINNDIKDTDIKVKYKKEEVFDVLKKILKLNLLANDVEEKIQFDSIKLKNVFGKDFVKKELQIKSIEESLEKNKADYRKEFIEIENDKYGNVKGENKKNRIYEYYKKSETHEKFRKNIIEAFEKLYKKDDIEKLYTQIIEISKKMHLKSKVRELYKNVIIKRSCDDFSKKNKEGISVLYSQIMNSVKKNEKFVKFVKNIELKDLTKSQIFYKYFLENEELNDENIKNIFCYFVEIEVSDLLKGNVYKVSKIYENKIKNIFEYNKLKKLVINKLENKLNNYVRNCGKYNYHMENGDIATSDINMRNRQTEAFLRSMIGVSSFGYFSLRNILGVNDDDFYEIEEDLTEEERKNESNVLKKAKEDITSKSIFEKVVDKSFEKKGIHSIRENVKMFYGDSFDKANEDELKQFFVNMLNAITSIRHRVVHYNMNTNSENIFNFSDIEVSRLLKSIFEKETDKRKLKLKIFRQLNSAGVFDYWENWKIKKYLENMKFEFVNKNIPFVPSFTKLYNRIDNLKGSNALNLGYINIPKRKEARDSQIYLLKNIYYGKFVEEFIKNNDNFEKIFREIIEINKNAGTNKQTNFYKLEKFEKLKANTPTEYLEKLQSLHKINYNREKIEEDKDIYVDFVQKIFLKGFISYLQKSNSLKPLNLLNLKKDEVINSEKSFYDEKLKQWENNGSNLSEMPKEIYKYIKEIKINKTNYSDRMSIFYLLLKLIDHKELTNLRGNLEKYESMNKNKIYSEELNIVNLVSLDNNKVRTNFSVEAEDIGKFLKTETSIKNINQLNNFSGIFADGENVIKHRSFYNIKKYGILDLLEKIVAKADLKIAKEEIKKYENLQKELEKNDFYKIQEKIHRKYNQKPNLISRTENKKDFNDYKKAIENIQNYTQLKNKIEFNDLNLLQGLLFRILHRLTGYTSLWERDLQFKLKGEFPEDKYIDEIFNSDRNNNQKYKSGGIAYKYVDFLIEKEEGKRAGKNKVKKRSERERSFIIRNYIAHFNYIPDAEKSILEILEELRELLKYDRKLKNAVMKSIKDIFKEYGFIIEFGISHESNSKKIKV

SEQ ID NO: 87 - protein, 1169 aa, Artificial; identical to SEQ ID NO: 23
  Synthetic

SEQ ID NO: 88 - protein, 1149 aa, Artificial; identical to SEQ ID NO: 8
  Synthetic

SEQ ID NO: 89 - protein, 1339 aa, Artificial
  Synthetic
MKIIRPYGRSVIQEKDLRQRKVLENKTGQVAAVRDLLESDGKAVLAQWVSAMDKIIAKPLNKKDLAAFISGVNNNKKIENKERIENNNRLALNRLALEKRKLLGEAIWAHVSDKTKPHCLEKPEDQEKWWRAKYEEAYAMSDKMHRGFPKGRWYKIFAGIEEPEHIDEVQASEIAEKIYRHFYENALASGSEKAGKEKYKGKGFLPHRIAFIGKNTLTHAYENYGKSPDRLDLTATEATMACYKYMQKGGDIAQRIRRKILAQFLETTRKEDKIKESVYIIAVLELKEKWKEIFAAGVKNIATARKTDEALFKLHQTVKETYKILLKGRSLFPDKLKDKLPKDKKEADKSRNKQIHDKLAEILPRDMKELLQLIQYKSCNRDIGHLIRLGKIIHYSSRNLTSQEQLFAAEVENSDYWTSQGQTIIKQNEAFVRIWRRLLAFAGRNVADWIAPNNDGLKDVLGGTGSCKAALKYFEEHYEGNDEEGKKYTAGFDEKYNVLFADDDGLFFNKGTKTLDALNGKGGKRPILEFIIGALTDLRNAAFHFKGMEHFVEQFGKADWVSGCERVGEEQTQEPHEAQAKIVPFLENYYHKACEAYRMRLLHILESINVHKFLNYEQIKNFLSEITAAEASPLPLPRFQKLLERSDCAWAKIGKPLLLPPYTKARDRAGDGDKDLAKNCQYNLAHMLYDKLFRAWLENLPAEKLQDFIKRAIERTTEAARKINGGKTDKELILARAGKLSAIQKNERVQWFFAGLVADSSTEGRVQKDNYKHDADAAREKAEYIEEFKQDVVALAFADYLREKQFSFILDIKDVRYRDKNFPMETLKKTLREEGTTETEKTEQNGEKADWICAKLYFLLHLMPVEEVSSLRQQIRKWEIVVDKPEVTAATKEAESEDVIEGAQEREQKTKERQEKALTQPILQALDLYIFMHDAQYVGEEIEAVTADWEEIFFEHGKGAVNKIFPAQERQKDLQAFRDLREMRRFGNTVLNDIYARKKISSEKIEQWREQKEKVEGKNGLQTELQTLHETWVKNRKNPEWQRKGKDGQEGEKYKEYREKLEIVAAYRILAGEVKLQNHVRLYRLLMAVLGRLVDFSGLFERDLYFTLLALCYQNDVKNIKAIFEDNEDSGAPIEKKEDGENLLQDGQVFKALDQLKGDYAPIKKELVKFFGDVFREEKGTSRNIRNRFAHLKMLSLPEKEEISWTQGVQINLTQEVNNTRQLMAYDRKLKNAVAKSLIDLLDREGLKLSWQMSIESVPEAAAKSDKSAPLKDKKVNHNLCNPHVETKWIPHLGSKLLDKKDKDGKPVIGKNGKPVKEAITEPRHGDIYVTMVKSLFGG

SEQ ID NO: 90 - protein, 1451 aa, Artificial
  Synthetic
MKIVRGYGRSIVGKFADGEGAAEEDLKIRKLHTTKGDEDLSFTAFAGTEGEFILAVWISVIDKIIAKATKDEKAQADKNAWAEELRQKIGAAAWQKILRANRLELAKMWNWKINAKASGKQGNNFPQGNWYPAFLGNAAPERLSDEQITELVHDIDTHIHKAMRQIRGDERKGKSRPHSEGLLADIVAAVGQNTLKVAYEKQFPEDKKRDCAFSEEEWQDYRDAANKAVGGDFVAGLKKAVLDKENKDKPYHKAIDYLKNTVWPKVFCDESGAVLGRKNATEQMPKPLTVHDAITAYYKKLLKDRGSIAGYKVREKGEAYQKATSIKRQGEKAPAKLEQLLPASVNKLKWILCKQHKNRDVNHYIRLGKVLHYTASQFSNENQDSAAYIIGNWDRAVAALPTSPYWTSEGQTQIKQNEAFIRVWRRVLAFAVHSLKNWADPDNTVTGDPTITATWTAIKKAYGWVDKGEDKNEDKAKAYFEGAFIERYELLFGNTRPKEEKSDEKEIEIKKISQQDKQVILDRLRWHIGNLRRAGFHFKGMETFIESLENQDPKKPEKEVIKLPKHMRDFYKADRKTYRAKPLKIMQGAQFERFFTKEQIEEMLTAAQEWDAVSVTAPKGDDGQQLPLPTLRRLLGRVKKTWSEDGQDNIALPPYDSAAKKNEKADEEEESEKRAKKTESAEDKKEKARHAQYIAIKQLYELPFRAWLAEDLSPDTVNTYIGKAVERATAAAQENETDEEVKSCIVARAASLPRLQAGERIDRFFYNLMAETASEMRVQKDYSSDGEQAKKQAAYIEKLKCDVVAYALADYLRDEFKYLVPSEAKGGAEEAYLLKERTDSAAAQDKEKTKAFWDAIEKDEEDKQKKEQSEWDKLTEEGKFLPWLYFLLHLAPVEEVASLRQQIRKWQIVVTKLENDKAGNEDSGEQKAGKRTEVAKIRPLLCALNLYIELHDEQFNQAGQEVPSLSDEDKKQLEGYYAVDFDAIFKGQKQGEKLQAVRGWREMRRFGGDTALDTILHEWDHKISQNHINAWKDTSGDTIAEAQKTRKKLHKEWVKEKEKGNTLSDKEKKNYAVALETIIKHSEAVAQIELHNHLNLHKLLLAVLGRLVDFSGLFERDLYFTMLALFYEKQQRENFISDRDWFAKQFTDIVEVTFAAPLEEKQAVGSSSLEQGLIVEAFCALCDTDIKNRLTEIFGVTGKEEGSTKKEKIRNLHNTDLTRWIRNRFAHLAVLENKNLDKNIDVTRELNFARALMAYDRKLKNAVAKSITEMLARQKLEILWQMGQEKNDPDSVDSNNPVDVAIAERKIKVTSRHYLHGAKVEPRIIHHLGDNKAKDLQENLQNAEFTSMVQMLFGGGNKIKAAGEAKEKAEAERRKRQEAAKKQGKKSGVVRFFDIKKNNGRIIPDEGERDIFVHISDVRASGLKTLKKGQWVSYKVQTGDKGPKAVNLSII

SEQ ID NO: 91 - protein, 968 aa, Artificial
  Synthetic
MEHRASSIAKNVLKIPASKDSDKEDIIKAGNITAKIKIAYNDADKEAYSARVGNIAAKIKAAVLEPKKGYQEWPHEIAARILHETAFCKFKQFADMKAENSTLLELHCQIKASYKALLKGHKQLNAKLEYVLPKDNEALFCLVEAQQQNHRINHLIRLGKIVHYAAISPDNASLAALQSSPRTIINNWPEKQAVEESRFWSSAGQTEIKQNEAFVRVWRGALAFAARSLKDWADPEDKIPGDILLKQQEALDNFNADYFNKKYQILFGGQCGLSAKEHKSLLAFSLKGIYALRNAAFHFNSLTVFVKALMPEEEPPQAELHEFLGTFYTKSCRDYRLKQKKIMEGAHFHQFFSEAEIQTIWQVLTSAKPGSLPLPRLKHVLERAQDAWKGEDRLSLPPYSTAEERESSAWAHCQYTAVKLLYDGRFRNWLEERNQAAVGRIIKQALEHTSQAAQNISSRGKDKEFKEFITAKAGKIAELGNKENFKTLFSALMAETATEMRVQKFYQSDGQAAREQADYIEKFKCDNVALAFADYLRATLGAGNVAAFCKLERKERPGDKSVYDRLPLEQNSAAELWQSRLYFLLHLMPVEEAGSLRQQLKKWEIVTDKSHGEQGRGGEILARLLAVFDLYIAMHDAQFVGAELVLKSDEETAKALFANQEDFRKSFPKKESGAEDEHLPIRGLREMRRFGTGLLHNLYEKHKIASASVARWQELKQTIAREQDKLKKLHGDWVNSKRKRHAIQWTSRDANDYNETLALVIEYRHLTAQIMLQNHVHVHRLLMKILGRLVDFAGLWERDLYFVLLALLYQKGMGDIKEEFKDEGAMLETGQIVKALRKLKDTDRRAEIAAFLNKEEVGEIRNSFYHFDTLKKEYFPINLTAEVNKARQLMAYDRKLKNAVTKSLVDLLKRENIILKWDMGADHKLSGPISVVSAKTCHLDKESDKNKIEEELCGKHFIAMIKSLFTGR

SEQ ID NO: 92 - protein, 1360 aa, Artificial
  Synthetic
MQMKISKIKNSRPGISVAENKNEESLSRQSLLYYAPVKDGKIRLESKDLEQHVTECNEKAQKLYNVITPEINFYRDENRQKMVENLARNFNAVINNALRSIRNPKEKKEQRVEKEVAFILNLSKKSIKMKKDVFVKSTDLIVKFPENNKYNKKNDKGTGSKEAYIQKMISDLVLRKLKNTLRKEVKLENGYRMQMTEIIISLMSAICLYGNAESFDPAILKAFFEKVDSDYTKYKYVEQIVKSIESQSAKLKVVEKDGRHLLISANADHRKKKYVFEFMRMYAAADEKEKRELTEHIQDLIGLYLCGKAGYENAENRFSDMTESHNCICGKIEEILNELEKPENLSQKKKENLKNTTVKVMALKYRAAVNYLADEVGKTVLGEIREKKVRSCADLYWIEYIDSTVEKLLLKSRNKDGYRYEIGFLSKHIWKEWTQYISGKYIEMGKGVYHFAIPDLSGNLEGEPISICEVKPEYRNGVSGFDYERIRAEESLEREMEKYVLFAVNNFARAVTPEEEREKSGHEDVLLMKTLSEIEESQTKEERQKKHDNNVKNAITLYADADRRILQFFGGQSRFREKEDSLINLYSGEDLYKEIRKELYAIRNITFHYTTKADKDQTQKHDLAEYLFEEEFSDITELFREKYYANNVWKYYDVEVINTIMENIYCGRKYRAAQVPAFKNIISRPELPQVMNGFVKGNSLRRLMNCPDRDVINKYWSALFFVLKELYYYDFLQEQKKPEDNVKERFFRAIEKLSGQENDDKKQKAWESFGNRIDQIGRDRSFGAICQGLMIEYMLQNSDISMVQTETDNGKANNKKQIYKHYRTLLYNCIREAFIEYLREKWEELRTPVLTVKEWSKEEFCRADGLKHLSLFDHLKKTFNDAESGSSWYMAAHFINQKYLNHLLGSIRNYLQFTEDIEDRAISLGDCVDNKREEKNLRYRNTLEILEFVAQFCERTTNVMEDYFESNQEYAEYLSGFVDYNTTKKETDIEKALYSFCKQKFKVDGKEYMAGIYYDGENLIPNRNIIRANMYGNTSCLKPCMDRITLKEIRTMYADQNKLDLVLKEGVCHTEEEQKAYREYQNEKNRIELFDVCTYTQILNDMQARLIGWSYMRERDLMYYQLGYYYTKLFWTDSISEEDARRRLVGNLVNVEDGAILYQILAFNSYNLPIIANKNNTVTLLKDEGSIGGKAITAFFKNYENAEMIYEEALDLFENMDEHAAIINTRNYIEHFKYFIKSDRSMMDLYSEIYDRFFRHDHNRKKNVPDSLKNVLADNFMIVDIDMELGSKKVGEKKKGFREHKAARIEFTDSGIRSTDMTYTIKPDIKDNKKDKKVLVPARSEVFLKQFRKILEYRIQDKIQ

SEQ ID NO: 93 - protein, 1387 aa, Artificial
  Synthetic
MKLTKVEKARIAVSREKKDSGRIILYTNPEDVKKTSVTTMEQQVSKRIDQANKLYQVFFKSVIPVELNKHFAEISKIAAKCRNTEEFYKKACGYSGYEWTDAKQKKRTSQISRFSYTSSGKNMYVVMDNFVKEYMVQIWQEKDFRNAAVKILCCICDGKKFASKLEKVKKESPDTLKKFIEISGKCEGNPFVDYDTSFLEKVFTLVISQMVKNCDRKSYEQDDKEKIKKSIQKEIQWLSHVQSVTERSFGREGKTYLLFKIRNPYATEERLQTVLIRMRKTLKRGRNRDIAIVLLQGLAQMNQVTFTDTVKHLYQEEEKAFCDFIDAVNRDYYRVNIVKSVRNMDVKVQPDLNDNSILKLSGLGNIKKEALSDTLLRYAASADESDQVLLDIKKLLFEYFLPENSKETSKYTTVQNLWNIPYLPKIFFDYGFENEDSDDDNECAEDIETLCDVEPQYKINQHSLKRRIRYVNYGKYLQMTKNESDRERRYWIHYIKEFVEKNYVDSGRTLSEKNCYASSMMLNCWKEIIRYLCGKYIDIGKAVFHFTNLTAMPKPKDKIIYGQLEEQYKKGISSFDYEAIKAEETLQRDIVQSVVAAAFAFSKSVIDETKMEECQETNKEDILFLSENVLGSLLKENTIKLILRFYGGESSVAQKEYFDQQEIVQEMISHLKSIRNENFHYLDGAKKDNPHKYASILWKNDEMAYQKLTKQRYYANNVGLFYRAEEIQELVQELYSQKNITEAQIPAFRTVLKRKDLPGYMEELGILFPDNTQEKSKGDFEGTLYFLMKEIYYRDFIVKDKAAAYFFKAVDQNKEQSKKEDKHTERAAENFHRYVKSLEKKYNKKEISFGTVCQYIMMEYNQQNTTKQETEIYKHFKMLISLCIRKAFGNYIKETYRFLFHPIYSKQQGEPEYLDTLELESGVKEKNYEWFTLAHFLHPVQLNHLVGDLKSYIQYREDILRRIVFAEQRVYADQQKEVQQKVKTAKEILEVLEFVREVSGRVSNEYTDYYENEEEYAEFLYQYIDFRKREGKSAFESLKYFCQNILDSGTVVDLYADTENPKVLRNIELTRMYAGSNVKIPEYEKITEDEIKMYYQEKNSVALILSRGLCRNEKEQKKVIEFNWKKKRLTLNEITDVFSLVNDLLGKMISFSYLRERDQMYLLLGFYYMALCAENKSENHLGWKGETLDKLESSDSKFDIGGGLVLYQIVSAFNFGSKLLYISEDGRWKMAGGAFPGKYGRFENDYNHRTSLSKVIRLFENESYEREIIYWRDYVDHMKYYVNQNQSIMEIYSAFYSKVLGYSAKLRKSVVFNLQAALEKHHINPECIWMTSDGKCADIKLMKNLESQKFTYKLAKREGEKTERKICMNALNENFLKTIRTSLEYKK

SEQ ID NO: 94 - protein, 1101 aa, Artificial; identical to SEQ ID NO: 73
  Synthetic

SEQ ID NO: 95 - protein, 949 aa, Artificial; identical to SEQ ID NO: 43
  Synthetic

SEQ ID NO: 96 - protein, 1258 aa, Artificial
  Synthetic
MRGGHMKITKIDGISHYKEKEKGVLKAKDVLLNGEIKEIVKKRYDATIESKIYKEFIKLRKNRVEHNNEKSVLELIKSNIDKNEKEIKTLLLDEFKIKEKNKKYDKYMSDKNELDNDIQIYESVESLYFFIKEVYSGKNNDKWDISKIDLEKIMEKDNNLIMLGYKLKKNIKEDEYPYLYKNENREKSTPLYTLLKKLIEENKDSNQNIRESQEYRKIQKDFKEYKNIKINLLVKSILNNKVNIKYNTSNNNIEDSNSKREKEIIEFFKKMIEEKNKPILEDRLKLFKLEVFFDEEFLEEIKKLLDSDNLDKSDNKKIAELRGKIFSRIREKIKEDKNRYILKNIYFLELKKYIENNLSHKKENNKNNSNIGEEKSKELYLKFLKKILFIDDNNRISIEKLKSRIDDNFKNLLIQHVIEYGKIKYYVENDDYIKNIVKNGELKLETENLEYIRIRETLIRKMAVLVSFAANSFYNLFENITSDILTANINLDSDVIKIGNNRLKEKFLNYFFYSEEISDKEDFLKALKDSIYNVRNGVNHFDKMILGKYNNGLDLKDSDTIKDYFNFKKKEIQQDLKDRFISNNLQYYYTENEIKKYFEKYKFEILKTKASFAPNFKRILRKGENLSISEISDIYDFFKRYSENSDKSSEYNEFTKTRNFLLKELYYNNFYREFLSDGTKFEEAVKKVKNNKKNRIIGNKKSAGKSYDVIEDYNSSDDVLEYISRIHKSEMERIEINTEKNRKDTSKYIRDFIEEVFLEGFIKYLDNNNLNFLKNRNKVDKERKEIIRNLKIKIEGLDILNQNDSEILNLYLFFNMIDNKRISEFRNEMIKYKQFLTKRQNIKSKFLEIDIEKIEAIIEFVIITRGKLEILEGETKEQKKDNMNALFNKFYSSESEYDESLKKFIEETVLNNKKNTPFYSTDGKTPIVHSNLEKMRKYGTENFLSKVLKDEKYTLENMKIKEKFETEANDKFKEQKILEKVDKIKGNEKHKKLIEYYNDCRCYLHKEWIKNKKNKEEFEYKEIYEKIIEEIRKYNYLENKEKLQNVYLLHEITSDLMARNVAFINKWERDFKFLSIAIKENLKDSNDIQKIKEFLAPSLDTTSDEEHFNVKNYASKLKNIQGLHNNIISLIFIKNLDGWSNKIDNFKWLGFRNYISHFNHINGENSKESFINQLNRLVLLFSYDKKVQNHITKSIKTILEKYNIDIEFKISDDSKNFFEYQISNINSKKGKMLGKENYFELLDEEFVQNVKKMLEYED

SEQ ID NO: 97 - protein, 1118 aa, Artificial
  Synthetic
MKGGSMKITKVDGLSHYKKQDKGVLKKKRKDLDERKQREKIEERYNKQIESKIYKEFFRLKNKKRIEKEEDQNIKSLYFFIKEMYLNEKNEEWELKNINLEILDDKERVIKGYKFKEDVYFFKEGDKEYYLRTLLNNLIEKVQNENKEKVRKNKEFLDLKEIFKKYKDRKIDLLLKSINNNKINLEYKKENVNEEIYGINPTNDREMTFYELLKEIIEKKDEQKSILEEKLDNFDITNFLENIEKIFNEETEINIIKGKVLNELREYIKEKEENNSDNKLKQIYNLELKKYIENNFSYKKQKSKSKNGKNDYLYLNFLKKIMFIEEVDEKKEINKEKFKNKINSNFKNLFVQHILDYGKLLYYKENDEYIKNTGQLETKDLEYIKTKETLIRKMAVLVSFAANSYYNLFGRTENNILTQEISDDLLLGKIENEIYIKGEKNRRYVFKEKMLNYFFNPEIFGDNKIVEVLSAISSSIYNIRNGVNHFDKMVLGKYNNELDLKDSDTIKDYFNFKKKEIQQDLKDRFISNNLQYYYTENENNKAKFREAVEKVKKNKKRRGGKSYDVIGNYNFSDSISEYISYIHKSEMERIEINTEKNRKDTSKHIRDFIEEIFLEGFIEYLNNNNFKFLKNRNEVDKEREEIVRNLNIRIEGLDILNEDDSEILNLYLFFNMIDNKRISEFRNDMIKYKQFLAKRQNIDSKFLKIDIEKIEAIIEFVIITKEKLEILEGETKEQKKDNMNALFNKFYSSESEYDEKLKKFIEEAILGDKKNTPFYSTDGKTPIVHSKLEKMRKYGTENFLSKVLKNSKYTLNNMTAKEKFEAEVSDELKEYKILEKVSRFKEKGKPKKVIEYYNDCRCYLHKKWIEKKKSEEEFEHKEIYKKIIEEIRKYNYLENKEKLQNVYLLHEMLSDLLARNVAFFNKWERDFKFIVIAIKQFLRENDKEKVNEFLNPHKSDGSRDNFSVTNYRSKMKSIINNIHENFMSLLFLNNNLATGGIQVGRNNNFTWGALRNYIAHFEYLHEEKDTISFIGQANLLIKLFSYDKKVQNHILKSTKTLLEKYNIQINFEISNDKNEVFKYKIKNRLYSKKGKMLGKNNKFEILENEFLENVKTLLEYSK

SEQ ID NO: 98 - protein, 985 aa, Artificial
  Synthetic
LEKNKAHFKKESVNNTTDRVKGNNKKSLFYEYYRNSSKHQEYVNNIFEAFDKLYSNSHEDINNLFLEITKGSNNRNIRKIREVYHEILNKNKTEFEEELYKKIQDSISNFDKLLEIEPEIKELTKSQIFYKYYIDKVNLNEINIKYCFCHLVEIEVNQLLKNYVYSKRNVNKEKLENIFEYCKLKNLIKNKLVNKLNSYIRNCGKYNGYINNNNIIDSKKISEIRIKEAFLRSIIGVSSSAYFSLRNILNTDNTQDITNKVKGEVDKLYQENKKIELEERLKLFFGNHFDINNQQEIEDFLMNIDKIISSIRHEIIHFKMEANAQNIFDFNNINLGNKAKNIFSNEINEEKIKFKIFKQLNSANVFDYLSNKDITEYIGKAVFSFTNRNIPFVPSFTKIYNRVQDLANSLEIKEWKIPGESEGKDAQIYLLKNIYYGKFLDEFLNEKNGKFIRMKDEVIELNRNQNKKTGFYKLEKFEKIEETNPKKYLEIIQSLYMINIEEIDSEEKNIFLDFIQKIFLKGFFEFIKNNYNYLLELKKVQDKKNVFDKEMSKYTAGEKTLGDMEEINEITQKIKVAEIDKILNQTDKINCFYLLLKLLNYKEITELKGNLEKYQILSNTNIYKKELILLNIVNLDNNKVKIEDFEISAEEIGKFIEKISRNKKIKTFEELRNFEKRENTGEYYNVYSDDKNIKNMRNLYNIKKYGMLDLLERISEKANYFIKKEDLKEYSELRKQLEDEKTDFYKIQKDLHYEYQKKYKNFSKKNNTEDYEKYKESIENIEKYVHLKNKIEFNELNLLQSLLLKILHRLVGFTSIWERDLRFRLIGEFPDELDVEDIFDHRKIYRRTRGQICKKYDRFINTHTEYKNNNKMKNIKFYDNNPVRNYIAHFNYLPNPKYSILKMLKKLRELLDYDRKLKNAVMKSIKDILEEYGFEAEFIINPDKEIILNSVKSIKIIHLGKNDLKSHRNSKDLCKLVKAMFEYSK

SEQ ID NO: 99 - protein, 1161 aa, Artificial
  Synthetic
MKVTKVDGISHKKYIEEGKLVKSTSEENRTSERLSELLSIRLDIYIKNPDNASEEENRIRRENLKKFFSNKVLHLKDSVLYLKNRNEKNAVQDKNYSEEDISEYDLKNKNSFSVLKKILLNEDINSEELEIFRKDVEAKLNKINSLKYSFEENKANYQKINENNVEKVGGKSKRNIIYDYYRESAKHNDYINNVQEAFDKLYKKEDIENLFFLIENSKKHEKYKIRECYHKIIGRKNDKENFAKIIYEEIQNVNNIKELIEKVPDMSELKKSQVFYKYYLDKEELNDENIKYAFCHFVEIEMSKLLKNYVYKKPSNISNDKVKRIFEYQSLKKLIENKLLNKLDTYVRNCGKYNYYLQDGEIATSDFIARNRQNEAFLRNIIGVSSVAYFSLRNILETENENDITGRMRGKTVKNNKGEEKYVSGEVDKIYNENKQNEVKENLKMFYSYDFNVDNKNEIEDFFANIDEAISSIRHGIVHFNLELEGKDIFAFKNIAPSEISKKMFQNEINEKKLKLKIFRQLNSANVFRYLEKYKILNYLKRTRFEFVNKNIPFVPSFTKLYSRIDDLKNSLGIYWKTPKTNDDNKTKEIIDAQIYLLKNIYYGEFLNYFMSNNGNFFEISREIIELNKNDKRNLKTGFYKLQKFEDIQEKTPKEYLANIQSLYMINAGNQDEEEKDTYIDFIQKIFLKGFMTYLANNGRLSLIYIGSDEETNTSLAEKKQEFDKFLKKYEQNNNIEIPHEINEFVREIKLGNILKYTERLNMFYLILKLLNHKELTNLKGSLEKYQSANKEETFSDELELINLLNLDNNRVTEDFELEADEIGKFLDFNGNKIKDRKELKKFDTNKIYFDGENIIKHRAFYNIKKYGMLNLLEKISDEAKYKISIEELKNYSNKKNEIEKNHTTQENLHRKYARPRKDEKFTDEDYKEYEKAIGNIQKYTHLKNKVEFNELNLLQGLLLKILHRLVGYTSIWERDLRFRLKGEFPENQYIEEIFNFDNSKNVKYKSGQIVEKYINFYKELYKDNVEKRSIYSDKKVKKLKQEKKDLYIRNYIAHFNYIPHAEISLLEVLENLRKLLSYDRKLKNAVMKSVVDILKEYGFVATFKIGADKKIGIQTLESEKIVHLKNLKKKKLMTDRNSEELCKLVKVMFEYKMEEKKSEN

SEQ ID NO: 100 - protein, 1186 aa, Artificial; identical to SEQ ID NO: 58
  Synthetic

SEQ ID NO: 101 - protein, 1360 aa, Artificial
  Synthetic
MQMKISKIKNSRPGISVAENKNEESLSRQSLLYYAPVKDGKIRLESKDLEQHVTECNEKAQKLYNVITPEINFYRDENRQKMVENLARNFNAVINNALRSIRNPKEKKEQRVEKEVAFILNLSKKSIKMKKDVFVKSTDLIVKFPENNKYNKKNDKGTGSKEAYIQKMISDLVLRKLKNTLRKEVKLENGYRMQMTEIIISLMSAICLYGNAESFDPAILKAFFEKVDSDYTKYKYVEQIVKSIESQSAKLKVVEKDGRHLLISANADHRKKKYVFEFMRMYAAADEKEKRELTEHIQDLIGLYLCGKAGYENAENRFSDMTESHNCICGKIEEILNELEKPENLSQKKKENLKNTTVKVMALKYRAAVNYLADEVGKTVLGEIREKKVRSCADLYWIEYIDSTVEKLLLKSRNKDGYRYEIGFLSKHIWKEWTQYISGKYIEMGKGVYHFAIPDLSGNLEGEPISICEVKPEYRNGVSGFDYERIRAEESLEREMEKYVLFAVNNFARAVTPEEEREKSGHEDVLLMKTLSEIEESQTKEERQKKHDNNVKNAITLYADADRRILQFFGGQSRFREKEDSLINLYSGEDLYKEIRKELYAIRNITFHYTTKADKDQTQKHDLAEYLFEEEFSDITELFREKYYANNVWKYYDVEVINTIMENIYCGRKYRAAQVPAFKNIISRPELPQVMNGFVKGNSLRRLMNCPDRDVINKYWSALFFVLKELYYYDFLQEQKKPEDNVKERFFRAIEKLSGQENDDKKQKAWESFGNRIDQIGRDRSFGAICQGLMIEYMLQNSDISMVQTETDNGKANNKKQIYKHYRTLLYNCIREAFIEYLREKWEGLRTPVLTVKEWSKEEFCRADGLKHLSLFDHLKKTFNDAESGSSWYMAAHFINQKYLNHLLGSIRNYLQFTEDIEDRAISLGDCVDNKREEKNLRYRNTLEILEFVAQFCERTTNVMEDYFESNQEYAEYLSGFVDYNTTKKETDIEKALYSFCKQKFKVDGKEYMAGIYYDGENLIPNRNIIRANMYGNTSCLKPCMDRITLKEIRTMYADQNKLDLVLKEGVCHTEEEQKAYREYQNEKNRIELFDVCTYTQILNDMQARLIGWSYMRERDLMYYQLGYYYTKLFWTDSISEEDARRRLVGNLVNVEDGAILYQILAFNSYNLPIIANKNNTVTLLKDEGSIGGKAITAFFKNYENAEMIYEEALDLFENMDEHAAIINTRNYIEHFKYFIKSDRSMMDLYSEIYDRFFRHDHNRKKNVPDSLKNVLADNFMIVDIDMELGSKKVGEKKKGFREHKAARIEFTDSGIRSTDMTYTIKPDIKDNKKDKKVLVPARSEVFLKQFRKILEYRIQDKIQ

SEQ ID NO: 102 - protein, 1388 aa, Artificial
  Synthetic
MKLSKVTYRVKDKNAKYKKEYNVRAAVANNSENAGGVLYHVPGVDLIDLREQMLDRDRSVRLLYNIFNHIQTGTKPKKWGNDETLSVDENERKAKEQNIKIMNYKWREACSEYIEKSQSTINSVLFYSYEESGYKTKRMNDNEAIIVKMQYENRLSHFTGGKLEDFVAYTLRNSLVVSRYDNQEFDSVNAMVVFINNIGNGNISDKDKKTICKLADLIRNDFSKLTPNVQSSQGANMVRSVRNQNMVVQPQGDKVSFPLVSDEGKNTVTNKNVEKKGLNEFLLNYANLDDEERMEKLRKLRRIIDVYFSSPSHYQKDMDISLSDNIDKTKFDVWKKHETGKKNTELFVDIPDELLTAETEKIKLDAVLEKKARKRLTDSIRKQNMICYRYTRAVVEKYNSTENLFFENDSINQYWIHHIENAVERILKSCKAETLFKLRRGYLTEKVWKDAINLISIKYIALGKVIYNFTVDDIWKDKKVKNLGSIDEKIKHGITSFDYEMIKAQEALQRELAVNVAFAANNLARAVCDMTNLKDKESDFLIWNKKDIANKLKNKDDMASVSVVLQFFGGKSSWDIDAFREAYKGNKYNYEVCFIDDLRKAVYAARNESFHFKTALVNNDIWNTEFFGKLFIKETEICLDIEKDRFYSNNLPVFYSDNDLKKMLDHLYNNKVSRAAQVPSYNSVMVRKYFPENITSTLKYQKPGYDEDTLEKWYSACYYLLKEIYYNSFLQSDEALALFEESVNNLKGDNKDQELAVKNFRNNYKNIKSSCTSFSQVCQMYMTEYNQQNNQFKKVRSSKDSIVDKPIYQHYKLLLKKVIANAFASYLQHNEELFGFIGKPLKVNCLKEIDKEQFLPEWTSKKYVSLCEEVRKSPELQKWYIVGKFLNSRSLNLMAGSMRSYIQYVNDIKRRADGIGNELHVIAQNLDVVNKWVQVIEVCLLLSSRVSNEFEDYFYDKDDYAAYLKSYVDFDNSDMPSEYSALVEFSDQGKVDLYVDPSNPKVNRNIVQSKLFAADYILRDIIEPVSKDEIEDFYNQKDEITTCKIKGAELTDEEQKKILKYQKLKNRVELRDVVEYGEIINELLGQLINWSFMRERDLLYFQLGFHYNCLRNDSAKPEEYKNLVLDDISIKDAILHQIIGVYVNGVAIYAPGKDKNKLESQCVKGRVGGKIGAFCGYSLYLKLAADTLYNAGLEVFEVLPEHEDIINLRNGIDHFKFYLGGYRSIISLYSEVFDRFFTYDMKYQKNVLNLLQNILLRHNVIIEPIFESGIKKIGKDTKPCAKLSIRSIISDSFEYKIKDGNLIADAKDKRYLETIKKILFYPEVEPEVRILSSKDSFEQNNQYGYMKEKSENNKNKKNKKNNGNRDEKKNSDGLTYNPFLNLPFELPE

SEQ ID NO: 103 - protein, 1388 aa, Artificial
  Synthetic
MKLSKVTYRVKDKNAKYKKEYNVRAAVANNSENAGGVLYHVPGVDLIDLREQMLDRDRSVRLLYNIFNHIQTGTKPKKWGNDETLSVDENERKAKEQNIKIMNYKWREACSEYIEKSQSTINSVLFYSYEESGYKTKRMNDNEAIIVKMQYENRLSHFTGGKLEDFVAYTLRNSLVVSRYDNQEFDSVNAMVVFINNIGNGNISDKDKKTICKLADLIRNDFSKLNPNVQSSQGANMVRSVRNQNMVVQPQGDKVSFPLVSDEGKNTVTNKNVEKKGLNEFLLNYANLDDEERMEKLRKLRRIIDVYFSSPSHYQKDMDISLSDNIDKTKFDVWKKHETGKKNTELFVDIPDELLTAETEKIKLDAVLEKKARKRLTDSIRKQNMICYRYTRAVVEKYNSTENLFFENDSINQYWIHHIENAVERILKSCKAETLFKLRRGYLTEKVWKDAINLISIKYIALGKVIYNFTVDDIWKDKKVKNLGSIDEKIKHGITSFDYEMIKAQEALQRELAVNVAFAANNLARAVCDMTNLKDKESDFLIWNKKDIANKLKNKDDMASVSVVLQFFGGKSSWDIDAFREAYKGNKYNYEVCFIDDLRKAVYAARNESFHFKTALVNNDIWNTEFFGKLFIKETEICLDIEKDRFYSNNLPVFYSDNDLKKMLDHLYNNKVSRAAQVPSYNSVMVRKYFPENITSTLKYQKPGYDEDTLEKWYSACYYLLKEIYYNSFLQSDEALALFEESVNNLKGDNKDQELAVKNFRNNYKNIKSSCTSFSQVCQMYMTEYNQQNNQFKKVRSSKDSIVDKPIYQHYKLLLKKVIANAFASYLQHNEELFGFIGKPLKVNCLKEIDKEQFLPEWTSKKYVSLCEEVRKSPELQKWYIVGKFLNSRSLNLMAGSMRSYIQYVNDIKRRADGIGNELHVIAQNLDVVNKWVQVIEVCLLLSSRVSNEFEDYFYDKDDYAAYLKSYVDFDNSDMPSEYSALVEFSDQGKVDLYVDPSNPKVNRNIVQSKLFAADYILRDIIEPVSKDEIEDFYNQKDEITTCKIKGAELTDEEQKKILKYQKLKNRVELRDVVEYGEIINELLGQLINWSFMRERDLLYFQLGFHYNCLRNDSAKPEEYKNLVLDDISIKDAILHQIIGVYVNGVAIYAPGKDKNKLESQCVKGRVGGKIGAFCGYSLYLKLAADTLYNAGLEVFEVLPEHEDIINLRNGIDHFKFYLGGYRSIISLYSEVFDRFFTYDMKYQKNVLNLLQNILLRHNVIIEPIFESGIKKIGKDTKPCAKLSIRSIISDSFEYKIKDGNLIADAKDKRYLETIKKILFYPEVEPEVRILSSKDSFEQNNQYGYMKEKSENNKNKKNKKNNGNRDEKKNSDGLTYNPFLNLPFELPE

SEQ ID NO: 104 - protein, 1373 aa, Artificial
  Synthetic
MAKHLRPIGESYTDFLDETEFVRLGRGLHRGHHGVQIPPTELPSYLAEYRKALMRQVVAVLDKVVGKRRRLSGMHPEAYRDRVHLAEALWVRLVARVKEIGTPPDPSELLDLRRMWNAKAHPYAEYDVVPRAPLNDGNGQKILECREVDDPKIERSDFEGRWHGRFWQSEPGPVDYNAIADRIFAHLFDQEAVIGGGPRREGNVTVPDEDINGQPGPATGKGLIIARGQSIVKSASDPRRSSKKVQRTWDKAVERRYFGDDGKGGSDIAKAIYEELGDPATLADPIYASWFGSRLYDHFGSFKNSLPLELKDPFKEQIWALHNSVRQFYQRMAKSDRFRLALQNARSEVPDRSELLALLPKDHDHLLLVLGGKKKNAEMSELIRLGKLFVHASDVLHDFDANDAAALDAFKRRMSFLATSIGQSEIKQTETFARTWRGAVGLTLRTVKGLADPRGIIGTPDNRDLGTAGPMKDAFNKFDQPHFQQHMTIIFGNKELQAEGNPTRSSVFTANGDKDHQAELLWGFLCVVRSVRNRTNHYNVRRALLRLLDEGIVSPMPSDPKKERVENRNLCTVSPTALEAFRRLLNFDLAIQKEAVRTALEQAKASEFVEEGKLRGLVSELAGTEDMPALHIPRFSAVMDKVRRLADNRDVGLDPILSTLQRSLPPTDKQAESDAARCRYRLLLELYKSGFRSWFSGIQSNEENNREICHWAVKQVGRAKDARKSEYDKKTKRHYRSPNSLIDDLGLDKFDDLTDLLEALASQSTREHDQNLKYVPDARVQSQMSNRIEEFRQELFAHIFTKYLDTHDFGWIGAIEVRREACDLADVVSAFEVRDQKFDADWHSQFYAWLYMVPPIEASRLRHQMRKSAVMDDKWSTTLELTSGDRKTRDDHAQDVLADMDRLFSLYTKVQAAGFNGQEHESALGSKSLFYEDGNQFDEVYSPDTETHNKTFPGTRRGLRQLVRYAHLPALEGVFKKHRITKAEVETFVALYDENRRDPGSVAHMLRREKLRTEILRSIHDGPKPKDKDFWPKLEAKCLEYRTVATETAIYNFQANAARLNDHARLHQIVMRVVARLTDYALIWERDRLFAFVGMLYRQTGGTGINPAMRHAEKTNAPPRIGILVSDSALAKKLNSNSAEVFIPYLDTETGFDAPRFDDLCTLLSHEHAKEFRFHFLEVGEENSKDEARRLNEETMGHRKRPAFKRGTRRQGIRNDLAHHNVLDLAGGAGPNLTYVVNAVRSLLSYDRKLKNAVPKSIKRILGEEGLIIEWQMNYDRLKKPTVYPNVETHLTMVPPRHMTAPVSFTLPRASVRLASMVKAVFDFGSSGYGEERMIGGRTAKQAVYPDDFTRRFPQTPMGLKQATRLVFASENS

SEQ ID NO: 105 - protein, 1287 aa, Artificial
  Synthetic
MRIGKVQGRTFTGFDNARGKTLRRRLLTRPDNEARSLSEHLAHDPKALIGQAISRIDTIYQKPKTGKPTPEQFGHRDTLGWAYWKLLVASYPEVEGHRDLFVRRLHPYGDTPPKSHGQKEGEHQKGGKPQLEGRWHGVMAQHGKNPDQIAARLFDHLHNSELRFGGTASGEPRTRPGKEATPTGLIGARAKTIEHSVLPRDAKRFVAEWRGEDQERYAGARDIAAAISAGLNDKDQKSGSGRKSAVIGKLLSDHLETLTGNRKCRFDPKSTAETLELRDGESVDDRRRILELHAEVKATYKRMAAWKPAKLPRNSDELFRLVRQQADNRILNHLVRVGRISVYSEQSDALSESQFWTSGGQTQIKESEVFARLWIGAISRASYSMKAWLEPEGTVFNPSINDFDVTSSHNTNRILEDSGRLSNAMARRAIYFGETPEFDALGEEDQRVLVKKCLDALSACRNRTFHHGQRAKFLKEVRKGLKEKEADSAGPAAWEGIREVIQADARNLGARLLQDLTGAKVHSFATDPEFRHLYESVAATLTAGGELEAALPRLKNVLKRAEGVRCYLDTPSQRREGDESLIARLPVAPVPRELDDAATKARHSALLRLYDGPFRPWATELRGERLSDYAARAKRLATRLAKSTNTASPYPDSVEGRSVRLRDPITADTAPETLKTYLSALTAETATEFRVQKGYESDGEKAKEQAEFIEDFRRDMIALAFQDFIRDHGFAWLLDIASKAEPSNDAPNLPDPVDTGKDTVFEDWQALLYLFLHFVPADDVSQLLHQLRKWDALQDKYELAEPGETLGQTKADTRKIVGQFRDCLTLFLKTGDARFDGEGVELPLSDFQELFESPATFKELFLAEPAENDASETDDQDAPGEKHRVTRTRRGLRQILRYNHMPVLRDLFLAHKVTDAEVDGLQALEVDDPQTGESQIGAAQRIRTEIHHHTSNDKQISEAKVEEYRRALSTIERHRFLVGRVYLGDHIRVHKLMMDVMGRLVDFAGAWEREAADGDRKGFISRAIALPEVAEGYAADRLKTVARRVLDDGEARRIRNDLGHFNDLAPTSGPANLTFVVNRARRMMRHDRKRKNAVTKSVIEILNRQGLGIEWTMRNHELCEAKLWQNPVKHLGFATLEGRGKKWRRPFEARYGDAYMAMVAQLFDGTVTSPPAKGPPQSGKSGGKPGKGAEGGAKEKSRSPTRMEEGGVYEGRVAKAKSDKGFGFLLVEGAQEEIFLHIYGISGNRPARIENGQRYRFTLGIDRDRERRKERAWVAREAVRIDENRSK

SEQ ID NO: 106 - protein, 1101 aa, Artificial; identical to SEQ ID NO: 73
  Synthetic

SEQ ID NO: 107 - protein, 1382 aa, Artificial
  Synthetic
MKLSKEKHIRSAVANEEQNIGGVLYHVPGTDTIDLKDQMLIRDRDVKQLYKVFNQIQVGNKPKKWKKDEKLSPEENERRAQQKNIKMKNYKWREACSEYVESSQRTINDVLFYSYMEADKKIRNMRKNEDILKKMQEVTKLPKFSGGKLEDFVAYTLRKSLVVSKNSTQEFDSVAAMVVFLECIGKSNISDHEKEIVYKLLELIRKDFSKLDPNVKDSQGANIVRSVRNQNMIVQPQGDRFLFPQVSDKEKKTVTNKNVEKEGLNEFLLNYANLDDEKRAEILRKLRRILDVYFSAPNHYEKDMEITLSDNIDKEKFNVWKKYECGKKVTGLFVNIPDVLMEAEAENIKLDAVVEKRERKILADRVRRQNIICYRYTRAVVEKYNSNESLFFENDAINQYWIHHIENAVERILKNCKAGKLFKLRKGYLAEKVWKDAINLISIKYIALGKAVYNFALDDIWKDKKDKELGIVDERIRNGITSFDYEMIKAYENLQRELAVDIAFSVNNLARAVCDMSNLKDRESDFLLWKKEDIADKLKNKDDMASVSAVLQFFGGKSSWDINIFKEAYKGKNKYNYEVRFIDDLRKAIYCARNENFHFKTALVNNEKWNTELFGKIFERETEFCLNVEKDRFYSNNLYMFYPVSELRNMLDQLYSRSVSRAAQVPSYNSVFIRKNFPEDITNVLRYQKPGYDADTLGKWYSACYYLLKEIYYNSFLQSDKALQLFEKSVKTLSWDDEEQKRAVDNFKNHFSDIKSACTSLAQVCQIYMTEYNQQNNQIKKVRSSNDSIFDKPIYQHYKVLLKKAIANAFAAYLKYNKNLFGFIGKPFKANEIREIDKEQFLPDWTSTKYESLCIEVSGSQELQKWYIVGKFLNARSLNLMAGSMRSYIQYVTDIKRRAASIGNELHVSVQDVEKVEKWVQVIEVWSLLAFRTSNQFEDYFNDKDDYARYLKSYVDFSNADMPSEYSALVDFSNEEQSDLYVDPKNPKVNRNIVHSKLFAADHILRDIVEPVSKDNIEEFYDQKAEIVYCKIKGKDITAEEQKAVLKYQKLKNRVELRDIVEYGEIINELLGQLINWSFMRERDLLYFQLGFHYNCLRNNSEKKEAYQKIEVNGDSIKDAILYQIIGMYVNGVAVYAPDEKGDILKEQCTKGGAGGKISAFNRYSEYLGLDKLTLYNAGLEIFEVVAEHDDIIKLRNGIDHFKYYLGDYRSMLSIYSEVFDRFFTYDIKYQKNVLNLLQNILLRHNVIVEPVLESGFKTIGKQTTSGAKLSIRSIKSDTFQYKVKGGSLITDAKDERYLKTIRKILYYVENEEDNLKKSVVVTNADKYEKNKESDDQNKQKEKKNKDNKGKKNEETKSDAGKNNNERLSYNPFANLNFKLPN

SEQ ID NO: 108 - protein, 1382 aa, Artificial
  Synthetic
MKLSKEKHTRSAVANEEQNIGGILYRFPGKSIDGVKDQMLRRDKEVKKLYNVFNQIQVGTKPKKWNNDEKLSPEENERRAQQKNIKIENYKWREACSKYVKSSQKTINYVIFYSYGKAENKLRYMRKNEDILKKMQEEEKLPKFSGGKLEDFVAYTLRKSLVVSKYDTQEFDSVAAMVVFLECIGKSNISDHEKEIVCKLLELIRKDFSKLDPNVKGSQGANIVRSVRNQNMIVQPQGDRFLFPQVYAKENETVTNKNVEKEGLNEFLLNYANLDDEKRAESLRKLRRILDVYFSAPNYYEKDMDITLSDNIEKGKFNVWEKHECGKKVTDLFVDIPDVLMEAGAENIKLDAVVEKRERKVLNDRVRKQNIICYRYTRAVVEKYNSNEPLFFENNAINQYWIHHIENAVERILKNCKAGKLFKLRKGYLAEKVWKDAINLISIKYIALGKAVYNFALDDIWKDKKNKELGIVDERIRNGITSFDYEMIKAHENLQRELAVDIAFSVNNLARAVCDMSNLGNKESDFLLWKRNDIADKLKNKDDMASVSAVLQFFGGKSSWDINIFKEAYKGKKKYNYEVRFIDDLRKAIYCARNENFHFKTALVNDEKWNTELFGKIFKRETEFCLNVEKDRFYSNNLYMFYQVSELRNMLDHLYSRSVSRAAQVPSYNSVIVRTAFPEYITNVLGYQKPGYDADTLGKWYSACYYLLKEIYYNSFLQSDRALQLFEKSVKTLSWDDEEQKRAVDNFKKYFSDIKSACTSLAQVCQIYMTEYNQQNNQIKKVRSSNDSIFDQPIYQHYKVLLKKAIANAFADYLKNNKDLFGFIGKPFKANEIREIDKEQFLPDWTSRKYEALCIEVSGSQELQKWYIVGKFLNAMSLNLMVGSMRSYIQYVTDIKRRAASIGNELHVSVQDVEKVEKWVQVIEVCSLLASRTSNQFEDYFNDKDDYARYLKSYVDFSNVDMPSEYSALVDFSNEEQSDLYVDPKNPKVNRNIVHSKLFAADHILRDIVEPVSKDNIEEFYSQKAEIAYCKIKGKEITAEEQKAVLKYQKLKNRVELRDIVEYGEIINELLGQLINWSFMRERDLLYFQLGFHYDCLRNDSKKPEGYKNIKVDENSIKDAILYQIIGMYVNGVTVYAPEKDGDKLKEQCVKGGVGVKVSAFHRYSKYLGLNEKTLYNAGLEIFEVVAEHEDIINLRNGIDHFKYYLGDYRSMLSIYSEVFDRFFTYDIKYQKNVLNLLQNILLRHNVIVEPILESGFKTIGEQTKPGAKLSIRSIKSDTFQYKVKGGTLITDAKDERYLETIRKILYYAENEEDNLKKSVVVTNADKYEKNKESDDQNKQKEKKNKDNKGKKNEETKSDAEKNNNERLSYNPFANLNFKLSN

SEQ ID NO: 109 - protein, 918 aa, Artificial
  Synthetic
MKLSKEKHTRSAVANNGDIKSAEVNNGNTKSEEVNNGDIRSAVANEEQNIGGILYRFPGKSIDGVKDQMLRRDKEVKKLYNVFNQIQVGTKPKKWNNDEKLSPEENERRAQQKNIKMKNYKWREACSKYVESSQRIINDVIFYSYRKAENKLRYMRKNEDILKKMQEAEKLSKFSGGKLEDFVAYTLRKSLVVSKYDTQEFDSVAAMVVFLECIGKNNISDHEREIVCKLLELIRKDFSKLDPNVKGSQGANIVRSVRNQNMIVQPQGDRFLFPQVYAKENETVTNKNVEKEGLNEFLLNYANLDDEKRAESLRKLRRILDVYFSAPNHYEKDMDITLSDNIEKEKFNVWEKHECGKKETGLFVDIPDVLMEAEAENIKLDAVVEKRERKVLNDRVRKQNIICYRYTRAVVEKYNSNEPLFFENNAINQYWIHHIENAVERILKNCKAGKLFKLRKGYLAEKVWKDAINLISIKYIALGKAVYNFALDDIWKDKKNKELGIVDERIRNGITSFDYEMIKAHENLQRELAVDIAFSVNNLARAVCDMSNLGNKESDFLLWKRNDIADKLKNKDDMASVSAVLQFFGGKSSWDINIFKDAYKGKKKYNYEVRFIDDLRKAIYCARNENFHFKTALVNDEKWNTELFGKIFERETEFCLNVEKDRFYSNNLYMFYQVSELRNMLDHLYSRSVSRAAQVPSYNSVIVRTAFPEYITNVLGYQKPGYDADTLGKWYSACYYLLKEIYYNSFLQSDRALQLFEKSVKTLSWDDKKQQRAVDNFKDHFSDIKSACTSLAQVCQIYMTEYNQQNNQIKKVRSSNDSIFDQPVYQHYKVLLKKAIANAFADYLKNNKDLFGFIGKPFKANEIREIDKEQFLPDWTSRKYEALCIEVSGSQELQKWYIVGKFLNARSLNLMVGSMRSY

SEQ ID NO: 110 - protein, 1369 aa, Artificial
  Synthetic
MKISKEGHKRTAVAVMENRAGGVVYKVPGGSGIDLTGYLTERSENTKILYNVFNQIQAGTAPSEYEWKDYLSETENKKREAQKTVQKANYELRRACENYAKKANFTVRKIIFSEKPKRMLSDNQIISNMQNQRLPQFKGKIEDFVLITLRKSLVVSTYNKEIFDSRKAATVFLKNIGKENISVDDERQIKQLLALIREDYNKWNPDENSSDKKESSGTMIIRSIEHQDMVIQPEENKLSLSKISNVGKKTKTKQIEKAGLDAFLTEYAQIDESGRMECLKKLRRLLDTYFAAPSSYVKGTEVSLPENINFSSELNVWERHETAKKVNIYFVEIPEVLLKAEQNNNIINKVEKEHSLEQLRTDIRRRNIACYHFANALAADERYHRFFLENMAMNQYWIHHMENAVERILKKCNVGTLFKLKIGYLSEKVWKDILNLLSIKYIALGKAVYHFALDDIWNDSYDKKPGKINDFAIKGISSFDYEMVKAQEDLQREMAVDVAFSTNNLARATCQMENLSDRESDFLLWDDKTIARHVKYTEKGEILSAILQFFGGRSSWDESLFENAYSDSNYELQFLNDLRRAIYAVRNETFHFKTAAIDEGSWNTRLFGNLFEKEAGICLDVEKNKFYSNNLALFYTQKDLNVILDKLYGKECSRAAQILSYNTILPRKSFPDFLKQLLKLQEPVYDLTIQDQWYSACYYLFKEVYYNAFLQDSSAKALFEDAVKALKGTDIKQERAIENFTKRYWEISKNASLAEICQSFMTEYNQQNNKERKVQSANDSMFNEPIYQHYKMLLKEALKMAFASYIKNSKELEFVYNPTKELFKVSQDSFLPNWNSRKYDALISEVKNSPDLQKWYIVGKFMNARTLNLLIGSMRSYLQYVSDIQKRADGLGEYQLHLFAGNVEQVKKWIQILEVCLLLSVRISDKFTDYFKDKEAYASYLKGYVDFEDSAMPLDYSALLAFGNEGKIDLYVDASNPKVNRNIIQAKLYAPDMVLKKVVKKISQNECREFNEKKEQILQTKNKGDTVSWEEQQQILEYQRLKNRVELRDLSDYGELINELLGQLINWSYLRERDLLYFQLGFHYRCLMNESKKPDAYKTICTDTVFIENAVLYQIIAMYINGFPVYVPEKGKLKARCKTGSAGLKIGAFCQWASTVEKKKYELYNAGLELFEVVGEHDNIVELRNKIDHFKYYQGNDSILSLYGEIFDRFFTYDMKYRKNVLNHLQNILLRHNVVIKPIISKDQKKVGKGETKDRAAFLLEEINSDRFTYKVKEGERKIDAKNRLYLETVRDILYFPNRAVNDKGGDIIVRSQKAQDLNEKKADRDKNYDNSKNGKRGKGSNNQGKKEKNKESYSNHITWNPFVGIKLE

SEQ ID NO: 111 - protein, 1217 aa, Artificial
  Synthetic
MRITKVKVEAGENGNPGSDKGKMVFLQREVKKGSLVLEGFSSGASEIEGDHLSDRTTDIIQQYKNRSFGLSLLKQTVISKDKLQKVHCEKCKGKKPCEACKKKYEHKKVICSTLERIFKPVIEDVIYGKRIDYDYENIKFSSQLSLCKEELSNFLCHKFRDTLRYNDVLKVRREVNLIDCLGKFIDSKGRMESLRAYCDWAEAYIVRKKAMLEKSVQNNRIVFDYSETETTGLSKRKQALLKWGKDYEDKSRSNQGAISPIDAASSVHYNINLDDFHRAFKIDDLCNAFALTLEKQLALLKEQEEQKHKQPNLQNTYSAHNQPTETKTKLVLTSSVCALLKKTLQEHQATWVFGRQADLEKENVDPARDAFIKHRNDCQLYAYNLEVVKYLEHYFPIKRKKPLPDEESARYYLNPETIKKRIQFQLENAVRMQLLQQGKLKHHELDERVNSETLSSIKRDDFFVLNLVEACAFAASNIRNIIDHEQKKDILGKVDFKNSLASARFDGELCKYFYETNLKTDCQALWAMRGAVQQIRNGIVHYHKGLIESVFKLDTFEYENAVDSEKQYTHTVFKELLQKSLAKLDGYIVEQFRSNDVLSYYEASDLNKLFGEQSLSLHRHSIPFAPGFKNIYDSGAKLQQGSTGMRLNHFLLAENNEASLTREGKELSFSRKLSPAATKLSPAYPAFRFLLKLIYNHLFLNFFLNSEDNASFRNAVAFVLKNNREEAMQALRESAKKHPGSRSSKPLLPQKYAFREIRGVQNGEDIASYMSYLHSFSVQEQERKGDGNENGETVRRNTEKFLKQVFVKGFDTYLSRLPLHFLYTPNIEKVQEDKDHYVDLDIKVKHQIDCTKGAHISFFAFCKLLDGNHLSDLRNELLKYSATSKAMGSSVEYNFAFDVIELCLLDNDKRMEFDKEGQVVNSDTKSKLCKGTYKKLLAPFVKGDEKTNRIWMAFYFQSDKETPVDYGSLALIRKFGTQKLLEALITDEYKVTEQDYDEWVALKRDIDKKVQEREQLHAEWVEAGGKFVSESNTDVYFKLCKDIERYNWLDNKLHLVHLKQLHNFIIQILSRMARFVAMRDRDLAFVKELRFPAYHKSFFMQDDTLKECRNYIAHFNYVTTTASSSLIDILNSLRELMAYDRKLRNAVTKSIIHVFKQNGMNLQLGWVDNGRKSDSIHRLMVKSVKSEPIKLLKAELTIDQVPEEYCRLCKWLLEMKK

SEQ ID NO: 112 - protein, 1217 aa, Artificial; identical to SEQ ID NO: 111
  Synthetic

SEQ ID NO: 113 - protein, 982 aa, Artificial
  Synthetic
MKISKVNHVKTGVSAKPAIEGGMLYDYPSKEGGSKDLRKHIEEVNRKAQILYNVFNQVKEKDKKQNSVKDALKIANAYINSTVIFGIKKEFPENKICNNFSYAVNRPIRLGKENVFITSISVSVKEKSAKESAEYIVNNYLRNSLRRDKRAAETIVRILTALYDGKNYEKLIKKIEREDLAAVVSAVSRDYLKDGELEKIAVSIEKQKVLVQVGKDGYLIPSGAEHEKKAYIFNFMKKYAESDEEGQRKMLNHMKDLIRLYYTEEEVVSSEILDLINSRDNTPFSQKDIIRSYNEQIAEKVSAFLVERYQKTLKDAKSEDEEGWVRYISDKAEKLLSVKNLTQDRIHCDYLFKKTWEEWTSFIAKKYIDLGKATYNFAMGDISKVSKGESVAFGTVNEGFETGISSFDYERMKAEDSLNRAMIKYISFAVNIFDASVRNPEQRTGGKEDILLLKPENIVMYEDAVKRVLRYFGGISKFSESSLDVSDKNGFFTALKDELYAARNYAFHYVTGEAEKREKPVVTTLLDTEYMLVGSIFRKKYFSNNVPMFYRTADIDNLMSRLYKSNRVILAQMPSFNKVLSRNAVVDFANAYLAGDSKREMSQPEISEQFRSSFYFLLKEIYYYDFILKEDLLERFKNGVECAQASAIKKENNSRKHVAMKNAYRDFMSRADKLTKTKGITFGQFCQEIMTEYNQQNSQKQKKPSAVEKTYVVKGQTRTSVREVEDKEQIYKHYRTLLYAGIREAFLIYLKEEAAFGFLRSPKDGREKFRDLKEEDFSQGWTTECYTKLKDAIIEDKELSSWYVTAHFMNQKHLNHLIGEIKNYVQFIDDIEKRAKVTGNRVCSTEEKMGKFTSLLEVLEFCKLFCGQVSNNLEDYFANNEEYAKYVAGFVDYGGTSAALLQAFCRENKELNYYDELNPIPNRNIILSLLYGNTAVLSSSMKKVTLQEVKGYQKNKESLSGVFKNGACKDENEQRKMSNYQK

SEQ ID NO: 114 - protein, 1425 aa, Artificial; identical to SEQ ID NO: 3
  Synthetic

SEQ ID NO: 115 - protein, 1380 aa, Artificial
  Synthetic
MKLSKEKQIRSAVANKEKNTEGVLYRFPGDDIGGVQAQMLVRDRDVKQLYNVFNQIQLGNKPKEWMNDEKLSPEENERRAQQKNIKMKNYKWRKACSKYVESSQRAINDILFYSYKEADKKIRNMSKNEDILIKMQNAEKLSKFSSGKLEDFVAYTLRKSLVVSKYGNQEFDSIAAMVVFLECIGKSNISDHEKEIVYKLLDLIRKDFSKLDPSIQDSQGANIVRSIRNQNMIVQPQGDRFSFPQVSDEEKKTVTNKNVEKDGLNEFMLNYANLDEEKRAEVLRKLRRILDVYFSAPSHYEKDMDITLSDNVNKGKFYVWKKHECGKKENGLFVDIPDVLVEAEAESIKLDAVVEKRERKVLADRVRRQNIICYRYTRAVVEKYNSNEPIFFENDTINQYWIHHIENAVERILKNCKTGTLFKLRKGYLAEKVWKDAINLISIKYIALGKAVYNFALDDIWKDKKDKKLGIVDERIRNGITSFDYEMIKAHENLQRELAVNIAFSVNNLARAVCDMSNLGDKESDFLLWKRNDIADKLKNKDDMASVSAVLQFFGGKSSWDINIFKEAYKGKKKYNYEVQFIDDLRKAIYCARNENFHFKTALVNNEKWNTELFGKIFERETEFCLNVEKDRFYSNNLYMFYPVSELRNMLDYLYSRSVSRAAQVPSYNSVLVRTVFPEYITNVLRYQKPGYDADTLGKWYNACYYLLKEIYYNSFLQSDKALQLFEKSVRTLRWDDKKQQRAVDNFKNHFSDIKSACTSLAQVCQIYMTEYNQQNNQIKKVRSSNDSIFDQPIYQHYKVLLKKAIANAFAAYLKNNKNLFGFIGKPFKANEIREIDKEQFLPDWTSKKYESLCIEVSENQELQKWYIVGKFLNARSLNLMVGSMRSYIQYVTDIKRRAASIGNELHVCAQDIEKVEKWVQVIEVCLLLSSRTSNQFEDYFKDKDDYARYLKSYVDFSNADMPSEYSALVKFSEEEQSDLYVDTNNPKVNRNIVHSKLFAADHILRDIVEPVSKGNIEEFYSQKAEIVYCKIKGKEITAEEQKAVLKYQKLKNRVELRDIVEYGEIINELLGQLINWSFMRERDLLYFQLGFHYNCLRNDSEKPEEYEKIEADENSIKDAILYQIIGMYVNGVAIYAPEKNGDKLKEQCVQGRVGAKVTSFNRYSEYLGLDELTLYNAGLEIFEVVAEHDDIINLRNGIDHFKYYLGDYRSMLSIYSEVFDRFFTYDMKYQKNVLNLLQNILLRHNVIVEPVLESGVKTIGEQTKPGAKLSVRSIKSDTFEYKVKGGTLITNAKDKRYLETIRKILYYADAEDADSKKPVIVTNADKYEKNKESEDEDKQKGKENRGKKNTETRSDAEKNNNERLSYNPFANFDFKLPNK

SEQ ID NO: 116 - protein, 1143 aa, Artificial
  Synthetic
MRISKVKVKDGGKDKMVLVHRKTTGAQLVYSGQPVSNETCNILPEKKRQSFDLSIENKTLKRRDDVDKTKKGKYDIVRKIIKYGELPQSINDVDILEFLNHKFQKPVKYWKNGKEESFNLTLLIVEAVKTQDRQKLQPYYDWKTWYIQTKSDLLKKSIENNRIDLTENLSKRKKALLAWETEFTTSGKIDLTHYHKVYMTDVLCTALQKVEPSTDKKGKINTNAYHRGLKKALQTHQPAIFGTRQAPNNVNRADDRLSIYHLEVVKYLEHYFPIKTSKRRNTADDIEHYLKTQTLKTTIEKQMVNAIRANIIQQGKTNHHELKADTTSNDLIRIKTNEAFVLNLTGTCAFAANNIRNMVDNEQTNDILGKGDFIKSLLKDNTNGQLYSFFFGESLSTNKAEKETQLWGIRGAVQQIRNNVNHYKKDALKTVFNISNFENPTITDPKQQTNYADTIYKALFIKELEKIPNAFAQQLKTGGALSYYTIENLKSLLTTFQFSLCRSTIPFAPGFKKVFNGGINYQNAKQDESFYELMLERYLRKENFAEEAYNARYFLLKLIYNNLFLPGFTRDRKAFADSVGFVQMQNKKQAEKVNPKKREAYAFEAVRPMTAADSIADYMAYVQSELMQEQNKKEEKATDETRINFEKFVLQVFVKGFDSFLRAKEFDFVQVPQPQLTATASNQQKADKLNQLEASITADCKLTPQYAKADNATHIAFYVFCKLLDAGHLSNLRNELIKFRESVNEFKFHHLLEIIEICLLSADVVPTDYRDLYSSEADCLARLRPFIEQGADITNWSDLFVQSDKHSPVIHANIELSVKYGTTKLLEQIINKDPQFKTTEANFTAWNTAQKSIEQLIKQREDHHEQWVKAKNADDKEKQERKREKSNFAQKFIEKHGDDYLDICDYINTYNWLDNKMHFVHLNRLHGLTIELLGRMAGFVALFDRDFQMLDAKRISDLYQLKSFISFREITSELDKNNDITEINLIKDKEIIKRDGTPITEADRNSLKSCIQSKREYYQKTYFKEHTNPFTDRNYIAHFNYLSTNTGNHSLIKLINKLRDLLHYDRKLKNAVSKAFIDLFDKHGMILKLKLNTDHQLEVESLEPKKIYHLGSSAKDKPEYQYCTNQVMMAYCNMCRSLLEMKK

SEQ ID NO: 117 - protein, 1384 aa, Artificial
  Synthetic
MGNLFGHKRWYEVSDRENYKIKRKVKVKRNYDGNKYILNINENNNKEKIDNNEFIEELVNYKKNNNVLREFKRKFHARNILFKLKGNKRSIEDSNDFLKTEEVVLDKEIYGQSEKLRNEKGITKKDILKEINKQKIDNSVKKISMNTNSGKTIVINFSDKLKKDKDDYQITLNIISEDELERKRKIYDIFKMINMDLYQIIKEIIENQVQKVFKNRYYEEHLREKLLKDDKMDVILTNFMKIREKIESNPEIMGFVKFYLNVGGDKKKSENKKMFVEKILNINVDLTVEDIVDFIVKELKFWNITKRIEKVKEFNNKFLENKRNRTYIKSYVLLDKHEKFKIERENKKDKIVKFFVENIKNNSIKEKIEKILAEFKIDELTKKLEKGNCDTEIFGIFKKHYKVNFDSKKFENKSDEEKELYKIIYRYLKGRIEKILINEEKVRLKKMEKIEIEKILNESILSEKILKRVKQYTLEHIMYLGKLVHNKINMATVNTNDFFRLHAKEELDLELITFLASTNMELNKIFNGKEKVTDFFGFNLNGQKITLKEKVPSFKLNILKKLNFINNENNIDEKLSHFYSFQKKGYLLRNKILHNSYGNIQETINLKGEYENVENLIKELKVSNEEISKSLNLDIIFEGKVDIINKINSLEIGEYKDKKYLPSFSKIVPEIMRKFREINKDKSFDIESEKIILNAVQYVNKILYEKITSNEENEFIKTLPDKLVKKNNNKENNNSLSIEEYYKNAQISSSKGDKKAIKKYQNKVTNAYIEYLENTFAEVIDFSNFNLNFDEIKTKIEERKYSKSKITVDSISTNINITNDIEYIISIFALLNSNTYINKIRNRFFATSVWLDKQNSTKEYDYENIIDILDKILSINLLRENNIADILDLKNTIIEAKIVENNEECIKNYIFENNEEELKKRLFCEELVNKEDVLKIFEDKNFKFKNFIKKTGNENFTINFDILFNLECNSELNVKKVMGQNSQRLNLFIKNTIDEYKSKIKTSFSSEFLEKYKKEIDNLVEDTESENKNKFEKIYYPKEHKNELYIYKKNLFLNIGNPNFDKIYELISKDIKNANTEILFDDDIRKNKISEIDAILKNLNDKLNGYSNDYKAKYVNKLKENDDFFAKNMKNENYSSFGEFEKDYNKVSEYKKIRDLVEFNYLNKIESYLIDINWKLAIQMARFERDMHYIVNGLRELGIIKLSGYNTGISRAYPKRNGSDGFYTTTAYYKFFDEESYKKFEKICYGFGIDLSENSEINKPENESIRNYISHFYIVRNPFVDYSIAEQIDRVSNLLSYSTRYNNSTYASVFEVFKKDVNLDYDKLKTKFKLFDDEKNDNIKILKIENLIESKKVSVLELESYNSDYIKNLIIELLTKIENTNDTL

SEQ ID NO: 118 - protein, 1161 aa, Artificial
  Synthetic
MKVTKVDGISHKKYIEEGKLVKSTSEENRTSERLSELLSIRLDIYIKNPDNASEEENRIRRENLKKFFSNKVLHLKDSVLYLKNRKEKNAVQDKNYSEEDISEYDLKNKNSFSVLKKILLNEDINSEELEIFRKDVEAKLNKINSLKYSFEENKANYQKINENNVEKVGGKSKRNIIYDYYRESAKRNDYINNVQEAFDKLYKKEDIETLFFLIENSKKHEKYKIRECYHKIIGRKNDKENFAKIIYEEIQNVNNIKELIEKVPDMSELKKSQVFYKYYLDKEELNDKNIKYAFCHFVEIEMSQLLKNYVYKRLSNISNDKIKRIFEYQNLKKLIENKLLNKLDTYVRNCGKYNYYLQVGEIATSDFIARNRQNEAFLRNIIGVSSVAYFSLRNILETENENDITGRMRGKTVKNNKGEEKYVSGEVDKIYNENKQNEVKENLKMFYSYDFNMDNKNEIEDFFANIDEAISSIRHGIVHFNLELEGKDIFAFKNIAPSEISKKMFQNEINEKKLKLKIFRQLNSANVFRYLEKYKILNYLKRTRFEFVNKNIPFVPSFTKLYSRIDDLKNSLGIYWKTPKTNDDNKTKEIIDAQIYLLKNIYYGEFLNYFMSNNGNFFEISREIIELNKNDKRNLKTGFYKLQKFEDIQEKTPKEYLANIQSLYMINAGNQDEEEKDTYIDFIQKIFLKGFMTYLANNGRLSLIYIGSDEETNTSLAEKKQEFDKFLKKYEQNNNIKIPYEINEFLREIKLGNILKYTERLNMFYLILKLLNHKELTNLKGSLEKYQSANKEETFSDELELINLLNLDNNRVTEDFELEANEIGKFLDFNGNKIKDRKELKKFDTNKIYFDGENIIKHRAFYNIKKYGMLNLLEKISDEAKYKISIEELKNYSNKKNEIEKNHTTQENLHRKYARPRKDEKFTDEDYKEYEKAIKNIEEYTHLKNKVEFNELNLLQGLLLKILHRLVGYTSIWERDLRFRLKGEFPENQYIEEIFNFDNSKNVKYKSGQIVEKYINFYKELYKDNVEKRSIYSDKKVKKLKQEKKDLYIRNYIAHFNYIPHAEISLLEVLENLRKLLSYDRKLKNAVMKSVVDILKEYGFVATFKIGADKKIGIQTLESEKIVHLKNLKKKKLTTNRNSKELCKLVKVMFEYKMEEKKSEN

SEQ ID NO: 119 - protein, 1071 aa, Artificial
  Synthetic
MGSGKYRITKIARKWDKNENWEKIILKRIVGNKKIKYVNENNNKDVDITDTYYNILSKNNSKFLGSEEQFLFKVNKMDRNIKNDYVIIKDYNDEEFEKFDKKIFFSRKIKVNNEDREKICRNFYEDEREIMKKRLEEAKNFNNIIFNICNKIFKLEYLDYTDEKVYKIFQNEIKVKDVKNLKEAFKQQEKGLETDKLLAISFNKNRNNILLEFVQQITKQEFKNQKELENWFSHSGEKYCKKIFKIYSNMSQKEKYSKLLGHKNKSIASISEKKETLQRRLKLGNYSNYDLRKYYQKDYKEEAIRELKDKNKEELEREIEKLIKENYKIDELCDEISNLEFSFVDSKKENKDKMSEIIVKIKEHYKNNVNIEERLENKEKYILSMIHNYVKGRYRKCLELQQKENVDFENLEKRIKEIFDSNEVTKKLKKSISTAVSKVGYTLNTLLEVNPEKDILEKYEEVEKLCTNNSIKNLCTVYSEINNNEKLLKGMIYFIQGLRQQVLHPKILWEKNVHKAEKVKEKEKIVIRFQNEGKAYNKKRIEEYFENILEKIPNYFIEKYESNNVFNIYRNFIDEIFEIIDKFDFKESNSISYLFPKFHKIYKRICKSENINDRQNGARKYLLQTIYYYYFQYEIENNKNDIFKYLNLYKSKIKAKKISYSHIIDNKDVNNKNIEILYRNIQREGMLNNRLLQMNNEWIEFMVVQFSEFLTNKKLNWILDDLSEYKKKEKLDENDKNKLLKTLKQKMNKKITYSNDSYVFISLAQFLDLKEISNLIHDIKKFIQFREKNVSKYKPEKNKLYIKELRKVLYILKVMLEHKERVIQKHYLESYDENISIIYGKDIERKDIKDIKIKIKNENQEVINQPLYKSGNDENSSWIVLYGIEQAKRNGTFKFFEGFFNLNDDIKLCKENIEKYEELYNEKEENQRKVDEYISSEENNNIDEIEEINNNKQLFYYYKNMIYGDGLKKGYDFINDIYSHYLSWAYRVERDCKIYKIKEYENKKNFNEYKFKEYKSIKNFRNEIAHFNYFQKTNKSLLELLNDFYDIFDYNLKYQRDVQKVINNIKQCVHI

SEQ ID NO: 120 - protein, 1177 aa, Artificial
  Synthetic
MKITKVDGLSHYKKQDKGILKKKWRDLDERKQREKIEERYNKQIESKIYKEFFRLKNKKRIEKEEDQNIKSLYFFIKEMYLNEENEEWELKNINLEILDDKERVIKGYKFKEDVYFFKEGDKKYYLRTLLNNLIEKIQNENRDKVRKNKEFSDLKEIFKKYKDRKIKLLLESINNNKINLEYKKENVNEEIYGINPTNDREMTFHELLKEIIEKKDEQKSILEEKLDNFDITNFLENIEKIFNEETEINIIKGKVLNELREYIREKEENNSDYKLKQIYNLELKKYIENNFSYKKQKSKSKNGKNDYLYLNFLKKIMFIEEVDEKKGINKEKFKNKINSNFKNLFVQHILDYGKLLYYKENDEYIKNTGQLETKDLEYIKTKETLIRKMAVLVSFAANSYYNLFGRTENNILTQEISDDLLLGKIENEIYIKGEKNRRYVFKEKMLNYFFNPEIFGDNKIVEVLSAISSSIYNIRNGVNHFDKINLGQYNNLDLSEIKKYFIEKRDKIKEKVKEKFSSNNLQYYYAKKEIENYFKAYEFEILKEKIPFAPNFKRIIKKGEDLFNNKKNKKYEYFKNFDKNIAEEKKEFLKTRNFLLKELYYNNFYKEFLSKKEEFKKVVIEVKEEKKNRGNINNKKSGVSFQSIDDYDTKINISDYIASIHKKEMERVEKYNEEKQKDTAKYIRDFVEEIFLTGFINYLEKDKRLHFLKEEFSILCNNNNNVVDFNININEEKIKEFLKENDSKTLNLYLFFNMIDSKRISEFRNELIKYKQFTKRRLDEKKEFLGIEIELYETLIEFVILTREKLDTKKSEEIDAWLVDKLYVKDNNEYKEYEEILKLFVDEKILSSKEAPYYATDNKTPILLSNFEKTRKYGTQSFLSEIQSNYKYSKVEKENIEDYNKKEEIEQKKKSNIEKLQDLKVELHKKWEQNKITEREIKKYNDTIKEIREYNYLKNKEELQNVYLLHEMLSDLLARNVAFFNKWERDFKFIVIAIKQFLRENDKEKVNEFLNPHKSDGSRDNFSVTNYRSKMKSIINNIHENFMSLLFLNNNLATGGIQMGRNNNFTWGNLRNYIAHFEYLHKEKDTISFLNQANLLIKLFSYDKKVQNHIIKSMKTLLEKYNIEIGFEISNDSEEIFEYKIKYINSKKGKMLGKNNEFEILENEFVRNVKALLEYSK

SEQ ID NO: 121 - protein, 1149 aa, Artificial; identical to SEQ ID NO: 8
  Synthetic

SEQ ID NO: 122 - protein, 1187 aa, Artificial
  Synthetic
MKVTKIDGLSHKKFENEGKLIKIKDASQKNETKERLEKLKEIKLGNYIKNPDKTKDKDNKKRRKELKEYFSEITLRKENGKYVLLKSKKLKKINNNIKDTDIKVKHKKEEVFDVLKEILQLNLLANDVEEKIQFDSIKLKNVFGKDFVKKELQIKSIEESLEKNKADYRKEFIETENNKYGNVKGENKKNCIYEYYKKSKTHEKFRKNITEAFEKLYTEENIKELYSKIEEVLKKTHLKSIVREFYQNEIIGESEFSEKGEDGISILYNQIIRSNEKKEKFVKFLENIENLQLKELTKSQIFYKYFLENEELDDENIKNVFCYFVEIEVNDLLKGNVYRVSKIYENKIKNIFEYNKLKKLVVNKLKNKLNNYVRNCGKYNYHMENGDIATSDINMRNRQTEAFLRSMIGVSSFGYFSLRNILGVNDDDFYEIEEDLTEDERKNESNVLKKAKEDITSKSIFEKVVDKSFEKKGIHSIRENVKMFYGVSFDKANEDELKQFFVNMLNAITSIRHRVVHYNMNTNSENIFNFSDIEVSRLLKNIFEKETDKRELKLKIFRQLNSAGVFDYWEDWKIEKYLKNIEFKFVNKNIPFVPSFTKLYNRIDNLKGSNALNLGFINIPKRKEARDSQIYLLKNIYYGEFVEKFVNNNDNFEKIFREIIEINKNAGTNTKTKFYKLEKFETLKANTPTEYLEKLQSLHQINYDKEKIEEDKDVYVDFVQKIFLKGFINYLQKSNSLKLLNLLNLKKDEVINSEKSSYDEKLKQWENNGSKLSEMPKEIYRYIKEININKTNYSDRMSIFYLLLKLIDHKELTNLRGNLEKYESMNKNKIYSEELNIVNLVSLDNNKVRTNFSVEAEDIGKFLKTETSIKLNNFSKMFADEQNVIKHRSFYNIKKYGILDLLEKIVAKADLKITKEEIKKYENLQNELKRNDFYKIQEKIHRKYNQKPNLISRTENKKDFNDYKKAIENIQNYTQLKNKIEFNDLNLLQSLLFRILHRLAGYTSLWERDLQFKLKGEFPEDKYIDEIFNSDGNNNQKYKNGGIADKYADFLIEKEEEKSGEILKKNQRNKRKKKIKEDLEIRNYIAHFNYFPDATKSILELLEELRELLKYDRKLKNAVMKSVKDIFKEYGFIVEFGISHESNSKKIKVCDVKSEEIKHLKNNGLVTTRNSEDLCELVKVMLEYKKS

SEQ ID NO: 123 - protein, 1168 aa, Artificial
  Synthetic
MKITKIDGISHKKYIKEGKLVKSTSEENKTDERLSELLTIRLDTYIKNPDNASEEENRIRRENLKEFFSNKVLYLKDGILYLKDRREKNQLQNKNYSEEDISEYDLKNKNNFLVLKKILLNEDINSEELEIFRNDFEKKLDKINSLKYSLEENKANYQKINENNIKKVEGKSKRNIFYNYYKDSAKRNDYINNIQEAFDKLYKKEDIENLFFLIENSKKHEKYKIRECYHKIIGRKNDKENFATIIYEEIQNVNNMKELIEKVPNVSELKKSQVFYKYYLNKEKLNDENIKYVFCHFVEIEMSKLLKNYVYKKPSNISNDKVKRIFEYQSLKKLIENKLLNKLDTYVRNCGKYSFYLQDGEIAISDFIVGNRQNEAFLRNIIGVSSTAYFSLRNILETENENDITGRIKGKTVKNNKGEEKYISGEIDKLYDNNKQNEVKKNLKMFYSYDFNMNSKKEIEDFFSNIDEAISSIRHGIVHFNLELEGKDIFTFKNIVPSQISKKMFQDEINEKKLKLKIFKQLNSANVFRYLEKYKILNYLNRTRFEFVNKNIPFVPSFTKLYSRIDDLKNSLCIYWKIPKANDNNKTKEITDAQIYLLKNIYYGEFLNYFMSNNGNFFEIIKEIIELNKNDKRNLKTGFYKLQKFENLQEKTPKEYLANIQSFYMIDAGNKDEEEKDAYIDFIQKIFLKGFMTYLANNGRLSLMYIGNDEQINTSLAGKKQEFDKFLKKYEQNNNIEIPHEINEFVREIKLGKILKYTESLNMFYLILKLLNHKELTNLKGSLEKYQSANKEEAFSDQLELINLLNLDNNRVTEDFELEADEIGKFLDFNGNKVKDRKELKKFDTKKIYFDGENIIKHRAFYNIKKYGMLNLLEKISDEAKYKISIEELKNYSNKKIEIEENHTTQENLHRKYARPRNDEKFNDEDYKKYEKAIRNIQQYTHLKNKVEFNELNLLQSLLLRILHRLVGYTSIWERDLRFRLKGEFPENQYIEEIFNFDNSKNVKYKNGQIVEKYISFYKELYKDDTEKISIYSDKKVKELKKEKKDLYIRNYIAHFNYIPNAEVSLLEVLENLRKLLSYDRKLKNAVMKSVVDILKEYGFVVKFKIGADKKIEIQSLKSEEIVHLKKLKLKDNDKKKEPIKTYRNSKELCKLVKVMFEYKMKEKKSEN

SEQ ID NO: 124 - protein, 1181 aa, Artificial
  Synthetic
MCMKITKIDGVSHYKKQDKGILKKKWKDLDERKQREKIEERYNKQIESKIYKEFFRLKDGKRITREEKDQNIKSLYFFIEELYLSKKNEEWELKNINLEILDDKERIIKGYKFKEDVYFFKEGDKKYYLRTLLNNLIEKIQNENRDKVRKNKEFSDLKEIFKKYKDRKIKLLLESINNNKINLEYKKENVNEEIYGINPTNDREMTFYELLKEIIEKKDEQKSILEEKLDNFDITNFLENIEKIFNEETEINIIKGKVLNELREYIREKEENNSDYKLKQIYNLELKKYIENNFSYKKQKSKSKNGKNDYLYLNFLKKIMFIEEVDEKKGINKEKFKNKINSNFKNLFVQHILVYGKLLYYKENDEYIKNTGQLETKDLEYIKTKETLIRKMAVLVSFAANSYYNLFGRVSGDILGTEVVKSSKTNVIKVGSHIFKEKMLNYFFDSEIFDANKIVEILESISYSIYNVRNGVGHFNKLILGKYKKKDININKRVEEDLNNSEEIKGYFIKKRGEIEKKIKERFLSNNLEYYYAKERIENYFEVYEFEILKEKIPFAPNFKRIIKKGEDLFNNKKNKKYEYFKNFDKNSAEEKKEFLKTRNFLLKELYYNNFYKEFLSKKEEFKKIVIEVKEEKKNRGNNKKSGVSFQSIDDYDTKINISDYIASIHKKEMERVEKYNEEKQKDTAKYIRDFVEEIFLTGFINYLEKDERLHFLKEEFSVLCNSNNNIIDFNVNINEEKIKEFLKENDSKTLNLYLFFNMIDSKRISEFRNELIKYKQFTKKRLDEEKEFLGIKIELYETLIEFVILTREKLDTKKSEETDAWLVDKLYVKENNAYKEYEEILKLFVDEKILSSKEAPYYATDNKTPILLSNFEKTRKYGTQSFLSEIQSNYKYSKVEKENIEDYNKKEEIEKKEKSNIEKLHDLKVELHKKWEKNKITEKEIKKYSDTIKEIREYNYLKNKEELQNVYLLHEILSDLLARNVAFFNKWERDFKFIVIAIKQFLRENDKGKVNEFLNPPDDSNGKKVYFSVSRYKNTVENIDGIHKNFMNLIFLNNKFMNRKINRINCTIWVYFRNYIAHFVYLHTKNEKISLINQINLLIKLFSYDKKVQNHILKSTKTLLEKYNIQINFEISNDKNEVFKYKIKDRLYSKKGKMLGKNNKFEILEKEFLENVKTLLECSK

SEQ ID NO: 125 - protein, 1143 aa, Artificial; identical to SEQ ID NO: 11
  Synthetic

SEQ ID NO: 126 - protein, 1101 aa, Artificial; identical to SEQ ID NO: 73
  Synthetic

SEQ ID NO: 127 - protein, 1144 aa, Artificial
  Synthetic
MRVSKVKVKVGWGRNSERMVFMRRTSKIGSLVYEDEQRSGKPETDDKTESILPDKKRESFILSIVNKTIPKKEIVKKNLGKGFVKEYYDAIAGIINSFLEKKIVDRKHYIIVNKLTEEEIKQYLNHRFQEANYKYVRDKEEVNFNLSKLLKESAKSNSTAPLQPYKEWAEWHIETKSVRLIRSIQNNRLVIDTQEEAENISPRKRALLKWENEFLLSHKLDLQDMEKTYLIDDLIHALHEVTYTISDKGFINGNEYHRFLKKALQSHQQNIFGSRETPNKVNRENAELYSYNMEVVKYLEHYFPIKKTNRRNTPEVKDYYLNGIKDRVRKQLENAVRNNLVRQGKYTLHTLTTDTANSDNLSKIKADEGFALTMLNQCAFAANNVRNIIDPTQVGDIIGKDDFIYSISDRHRIPSEQVFPLFFGLDATLKQDYVNHLWAMRGAVANIRNNIIHYRANALDTIFNIEKYELKNKDEYKYFHQDTSFGTLLQAEMENVSESLAKQLMTGNVLEYYPMQELKSFFSKNSISLYRSVIPFAPGFKRVMKKGENYQNADKKENKKDSKDGYYDLKIESFLPQESFTKEAYDARYFLLKLIYNNIFLPKFTESTDWFKSTVNGVIALNREENVRKGKKHKIAFAEIRLMDSIDTIGTYAAYLQSCAIIEANKKPDAAKDETVLLNFEKLILQIFIKGFDDFLRRNGVLKFVQQPSLQFKSGAKDETTQRKDWAKEIEGSLRAPVNEINPTESSHISFYVFCKLLDASHLNDLRNELIKYYRSQSHRPQKIKNIKYLLSIIELCLLSVDASELNKLFTDANNSINDRLLAFLEKNKTVTDYEDLYTQSDNETMVLHRTIAKTYKYGTRKVLEQVIDSNPSYRVTVGEYQEWRSLKENVEEWIARREKLHAKWVKVERVPKMKEGEMTGDMKEYVKICSAIDRYNWLDNKVHLEHINKLHNLTIDILGRMAGFNTLFERDLQYYCNCNEKVRSLLKPESSEGFDFSKGLPKFTEEQNSILFQTFLVEGYRDTRNFVAHFNFLNSFEDSYSKNRYSLIDVINRLRKQFKYDRKLKNAVSKAIIKLFEKHGMVLILSFPEEAHELVVKDVFPRKITHFSKLKLDKKIEQKPKVETDMVPKEFCAMCKSLLELNK

SEQ ID NO: 128 - protein, 1387 aa, Artificial; identical to SEQ ID NO: 93
  Synthetic

SEQ ID NO: 129 - protein, 1380 aa, Artificial
  Synthetic
MKLSKEKQIRSAVANKEKNTEGVLYRFPGADIGGVQAQMLVRDRDVKQLYNVFNQIQLGNKPKEWMNDEKLSPEENERRAQQKNIKMKNYKWRKACSKYVESSQRAINDILFYSYKEADKKIRNMSKNEDILIKMQNAEKLSKFSGGKLEDFVAYTLRKSLVVSKYGNQEFDSIAAMVVFLECIGKSNISDREKEIVYKLLDLIRKDFSKLDPSIQDSQGANIVRSIRNQNMIVQPQGDRFSFPQVSDEEKKTVTNKNAEKDGLNEFMLNYANLDEEKRAEVLRKLRRILDVYFSAPSHYEKDMDITLSDNVNKEKFYVWKKHECGKKENGLFVDIPDVLVEAEAESIKLDAVVEKRERKVLADRVRRQNIICYRYTRAVVEKYNSNEPIFFENDTINQYWIHHIENAVERILKNCKTGTLFKLRKGYLAEKVWKDAINLISIKYIALGKAVYNFALDDIWKDKKDKKLGIVDERIRNGITSFDYEMIKAHENLQRELAVNIAFSVNNLARAVCDMSNLGDKESDFLLWKRNDIADKLKNKDDMASVSAVLQFFGGKSSWDINIFKEAYKGKKKYNYEVQFIDDLRKAIYCARNENFHFKTALVNNEKWNTELFGKIFERETEFCLNVEKDRFYSNNLYMFYPVSELRNMLDHLYSRSVSRAAQVPSYNSVLVRTVFPEYITNVLRYQKPGYDADTLGKWYNACYYLLKEIYYNSFLQSDKALQLFEKSVRTLRWDDKKQQRAVDNFKNHFSDIKSACTSLAQVCQIYMTEYNQQNNQIKKVRSSNDSIFDQPIYQHYKVLLKKAIANAFAAYLKNNKNLFGFIGKPFKANEIREIDKEQFLPDWTSKKYESLCIEVSENQELQKWYIVGKFLNARSLNLMVGSMRSYIQYVTDIKRRAASIGNELHVCAQDVEKVEKWVQVIEVCLLLSSRTSNQFEDYFKDKDDYARYLKSYVDFSNADMPSEYSALVKFSEEEQSDLYVDTNNPKVNRNIVHSKLFAADHILRDIVEPVSKGNIEEFYSQKAEIVYCKIKGKEITAEEQKAVLKYQKLKNRVELRDIVEYGEIINELLGQLINWSFMRERDLLYFQLGFHYNCLRNDSEKPEEYEKIEADENSIKDAILYQIIGMYVNGVAIYAPEKNGDKLKEQCVQGRVGAKVTSFNRYSEYLGLDELTLYNAGLEIFEVVAEHDDIINLRNGIDHFKYYLGDYRSMLSIYSEVFDRFFTYDMKYQKNVLNLLQNILLRHNVIVEPVLESGVKTIGEQTKPGAKLSVRSIKSDTFQYKVKGGTLITDAKDERYLETIRKILYYADDEDADTKKPVIVTNADKYEKNKESEDEDKQKGKENRGKKNTETRSDAEKNNNDRLSYNPFANFDFKLPNK

SEQ ID NO: 130 - protein, 1330 aa, Artificial
  Synthetic
MKREKNITIMKISKVNHRRTAVALNGDKSELGGILYEAPVQKDKNGNYNDVIAETGKVVNEALDKKSRLYTPFNNQKVIIDKNLQRYANNLKRCYINFVKQYVNNKSFNYKAMQFIPDIQNPKTNDAVNYRTDRDNVYNKNKYYDKQTKSKSKKFIYEKIVIPQNEQNIVISALVNCSLRKSLRKDVSYKTKSGEIKTYNLPELVKKSMRFYCLEGQREPDEKEKYEMYILFSYMKEDKRTKNTDLLVKSISNQNTKVKVEDIDGNKLLKLSIADTKKKPLWEYLIKYADSSRQRELMYDIRKKIILYVAGIEEYENIKEDSGLSKVSWSKYNISDNKMFFDINSCTDKRKQNLEIKIREANIEHYRNASSKLCDDESIFWFQHFEGVIETLFSKKSKISEERLGCAYICDYLWKDFLSYLAAKYIDLGKGVYHFTMKDKLDMLNKNEAVTDLRFGIVSEKYEKGITSFDYERIKAEEELDRNIAAYVTFAADIFAKSVIKSDYRTKKDNNSDVLQYSDKEFRNSEVIRDNAEKNILQYWGGYSRWCTENSKLPENNKVSDFGKLDVSDLCIDIKKHLAGIRNSSVHYTTKIKNESAADGSNVKILFEKDLADINIIYADKYYSNNVWMFYSLEDINKLIAFLYKEKRVIRQVQIPSFSRILKRKAMQDVINEIFKDDFDENIVNPELKEKYRNSLYFMLKEIYYNAFIIQPELKEKFKDKIKTMKSELYNKLKTIDKKEYKALYCMLSNEESALKNFADRIYSVDGDNVSFADICKILMTDYNMQNQEKKNIESMEQKKKNKGKDENYKHFPLLLHKVLKELFIEYLKQTHELEFLRNNICIKSDVTMESFESQIKGVEIYKDLKEKIDKNNSLLDWYVIAHFLMPKQLNHLIGNIKNYIQFATNIDKRAESVKNLTESGMVKRIQYYDDIVRTLEFSAQYIGKISNNINDYFNSEDEYVSFLSKYVGFINDKSEDVLTELKDFCREKINNGSQIIGIYYGGDNVIINRNVIYAQMYSNAEVFSNIYKKVTKNDIINYYEKQNDLKDVFKSGVCQNEDEQRSLCEFQQLKNRIELTELSTYADMVNDFMAQFVEWAYLRERDLMYFQLGIHYIRLFYSDNVLDEKYHKLSDNVIDIEEGALLYQIVAMYDYELRIFETDNSGNAKRIGQGGPGKSIPVFLKKYCSGTDVYECGLELFEDINQHEHIIRFRNDIAHMRYMSNQAMNIMSIVSNIYKSFFAYDTKLKKSISLVFKNILMRYGVIADLVFSYNNKNQSIKDDMDINIINIKNLKSDKYVYKIVNEDIVKQVEIEIRNQVFLEQLHNLLYFSR

SEQ ID NO: 131 - protein, 1382 aa, Artificial
  Synthetic
MKLSKEKHTRSAVANEEQNIGGILYRFPGKSIDGVKDQMLRRDKEVKKLYNVFNQIQVGTKPKKWNNDEKLSPEENERRAQQKNIKMKNYKWREACSKYVESSQRIINDVIFYSYGKAENKLRYMRKTKDILKKMQEAEKLSKFSGGKLEDFVAYTLRKSLVVSKYDTQEFDSVAAMVVFLECIGKNNISDHEREIVCKLLELIRKDFSKLDPNVKGSQGANIVRSVRNQNMIVQPQGDRFLFPQVYAKENETVTNKNVEKEGLNEFLLNYANLDDEKREESLRKLRRILDVYFSAPNHYEKDRDITLSDNIEKEKFNVWEKHECGKKETGLFVDIPDVLMEAEAENIKLDAVVEKRERKVLNDRVRKQNIICYRYTRAVVEKYNSNEPLFFENNAINQYWIHHIENAVERILKNCKAGKLFKLRKGYLAEKVWKDAINLISIKYIALGKAVYNFALDDIWKDKKNKELGIVDERIRNGITSFDYEMIKAHENLQRELAVDIAFSVNNLARAVCDMSNLGNKESDFLLWKRNDIADKLKNKDDMASVSAVLQFFGGKSSWDINIFKEAYKGKKKYNYEVRFIDDLRKAIYCARNENFHFKTALVNDEKWNTELFGKIFERETEFCLNVEKDRFYSNNLYMFYQVSELRNMLDHLYSRSVSRAAQVPSYNSVIVRTAFPEYITNVLGYQKPGYDADTLGKWYSACYYLLKEIYYNSFLQSDRALQLFEKSVKTLSWDDEEQKRAVDNFKKYFSDIKSACTSLAQVCQIYMTEYNQQNNQIKKVRSSNDSIFDQPIYQHYKVLLKKAIANAFADYLKNNKDLFGFIGKPFKANEIREIDKEQFLPDWTSRKYEALCIEVSGSQELQKWYIVGKFLNARSLNLMVGSMRSYIQYVTDIKRRAASIGNELHVSVQDVEKVEKWVQVIEVCSLLASRTSNQFEDYFNDKDDYARYLKSYVDFSNVDMPSEYSALVDFSNEEQSDLYVDPKNPKVNRNIVHSKLFAADHILRDIVEPVSKDNIEEFYSKKAEIAYCKIKGKEITAEEQKAVLKYQKLKNRVELRDIVEYGEIINELLGQLINWSFMRERDLLYFQLGFHYDCLRNDSKKTEGYKNIKVDENSIKDAILYQIIGMYVNGVTVYAPEKDGDKLKEQCVKGGVGVKVSAFHRYSKYLGLNEKTLYNAGLEIFEVVAEHEDIINLRNGIDHFKYYLGDYRSMLSIYSEVFDRFFTYDIKYQKNVLNLLQNILLRHNVIVEPILESGFKTIGEQTKPGAKLSIRSIKSDTFQYKVKGGTLITDAKDERYLETIRKILYYAENEEDNLKKSVVVTNADKYEKNKESDDQNKQKEKKNKDNKGKKNEETKSDAEKNNNERLSYNPFANFDFKLLN

SEQ ID NO: 132 - protein, 1101 aa, Artificial; identical to SEQ ID NO: 73
  Synthetic

SEQ ID NO: 133 - protein, 1412 aa, Artificial; identical to SEQ ID NO: 53
  Synthetic

SEQ ID NO: 134 - protein, 1116 aa, Artificial
  Synthetic
MGNLFGYKKWYKVDKIIKGKEVKVEVRIKRKYLDNESKYVLNINKQKEEYDENKITDKEFIDQFIEYKTNNDIFEKFKRKFHMGNILFKLKAKELTEKTIKEIRNYNDFLEKEKAILEIEIYQQSEKLIEEENITKKDIIDKAIKEKITEDSNEIKMQIKSKENKSKEIKISINKETEEYHIKLKSINNDELNLKREIYEILKSINANLYTITKNTISNADFKKKNYENFLRENIMEHLKKNIKEKSKMTFFKSLSNSLKKIQGNIKENDEIINFIKYYSNINGSKTVSENKKNFLEKILNTEVSVSENDIIDFIIGELKFYGIIKRIEKLQKEGKRTETEIKNTYTKSYVLLDKHEKFKKYDRNSKNEIVKLFVKDIKDNAMIEKINYILSKFKIEELIEKLKENTENKNFDTEIFGIFKTHYQNIFSSEKFENKSDEEKELYKIIYRYLKGRIEKILVNEQKVRLKKMEKIEIEKILNESILSEKILKRVKQYTLEYIMYLGKLIHNKINMTTVNTNDFSRLHAKEELDLELITFFASTNMELNKIFSRENINNDENIDFFGGDREKNYVLDKKNLNSKIEIIRDLDFINNKNNITNNFISKFTKIGTNERNRILHASSKERDLQGTQDDYNKVINIIQNLKISDEEVSKALNLDVVFKDKKNIITEINDIEISEENNSVIKYLPSFSKVLPEILNLYKNKNKNNPFDTTETERIMLNALIYVNKELYKKLILEDDLEENGSKNIFLQELKKTLGNIDETDENIIESYYKNAQISASKGNNKAIKKYQKKVIECYIKYLEENYKKLFDFSDFKMNIQEIKKQIKDINDNKTYERITIKTSDKSIVINDDFEYIISIFALLNSNAVINKIRNRFFATSVWLDTSEYQNIINILDEIMQLNTLRNECITENWNLNLEEFIQKMKEIEKDFDDFKIQTKKDIFNGNYESIKNNVLSKFIGFSDVQKILEEKLNNLIDFENDNEIKKSVNLDSLNPDERRNLMPNINPKKGGIDLIKEIDKLIVIKKNNIEKNILLKIIFNSDFLKKYKKEIDNLVEDTESENKNKFEKIYYPEEHKNELYIYKKNLFLNIGNPNFDKIYELISKDIKNANTEILFND

SEQ ID NO: 135 - protein, 1257 aa, Artificial
  Synthetic
MRGGHMKITKIDGISHYKEKEKGVLKAKDVLNEEIKEIVKKRYDATIESKIYKEFIKLRKNRIEQNNEKSVLELIKSNIDKNEKEIKTLLWNKFKIKEKNKKYDKYILDEIKLDNDIKIYESAESLYFFIKEAYLGQNNKKWNISKIDLEKIMEKDNNLIMLGYKLKKNIKEDEYPYLYKNKNKQKSTPLYTLLKKLIEKNKNSNQNIRESEEYEKIQKDFKEYKNIKINLLVKSILNNKVNIKYNTSNNNIEESNSKREKEIIEFFKKMIEEKNKSILKDKLKLFRLEVFFDEEFLEEIKKLLDNDNLDKSDNKKIAELRGKIFSRIREKIKEDKNRDILKNIYFLELKKYIENNLSHKKENNKKNNNIGEEKSKELYLKFLKKVLFIDDNNRISIEKLKSRIDDNFKNLLIQHVIEYGKIKYYVENDDYIKNIVKNGELKLETENLEYIRVRETLIRKMAVLVSFAANSFYNLFENITSDILTANINLDSDVIKIGNNRLKEKFLNYFFYSEEISDKEDFLKALKDSIYNVRNGVNHFDKMILGKYNNRLDLKDSNTIKDYFNFKKKEIKQDLKDRFISNNLQYYYTENEIKKYFEKYKFEILKTKASFAPNFKRILRKGENLSISEISDIYDFFKRYSENSDKSSEYNEFTKTRNFLLKELYYNNFYREFLSDRTKFEEAVKKVKNNKKNRIIDNRKSAGKSYDVIEDYNSSDDVLEYISRIHKSEMERIEVNTEKNRKDTSKYIRDFIEEVFLEGFIKYLDNNNFNFLKNRNKADKERKEIVRNLNIKIEGLDILNQNDSEILNLYLFFNMIDNKRISEFRNEMIKYKQFLTKRQNIKSKFLEIDIEKIEAIIEFVIITRGKLEILEGETKEQKKDNMNALFNKFYSSESEYDESLKKFIEETVLNDKKNTPFYSTDGKTPIVHSNLEKMRKYGTENFLSKVLKDEKYTLDNMKIKEKFETKVNDKFKEQKILEKVDKIKGNEKHKKLIEYYNDCRCYLHGEWIENKKNKEEFEYKEIYEKIIEEIRKYNYLENKEKLQNVYLLHEITSDLMARNVAFINKWERDFKFLSIAIKENLKDSNDIQKIEEFLNPSLDTTSDEEHFNVKNYASKLKNIQGLHNNIISLIFIKNLDGWNNKIDNFKWLGFRNYISHFNHINGENSKESFINQLNRLVLLFSYDKKVQNHITKSIKTILEKYNIDIEFKISDDSKNFFEYQISNINSKKGKMLGKENYFELLDKEFVQNVKKMLEYED

SEQ ID NO: 136 - protein, 1162 aa, Artificial
  Synthetic
MKVTKVDGISHKKYIEEGKLVKSTSEENRTSERLSELLSIRLDIYIKNPDNASEEENRIRRENLKKFFSNKVLHLKDSVLYLKNRKEKNAVQDKNYSEEDISEYDLKNKNSFSVLKKILLNEDINSEELEIFRKDVEAKLNKINSLKYSFEENKANYQKINENNVEKVGGKSKRNIIYDYYRESAKRNDYINNVQEAFDKLYKKEDIEKLFFFIENSKKHEKYKIRECYHKIIGRKNDKENFAKIIYEEIQNVNNIKELIEKVPDMSELKKSQVFYKYYLDKEELNDENIKYAFCHFVEIEMSKLLKNYVYKKPSNISNDKVKRIFEYQSLKKLIENKLLNKLDTYVRNCGKYNYYLQDGEIATSDFIARNRQNEAFLRNIIGVSSVAYFSLRNILETENKDDITGKIRGKTRIESKTGEEKYIPGEVDKIYNENKQNEVKENLKMFYSYDFNLDNKNEIEDFFVNIDEAISSIRHGIVHFNLELEGKDIFAFKNIAPSEISKKMFQNEINEKKLKLKIFRQLNSANVFRYLEKYKILNYLKRTRFEFVNKNIPFVPSFTKLYSRIDDLKNSLGIYWKTPKTNDDNKTKEIIDAQIYLLKNIYYGEFLNYFMSNNGNFFEISREIIELNKNDKRNLKTGFYKLQKFEDIQEKTPKKYLANIQSLYMINAGNQDEEEKDTYIDFIQKIFLKGFMTYLANSGRLSLMYIGNDEQINTSLAGKKQEFDKFLKKYEQNNNIEIPHEINEFVREIKLGKILKYTESLNMFYLILKLLNHKELTNLKGSLEKYQSANKEETFSDELELINLLNLDNNRVTEDFELEANEIGKFLDFNGNKIKDRKELKKFDTKKIYFDGENIIKHRAFYNIKKYGMLNLLEKIADKAKYKISLKELKEYNNKKNEIEKNSTMQQNLHRKYARPRKDEKFNDEDYKEYEKAIGNIQKYTHLKNKVEFNELNLLQGLLLKILHRLVGYTSIWERDLRFRLKGEFPENQYIEEIFNFDNSKNVKYKSGQIVEKYINFYKELYKDNVEKRSIYSDKKVKKLKQEKKDLYIRNYIAHFNYIPHAEISLLEVLENLRKLLSYDRKLKNAVMKSVMNILKEYGFVAKFKIGADKKIEIQTLESEKIVHLKNLKKEKLTTNRNSKELCKLVKVMFEYKMEEKKSEN

SEQ ID NO: 137 - protein, 1317 aa, Artificial
  Synthetic
MCCEVDQEAAELAHEQKYQEFCQQIDSPDHEIGPSDFVHLHNHTHYSLLDGLTKVPDLINYVKGQGMEAVAVTDHGTMSSLIELYKEAKAAEIKPILGLEAYVAARSRLDRDPAYDKVRYHITLLAMNDKGFENLCRLATEAEVNGKYYKPRIDHEIMEKYNEGIICLSGCASSEISVRLKNGDMEGAEKLVEWYKNVYKDRFYLEMQDHGHPDSPTHWDVQNRINQGLQEIAKKTGLPLVVTCDGHYLKHEDQDAHEILLCIGTASNLSDPNRMTLKDFQLHVIPPQEIIDRWSKDFPDAIKNTRKIAERCHTEIQLGRILIPKFPIPDGDSEKSYLDKLVFRGLAFRYGGVTQEEAAKLSIEECRKLLSEKILERIDYELLVVDKMGYNGYFLIVQDFIMWGKTRRIIYGPGRGSAAGSILAYALRITELDPMKYDLLFERFLNPDRISMPDIDTDIQDTRRDEVIEYCTDKYGKARVANIVTFGKMMAKNAVRDVARVLEVPYAEADRIAKLVPDPVQGHHVKLTDAIVNTPDLKYEYEHNPTAKRVIDYASKLEGTIRSHGVHACGIVIAPDDLVKFLPLEVSAKGPLATQYPSTQVEELGLLKMDFLGLSNLSVINNALRMIRKVYHDDIDLYNVPLDDPLAYQLLQNAETTGVFQLESAGMKRYLKDLKASSFEDIIAMVALYRPGPMQFIDSFIRRKHGEEPITYLHPGLENALKSTYGILIYQEQFMQISKEWCGFTGGQADTLRKAVGKKKVALMNKVKPEFIKGAQEVGGATEEQAETFWNQLLEFANYCFNKSHAACYGLVAYWTAYLKAHYPDAFMAALMTSDMRWTDRLAIEIAECKRIGIKVLGPDINQSYADFGIVGGEKTIRFGLAAIKSMGKALIEEIVIPERDKNGPFKSVCDFASRVDNTKFNKKSWESAIKTGAFDRFASRTDLLFNLEDIQAYGGKVQKDRASGQTDLFGLMGDAGAVPEPEIKPSPSKVSEKEQLLWERDLMGLYLSAHPLDKYDIYFEENTHPFSVVSAENDGKQVIVGGIVTGIRTILTKSNTKMAFVKIESKTSETEFIVFPALYEQEGSKLAVDNIIKVTGRVNARDKDGNITSEVKIIADSFSIVSDDKLENYQSTGARLDDPKEAPKKEFRRKKTASVPENIAARLSGSQKSDDKNTEKKESNTEKSAEKAGKTDKEPNKPESESIRNYISHFYIVRNPFIDYSIAEQIDRVSNLLSYSTRYNNSTYASVFEVFKKDVDLEYDELKKKFKLISNTDILKRLMKPKKVSVLELESYNSNYIKNLIIELLTKVENKDEISS

SEQ ID NO: 138 - protein, 1338 aa, Artificial
  Synthetic
MGNLFGHKRWYEVEKIIKDKEVKVEVRIKRKYLANESKYVLNIDKQKEEYDENKITNKEFVDQFIEYKTKNDVFKKFTKKFHMGNILFKLKAKELTEKTIKEIRNYNDFLEKEKAILEIEIYQQSEKLREEENITKKDIIDKAIKEKITEDSNEIKMQIKSKENKSKEIKISINKETEEYHIKLKSINNDELNLKREIYEILKSINANLYIITKNAISNADFKKRNYENFLRENIMEHLKKNIRKKSKMTFLKSLSNSLKKIQGNIKENDEIINFIKYYSNINGSKTVSENKKNFLEKILNTEVSVSENDIIDFIIGELKFYGIIKRIEKLQEKTATRTDEDIKNTYIDTYVSLDKHEKFKKYNRNKKDEIVKLFVKDINNNTMEEKINQILSKFKIEELIGELKKNTENKNFDTEIFGIFKTHYQKIFSSEKFENKSDEEKELYKIIYRYLKGRIEKILINGEKVRLKKMEKIEVKKIFNESILSEKILKRVKQYTLEYVMYLGKLVHNDIDRSIVNTNNFSRLHAREELDLELITFFASTNMELNKIFSRKDEYEENTDFFGEGAFSNKKREKITLNKKSLNSKIKMIRELDFIDNKNEIIQKNFFDKFIKIGANERNRILHASNKRRIPQGTQDDYNKVINIIQNLKISDEEASKALNLDVVFKDKKNIITKINDIKISEENNSIIKYLPSFSKVLPEILNLYKNENKNNPFDTIETEKIIQNALIYVNKELYKKLISEKNLEENESKNKFLKELKKNLSGTDETDENIIENYYKNAQISASKGNNKAIKKYQKKVIECYIGYLRKNYEELFDFSDFKMNIQEIKKQIKDINDNKTYERITIKTIDKTIVINDDFEYIISIFALLNSNAVINKIRNRFFATSVWLNTSEYQNIINILDEIMQLNTLRNECITENWNLNLEEFIQKMKEIEKDFDDFKIQTKKDIFNDNYESIKNNVLSKFIGFSDVQKILEEKLNKLIDFENDNEIKKSVNSDSLDSDERRNLMPNINPKKGGIDLIREIDELIVIEKNNTEKKEKTVAKRDKAETKKTEVVKTEASKVKASKVKEAVSREPYEESAQNPELGEEPLENASQDNVSRDEVRREGPRDTDAKEAHGILEVMADGYGFIRSENFMPGEQDVYVNSLMIRRFHLKTGDMIYGYAKSRNPQERYNALLYIETVNDLPVSAIFRRPDFDKLTPIFPDERIHMEREGKRVPTSLRVLDLLAPIGKGQRGMIVSPPKAGKTTLLKQIAQSILKNQPDMTLMILLIDERPEEVTDMMEEVVGDKVQVIYSTFDELPEHHKRVAEMTIERGKRLVEQGQDVCILLDSITRLARA

SEQ ID NO: 139 - protein, 1412 aa, Artificial
  Synthetic
MKLSKEKHTRSAVANNGDIKSAEVNNGNTKSEEVNNGDTRSAVANEEQNIGGILYRFPGKSIDGVKDQMLRRDKEVKKLYNVFNQIQVGTKPKKWNNDEKLSPEENERRAQQKNIKMKNYKWREACSKYVESSQRIINDVIFYSYRKAKNKLRYMRKNEDILKKMQEAEKLSKFSGGKLEDFVAYTLRKSLVVSKYDTQEFDSVAAMVVFLECIGNNNISDHEREIVCKLLELIRKDFSKLDPNVKGSQGANIVRSVRNQNMIVQPQGDRFLFPQVYAKENETVTNKNVEKEGLNEFLLNYANLDDEKRAESLRKLRRILDVYFSAPNHYEKDMDITLSDNIEKEKFNVWEKHECGKKETGLFVDIPDVLMEAEAENIKLDAVVEKRERKVLNDRVRKQNIICYRYTRAVVEKYNSNEPLFFENNAINQYWIHHIENAVERILKNCKAGKLFKLRKGYLAEKVWKDAINLISIKYIALGKAVYNFALDDIWKDKKNKELGIVDERIRNGITSFDYEMIKAHENLQRELAVDIAFSVNNLARAVCDMSNLGNKESDFLLWKRNDIADKLKNKDDMASVSAVLQFFGGKSSWDINIFKDAYKGKKKYNYEVRFIDDLRKAIYCARNENFHFKTALVNDEKWNTELFGKIFERETEFCLNVEKDRFYSNNLYMFYQVSELRNMLDHLYSRSVSRAAQVPSYNSVIVRTAFPEYITNVLGYQKPSYDADTLGKWYSACYYLLKEIYYNSFLQSDRALQLFEKSVKTLSWDDKKQQRAVDNFKDHFSDIKSACTSLAQVCQIYMTEYNQQNNQIKKVRSSNDSIFDQPVYQHYKVLLKKAIANAFADYLKNNKDLFGFIGKPFKANEIREIDKEQFLPDWTSRKYEALCIEVSGSQELQKWYIVGKFLNARSLNLMVGSMRSYIQYVTDIKRRAASIGNELHVSVHDVEKVEKWVQVIEVCSLLASRTSNQFEDYFNDKDDYARYLKSYVDFSNVDMPSEYSALVDFSNEEQSDLYVDPKNPKVNRNIVHSKLFAADHILRDIVEPVSKDNIEEFYSQKAEIAYCKIKGKEITAEEQKAVLKYQKLKNRVELRDIVEYGEIINELLGQLINWSFMRERDLLYFQLGFHYDCLRNDSKKPEGYKNIKVDENSIKDAILYQIIGMYVNGVTVYAPEKDGDKLKEQCVKGGVGVKVSAFHRYSKYLGLNEKTLYNAGLEIFEVVAEHEDIINLRNGIDHFKYYLGDYRSMLSIYSEVFDRFFTYDIKYQKNVLNLLQNILLRHNVIVEPILESGFKTIGEQTKPGAKLSIRSIKSDTFQYKVKGGTLITDAKDERYLETIRKILYYAENEEDNLKKSVVVTNADKYEKNKESDDQNKQKEKKNKDNKGKKNEETKSDAEKNNNERLSYNPFANLNFKLLN

SEQ ID NO: 140 - protein, 1412 aa, Artificial
  Synthetic
MKLSKEKHTRSAVANNGDIKSAEVNNGNTKSEEVNNGDTRSAVANEEQNIGGILYRFPGKSIDGVKDQMLRRDKEVKKLYNVFNQIQVGTKPKKWNNDEKLSPEENERRAQQKNIKMKNYKWREACSKYVESSQRIINDVIFYSYRKAKNKLRYMRKNEDILKKMQEAEKLSKFSGGKLEDFVAYTLRKSLVVSKYDTQEFDSVAAMVVFLECIGKNNISDHEREIVCKLLELIRKDFSKLDPNVKGSQGANIVRSVRNQNMIVQPQGDRFLFPQVYAKENETVTNKNVEKEGLNEFLLNYANLDDEKRAESLRKLRRILDVYFSAPNHYEKDMDITLSDNIEKEKFNVWEKHECGKKETGLFVDIPDVLMEAEAENIKLDAVVEKRERKVLNDRVRKQNIICYRYTRAVVEKYNSNEPLFFENNAINQYWIHHIENAVERILKNCKAGKLFKLRKGYLAEKVWKDAINLISIKYIALGKAVYNFALDDIWKDKKNKELGIVDERIRNGITSFDYEMIKAHENLQRELAVDIAFSVNNLARAVCDMSNLGNKESDFLLWKRNDIADKLKNKDDMASVSAVLQFFGGKSSWDINIFKDAYKGKKKYNYEVRFIDDLRKAIYCARNENFHFKTALVNDEKWNTELFGKIFERETEFCLNVEKDRFYSNNLYMFYQVSELRNMLDHLYSRSVSRAAQVPSYNSVIVRTAFPEYITNVLGYQKPSYDADTLGKWYSACYYLLKEIYYNSFLQSDRALQLFEKSVKTLSWDDKKQQRAVDNFKDHFSDIKSACTSLAQVCQIYMTEYNQQNNQIKKVRSSNDSIFDQPVYQHYKVLLKKAIANAFADYLKNNKDLFGFIGKPFKANEIREIDKEQFLPDWTSRKYEALCIEVSGSQELQKWYIVGKFLNARSLNLMVGSMRSYIQYVTDIKRRAASIGNELHVSVHDVEKVEKWVQVIEVCSLLASRTSNQFEDYFNDKDDYARYLKSYVDFSNVDMPSEYSALVDFSNEEQSDLYVDPKNPKVNRNIVHSKLFAADHILRDIVEPVSKDNIEEFYSQKAEIAYCKIKGKEITAEEQKAVLKYQKLKNRVELRDIVEYGEIINELLGQLINWSFMRERDLLYFQLGFHYDCLRNDSKKPEGYKNIKVDENSIKDAILYQIIGMYVNGVTVYAPEKDGDKLKEQCVKGGVGVKVSAFHRYSKYLGLNEKTLYNAGLEIFEVVAEHEDIINLRNGIDHFKYYLGDYRSMLSIYSEVFDRFFTYDIKYQKNVLNLLQNILLRHNVIVEPILESGFKTIGEQTKPGAKLSIRSIKSDTFQYKVKGGTLITDAKDERYLETIRKILYYAENEEDNLKKSVVVTNADKYEKNKESDDQNKQKEKKNKDNKGKKNEETKSDAEKNNNERLSYNPFANLNFKLLN

SEQ ID NO: 141 - protein, 1388 aa, Artificial
  Synthetic
MKLSKVTYRVKDKNAKYKKEYNVRAAVANNSENAGGVLYHVPGVDLIDLKEQMLDRDRSVRLLYNIFNQIQTGTKPKKWGNDETLSVDENERKAKEQNIKIMNYKWREACSEYIEKSQSTINSVLFYSYEESGYKTKRMNDNEAIIVKMQYENRLSHFTGGKLEDFVAYTLRNSLVVSRYDNQEFDSVNAMVVFINNIGNGNISDKDKKTICKLADLIRNDFSKLNPNVQSSQGANMVRSVRNQNMVVQPQGDIVSFPLVSDEGKNTVTNKNVEKKGLNEFLLNYANLDDEERMENLRKLRRIIDVYFSSPSHYQKDMDISLSDNIDKTKFVVWKKHETGKKNTELFVDIPDELFTAETEKIKLDVLEKQARKRLTDSIRKQNMICYRYTRAVVEKYNSTENLFFENDSINQYWIHHIENAVERILKSCKAETLFKLRRGYLTEKVWKDAINLISIKYIALGKVIYNFTVDDIWKDKKVKNLGSIDEKIKHGITSFDYEMIKAQEALQRELAVNVAFAANNLVRAVCDMTNLKDKESDFLIWNKKDIANKLKNKDDMASVSVVLQFFGGKSSWDIDAFREAYKGNKYNYEVCFIDDLRKAVYAARNESFHFKTALVNNDIWNTEFFGKLFIKETEICLDIEKDRFYSNNLPVFYSDNDLKKMLDHLYNNKVSRAAQVPSYNSVMVRKYFPENITSTLKYQKPGYDEDTLEKWYSACYYLLKEIYYNSFLQSDEALALFEESVNNLKGDNKDQELAVKNFRNNYKNIKSSCTSFSQVCQMYMTEYNQQNNQFKKVRSSKDSIVDKPIYQHYKLLLKKVIANAFASYLQHNKELFGFIGKPLKVNCLKEIDKEQFLPEWTSKKYVSLCEEVRKSPELQKWYIVGKFLNSRSLNLMAGSMRSYIQYVNDIKRRADGIGNELHVIAQNLDVVDKWVQVIEVCLLLSSRVSNEFEDYFYDKDDYAAYLKSYVDFDNSDMPSEYSALVEFSDQGKVDLYVDPSNPKVNRNIVQSKLFAADYILRDIIEPVSKDEIEDFYNQKDEITTCKIKGAELTDEEQKKILKYQKLKNRVELRDVVEYGEIINELLGQLINWSFMRERDLLYFQLGFHYNCLRNDSAKPEEYKNLVLDDVSIKDAILHQIIGMYVNGVAIYAPGKDKNKLESQCVKGRVGGKIGAFCGYSLYLKLAADTLYNAGLEVFEVLPEHEDIINLRNGIDHFKFYLGGYRSIISLYSEVFDRFFTYDMKYQKNVLNLLQNILLRHNVIIEPIFESGIKKIGKDTKPCAKLCISSIKSDSFEYKIKDGTLITDAKDKRYLETIKKLLYYPDIESNVKILLRKDNFNQNKDKKNVNNRKTKNNNKNGNRNRDKNRDKNGGGDGLTYNPFLNLIFDLPE

SEQ ID NO: 142 - protein, 1138 aa, Artificial
  Synthetic
MVNEDSDIWFEHSARRNDSTPYCEAVIIETTDRNGTIRKKLDMRATRNNIRNQNMMDYRRTTETVANDTEGRFFENADVNAFWIHHIENAIERITANINANKTYKLTRGYLGEKVWKDIINFISIKYIAVGKAVYHFAADDINTDSKEINIGKIISEKKGGMSSFDYEQIKAEETLQRETATYVAFAVNNLATATVNLSEKREDILLLGENALGKECKPHIRRNVLQYFGGNSLWEKSGSPFEDVSEDDTADIRLLVAIKNALYSLRNYSFHYNTADENDSEACSELIAKMFEFDSNRASSIQIEKLYSNNLPMFYSQANLEKLVGRIYAEYAERASQIPSFNKVFVRSNFAEYLRNDLRINVALNGTEELSKWHSAVYYAFKEIYYNAFIQDKSTRDLFIKKVKSLKPREDKKTDSKAIENFAMRIKEIEQANPDFSLAQICQIIMTEQNLQNGGNSKAHLTKDAGENEAIYKHYKMLLYKALRDAFMEYIDGSDFAFLKEPHEYREVSKEDFTVRSGSNIYSELSGLINEDPSLLNYYILSRMLAPRQQNFLAGSLRSYVQYSEDVERRAKQTRNSLSKDSSADRAYIRTAVRIIDMCIQISGTTSNTVADYFDNEDSFAEYVFKYYDIGSEYENVGISPAAKLKAFCNTEYAKDKRIGLFYDGENPILNRNLILAKLYGADNVISKIVKKNNKEEIEDLYRKSAEIEDYKVTGTYKSFDVLKKIKAYQEKKNKVELRDVVDYSEIINELQGQLINGSLMRERDFMYFQLGFHYYCLHNEECIKSDNYRSLTVGDKTINGAILYQIIAMYTYGLPMYVADENGSIKAVGDREQTANKVKLLGEYTLNDSGFYSTSNAGYYADAGYELFGVLEEQGNVYSLRNYIDHFHYYAKQDRSLLDIYSEVFDRFFTYDIKYQKNVINLLSSVLSSHFVDASFMLESDPVKNLKKQIGKNGNKTKEMATIRINPAQGIKSELFTYSVENEDRARNLPARSPEYLENVARILCYPNLELVTEDLIKLPRVKEDRGGHRDLGKQHGDRKRDNNYNEYQKYKKNNESVGTLSAMINIHTDIDLDKDYTCEVTQIDKKSGYGRGKLPNGEEATFKWKGTSIVNGATITVRLKKYDDRRKAYEATVVG

SEQ ID NO: 143 - protein, 1380 aa, Artificial
  Synthetic
MKLSKEKQIRSAVANKEKNTEGVLYRFPGDDIGGVQAQMLVRDRDVKQLYNVFNQIQLGNKPKEWMNDEKLSPEENERRAQQKNIKMKNYKWRKACSKYVESSQRAINDILFYSYKEADKKIRNMSKNEDILIKMQNAEKLSKFSSGKLEDFVAYTLRKSLVVSKYGNQEFDSIAAMVVFLECIGKSNISDHEKEIVYKLLDLIRKDFSKLDPSIQDSQGANIVRSIRNQNMIVQPQGDRFSFPQVSDEEKKTVTNKNVEKDGLNEFMLNYANLDEEKRAEVLRKLRRILDVYFSAPSHYEKDMDITLSDNVNKGKFYVWKKHECGKKENGLFVDIPDVLVEAEAESIKLDAVVEKRERKVLADRVRRQNIICYRYTRAVVEKYNSNEPIFFENDTINQYWIHHIENAVERILKNCKTGTLFKLRKGYLAEKVWKDAINLISIKYIALGKAVYNFALDDIWKDKKDKKLGIVDERIRNGITSFDYEMIKAHENLQRELAVNIAFSVNNLARAVCDMSNLGDKESDFLLWKRNDIADKLKNKDDMASVSAVLQFFGGKSSWDINIFKEAYKGKKKYNYEVQFIDDLRKAIYCARNENFHFKTALVNNEKWNTELFGKIFERETEFCLNVEKDRFYSNNLYMFYPVSELRNMLDHLYSRSVSRAAQVPSYNSVLVRTVFPEYITNVLRYQKPGYDADTLGKWYNACYYLLKEIYYNSFLQSDKALQLFEKSVRTLRWDDKKQQRAVDNFKNHFSDIKSACTSLAQVCQIYMTEYNQQNNQIKKVRSSNDSIFDQPIYQHYKVLLKKAIANAFAAYLKNNKNLFGFIGKPFKANEIREIDKEQFLPDWTSKKYESLCIEVSENQELQKWYIVGKFLNARSLNLMVGSMRSYIQYVTDIKRRAASIGNELHVCAQDIEKVEKWVQVIEVCLLLSSRTSNQFEDYFKDKDDYARYLKSYVDFSNADMPSEYSALVKFSEEEQSDLYVDTNNPKVNRNIVHSKLFAADHILRDIVEPVSKGNIEEFYSQKAEIVYCKIKGKEITAEEQKAVLKYQKLKNRVELRDIVEYGEIINELLGQLINWSFMRERDLLYFQLGFHYNCLRNDSEKPEEYEKIEADENSIKDAILYQIIGMYVNGVAIYAPEKNGDKLKEQCVQGRVGAKVTSFNRYSEYLGLDELTLYNAGLEIFEVVAEHDDIINLRNGIDHFKYYLGDYRSMLSIYSEVFDRFFTYDMKYQKNVLNLLQNILLRHNVIVEPVLESGVKTIGEQTKPGAKLSVRSIKSDTFEYKVKGGTLITNAKDKRYLETIRKILYYADAEDADSKKPVIVTNADKYEKNKESEDEDKQKGKENRGKKNTETRSDAEKNNNERLSYNPFANFDFKLPNK

SEQ ID NO: 144 - protein, 1101 aa, Artificial; identical to SEQ ID NO: 73
  Synthetic

SEQ ID NO: 145 - protein, 1007 aa, Artificial
  Synthetic
MRVSKVKVKDGGKDKMVLVHRKTTGAQLVYSGQPVSNETCNILPEKKRQSFDLSIENKTLKRRDDVDKTKKGKYDIVRKIIKYGELPQSINDVDILEFLNHKFQKPVKYWKNGKEESFNLTLLIVEAVKTQDRQKLQPYYDWKTWYIQTKSDLLKKSIENNRIDLTENLSKRKKALLAWETEFTTSGKIDLTHYHKVYMTDVLCTALQKVEPSTDKKGKINTNAYHRGLKKALQTHQPAIFGTRQAPNNVNRADDRLSIYHLEVVKYLEHYFPIKTSKRRNTADDIEHYLKTQTLKTTIEKQLVNAIRANIIQQGKTNHHELKADTTSNDLIRIKTNEAFVLNLTGTCAFAANNIRNMVDNEQTNDILGKGDFIKSLLKDNTNGQLYSFFFGESLSTNKAEKETQLWGIRGAVQQIRNNVNHYKKDALKTVFNISNFENPTITDPKQQTNYADTIYKALFIKELEKIPNAFAQQLKTGGALSYYTIENLKSLLTTFQFSLCRSTIPFAPGFKKVFNGGINYQNAKQDESFYELMLERYLRKENFAEEAYNARYFLLKLIYNNLFLPGFTRDRKAFADSVGFVQMQNKKQAEKVNPKKREAYAFEAVRPMTAADSIADYMAYVQSELMQEQNKKEEKATDETRINFEKFVLQVFVKGFDSFLRAKEFDFVQVPQPQLTATASNQQKADKLNQLEASITADCKLTPQYAKADNATHIAFYVFCKLLDAGHLSNLRNELIKFRESVNEFKFHHLLEIIEICLLSADVVPTDYRDLYSSEADCLARLRPFIEQGADITNWSDLFVQSDKHSPVIHANIELSVKYGTTKLLEQIINKDPQFKTTEANFTAWNTAQKSIEQLIKQREDHHEQWVKAKNADDKEKQERKREKSNFAQKFIEKHGDDYLDICDYINTYNWLDNKMHFVHLNRLHGLTIELLGRMAGFVALFDRDFQMLDAKRISDLYQLKSFISFREITSELDKNNDITEINLIKDKEIIKRDGTPITEADRNSL

SEQ ID NO: 146 - protein, 1101 aa, Artificial; identical to SEQ ID NO: 73
  Synthetic

SEQ ID NO: 147 - protein, 1135 aa, Artificial
  Synthetic
MKITKIGGISHKKYEEKGKLIKSNEIEKDVIEERFSNIEAKTTELFSKTLDFYVKNYEKCEEQNKERREKAKNYFSKVKLIVDNKKITIFNENTEKIEIEGFNEYDVRDEKYFNVLNKILKEENCTEEDLEVFENDLQKKLNQIQSIKNSLEKNKAHFKKESINNTTDRVKGNNKKSLFYEYYRNSSKHQEYVNNIFEAFDKLYSNSHEDINNLFLEITKDSNNRNIRKIREVYNEILNKNKTEFGEELYKKIQDNISNFDKLLEIEPEIKELTKSQIFYKYYIDKVSLDGTNIKHCFSHLVEIEVNQLLKNYVYSKRSTNKEKLENIFEYCKLRNLVKNKLVNKLNNYIRNCGKYNSYINNNDVVNSEKISEIRTKEAFLRSIIGVSSSAYFSLRNILNTDNTQDITNKVKGEVEKLYQENKKVKLEERLKLFFGNNFDINNQQEIEDFLMNIDKIISNIRHEIIHFKIEANAHSIFDFNNVTLGNKAKNIFNNEINEERIKFKIFKQLNSANVFDYLSDENITEYMGKVIFSFTNRNIPFVPSFRKIYNRVQDLANSLKIKEWKISDESEGKDAQIYLLKNIYYGEFLDDFLNEKNEKFIKIKDEIIELNKNQNKITGFYKLEKFEKIEEKNPKKYLEIIQSLYMINIEEIDNEEKNIFLDFIQKIFLKGFFEFIKNNYNYLLELKKIQDKKNIFDREMSEYIAGEKTLEDIGEINEIIQKIEITKIDKILNLTDKINCFYLLLKLLNYKEITELKGNLEKYQILSKTDIYEKELILLNIVNLDNNKVKIEKFKISAEEIGKFIEKISRNKKIKTFEELRNFEKRENTGEYYNVYSDDKNIKNIRNLYNIKKYGMLDLLERISEKSNYCIKKEDLKEYDKLKKKLEDKKTDFYKIQKDLHYKYQKEYKNFSKKNNTEDYEKYKESIENIEKYVHLKNKIEFNELNLLQSLLLKILHRLVGFTSIWERDLRFRLIGEFPDELDVEDIFDHRERYRGTRGQICKKYDQFISVHIEYQNNKKMKNIKFDDNNPIRNYIAHFNYLPTPKYSILKMLGKLRELLDYDRKLKNAVMKSIKDILEEYGFKAEFVINPDKEIILNSVKSVEIIHLKKNDLNSHRNSEDLCKLVKAMLEYSE

SEQ ID NO: 148 - protein, 1386 aa, Artificial
  Synthetic
MGNLFGHKRWYEVPDKKGFKIKRKVKVKRNYDGNKYILNINENNNKEKIDNNKFIRKYINYKKNDNILKEFTRKFHAGNILFKLKGKEGIIRIENNDDFLETEEVVLYIEAYGKSEKLKALGITKKKIIDEAIRQGITKDDKKIEIKRQENEEEIEIDIRDEYTNKTLNDCSIILRIIENDELETKKSIYEIFKNINMSLYKIIEKIIENETEKVFENRYYEEHLREKLLKDDKIDVILTNFMEIREKIESNLEIMGFVKFYLNVGGDKKKSENKKILVEKILNINVDLTVEDIADFVIKELEFWNITKRIEKVKKVNNEFLEKRRNRTYIKSYVLLDKHEKFKIERENKKDKIVKFFVENIKNNSIKEKIEKILAEFKIDELIKKLEKELKKGNCDTEIFGIFKKHYKVNFDSKKFSKKSDEEKELYKIIYRYLKGRIEKILISEEKVRLKKMKKIEIEKILNKSILSKKVLKRVKQYTLEHVMYLGKLVHNDIDMTTVNTNDFSMLHAKEELDLELITFFASTNMELNKIFNGKEKVTDFFGFNLTGQKITLKEKVPSFKLNILKKLNFINNENNIDEKLSHFYSFQKEGYLLRNKILHNSYGNIQETKNLEEEYENVTNLIDELKVSDEEISKSLNLDIIFEGKVDIINKINSLEIGEYKDKKYLPSFSKIVPEITRKFREINKDKSFDIESEKIILNAVKYVNKILYEKITSNEENQFIKTLPDKLVKKNNNKENKNSLSIEEYYKNAQISSSKGDKKAIKKYQNKVTNAYLEYLENTFAEVISFSNFNLNFDEIKTKIEERKDSKSKITIDSISTNINITNDIEYIISIFALLNSNTYINKIRNRFFATSVWLEKQNSTKEYDYENIISILDEILLTNLLRENNITDILDLKNAIIDAKIAENDEAYIKNYIFESNEEKLKKRLFCEELIDKEDIRKIFEDKNFKFKNFIKKTENENFTINFDNLFNLECNSELNVKKVIGQNSQRLNLFIKNTIDEYKSKIKTSFSSEFLEKYKGIIDNLIENENKFEKIYYPEEHKNELYIYKKNLFLNIGNPNFDKIYGLISNDIKVADAKFLFDSDGEDIRNNKISEIDAILKNLNDKLNGYSKEYKEKYIKKLKENNDFFKKNIQNENYNSFEEFKEDYNKVSEYKRIRDLVEFNYLNKIESYLIDINWKLAIQMARFERDMHYIVNGLDYLYIIRLEKNRNQDRSSPYPKYKNGVLDYTKSYYNFKDYQEFMDICLKFGIDLSENSEINKPENESIRNYISHFYIVRNPFADYSIAEQIDRVSNLLSYSTRYNNSTYASVFEVFKKDVNLDYDKLKTKFKLFDDEKNDNIKILKIENLIESKKVSVLELESYNSDYIKNLIIELLTKIENTNDTL

SEQ ID NO: 149 - protein, 1168 aa, Artificial
  Synthetic
MKITKIDGILHKKYIKEGKLVKSTSEENKTDERLSELLTIRLDTYIKNPDNASEEENRIRRETLKEFFSNKVLYLKDSILYLKDRREKNQLQNKNYSEEDISEYDLKNKNSFLVLKKILLNEDINSEELEIFRNDFEKKLDKINSLKYSLEENKANYQKINENNIKKVEGKSKRNIFYNYYKDSAKRNDYINNIQEAFDKLYKKEDIENLFFLIENSKKHEKYKIRECYHKIIGRKNDKENFATIIYEEIQNVNNMKELIEKVPNVSELKKSQVFYKYYLNKEKLNDENIKYVFCHFVEIEMSKLLKNYVYKKPSNISNDKVKRIFEYQSLKKLIENKLLNKLDTYVRNCGKYSFYLQDGEIATSDFIVGNRQNEAFLRNIIGVSSTAYFSLRNILETENENDITGRIKGKTVKNKKGEEKYISGEIDKLYDNNKQNEVKKNLKMFYSYDFNMNRKKEIEDFFSNIDEAISSIRHGIVHFNLELEGKDIFTFKNIVPSQISKKMFQNEINEKKLKLKIFRQLNSANVFRYLEKYKILNYLNRTRFEFVNKNIPFVPSFTKLYSRIDDLKNSLCIYWKIPKANDNNKTKEITDAQIYLLKNIYYGEFLNYFMSNNGNFFEIIKEIIELNKNDKRNLKTGFYKLQKFENLQEKTPKEYLANIQSFYMIDAGNKDEEEKDAYIDFIQKIFLKGFMTYLANNGRLSLMYIGNDEQINTSLAGKKQEFDKFLKKYEQNNNIEIPHEINEFVREIKLGKILKYTESLNMFYLILKLLNHKELTNLKGSLEKYQSANKEEAFSDQLELINLLNLDNNRVTEDFELEADEIGKFLDFNGNKVKDNKELKKFDTNKIYFDGENIIKHRAFYNIKKYGILNLLEKISDEAKYKISIEELKNYSNKKIEIEKNHTTQENLHRKYARPRKDEKFNDEDYKKYEKTIRNIQQYTHLKNKVEFNELNLLQSLLLRILHRLVGYTSIWERDLRFRLKGEFPENQYIEEIFNFDNSKNVKYKNGQIVEKYISFYKELYKDDMEKISIYSDKKVKELKKEKKDLYIRNYIAHFNYIPNAEVSLLEVLENLRKLLSYDRKLKNAIMKSIVDILKEYGFVVTFKIEKDKKIRIESLKSEEVVHLKKLKLKDNDKKKEPIKTYRNSKELCKLVKVMFEYKMKEKKSEN

SEQ ID NO: 150 - protein, 1357 aa, Artificial
  Synthetic
MQMKISKIKNSRPGISVAENKNEEPLSRQSLLYYAPVKDGKIRLESKDLEQHVTECNEKAQKLYNVITPEINFYRDENRQKMVENLAKNFNAVINNALRSIRNPKEKKEQRVEKEVAFILNLSKKSIKMKKDVFVKRTDLIVKFPENNKYNKKNDKGTGSKEADIQKIISDLVLRKLKKTLRKEVKLENGCRMQMTEITISLMSAICLYGNAESFDPAILKAFFEKVDSDYTKYKYVEQIVKSIESQSAKLKVVEKDGRHLLISANADHRKKKYVFEFMRMYAAADEKEKRELTEHIQDLIGLYLCGKAGYENAENRFSDMIESHNCICGKIEEILNELEEPENLSQQKKEKLKNTTVKVMALKYRAAVNYLADEVGKTVLGEIREKKVRSCADLYWIEYIDSTVEKLLLKSRNKDGYRYEIGFLSKHIWKEWTQYISGKYIEMGKGVYHFAIPDLSGALEGESVSICEVKPEYRNGVSGFDYERIRAEESLEREMEKYVLFAVNNFARAVTPEEEREKSGHEDVLLMKTLSEIEESQTKEERQKKHDNNVKNAITLYADADRRILQFFGGQSRFREKEDSLINLYSGEDLYKEIRKELYAIRNITFHYTTKAEKDQTQKHDLAEYLFEEEFSDITELFREKYYANNVWKYYDAEVINTIMENIYCGRKYRAAQVPAFKNIISRPELPQVMNGFVKGNSLRRLMNCPDRDVINKYWSALFFVLKELYYYDFLQEQKRPEDNVKERFFSAIKKLSGQEKGDKEQKAWESFENRIDQIGRDRSFGAICQGLMIEYMLQNSDISMVQTETDNGKANNKKQIYKHYRTLLYNCISEAFIEYLREKWKELRTPVLTAKEWSKEEFCRADGLKHLSLFDHLKETFNDAESGSSWYMAAHFINQKYLNHLLGSIRNYLQFTEDIEDRAISLGDCVDNKREEKNLRYRNTVEILEFVAQFCERTTNVMEDYFESNQEYAEYLSGFVDYNTTKKETDIEKALYSFCKQKFKVDGKEYMAGIYYDGENLIPNRNIIRANMYGNVSCLKPYMDRITLKEIRTMYADQNKLDTVLKEGICRTEEEQKAYREYQNEKNRIELFDLCTYTQILNDMQARLIGWSYMRERDLMYYQLGYYYTKLFWTDAISEEDARRRLVGNLVDVEDGAILYQILAFNSYNLPIIANKNNTVTLLKDEGSIGGKAITAFFKNYENAEMIYEEALDLFENMDEHAAIINTRNYIEHFKYFIKSDRSMMDLYSEIYDRFFRHDHNRKKNVPDSLKNVLADNFMIVDIDMELGSKKVGEKKKGFREHKAARIEFTDSGIRSTDMTYTIKPDIKDNKKVLVPARSEVFLKQFRKILEYRIQDKTQ

SEQ ID NO: 151 - protein, 1412 aa, Artificial
  Synthetic
MKLSKEKHTRSAVANNGDIKSAEVNNGNTKSEEVNNGDTRSAVANEEQNIGGILYRFPGKSIDGVKDQMLRRDKEVKKLYNVFNQIQVGTKPKKWNNDEKLSPEENERRAQQKNIKMKNYKWREACSKYVESSQRIINDVIFYSYRKAKNKLRYMRKNEDILKKMQEAEKLSKFSGGKLEDFVAYTLRKSLVVSKYDTQEFDSVAAMVVFLECIGKNNISDHEREIVCKLLELIRKDFSKLDPNVKGSQGANIVRSVRNQNMIVQPQGDRFLFPQVYAKENETVTNKNVEKEGLNEFLLNYANLDDEKRAESLRKLRRILDVYFSAPNHYEKDMDITLSDNIEKEKFNVWEKHECGKKETGLFVDIPDVLMEAEAENIKLDAVVEKRERKVLNDRVRKQNIICYRYTRAVVEKYNSNEPLFFENNAINQYWIHHIENAVERILKNCKAGKLFKLRKGYLAEKVWKDAINLISIKYIALGKAVYNFALDDIWKDKKNKELGIVDERIRNGITSFDYEMIKAHENLQRELAVDIAFSVNNLARAVCDMSNLGNKESDFLLWKRNDIADKLKNKDDMASVSAVLQFFGGKSSWDINIFKEAYKGKKKYNYEVRFIDDLRKAIYCARNENFHFKTALVNDEKWNTELFGKIFKRETEFCLNVEKDRFYSNNLYMFYQVSELRNMLDHLYSRSVSRAAQVPSYNSVIVRTAFPEYITNVLGYQKPGYDADTLGKWYSACYYLLKEIYYNSFLQSDRALQLFEKSVKTLSWDDEEQKRAVDNFKKYFSDIKSACTSLAQVCQIYMTEYNQQNNQIKKVRSSNDSIFDQPIYQHYKVLLKKAIANAFADYLKNNKDLFGFIGKPFKANEIREIDKEQFLPDWTSRKYEALCIEVSGSQELQKWYIVGKFLNARSLNLMVGSMRSYIQYVTDIKKRAASIGNELHVSVQDVEKVEKWVQVIEVCSLLASRTSNQFEDYFNDKDDYARYLKSYVDFSNVDMPSEYSALVDFSNEEQSDLYVDPKNPKVNRNIVHSKLFAADHILRDIVEPVSKDNIEEFYSQKAEIAYCKIKGKEITAEEQKAVLKYQKLKNRVELRDIVEYGEIINELLGQLINWSFMRERDLLYFQLGFHYDCLRNDSKKPEGYKNIKVDENSIKDAILYQIIGMYINGVTVYAPEKDGDKLKEQCVKGGVGVKVSAFHRYSKYLGLNEKTLYNAGLEIFEVVAEHEDIINLRNGIDHFKYYLGDYRSMLSIYSEVFDRFFTYDIKYQKNVLNLLQNILLRHNVIVEPILESGFKTIGEQTKPGAKLSIRSIKSDTFQYKVKGGTLITDAKDERYLETIRKILYYAENEEDNLKKSVVVTNADKYEKNKESDDQNKQKEKKNKDNKGKKNEETKSDAEKNNNERLSYNPFANLNFKLSN

SEQ ID NO: 152 - protein, 1382 aa, Artificial
  Synthetic
MKLSKEKHTRSAVANEEQNIGGILYRFPGKSIGGVKDQMLRRDKEVKKLYNVFNQIQVGTKPKKWNNDEKLSPEENERRAQQKNIKIENYKWREACSKYVKSSQKTINYVIFYSYGKAENKLRYMRKNEDILKKMQEEEKLPKFSGRKLEDFVAYTLRKSLVVSKYDTQEFDSVAAMVVFLECIGKSNISDHEKEIVCKLLELIRKDFSKLDPNVKGSQGANIVRSVRNQNMIVQPQGDRFLFPQVYAKENETVTNKNVEKEGLNEFLLNYANLDDEKRAESLRKLRRILDVYFSAPNHYEKDMDITLSDNIEKEKFNVWEKHECGKKETGLFVDIPDVLMEAEAENIKLDAVVEKRERKVLNDRVRKQNIICYRYTRAVVEKYNSNEPLFFENNAINQYWIHHIENAVERILKNCKAGKLFKLRKGYLAEKVWKDAINLISIKYIALGKAVYNFALDDIWKDKKNKELGIVDERIRNGITSFDYEMIKAHENLQRELAVDIAFSVNNLARAVCDMSNLGNKESDFLLWKRNDIADKLKNKDDMASVSAVLQFFGGKSSWDINIFKEAYKGKKKYNYEVRFIDDLRKAIYCARNENFHFKTALVNDEKWNTELFGKIFERETEFCLNVEKDRFYSNNLYMFYQVSELRNMLDHLYSRSVSRAAQVPSYNSVIVRTAFPEYITNVLGYQKPGYDADTLGKWYSACYYLLKEIYYNSFLQSDRALQLFEKSVKTLSWDDKKQQRAVDNFKDHFSDIKSACTSLAQVCQIYMTEYNQQNNQIKKVRSSNDSIFDQPVYQHYKVLLKKAIANAFADYLKNNKDLFGFIGKPFKANEIREIDKEQFLPDWTSRKYEALCIEVSGSQELQKWYIVGKFLNAMSLNLMVGSMRSYIQYVTDIKRRAASIGNELHVSVQDVEKVEKWVQVIEVCSLLASRTSNQFEDYFNDKDDYARYLKSYVDFSNVDMPSEYSALVDFSNEEQSDLYVDPKNPKVNRNIVHSKLFAADHILRDIVEPVSKDNIEEFYSQKAEIAYCKIKGKEITAEEQKAVLKYQKLKNRVELRDIVEYGEIINELLGQLINWSFMRERDLLYFQLGFHYDCLRNDSKKPEGYKNIKVDENSIKDAILYQIIGMYVNGVTVYAPEKDGDKLKEQCVKGGVGVKVSAFHRYSKYLGLNEKTLYNAGLEIFEVVAEHEDIINLRNGIDHFKYYLGDYRSMLSIYSEVFDRFFTYDIKYQKNVLNLLQNILLRHNVIVEPILESGFKTIGEQTKPGAKLSIRSIKSDTFQYKVKGGTLITDAKDERYLETIRKILYYAENEEDNLKKSVVVTNADKYEKNKESDDQDKQKEKKNKDNKGKKNEETKSDAEKNNNERLSYNPFANLNFKLSN

SEQ ID NO: 153 - protein, 1380 aa, Artificial
  Synthetic
MKLSKEKQIRSAVANKEKNTEGVLYRFPGDDIGGVQAQMLVRDRDVKQLYNVFNQIQLGNKPKEWMNDEKLSPEENERRAQQKNIKMKNYKWRKACSKYVESSQRAINDILFYSYKEADKKIRNMSKNEDILIKMQNAEKLSKFSSGKLEDFVAYTLRKSLVVSKYGNQEFDSIAAMVVFLECIGKSNISDHEKEIVYKLLDLIRKDFSKLDPSIQDSQGANIVRSIRNQNMIVQPQGDRFSFPQVSDEEKKTVTNKNVEKDGLNEFMLNYANLDEEKRAEVLRKLRRILDVYFSAPIHYEKDMDITLSDNVNKGKFYVWKKHECGKKENGLFVDIPDVLVEAEAESIKLDAVVEKRERKVLADRVRRQNIICYRYTRAVVEKYNSNEPIFFENDTINQYWIHHIENAVERILKNCKTGTLFKLRKGYLAEKVWKDAINLISIKYIALGKAVYNFALDDIWKDKKDKKLGIVDERIRNGITSFDYEMIKAHENLQRELAVNIAFSVNNLARAVCDMSNLGDKESDFLLWKRNDIADKLKNKDDMASVSAVLQFFGGKSSWDINIFKEAYKGKKKYNYEVQFIDDLRKAIYCARNENFHFKTALVNNEKWNTELFGKIFERETEFCLNVEKDRFYSNNLYMFYPVSELRNMLDHLYSRSVSRAAQVPSYNSVLVRTVFPEYITNVLRYQKPGYDADTLGKWYNACYYLLKEIYYNSFLQSDKALQLFEKSVRTLRWDDKKQQRAVDNFKNHFSDIKSACTSLAQVCQIYMTEYNQQNNQIKKVRSSNDSIFDQPIYQHYKVLLKKAIANAFAAYLKNNKNLFGFIGKPFKANEIREIDKEQFLPDWTSKKYESLCIEVSENQELQKWYIVGKFLNARSLNLMVGSMRSYIQYVTDIKRRAASIGNELHVCAQDIEKVEKWVQVIEVCLLLSSRTSNQFEDYFKDKDDYARYLKSYVDFSNADMPSEYSALVKFSEEEQSDLYVDTNNPKVNRNIVHSKLFAADHILRDIVEPVSKGNIEEFYSQKAEIVYCKIKGKEITAEEQKAVLKYQKLKNRVELRDIVEYGEIINELLGQLINWSFMRERDLLYFQLGFHYNCLRNDSEKPEEYEKIEADENSIKDAILYQIIGMYVNGVAIYAPEKNGDKLKEQCVQGRVGAKVTSFNRYSEYLGLDELTLYNAGLEIFEVVAEHDDIINLRNGIDHFKYYLGDYRSMLSIYSEVFDRFFTYDMKYQKNVLNLLQNILLRHNVIVEPVLESGVKTIGEQTKPGAKLSVRSIKSDTFEYKVKGGTLITNAKDKRYLETIRKILYYADAEDADSKKPVIVTNADKYEKNKESEDEDKQKGKENRGKKNTETRSDAEKNNNERLSYNPFANFDFKLPNK

SEQ ID NO: 154 - protein, 1382 aa, Artificial
  Synthetic
MKLSKEKHTRSAVANEEQNIGGILYRFPGKSIGGVKDQMLRRDKEVKKLYNVFNQIQVGTKPKKWNNDEKLSPEENERRAQQKNIKIENYKWREACSKYVKSSQKTINYVIFYSYGKAENKLRYMRKNEDILKKMQEEEKLPKFSGGKLEDFVAYTLRKSLVVSKYDTQEFDSVAAMVVFLECIGKSNISDHEKEIVCKLLELIRKDFSKLDPNVKGSQGANIVRSVRNQNMIVQPQGDRFLFPQVYAKENETVTNKNVEKEGLNEFLLNYANLDDEKRAESLRKLRRILDVYFSAPNYYEKDMDITLSDNIEKGKFNVWEKHECGKKVTDLFVDIPDVLMEAGAENIKLDAVVEKRESKVLNDRVRKQNIICYRYTRAVVEKYNSNEPLFFENNAINQYWIHHIENAVERILKNCKAGKLFKLRKGYLAEKVWKDAINLISIKYIALGKAVYNFALDDIWKDKKNKELGIVDERIRNGITSFDYEMIKAHENLQRELAVDIAFSVNNLARAVCDMSNLGNKESDFLLWKRNDIADKLKNKDDMASVSAVLQFFGGKSSWDINIFKEAYKGKKKYNYEVRFIDDLRKAIYCARNENFHFKTALVNDEKWNTELFGKIFERETEFCLNVEKDRFYSNNLYMFYQVSELRNMLDHLYSRSVSRAAQVPSYNSVIVRTAFPEYITNVLGYQKPGYDADTLGKWYSACYYLLKEIYYNSFLQSDRALQLFEKSVKTLSWDDEEQKRAVDNFKKYFSDIKSACTSLAQVCQIYMTEYNQQNNQIKKVRSSNDSIFDQPIYQHYKVLLKKAIANAFADYLKNNKDLFGFIGKPFKANEIREIDKEQFLPDWTSRKYEALCIEVSGSQELQKWYIVGKFLNARSLNLMVGSMRSYIQYVTDIKRRAASIGNELHVSVQDVEKVEKWVQVIEVCSLLASRTSNQFEDYFNDKDDYARYLKSYVDFSNVDMPSEYSALVDFSNEEQSDLYVDPKNPKVNRNIVHSKLFAADHILRDIVEPVSKDNIEEFYSQKAEIAYCKIKGKEITAEEQKAVLKYQKLKNRVELRDIVEYGEIINELLGQLINWSFMRERDLLYFQLGFHYDCLRNDSKKPEGYKNIKVDENSIKDAILYQIIGMYVNGVTVYAPEKDGDKLKEQCVKGGVGVKVSAFHRYSKYLGLNEKTLYNAGLEIFEVVAEHEDIINLRNGIDHFKYYLGDYRSMLSIYSEVFDRFFTYDIKYQKNVLNLLQNILLRHNVIVEPILESGFKTIGEQTKPGAKLSIRSIKSDTFQYKVKGGTLITDAKDERYLETIRKILYYAENEEDNLKKSVVVTNADKYEKNKESDDQNKQKEKKNKDNKGKKNEETKSDAEKNNNERLSYNPFANLNFKLSN

SEQ ID NO: 155 - protein, 1360 aa, Artificial; identical to SEQ ID NO: 92
  Synthetic

SEQ ID NO: 156 - protein, 1101 aa, Artificial; identical to SEQ ID NO: 73
  Synthetic

SEQ ID NO: 157 - protein, 1154 aa, Artificial
  Synthetic
MKVTKVDGISHKKYIEEGKLVKSTSEENRTSERLSELLSIRLDIYIKNPDNASEEENRIRRENLKKFFSNKVLHLKDSVLYLKNRKEKNAVQDKNYSEEDISEYDLKNKNSFSVLKKILLNEDINSEELEIFRKDVEAKLNKINSLKYSFEENKANYQKINENNVEKVGGKSKRNIIYDYYRESAKRNDYINNVQEAFDKLYKKEDIENLFFLIENSKKHEKYKIRECYHKIIGRKNDKENFAKIIYEEIQNVNNIEELIEKVPDMSELKKSQVFYKYYLDKEELNDKNIKYAFCHFVEIEMSQLLKNYVYKRLSNISNDKIKRIFEYQNLKKLIENKLLNKLDTYVRNCGKYNYYLQVGEIATSDFIARNRQNEAFLRNIIGVSSVAYFSLRNILETENENDITGRMRGKTVKNNKGEEKYVSGEVDKIYNENKQNEVKENLKMFYSYDFNMDNKNEIEDFFANIDEAISSIRHGIVHFNLELEGKDIFAFKNIVPSEISKKMFQNEINEKKLKLKIFRQLNSANVFNFYEKDVIIKYLKNTKFNFVNKNIPFVPSFTKLYNKIDDLRNTLKFSWKIPKDKEEKDAQIYLLKNIYYGEFLNKFVKNSKDFFKITDEVIKINKQINQKTGYYKYQKFENIEKTVPVEYLAIIQSRDMINNQDKEEKNTYIDFVQQIFLKGFIDYLNKNNLKYIENNNNNDIFSRIKIKKDSKERYDKILKNYEKNNRNKEIPYEINEFVREIKLGKILKYTESLNMFYLILKLLNHKELTNLKGSLEKYQSANKEETFSDELELINLLNLDNNRVTEDFELEANEIGKFLDFNGNKIKDRKELKKFDTKKIYFDGENIIKHRAFYNIKKYGMLNLLEKISDEAKYKISIEELKNYSNKKKEIEKNHTTQENLHRKYARPRKDEKFTDEDYESYKQAIKNIEEYTHLKNKVEFNELNLLQGLLLRILHRLVGYTSIWERDLRFRLKGEFPENQYIEEIFNFENKKNVKYKSGQIVEKYIKFYKELHQNDEVKINKYSSANIKVLKQEKKDLYIRNYIAHFNYIPHAEISLLEVLENLRKLLSYDRKLKNAVMKSVMNILKEYGFVAKFKIGADKKIGIQTLESEKIVHLKNLKKKKLMTDRNSEELCKLVKVMFEYKMEEKKSEN

SEQ ID NO: 158 - protein, 1427 aa, Artificial
  Synthetic
MGNLFGHKRWYEVEKIIKDKEVKVEVRIKRKYLANESKYVLNIDKQKEEYDENKITNKEFVDQFIEYKTKNDVFKKFTKKFHMGNILFKLKAKELTEKTIKEIRNYNDFLEKEKAILEIEIYQQSEKLREEENITKKDIIDKAIKEKITEDSNEIKMQIKSKENKSKEIKISINKETEEYHIKLKSINNDELNLKREIYEILKSINANLYIITKNAISNTDFKKRNYENFLRENIMEHLKKNIRKKSKMTFLKSLSNSLKKIQGNIKENDEIINFIKYYSNINGSKTVSENKKNFLEKILNTEVSVSENDIIDFIIGELKFYGIIKRIEKLQEKTATRTDEDIKNTYIDTYVSLDKHEKFKKYNRNKKDEIVKLFVKDINNNTMEEKINQILSKFKIEELIGELKKNTENKNFDTEIFGIFKTHYQKIFSSEKFENKSDEEKELYKIIYRYLKGRIEKILINGEKVRLKKMEKIEVKKIFNESILSEKILKRVKQYTLEYVMYLGKLVHNDIDRSIVNTNNFSRLHAREELDLELITFFASTNMELNKIFSRKDEYEENTDFFGEGAFSNKKREKITLNKKSLNSKIKMIRELDFIDNKNEIIQKNFFDKFIKIGANERNRILHASNKRRIPQGTQDDYNKVINIIQNLKISDEEASKALNLDVVFKDKKNIITKINDIKISEENNSIIKYLPSFSKVLPEILNLYKNENKNNPFDTIETEKIIQNALIYVNKELYKKLISEKNLEENESKNKFLKELKKNLSGTDETDENIIENYYKNAQISASKGNNKAIKKYQKKVIECYIGYLRKNYEELFDFSDFKMNIQEIKKQIKDINDNKTYERITIKTIDKTIVINDDFEYIISIFALLNSNAVINKIRNRFFATSVWLNTSEYQNIINILDEIMQLNTLRNECITENWNLNLEEFIQKMKEIEKDFDDFKIQTKKDIFNDNYESIKNNVLSKFIGFSDVQKILEEKLNKLIDFENDNEIKKSVNSDSLDSDERRNLMPNINPKKGGIDLIREIDELIVIEKNNTEKNILLKIIFNSNFLEKYKKEIDNLIEGTESENENKFEKIYYPEEHKNELYIYKKNLFLNIGNPNFDKIYGLISNDIKMADAKFLFNSDGKNIRNNKIVEIDVILKKLNNKLNGYSKEYKEKYVEKLKEDNDFFIKNIQNKNYKSFKRFEENYNKVSKYKKIRDLVEFNYLNKIESYLIDINWKLAIQMARFERDMHYIVNGLNYLYIIRLEREINQDWSSPYPKYKYIDKGDKTKGRELDYSTSYYNFKDYQKFVDICSKFGIDLSENSEINKPESESIRNYISHFYIVRNPFIDYSIAEQIDRVSDLLSYSTRYNNSTYASVFEVFKKDVDLEYDELKKKFKLISNTDILKRLMKPKKVSVLELESYNSNYIKNLIIELLTKVENKDEISS

SEQ ID NO: 159 - protein, 1244 aa, Artificial
  Synthetic
MKITKIDGVSHYKEKEKGVLKGKDILNGKIEKIVKKRYDATIESKIYKEFIKLRKNRIEQNNEKSILELIKSNIDKNEKEIKTLLWKNFKIKEKNKNYDEYITDEIKLDNDIKIYESVESLYFLIKEIYLGQNNKKWNISKIDLEKIMEEDSDLIMLGYKLKKNIKEDDYPYLYRDKNGQESTSVYKLLKKLIEENKDRNQDIRKSQEYEKIRKNFEEYKNRKINLLVKSIKNNKINIQYINNEIKSHDNPREENIIKFFKKMIEEKNKPILKDKLKLFRLEVFFNEEFLEEIKKLLDSDDSDKSQNKKISELRGKIFNRIREEIKNNKNRDELENIYFLELKKYIENNLSHKKEKNKNSNNTGEEKSKKLYLKFLKKVLFIDDNNRISIEKLKSRIDDNFKNLLIQHVIEYGKIKYYVENDDYIRNIVKNGELKLETKDLEYIKTKETLIRKMAVLVSFAANSYYNLFGSASEDILGTEVVKNRRTNVIKVKSYIFKEKMLNYFFDSEDFDVNKTIEVLESISYSIYNIRNGVGHFNKLVLGKYKKKDISTNKRVEEDLNNNEEIKGYFIKKRGEIEKKIKERFLSNNLQYYYAKERIENYFEVYEFEILKEKIPFAPNFKRIIKKGENLLNNKKYEYFKNFDKNSVEEKKEFLKTRNFLLKELYYNNFYKEFLSKKEEFKKIVIEVKEEKKNRGNNKKSGVSFQSIDDYDTKINISDYIASIHKKEMERVEKYNEEKQKDTAKYIRDFVEEIFLTGFINYLEKDKRLHFLKEEFSILCNNNNVVDFNININEEKIKEFLKENDSKTLNLYLFFNMIDSKRISEFRNELIKYKQFTKKRLDEEKEFLGIKIELYETLIEFVILTREKLDTKKSEETDAWLVDKLYVKEKNECNEYEYKEYEEILKLFVDEKILNSKEAPYYATNNKTPILLSNFEKTRKYGTQSFLSEIQSNYKYSKVEKENIEDYNKKEEIEKKKKSNIEKLQDLKVELHKKWEQNKITEKEIKKYNDTIKEIREYNYLKNKEELQNVYLLHEILSDLLARNVAFFNKWERDFKFIVIAIKQFLRENDKEKVENFLNPLDNSKGKKVYFSVSKYKNTVENIDGIHKNFMNLIFLNNKFMNRKIDKMNCTIWVYFRNYIAHFLHLHTKNEKISLINQMNLLIKLFSYDKKVQNHILKSTKTLLEKYNIQINFEISNDKNEVFKYKIKNRLYSKKGKMLGKNNKFEILENEFLENVKAMLEYSE

SEQ ID NO: 160 - protein, 1118 aa, Artificial
  Synthetic
MKLIKSNEIEKDVIEERFSNIEAKTTELFSKTLDFYVKNYEKCEEQNKERREKAKNYFSKVKLIVDNKKITIFNENTEKIEIEGFNEYDVRDEKYFNVLNKILKEENCTEEDLEVFENDLQKKLNQIQSIKNSLEKNKAHFKKESINNTTDRVKGNNKKSLFYEYYRNSSKHQEYVNNIFEAFDKLYSNSHEDINNLFLEITKDSNNRNIRKIREVYNEILNKNKTEFGEELYKKIQDNISNFDKLLEIEPEIKELTKSQIFYKYYIDKVSLDGTNIKHCFSHLVEIEVNQLLKNYVYSKRSTNKEKLENIFEYCKLRNLVKNKLVNKLNNYIRNCGKYNSYINNNDVVNSEKISEIRTKEAFLRSIIGVSSSAYFSLRNILNTDNTQDITNKVKGEVEKLYQENKKVKLEERLKLFFGNNFDINNQQEIEDFLMNIDKIISNIRHEIIHFKIEANAHSIFDFNNVTLGNKAKNIFNNEINEERIKFKIFKQLNSANVFDYLSDENITEYMGKVIFSFTNRNIPFVPSFRKIYNRVQDLANSLKIKEWKISDESEGKDAQIYLLKNIYYGEFLDDFLNEKNEKFIKIKDEIIELNKNQNKITGFYKLEKFEKIEEKNPKKYLEIIQSLYMINIEEIDNEEKNIFLDFIQKIFLKGFFEFIKNNYNYLLELKKIQDKKNIFDREMSEYIAGEKTLEDIGEINEIIQKIEITKIDKILNLTDKINCFYLLLKLLNYKEITELKGNLEKYQILSKTDIYEKELILLNIVNLDNNKVKIEKFKISAEEIGKFIEKISRNKKIKTFEELRNFERRENTGEYYNVYSDDKNIKNIRNLYNIKKYGMLDLLERISEKSNYCIKKEDLKEYDKLKKKLEDKKTDFYKIQKDLHYKYQKEYKNFSKKNNTEDYEKYKESIENIEKYVHLKNKIEFNELNLLQSLLLKILHRLVGFTSIWERDLRFRLIGEFPDELDVEDIFDHRERYRGTRGQICKKYDQFISVHIEYQNNKKMKNIKFDDNNPIRNYIAHFNYLPTPKYSILKMLGKLRELLDYDRKLKNAVMKSIKDILEEYGFKAEFVINPDKEIILNSVKSVEIIHLKKNDLNSHRNSEDLCKLVKAMLEYSE

SEQ ID NO: 161 - protein, 1168 aa, Artificial; identical to SEQ ID NO: 149
  Synthetic

SEQ ID NO: 162 - protein, 1382 aa, Artificial; identical to SEQ ID NO: 131
  Synthetic

SEQ ID NO: 163 - protein, 1101 aa, Artificial; identical to SEQ ID NO: 73
  Synthetic

SEQ ID NO: 164 - protein, 1382 aa, Artificial; identical to SEQ ID NO: 131
  Synthetic

SEQ ID NO: 165 - protein, 1382 aa, Artificial; identical to SEQ ID NO: 131
  Synthetic

SEQ ID NO: 166 - protein, 1382 aa, Artificial
  Synthetic
MKLSKEKHTRSAVANEEQNIGGILYRFPGKSIDGVKDQMLRRDKEVKKLYNVFNQIQVGTKPKKWNNDEKLSPEENERRAQQKNIKIENYKWREACSKYVKSSQKTINYVIFYSYGKAENKLRYMRKNEDILKKMQEEEKLPKFSGGKLEDFVAYTLRKSLVVSKYDTQEFDSVAAMVVFLECIGKSNISDHEKEIVCKLLELIRKDFSKLDPNVKGSQGANIVRSVRNQNMIVQPQGDRFLFPQVYAKENETVTNKNVEKEGLNEFLLNYANLDDEKRAESLRKLRRILDVYFSAPNYYEKDMDITLSDNIEKGKFNVWEKHECGKKVTDLFVDIPDVLMEAGAENIKLDAVVEKRERKVLNDRVRKQNIICYRYTRAVVEKYNSNEPLFFENNAINQYWIHHIENAVERILKNCKAGKLFKLRKGYLAEKVWKDAINLISIKYIALGKAVYNFALDDIWKDKKNKELGIVDERIRNGITSFDYEMIKAHENLQRELAVDIAFSVNNLARAVCDMSNLGNKESDFLLWKRNDIADKLKNKDDMASVSAVLQFFGGKSSWDINIFKEAYKGKKKYNYEVRFIDDLRKAIYCARNENFHFKTALVNDEKWNTELFGKIFKRETEFCLNVEKDRFYSNNLYMFYQVSELRNMLDHLYSRSVSRAAQVPSYNSVIVRTAFPEYITNVLGYQKPGYDADTLGKWYSACYYLLKEIYYNSFLQSDRALQLFEKSVKTLSWDDEEQKRAVDNFKKYFSDIKSACTSLAQVCQIYMTEYNQQNNQIKKVRSSNDSIFDQPIYQHYKVLLKKAIANAFADYLKNNKDLFGFIGKPFKANEIREIDKEQFLPDWTSRKYEALCIEVSGSQELQKWYIVGKFLNAMSLNLMVGSMRSYIQYVTDIKRRAASIGNELHVSVQDVEKVEKWVQVIEVCSLLASRTSNQFEDYFNDKDDYARYLKSYVDFSNVDMPSEYSALVDFSNEEQSDLYVDPKNPKVNRNIVHSKLFAADHILRDIVEPVSKDNIEEFYSQKAEIAYCKIKGKEITAEEQKAVLKYQKLKNRVELRDIVEYGEIINELLGQLINWSFMRERDLLYFQLGFHYDCLRNDSKKPERYKNIKVDENSIKDAILYQIIGMYVNGVTVYAPEKDDDKLKEQCVKGGVGVKVSAFHRYSKYLGLNEKTLYNAGLEIFEVVAEHEDIINLRNGIDHFKYYLGDYRSMLSIYSEVFDRFFTYDIKYQKNVLNLLQNILLRHNVIVEPILESGFKTIGEQTKPGAKLSIRSIKSDTFQYKVKGGTLITDAKDERYLETIRKILYYAENEEDNLKKSVVVTNADKYEKNKESDDQNKQKEKKNKDNKGKKNEETKSDAEKNNNERLSYNPFANLNFKLSN

SEQ ID NO: 167 - protein, 1268 aa, Artificial
  Synthetic
MKVSKVKHRRTAVSVNKKNNTVKGILYDDPIKKDSKGDGASAYVSTKYVVDDVVRNSSRLYSPFNSKKLIIDDKTKVVANSLRQHFKNFVKIYLNCESIDEQQMKFTPDNKYLMDNRVRISLPSDVNEEKLVEAIVNSSLRKSLNKKCNIQIKAGLRETFDIPELIKKAIKIYCIDEKRNLNDAEKLDMYALFSFMYEDKYKNRQKKLIINSISNQVTKVKVCENGNRLLKLSIADTKKKPLWDFMIEYSNSDKKKQDTMLRNIRKSIVLFVCGVENYKNIENDNKLDICSWDGYDINENQQFVCVNTNNSNDDYFISSTELRRANLDHYMKAVAKLNDDRNKFWFQHFESVIETFFSKKAKRNIERIKSAYLCEYLWRDFCSYVALKYVDLGKGVYHFTMADKLALINRNKYEKSIIFGEIESRYNNGISSFDYERIKAEELFERNISTYTTFATNIFSKAVVQDDYIKNHNKASDVLQYSDKEFSDSKVLRNDAMKRILQYWGGQSRWNNTLNKINVDTLCIDIKEHLSNIRNSSVHYTSKVSLSGDKNESIVYMLFKKDFAEIRNIFASKYYSNNVWMFYSIEKINGLMEYLYGDNSTVIDAQIPAYNNIIKRKNIADVIEKIIKKNSYKTINELELIKKYRACLYFILKEIYYNRFIKQENLKEQFIQFVDNDNNLLDDNKNAVESFRRRIHDIDNSLMSFGEMCQFIMTDYNMQNQGNKSIKSKDRQNEDKKKGIDGSYKHFPLLLYHVIKELFLKYIKTDEKIVFIREPANIGSVKTQDEFETHISTLGLYKTLKEKVDSNMSLLDWYTLSHFLMPKQLNYLIGDIKNYIQYLRNIDKRAESVGNNKAYDIDGKINNYYDIVYVLDFSLQYIGRISNEITDYFADEDEYALFMSQFVDFSSDNIVGLKTFCNEKTSNGKHTIGLYCDGANPIMNRNIAYAKMYSNDKILSRTYSKVTIKEIERYYRIQDDLKNVFENGVCKNKDQQKELCDFQKIKNHIELTEISIYTNILNDFMSQFISWSYLRERDLMYFQLGMHYLRLYYGTNELETKYNKLVGESVNIEKGALLYQIAAMYTYKLPIYKVDKNGSAVLAEKQGGTGASVTSFVTEYCKENMRDAIIYEKGLELFEDVKQHKKWSDFRNDIAHMRYISDRDKSIMDIISEIYGGFFTYDIKLKKSIPVIFKNILMRYAVDANLNFLHKENRKLKDTLINIRADKGLVSDKYTYKIGEKDTVDIEVRNDKFLLQLRKLLEYKIRVNGNVL

SEQ ID NO: 168 - protein, 1382 aa, Artificial
  Synthetic
MKLSKEKHTRSAVANEEQNIGGILYRFPGKSIDGVKDQMLRRDKEVKKLYNVFNQIQVGTKPKKWNNDEKLSPEENERRAQQKNIKMKNYKWREACSKYVESSQRIINDVIFYSYGKAENKLRYMRKTKDILKKMQEAEKLSKFSGGKLEDFVAYTLRKSLVVSKYDTQEFDSVAAMVVFLECIGKNNISDHEREIVCKLLELIRKDFSKLDPNVKGSQGANIVRSVRNQNMIVQPQGDRFLFPQVYAKENETVTNKNVEKEGLNEFLLNYANLDDEKREESLRKLRRILDVYFSAPNHYEKDRDITLSDNIEKEKFNVWEKHECGKKETGLFVDIPDVLMEAEAENIKLDAVVEKRERKVLNDRVRKQNIICYRYTRAVVEKYNSNEPLFFENNAINQYWIHHIENAVERILKNCKAGKLFKLRKGYLAEKVWKDAINLISIKYIALGKAVYNFALDDIWKDKKNKELGIVDERIRNGITSFDYEMIKAHENLQRELAVDIAFSVNNLARAVCDMSNLGNKESDFLLWKRNDIADKLKNKDDMASVSAVLQFFGGKSSWDINIFKEAYKGKKKYNYEVRFIDDLRKAIYCARNENFHFKTALVNDEKWNTELFGKIFKRETEFCLNVEKDRFYSNNLYMFYQVSELRNMLDHLYSRSVSRAAQVPSYNSVIVRTAFPEYITNVLGYQKPGYDADTLGKWYSACYYLLKEIYYNSFLQSDRALQLFEKSVKTLSWDDEEQKRAVDNFKKYFSDIKSACTSLAQVCQIYMTEYNQQNNQIKKVRSSNDSIFDQPIYQHYKVLLKKAIANAFADYLKNNKDLFGFIGKPFKANEIREIDKEQFLPDWTSRKYEALCIEVSGSQELQKWYIVGKFLNAMSLNLMVGSMRSYIQYVTDIKRRAASIGNELHVSVQDVEKVEKWVQVIEVCSLLASRTSNQFEDYFNDKDDYARYLKSYVDFSNVDMPSEYSALVDFSNEEQSDLYVDPKNPKVNRNIVHSKLFAADHILRDIVEPVSKDNIEEFYSQKAEIAYCKIKGKEITAEEQKAVLKYQKLKNRVELRDIVEYGEIINELLGQLINWSFMRERDLLYFQLGFHYDCLRNDSKKPEGYKNIKVDENSIKDAILYQIIGMYVNGVTVYAPEKDGDKLKEQCVKGGVGVKVSAFHRYSKYLGLNEKTLYNAGLEIFEVVAEHEDIINLRNGIDHFKYYLGDYRSMLSIYSEVFDRFFTYDIKYQKNVLNLLQNILLRHNVIVEPILESGFKTIGEQTKPGAKLSIRSIKSDTFQYKVKGGTLITDAKDERYLETIRKILYYAENEEDNLKKSVVVTNADKYEKNKESDDQNKQKEKKNKDNKGKKNEETKSDAEKNNNERLSYNPFANLNFKLSN

SEQ ID NO: 169 - protein, 1360 aa, Artificial; identical to SEQ ID NO: 92
  Synthetic

SEQ ID NO: 170 - protein, 1435 aa, Artificial
  Synthetic
LFLWIIEEVIYEIIKLYKNLEEEIIMGNLFGYKRWYEVRDKEDYKIKRKVKVKRNYDGNKYILNINENNNKEKIDDNKFIREFINYKKNDNVLREFKKKFHAGNILFKLKGKEKIRRIENDDDFLETEEVVLYIEVYGQSEKLKNEEEITKKDILKEINKQKIDNSVKKISMNTNSGKTIVINFSDKLKKDKDDYQITLNIISEDELERKRKIYDIFKMINMDLYQIIKEIIENEVQKVFENRYYEEYLREKLLKDDKIDVILTNFMEIREKIKSNLEIMGFVKFYLNVGGDKKKSENKKMFVEKILNINVDLTVEDIVDFIVKELKFWNITKRIEKVKEFNNKFLENKRNRTYIKSYVLLDKHEKFKIERENKKDKIVKFFVENIKNNSIKEKIEKILAEFKIDELTKKLEKELKKGNCDTEIFGIFKKHYKVNFDSKKFSNKSDEEKELYKIIYRYLKGRIEKILINGEKVRLKKMEKIEIEKILNESILSEKILKRIKQYTLEHIMYLGKLVHNKINMATVNTNDFFRLHAKEELDLELITFFASTNMELNKIFSRENINNDENIDFFGGDREKNYVIDKKNLNSKIKIIRDLDFIDNKNNITNDFINKFTKIGTNERNRILHASGKKRDSQGTQDDYNKVINIIQNLKISDEEVSKALNLDVVFKDKKNIITEINDIKISEENSNDIKYLPSFSKVLPEILNLYRNNPKNKPFDTIETEKIVLNALIYVNKELYKKLILEDDLKKNRSENIFLQELKKTLGNIDETDENIIENYYKNAQISASKGNNKVIKKYQKKVIECYIGYLRKNYEKLFDFSDFKMNIQEIKKQIKDINDNKTYERITIKTSDKSIVINDDFEYIISIFALLNSNTIINKIRNRFFATSVWLEKQNSTKEYDYENIISILDEIMQLNTLRNECITENWNLNLEEFIQKMKDIEKEFEDFKIQTKKDIFNSNYEGIKNNVLNKFIGFSDVQKILEEKLNKLIEFENDNEIKKSVNLDSLDSDERRKLMPNINPKKGGIDLIKEIDKLIMIEKNNIEKNILLKIIFNSDFLEKYKEEIDNLVECTESKNENKFEKIYYPEEHKNELYIYKKNLFLNIGNPNFDKIYELISKDIKNANTEILFNDDIRNNKIAEIDVILKKLNDKLSGYSKEYKEKYIKKLKENQENNDFFSKNIQNENYSSFREFKKDYNKVSEYKKIRDLVEFNYLNKIESYLIDINWKLAIQMARFERDMHYIVNGLRELGIIKLNGYNTGISRAYPKRNGTGDFYITTAYYKFFDEESYKKFEKICYGFGIDLSENSEINKPENESIRNYISHFYIVRNPFVDYSIAEQIDRVSNLLSYSTRYNNSTYASVFEVFKKDVDLDYDKLKTKFKLFDDEKNDDIKILKIEDLIESKKVSVLELESYNSNYVKNLIIKLLTKVENTNNTL

SEQ ID NO: 171 - protein, 1186 aa, Artificial
  Synthetic
MKVTKIDGLSHKKFEDEGKLVKIEDASQKNETLERLEKLKEIKLGNYIKNPDKTKDKDNKKRRKGLKEYFSEITLRKENEKYVLLKGKKLKKINNDIKDTDIKVKYKKEEVFDVLKKILKLNLLANDVEEKIQFDSIKLKNVFGKDFVKKELQIKSIEESLEKNKADYRKEFIEIENDKYGNVKGENKKNRIYEYYKKSETHEKFRKNIIEAFEKLYKKDDIEKLYTQIIEISKKMHLKSKVRELYKNVIIKRSCDDFSKKNKEGISVLYSQIMNSVKKNEKFVKFVKNIELKDLTKSQIFYKYFLENEELNDENIKNIFCYFVEIEVSDLLKGNVYKVSKIYENKIKNIFEYNKLKKLVINKLENKLNNYVRNCGKYNYHMENGDIATSDINMRNRQTEAFLRSMIGVSSFGYFSLRNILGVNDDDFYEIEEDLTEEERKNESNVLKKAKEDITSKSIFEKVVDKSFEKKGIHSIRENVKMFYGDSFDKANEDELKQFFVNMLNAITSIRHRVVHYNMNTNSENIFNFSDIEVSRLLKSIFEKETDKRKLKLKIFRQLNSAGVFDYWENWKIKKYLENMKFEFVNKNIPFVPSFTKLYNRIDNLKGSNALNLGYINIPKRKEARDSQIYLLKNIYYGKFVEEFIKNNDNFEKIFREIIEINKNAGTNKQTNFYKLEKFEKLKANTPTEYLEKLQSLHKINYNREKIEEDKDIYVDFVQKIFLKGFISYLQKSNSLKPLNLLNLKKDEVINSEKSFYDEKLKQWENNGSNLSEMPKEIYKYIKEIKINKTNYSDRMSIFYLLLKLIDHKELTNLRGNLEKYESMNKNKIYSEELNIVNLVSLDNNKVRTNFSVEAEDIGKFLKTETSIKNINQLNNFSGIFADGENVIKHRSFYNIKKYGILDLLEKIVAKADLKIAKEEIKKYENLQNELKRNDFYKIQEKIHRKYNQKPNLILRTENKKDFNDYKKAIENIQNYTQLKNKIEFNDLNLLQGLLFRILHRLAGYTSLWERDLQFKLKGEFPEDKYIDEIFNSDRNNNQKYKSGGIAYKYVDFLIEKEEGKRAGKNKVKKRSEKEGSFIIRNYIAHFNYIPDAEKSILEILEELRELLKYDRKLKNAVMKSVKDIFKEYGFIVEFRISHESNSKKIKVLDVKSEKIKHLKNNGLVTTKNSEDLCELVKVMLEYKKS

SEQ ID NO: 172 - protein, 1161 aa, Artificial
  Synthetic
MKVTKVDGISHKKYIEEGKLVKSTSEENRTSERLSELLSIRLDIYIKNPDNASEEENRIRRENLKKFFSNKVLHLKDSVLYLKNRNEKNAVQDKNYSEEDISEYDLKNKNSFSVLKKILLNEDINSEELEIFRKDVEAKLNKINSLKYSFEENKANYQKINENNVEKVGGKSKRNIIYDYYRESAKRNDYINNVQEAFDKLYKKEDIEKLFFLIENSKKHEKYKIRECYHKIIGRKNDKENFAKIIYEEIQNVNSIKELIEKVPDMNELKKSQVFYKYYLDKEELNDENIKYAFCHFVEIEMSKLLKNYVYKKPSNISNDKVKRIFEYQSLKKLIENKLLNKLDTYVRNCGKYNYYLQDGEIATSDFIARNRQNEAFLRNIIGVSSVAYFSLRNILETENENDITGRMRGKTVKNNKGEEKYVSGEVDKIYNENKQNEVKENLKMFYSYDFNVDNKNEIEDFFANIDEAISSIRHGIVHFNLELEGKDIFAFKNIAPSEISKKMFQNEINEKKLKLKIFRQLNSANVFRYLEKYKILNYLKRTRFEFVNKNIPFVPSFTKLYSRIDDLKNSLGIYWKTPKTNDDNKTKEIIDAQIYLLKNIYYGEFLNYFMSNNGNFFEISREIIELNKNDKRNLKTGFYKLQKFEDIQEKTPKEYLANIQSLYMINAGNQDEEEKDTYIDFIQKIFLKGFMTYLANNGRLSLIYIGSDEETNTSLAEKKQEFDKFLKKYEQNNNIEIPHEINEFVREIKLGNILKYTERLNMFYLILKLLNHKELTNLKGSLEKYQSANKEETFSDELELINLLNLDNNRVTEDFELEADEIGKFLDFNGNKIKDRKELKKFDTNKIYFDGENIIKHRAFYNIKKYGMLNLLEKISDEAKYKISIEELKNYSNKKNEIEKNHTTQENLHRKYARPRKDEKFTDEDYKKYEKAIRNIQQYTHLKNKVEFNELNLLQSLLLRILHRLVGYTSIWERDLRFRLKGEFPENQYIDEIFNFDNSKNVKYKNGQIVEKYINFYKELYKDDTEKISIYSDKKVKELKKEKKDLYIRNYIAHFNYIPNAEISLLEVLENLRKLLSYDRKLKNAVMKSVVDILKEYGFVAKFKIGADKKIGIQTLESEKIVHLKNLKKKKLMTDRNSEELCKLVKVMFEYKMEEKKSEN

SEQ ID NO: 173 - protein, 1425 aa, Artificial; identical to SEQ ID NO: 3
  Synthetic

SEQ ID NO: 174 - protein, 1276 aa, Artificial
  Synthetic
MRIVRPYGESRTDLGGERGQTRVLVDNTAARARHEIPDFAQSHDALVIAQWISVLDRIATKPQGTQGATRAQHAFRDRLGRAAWAQMCAADRISAAAQADPYVAALWRFKTHPYGDAKYRPRKGKDGKPLGEPKPQGRWYGRFAANAEPEQADVAAIAALMDHHLHVAELRIDPKRPEKRKGLIEARAKSIEGNVLVAEPRKRPVGSWSREAITRYFMRQDVAAEIFAAARDREQGLNDVPRGPVRLALAAKILHGHWTRLFHAPGTRTAYSIREAEEKEPELFALHMAVKDAYAKLLKRRTQPKTLKKGVKPPQQAPVTTVLPKNAGELLRLVQHRSRNRDLSALIRRGKLIHYTAFDIAAAAAEAESKTPDVPDADRLAYVLTHWPDDLSASRYLTSDGQSAIKRSEAFVRVWRHTIAMASLTLRDWASMNNDLGDVLGSANKVDQAIGRANFDPAWHDKKVRLLFGARAALFPSDDDGRKALLASVIRAGLALRNSSFHFTGRGGFLAALKKLGSEEVMVPSILAAAHALWREDATARAGRLRAALTGAHAAHYFEEDQNASILTLLDEAPPKESLPIPRFRRVLGRAENTWKGKEALVLPPTANRRQLEDPARRCRYTILKALYERPFRSWLIARAPEEVNAWIDRAIERTTRAAKDMNAKRGEDDKRSVIAAKAESLPRLSGERGIGDFFFDLSSATASEMRVQRGYGHDGEAAKEQAGYIDDLLCDVVALAFDAWLRNPQANGRPLTFICDLKPETPLPAAPKCTLQEIGSAAEPVRPEDWQAALYLLLHLVPVGEAGRLLHQLAKWTVTSRLADDLLNANVTDDPSKAERTADEEDLKRLVHTLIQHLDMHDAKFEGGDALTGCEPFAALFASRPGFARIFPAEADERLDRRVPKRGLREIMRFGHHGLVASFAEDTRITDKEVGDYLRLEIEERPDNVAALQARKEEAHERWVKAKEKRKTVDPKHLEDYVTALCGIARHRRLASRVTLTDQVQVHRLLMTVLGRLVDFSGMFERDLYFAMLGLLDEKGARPDEVFSGPIDEPKSRLALLANGRVLAALREQIPHSKDLAEELRKDLERLFGMDCSGIRLLEADERGDTCLRDIRNDLSHFNLLHDDSFALDLTTLVNRTRGLMSYDRKLKNAVSKSIKELLAREGLTLSWDMTDRHDLENARIGAKPAVHLGGRKLAFRGGDRRPEPVRENLHSPTHLEAVARLFGGKVVEEDDVTNLDLSSIDWAAEPHNSKETHRHRPAGPRKSPPKRRAYHAPR

SEQ ID NO: 175 - protein, 1349 aa, Artificial
  Synthetic
MPLQAAGFGKPRRSPMRWLQALSRPERRKPGRWCGKSARPNGTVANGLDGLHPCLGGFCAGGATMQIGKVQGRTISEFGDPAGGLKRKISTDGKNRKELPAHLSSDPKALIGQWISGIDKIYRKPDSRKSDGKAIHSPTPSKMQFDARDDLGEAFWKLVSEAGLAQDSDYDQFKRRLHPYGDKFQPADSGAKLKFEADPPEPQAFHGRWYGAMSKRGNDAKELAAALYEHLHVDEKRIDGQPKRNPKTDKFAPGLVVARALGIESSVLPRGMARLARNWGEEEIQTYFVVDVAASVKEVAKAAVSAAQAFDPPRQVSGRSLSPKVGFALAEHLERVTGSKRCSFDPAAGPSVLALHDEVKKTYKRLCARGKNAARAFPADKTELLALMRHTHENRVRNQMVRMGRVSEYRGQQAGDLAQSHYWTSAGQTEIKESEIFVRLWVGAFALAGRSMKAWIDPMGKIVNTEKNDRDLTAAVNIRQVISNKEMVAEAMARRGIYFGETPELDRLGAEGNEGFVFALLRYLRGCRNQTFHLGARAGFLKEIRKELEKTRWGKAKEAEHVVLTDKTVAAIRAIIDNDAKALGARLLADLSGAFVAHYASKEHFSTLYSEIVKAVKDAPEVSSGLPRLKLLLKRADGVRGYVHGLRDTRKHAFATKLPPPPAPRELDDPATKARYIALLRLYDGPFRAYASGITGTALAGPAARAKEAATALAQSVNVTKAYSDVMEGRSSRLRPPNDGETLREYLSALTGETATEFRVQIGYESDSENARKQAEFIENYRRDMLAFMFEDYIRAKGFDWILKIEPGATAMTRAPVLPEPIDTRGQYEHWQAALYLVMHFVPASDVSNLLHQLRKWEALQGKYELVQDGDATDQADARREALDLVKRFRDVLVLFLKTGEARFEGRAAPFDLKPFRALFANPATFDRLFMATPTTARPAEDDPEGDGASEPELRVARTLRGLRQIARYNHMAVLSDLFAKHKVRDEEVARLAEIEDETQEKSQIVAAQELRTDLHDKVMKCHPKTISPEERQSYAAAIKTIEEHRFLVGRVYLGDHLRLHRLMMDVIGRLIDYAGAYERDTGTFLINASKQLGAGADWAVTIAGAANTDARTQTRKDLAHFNVLDRADGTPDLTALVNRAREMMAYDRKRKNAVPRSILDMLARLGLTLKWQMKDHLLQDATITQAAIKHLDKVRLTVGGPAAVTEARFSQDYLQMVAAVFNGSVQNPKPRRRDDGDAWHKPPKPATAQSQPDQKPPNKAPSAGSRLPPPQVGEVYEGVVVKVIDTGSLGFLAVEGVAGNIGLHISRLRRIREDAIIVGRRYRFRVEIYVPPKSNTSKLNAADLVRID

SEQ ID NO: 176 - protein, 1349 aa, Artificial
  Synthetic
MPLQAAGFGKPRRSPMRWLQALSRPERRKPGRWCGKSARPNGTVANGLDGLHPCLGGFCAGGATMQIGKVQGRTISEFGDPAGGLKRKISTDGKNRKELPAHLSSDPKALIGQWISGIDKIYRKPDSRKSDGKAIHSPTPSKMQFDARDDLGEAFWKLVSEAGLAQDSDYDQFKRRLHPYGDKFQPADSGAKLKFEADPPEPQAFHGRWYGAMSKRGNDAKELAAALYEHLHVDEKRIDGQPKRNPKTDKFAPGLVVARALGIESSVLPRGMARLARNWGEEEIQTYFVVDVAASVKEVAKAAVSAAQAFDPPRQVSGRSLSPKVGFALAEHLERVTGSKRCSFDPAAGPSVLALHDEVKKTYKRLCARGKNAARAFPADKTELLALMRHTHENRVRNQMVRMGRVSEYRGQQAGDLAQSHYWTSAGQTEIKESEIFVRLWVGAFALAGRSMKAWIDPMGKIVNTEKNDRDLTAAVNIRQVISNKEMVAEAMARRGIYFGETPELDRLGAEGNEGFVFALLRYLRGCRNQTFHLGARAGFLKEIRKELEKTRWGKAKEAEHVVLTDKTVAAIRAIIDNDAKALGARLLADLSGAFVAHYASKEHFSTLYSEIVKAVKDAPEVSSGLPRLKLLLKRADGVRGYVHGLRDTRKHAFATKLPPPPAPRELDDPATKARYIALLRLYDGPFRAYASGITGTALAGPAARAKEAATALAQSVNVTKAYSDVMEGRTSRLRPPNDGETLREYLSALTGETATEFRVQIGYESDSENARKQAEFIENYRRDMLAFMFEDYIRAKGFDWILKIEPGATAMTRAPVLPEPIDTRGQYEHWQAALYLVMHFVPASDVSNLLHQLRKWEALQGKYELVQDGDATDQADARREALDLVKRFRDVLVLFLKTGEARFEGRAAPFDLKPFRALFANPATFDRLFMATPTTARPAEDDPEGDGASEPELRVARTLRGLRQIARYNHMAVLSDLFAKHKVRDEEVARLAEIEDETQEKSQIVAAQELRTDLHDKVMKCHPKTISPEERQSYAAAIKTIEEHRFLVGRVYLGDHLRLHRLMMDVIGRLIDYAGAYERDTGTFLINASKQLGAGADWAVTIAGAANTDARTQTRKDLAHFNVLDRADGTPDLTALVNRAREMMAYDRKRKNAVPRSILDMLARLGLTLKWQMKDHLLQDATITQAAIKHLDKVRLTVGGPAAVTEARFSQDYLQMVAAVFNGSVQNPKPRRRDDGDAWHKPPKPATAQSQPDQKPPNKAPSAGSRLPPPQVGEVYEGVVVKVIDTGSLGFLAVEGVAGNIGLHISRLRRIREDAIIVGRRYRFRVEIYVPPKSNTSKLNAADLVRID

SEQ ID NO: 177 - protein, 1349 aa, Artificial; identical to SEQ ID NO: 175
  Synthetic

SEQ ID NO: 178 - protein, 1349 aa, Artificial; identical to SEQ ID NO: 175
  Synthetic

SEQ ID NO: 179 - protein, 1380 aa, Artificial; identical to SEQ ID NO: 143
  Synthetic

SEQ ID NO: 180 - protein, 1219 aa, Artificial
  Synthetic
MKLTKSKNAKESFFYRNAEKGKLYIHDFLNEDSTDTVIDQLPLNDSLIGRILSKCDKTKSYKQNPFEKFIKDLVVSGTVELPTNKDIGFNKKFQAEKYFSHYGRALKIVKDGKTIELMDLLKEYYEDGKNISEDLTIWSETLKGRVVYKKKRLKKSISNNKIFFPLNINESNDKKMSKAQWLLGFITNEEKFTKYKDWYDYESLYEKLKPLKEKANYLKMPQKWGGCIYAEVQKHHRELYQKKKTEALSTEELQGFVFYLGEVQAYFRHYFGSSKAGKSLDKEYKVNKLMEVKKGELDESYLYKWIKAHITNKITALLIQNGKLTQYKVSQPTSDNLSNIQIEESFKKQLFLSIAWATTRLNYFFDYGSNNDDLLGEPQNNSTIGTTITGDILLEFNQNTTLKDIYQKNQKNTTTYIEYFLAELKENKNNNKTVFQEKACTTFPIQIKKDNQDKAVEDILDVLDAAKESISYLRNNIFHPQKEYLYELTLPDKIKGILEHDYFAKVKKVLATDIFRIDSCFKEKIRSSLIADIYPLEILKKIFSDCNLAFHIYAPKYELMPAFRKVYQRGTNLCSQDGTQRKLSWFYNKPVFDSEVDVSQERNDIKKWQAYKNLLQMIYEHSFLPAVHDDESLIKKYINETIKQSQEASRAGNEYCFRYNNMPKHNGLNLAEYMAELQRLQSAEESNQHDNIKNKTDDKNYYIDFVQDLFVRAFDHYLEKHLTNIKGQLFSTLSNDLSKSTETTLDRLFQKDKPITSMQHDSFLSENDDLCLLLYPFLRMLERRELSNLQHQVIRYRCSLKNRRFEEMKSSEKLEQLIAMLIFTFPEHIDEEECYKDMIETHFKKLVEGPIETYMDLYCQKEAVSQKVIQQKSMLALMRTGGMALYSEMFSSIYKITQKDYNKYKSYRELGENTGNNQPSPIEKVQGKLAILHKELCKEKSIFKNNEKLKDYEKKLTFVNEYSGLRRKITFDLLYELHLIHVDILGRLASFAADWERDMHFLLLGLYNLGQQCGKDILTLNEKNIEDIYDHKIQGTMTTKFLAAIKEETNRKILTQLYFPNDSLPLSRKKLEELIRPRNSLAHLNHMTQLKQGNSYQKSIIVLLTAVGKLLNYDLKRKNSVTRVLKELLKKYHINLSLYQKSDYEYELYTKEDCKCNHKRPSIESENIVHLKDVKMGGDKKGITIPAKDELFVKCIEKLLIFSYNETEDKKVRNRSTHR

SEQ ID NO: 181 - protein, 1101 aa, Artificial; identical to SEQ ID NO: 73
  Synthetic

SEQ ID NO: 182 - protein, 1412 aa, Artificial
  Synthetic
MKLSKEKHTRSAVANNGDIKSAEVNNGNTKSEEVNNGDIRSAVANEEQNIGGILYRFPGKSIDGVKDQMLRRDKEVKKLYNVFNQIQVGTKPKKWNNDEKLSPEENERRAQQKNIKMKNYKWREACSKYVESSQRIINDVIFYSYRKAKNKLRYMRKNEDILKKMQEAEKLSKFSGGKLEDFVAYTLRKSLVVSKYDTQEFDSVAAMVVFLECIGKNNISDHEREILCKLLELIRKDFSKLDPNFKGSQGANIVRSFRNQNMIVQPQGDRFLFPQVYAKENETVTNKNVEKEGLNEFLLNYANLDDEKRAESLRKLRRILDVYFSAPNHYEKDMDITLSDNIEKEKFNVREKHECGKKETGLFVDIPDVLMEAEAENIKLDAVVEKRERKVLNDRVRKQNIICYRYTRAVVEKYNSNEPLFFENNAINQYWIHHIENAVERILKNCKAGKLFKLRKGYLAEKVWKDAINLISIKYIALGKAVYNFALDDIWKDKKNKELGIVDERIRNGITSFDYEMIKAHENLQRELAVDIAFSVNNLARAVCDMSNLGNKESDFLLWKRNDIADKLKNKDDMASVSAVLQFFGGKSSWDINIFKEAYKGKKKYNYEVRFIDDLRKAIYCARNENFHFKTALVNDEKWNTELFGKIFKRETEFCLNVEKDRFYSNNLYMFYQVSELRNMLDHLYSRSVSRAAQVPSYNSVIVRTAFPEYITNVLGYQKPGYDADTLGKWYSACYYLLKEIYYNSFLQSDRALQLFEKSVKTLSWDDEEQKRAVDNFKKYFSDIKSACTSLAQVCQIYMTEYNQQNNQIKKVRSSNDSIFDQPIYQHYKVLLKKAIANAFADYLKNNKDLFGFIGKPFKANEIREIDKEQFLPDWTSRKYEALCIEVSGSQELQKWYIVGKFLNARSLNLMVGSMRSYIQYVTDIKRRAASIGNELHVSVQDVEKVEKWVQVIEVCSLLASRTSNQFEDYFNDKDDYARYLKSYVDFSNVDMPSEYSALVDFSNEEQSDLYVDPKNPKVNRNIVHSKLFAADHILRDIVEPVSKDNIEEFYSQKAEIAYCKIKGKEITAEEQKAVLKYQKLKNRVELRDIVEYGEIINELLGQLINWSFMRERDLLYFQLGFHYDCLRNDSKKPEGYKNIKVDENSIKDAILYQIIGMYVNGVTVYAPEKDGDKLKEQCVKGGVGVKVSAFHRYSKYLGLNEKTLYNAGLEIFEVVAEHEDIINLRNGIDHFKYYLGDYRSMLSIYSEVFDRFFTYDIKYQKNVLNLLQNILLRHNVIVEPILESGFKTIGEQTKPGAKLSIRSIKSDTFQYKVKGGTLIIDAKDERYLETIRKILYYAENEEDNLKKSVVVTNADKYEKNKESDDQNKQKEKKNKDNKGKKNEETKSDAEKNNNERLSYNPFANLNFKLSN

SEQ ID NO: 183 - protein, 1349 aa, Artificial; identical to SEQ ID NO: 175
  Synthetic

SEQ ID NO: 184 - protein, 1137 aa, Artificial
  Synthetic
MCMKITKIDGISHKKYKEKGKLIKSNEIEKDVTEERFNDIEAKTTELFLKTLDSYVKNYEKCEEQNKERREKAKNYFSKVKLIIDNEKITICNENTEKIEIEDFNEYDVRNRKYFNVLNKILNGENYTEEDLEVFENDLQKKLNQIQSIKNSLEENKAHFKKESINNTTDRVKGNNKKSLFYEYYRNSSKHQEYVNNIFEAFDKLYSNSHEDINNLFLEITKDSNDRNIRKIRETYHEILNKNKTEFGEELYKKIQDNINNFDKLLEIEPEIKELTKSQIFYKYYIDKVSLDGTNIKHCFSHLVEIEVNQLLKNYVYSKRSTNKEKLENIFEYCKLRNLVKNKLVNKLNSYIRNCGKYNGYISNNDVVNSEKISEIRTKEAFLRSIIGVSSSAYFSLRNILNTDNTQDITNKVDKEVDKLYQENKKIELEERLKLFFGNYFDINNQQEIEDFLMNIDKIISSIRNEIIHFKMEANAYSIFDFNNVTLGNKAKKILNEEINKEKIKLKIFKQLNSANVFDYLSNEDITEYMGKAVFSFTNRNIPFVPSFTKIYNRVQDLANSLKIEEWKIPEGSEKKDAQIYLLKNIYYGEFLDKFLNEENGIFISIKNKIIELNRNQNKRTGFYKLEKFEKIEEKNPKKYLEIIQSLYMINIEEIDNEEKNIFLDFIQKIFLKGFFEFIKNNYNYLLELKKVQDKKNIFDREMSEYTTGEKTLEDMEEINEITQKIKITEIDKILNQTDKINCFYLLLKLLNYKEITELKGNLEKYQILSNTNIYEKELTLLNIVNLDNNKVKIENFEISVKEIGKFIEKISGNRKIETFEELRNFEKIGNSVEYYNVYSDDKNIKNIRNLYNIKKYGMLDLLEKISEKANYCIKKKNLEEYNELKKQLEDEKTDFYKIQKDLHYKYQKKYKNFSEKNNIEDYKKYKKSIENIEKYVHLKNKIEFNELNLLQSLLLKTLHRLVGFTSIWERDLRFRLTGEFPNELDVEDIFDHRKRYRGNKGQICKKYDQFISVHIEYQNNNKMKNIKFDDNNPIRNYIAHFNYLPTPKYSILKMLEKLRELLDYDRKLKNAVMKSIKGILEEYGFEAEFIINPNKEIILNSIKSAEIIHLKKNDLKSHRNSEDLCKLVIAMLEYSK

SEQ ID NO: 185 - protein, 1388 aa, Artificial
  Synthetic
MKLSKVTYRVKDKNAKYKKEYNVRAAVANNSENAGGVLYHVPGVDLIDLKEQMLDRDRSVRLLYNIFNQIQTGTKPKKWGNDETLSVDENERKAKEQNIKIMNYKWREACSEYIEKSQSTINSVLFYSYEESGYKTKRMNDNEAIIVKMQYENRLSHFTGGKLEDFVAYTLRNSLVVSRYDNQEFDSVNAMVVFINNIGNGNISDKDKKTICKLADLIRNDFSKLNPNVQSSQGANMVRSVRNQNMVVQPQGDIVSFPLVSDEGKNTVTNKNVEKKGLNEFLLNYANLDDEERMENLRKLRRIIDVYFSSPSHYQKDMDISLSDNIDKTKFVVWKKHETGKKNTELFVDIPDELFTAETEKIKLDAVLEKQARKRLTDSIRKQNMICYRYTRAVVEKYNSTENLFFENDSINQYWIHHIENAVERILKSCKAETLFKLRRGYLTEKVWKDAINLISIKYIALGKVIYNFTVDDIWKDKKVKNLGSIDEKIKHGITSFDYEMIKAQEALQRELAVNVAFAANNLARAVCDMTNLKDKESDFLIWNKKDIANKLKNKDDMASVSVVLQFFGGKSSWDIDAFREAYKGNKYNYEVCFIDDLRKAVYAARNESFHFKTALVNNDIWNTEFFGKLFIKETEICLDIEKDRFYSNNLPVFYSDNDLKKMLDHLYNNKVSRAAQVPSYNSVMVRKYFPENITSTLKYQKPGYDEDTLEKWYSACYYLLKEIYYNSFLQSDEALALFEESVNNLKGDNKDQELAVKNFRNNYKNIKSSCTSFSQVCQMYMTEYNQQNNQFKKVRSSKDSIVDKPIYQHYKLLLKKVIANAFASYLQHNKELFGFIGKPLKVNCLKEIDKEQFLPEWTAKKYVSLCEEVRKSPELQKWYIVGKFLNSRSLNLMAGSMRSYIQYVNDIKRRADGIGNELHVIAQNLDVVDKWVQVIEVCLLLSSRVSNEFEDYFYDKDDYAAYLKSYVDFDNSDMPSEYSALVEFSDQGKVDLYVDPSNPKVNRNIVQSKLFAADYILRDIIEPVSKDEIEDFYNQKDEITICKIKGAELTDEEQKKILKYQKLKNRVELRDVVEYGEIINELLGQLINWSFMRERDLLYFQLGFHYNCLRNDSAKPEEYKNLVLDDISIKDAILHQIIGMYVNGVAIYAPGKDENKLESQCAQGGAGGKIGAFCRYSLYLKLAADTLYNAGLEVFEVLPEHEDIIKLRNGIDHFKFYLGGYRSIMSLYSEVFDRFFTYDMKYQKNVLNLLQNILLRHNVIIEPIFESGIKKIGKDTKPCAKLCISSIKSDSFEYKIKDGTLITDAKDKRYLETIKKILFYPEVESEVRILSSKDSFEQNNQYGYMKGKSENNKNKKNKKNNGNRDEKKNSDGLTYNPFLNLPFELPE

SEQ ID NO: 186 - protein, 1360 aa, Artificial
  Synthetic
MQMKISKIKNSRPGISVTENKNEEQLSRQSLLYYAPVKDGKIRLESKDLEQHVTECNEKAQKLYNVITPEINFYRDENRQKMVENLARNFNAVINNALRSIRNPKEKKERRVEKEVAFILNLSKKSIKLKKNVFVKSTDLIVKFPENNKYNKKNDKGTGSKEAYIQKMISDLVLRKLKKTLRKEVKLENGCRMQMTEIIISLMSAICLYGNAESFDPAILKAFFEKVDSDYTKYKYVEQIVKSIESQSAKLKVVEKDGRHLLISANADHRKKKYVFEFMRMYAAADEKEKRELTEHIQDLIGLYLCGKAGYENAENRFSDMIESHNCICGKIEEILNELEKPENLSQQKKENLKNTTVKVMALKYRAAVNYLADEVGKTVLGEIREKKVRSCADLYWIEYIDSTVEKLLLKSRNKDGYRYEIGFLSKHLWKEWTQYISGKYIEMGKGVYHFAIPDLSGALEGESVSICEVKPEYRNGVSGFDYERIRAEESLEREMEKYVLFAVNNFARAVTPEEEREKSGHEDVLLMKTLSEIEESQTKEERQKKHDNNVKNAITLYADADRRILQFFGGQSRFREKEDSLINLYSGEDLYKEIRKELYAIRNITFHYTTKAEKDQTQKHDLAEYLFEEEFSDITELFREKYYANNVWKYYDAEVINTIMENIYCGRKYRAAQVPAFKNIISRPELPQVMNGFVKGNSLRRLMNCPDRDVINKYWSALFFVLKELYYYDFLQEQKRPEDNVKERFFRAIKKLSGQEKGDKEQKAWESFENRIDQIGRDRSFGAICQGLMIEYMLQNSDISMVQTETDNGKANNKKQIYKHYRTLLYNCISEAFIEYLREKWKELRTPVLTVKEWSKEEFCRADGLKHLSLFDHLKETFNDAESGSSWYMAAHFINQKYLNHLLGSIRNYLQFTEDIEDRAISLGDCVDNKREEKNLRYRNTVEILEFVAQFCERTTNVMEDYFESNQEYAEYLSGFVDYNTTKKETDIEKALYSFCKQKFKVDGKEYMAGIYYDGENLIPNRNIIRANMYGNTSCLKPCMDRITLKEIRTMYADQNKLDLVLKEGVCHTEEEQKAYREYQNEKNRIELFDVCTYTQILNDMQARLIGWSYMRERDLMYYQLGYYYTKLFWTDSISEEDARRRLVGNLVNVEDGAILYQILAFNSYNLPIIANKNNTVTLLKDEGSIGGKAITAFFKNYENAEMIYEEALDLFENMDEHAAIINTRNYIEHFKYFIKSDRSMMDLYSEIYDRFFRHDHNRKKNVPDSLKNVLADNFMIVDIDMELGSKKVGEKKKGFREHKAARIEFTDSGIRSTDMTYTIKPDIKDNKKDKKVLVPARSEVFLKQFRKILEYRIQDKTQ

SEQ ID NO: 187 - protein, 1217 aa, Artificial; identical to SEQ ID NO: 111
  Synthetic

SEQ ID NO: 188 - protein, 1353 aa, Artificial
  Synthetic
MKVTKAEKLRVAVSRKLNNEDKRAVLYKTPNPGQTCGTVKKQLANRVERANKLYGVFFRSDVPETLQYHFEELVTYAAQSTSPNEFRQKASQYRECEKKDKFGKMRKYPIFRCSYAPSGKNMKKVMELYVRERMKDEWQSQAYRTAAIEILLCICNKDFSKQLSRVDARIFADFYNASKACPQPYIGKSTGVLEAAFTSVMKQMSLHAKANASNKIWWLQNQLRTIELNKKIVKISDFKYEYATEDRMRAILVRMRKSLKRGTNGDIAVALLQGIAQMNGKTLSGVLEELSANSETKEQLIKFLKAVHEDYHKTPILKAIRNQDVKVQVHEVDPVSPEGRALDLASINVSKGNERKKYKVALTQTLGNYAKSPKDATQTLKAIKGVLLDYFMWLDSDVKAEFLEDNNLWKIPNRTEEYFDNNFVPIDDKKDDKIEAIEDFASIWRQERVKNSRIKARMNYVNCGKYQQLIKQETDDFRICWISYAKDFVEKNYVSKNRQFTQGDCFSTKMLLECWKEIIRFICGKYIDIGKAVYHFAMPETMNARDSLAYGVLGEKYKEGISSFDYEAIKAEETLQRDIAKAAVAAIHAFSGSVIDDKKPVEDILFIKDEELQEHAKADDVIVKQILRFYGGFSSVEGREKLEGMALAKEVLSQLKAIRNENFHFTQGKRKNVEENIPLTKALWENEEKVYRQTVKETYYSNNVSMFYSQEVIQKLVAELYQNNNVAEAQIPAFRTIWKRKDLPEYIGSLNISWDKTEPKQVIYEGALYFLLKEIYYRDFIKSGEAKKLFFDAVMDNATEMEKSSNADSRNQEKKALANAGKNFRDYVNGLNASTLGEVCQFIQNEYNQQNRGKQEQEIYKHFKMLLPICMRKAFQRYIDEKHSFIKKPGELPQTTEDYLENVKVACPEKKIKLGRWFTFAHFIHPRELNFLIGDFKNYIQYREDVLRRSEHAGQFSDTTERDGEKAVVDHAVQKAKDILGVLEFVRHISGRVSNEFTDYYADRAEYDEYMAKYFEPDVQIEQYDLYGDAKNAKVIRNIELARMYAGDSLMSASYRKITKKEIETYYAKKDEIAQLQSQGICNSKKEQEDIVAFQKLKNRITLNEVTDLWSLVNELLGNLVSLAYLRERDEMYLFLGFYYMALRHPEGWTNEIMNSVSNEKYAVKEGLVLYQTVAVFDFGTKLLFQNDNQKWEETTGYKWQHFIDNHKESYACILPLFEIAKCETEARAVRNYVDHFKYYSNEDRSILELYGKFYTHLFGYSTRLRKSVLQILAQTLEKHGISAGIQFDGTTVKATRCDMKSVEFTYKYEEKLNEQKTVLRTISLPAKSEGFITAVCEMLKQKKGDHTENTLC

SEQ ID NO: 189 - protein, 1330 aa, Artificial
  Synthetic
MKREKNITIMKISKVNHRRTAVALNGDKSELGGILYEAPVQKDRNGNYNDVIAETGKVVNEALDKKSRLYTPFNNQKVIIDKNLQRYANNLKRCYINFVKQYVNNKSFNYKAMQFIPDIQNPKTNDAVNYRTDRDNVYNKNKYYDKQTKSKSKKFIYEKIVIPQNEQNIVISALVNCSLRKSLRKDVSYKTKTGEIKTYNLPELVKKSMRFYCLEGQREPDEKEKYEMYILFSYMKEDKRTKNTDLLVKSISNQNTKVKVEDIDGNKLLKLSIADTKKKPLWEYLIKYADSSRQRELMYDIRKKIVLYVAGIEEYENIKEDSGLSKVSWSKYNISDNKMFFDINSCTDKRKQNLEIKIREANIEHYRNASSKLCDDESIFWFQHFEGVIETLFSKKSKISEERLGCAYICDYLWKDFLSYLAAKYIDLGKGVYHFTMKDKLDMLNKNEAVTDLRFGIVSEKYEKGITSFDYERIKAEEELDRNIAAYVTFAADIFAKSVIKSDYRTKKDNNSDVLQYSDKEFRNSEVIRDNAEKNILQYWGGYSRWGTENSKLPENNKVSDFGKLDVSDLCIDIKKHLAGIRNSSVHYTTKIKNESAADGSNVKILFEKDLADINIIYADKYYSNNVWMFYSLEDINKLIAFLYKEKRVIRQVQIPSFSRILKRKAMQDVINEIFKDDFDENIVNPELKEKYRNSLYFMLKEIYYNAFIIQPELKEKFKDKIKTMKSELYNKLKTIDKKEYKALYCMLSNEESALKNFADRIYSVDGDNVSFADICKILMTDYNMQNQEKKNIESMEQKKKNKGKDENYKHFPLLLHKVLKELFIEYLKQTHELEFLRNNICIKSDVTMESFESQIKGVEIYKDLKEKIDKNNSLLDWYVIAHFLMPKQLNHLIGNIKNYIQFATNIDKRAESVKNLTESGMVKRIQYYDDIVRTLEFSAQYIGKISNNINDYFNSEDEYVSFLSKYVGFINDKSEDVLTELKDFCREKINNGSQIIGIYYGGDNVIINRNVIYAQMYSNAEVFSNIYKKVTKNDIINYYEKQNDLKDVFKSGVCQNEDEQRSLCEFQQLKNRIELTELSTYADMVNDFMAQFVEWAYLRERDLMYFQLGIHYIRLFYSDNVLDEKYHKLSDNVIDIEEGALLYQIVAMYDYELRIFETDNFGNAKRIGQGGPGKSIPVFLKKYCNGTDVYECGLELFEDINQHEHIIRFRNDIAHMRYMSNQAMNIMSIVSNIYKSFFVYDTKLKKSISLVFKNILMRYGVIADLVFSYNNKNQSIKDDMDINIINIKNLKSDKYVYKIVNEDIVKQVEIEIRNQVFLEQLHKLLYFSR

SEQ ID NO: 190 - protein, 1351 aa, Artificial
  Synthetic
MQILKPIGRSSTRYAIEKNTFLLRRFLADRYLDAFSNELAVPIEDISVLRMIPIDEGRELVRQAASLFNKTVKSSRLLRNMDMQTYVDRVFLSQELIKYILDAVNIRDGAEFSSLKELWVGLVHPYASHEIDNRSPSEDKNAAIIKKFGLKDATRVSFNGRWHDAFWVLGKNGKPDYAAIALNMMTHLVFDEMKINGDLRQCRNKYGEFNGAIVRRALSIFTSTHDPRFSSNRTISDFATEYYFYKDVAEEIFGLAHASESKDVRLTHKEAGRVLYEHFGGNPNAGSYKEFDREIQKQIWELHNKVRSFYADALSSVRFVRIFDKDGARRNEIISVIPPNKLSLLARLKVRSEKRDLVRMVRLGKAVVHALDKSSSATDEEAQGAFNVNLDFLLTSEGQAEIKRVESFARAWRESVGLSCRTIGVWSKLASAPPKKDGTDWDVTEADYAKKRVPLLSPETDIRPAARLIFGDKQVGRGKTSRLEAILATESNPTEILWGFVRLNSEMRNASAHFNTRKRFVELIQDSIIKPLKAPTVNYENRGGNEVALEALEAFGRLLQFDESLVFDLLEEEIKSLRLDRFAADADLKALVREASPNTSGSQIATPKFMSLMERAVGLATSRSEFVPDELQRFARLNLAGLSSRSDEDDVSRIGALRLVYGRGFERWLTEHLSDSSQIRQLLRRIGELHTKRRLEYDSAHNRPTQPGIDLLERIDIDSISSLEDLARRLTIEAMTDSSLATRARRASRNRYEQNVLTDERRQRSGQVELVRQEIYGCLFARYLNESGLDWIFADFPEPKDVAVPFEIGATTSSHHPSWHASFYGWLYLLPPDDVALLRHQFKKTAALEERAEDGLSPDDMTVLYDIDGLMALYVSVQSAGFGGREHAIDVKPERGAGTDRSVYYEDTSQFARVFSEDKETHRDSVPGTRRGLRQLRFENIPSLLSIFEKHRVTVPEVESFMKKAGPDNAIRVGLLEEKTKLRNKLADMAKSRDSRPFMAPDVERYRSLAGELARYDFEINAARLTEFSRLYRLAMRIIGRLNDFTLMWERDRLYMLMGMLYEKLGAEGFRVEVKAWNNGTEQRRWIAIAVGDGASSGAIDEKPPSRAGDVSTWMLRKYSCLPIWDSRFGIVAKGTEEETKLLSPEDRIVFVRHFVGAEAENPRDIEARRDKPPAPPRRGADARSWRNGKAKIRNDFAHYNMLGSSVKILNLTYRVNAVRSLFGYDRKMKNVVSKAISDILLDEGLAIRWKMREDRLRGALVLPLVRKELAFLGLVDGKDLSIDLPQVSVRFTSMVQALFGFDSGGHRELVETEGKLKARGRLTYPREFLARHGDRLPKEVLSEYPSLPQK

SEQ ID NO: 191 - protein, 1330 aa, Artificial
  Synthetic
MKREKNITIMKISKVNHRRTAVALNGDKSELGGILYEAPVQKDKNGNYNDVIAETGKVVNEALDKKSRLYTPFNNQKVIIDKNLQRYANNLKRCYINFVKQYVNNKSFNYKAMQFIPDIQNLKTNDAVNYRTDRDNVYNKNKYYDKQTKSKSKKFIYEKIVIPQNEQNIVISALVNCSLRKSLRKDVSYKTKSGEIKTYNLPELVKKSMRFYCLEGQREPDEKEKYEMYILFSYMKEDKRTKNTDLLVKSISNQNTKVKVEDIDGNKLLKLSIADTKKKPLWEYLIKYADSSRQRELMYDIRKKIILYVAGIEEYENIKEDSGLSKVSWSKYNISDNKMFLDINSCTDKRKQNLEIKIREANIEHYRNASSKLCDDESIFWFQHFEGVIETLFSKKSKISEERLGCAYICDYLWKDFLSYLAAKYIDLGKGVYHFTMKDKLDMLNKNEAVTDLRFGIVSEKYEKGITSFDYERIKAEEELDRNIAAYVTFAADIFAKSVIKSDYRTKKDNNSDVLQYSDKEFRNSEVIRDNAEKNILQYWGGYSRWGTENSKLPENNKVSDFGKLDVSDLCIDIKKHLAGIRNSSVHYTTKIKNESAADGSNVKILFEKDLADINIIYADKYYSNNVWMFYSLEDINKLIAFLYKEKRVIRQVQIPSFSRILKRKAMQDVINEIFKDDFDENIVNPELKEKYRNSLYFMLKEIYYNAFIIQPELKEKFKDKIKTMKSELYNKLKTIDKKEYKALYCMLSNEESALKNFADRIYSVDGDNVSFADICKILMTDYNMQNQEKKNIESMEQKKKNKGKDENYKHFPLLLHKVLKELFIEYLKQTHELEFLRNNICIKSDVTMESFESQIKGVEIYKDLKEKIDKNNSLLDWYVIAHFLMPKQLNHLIGNIKNYIQFATNIDKRAESVKNLTESGMVKRIQYYDDIVRTLEFSAQYIGKISNNINDYFNSEDEYVSFLSKYVGFINDKSEDVLTELKDFCREKINNGSQIIGIYYGGDNVIINRNVIYAQMYSNAEVFSNIYKKVTKNDIINYYEKQNDLKDVFKSGVCQNEGEQRSLCEFQQLKNRIELTELSTYADMVNDFMAQFVEWAYLRERDLMYFQLGIHYIRLFYSDNVLDEKYHKLRDNVIDIEEGALLYQIVAMYDYELRIFETDNSGNAKRIGQGGPGKSIPVFLKKYCNGTDVYECGLELFEDINQHEHIIRFRNDIAHMRYMSNQAMNIMSIVSNIYKSFFVYDTKLKKSISLVFKNILMRYGVIADLVFSYNNKNQSIKDDMNINIINIKNLKSDKYVYKIVNEDIVKQVEIEIRNQVFLEQLHKLLYFSR

SEQ ID NO: 192 - protein, 1199 aa, Artificial
  Synthetic
MLRRMCMKITKIDGVSHYKKQDKGILKKKWKDLDEREQREKIEARYNKQIESKIYKEFFRLKNGKDSGRITEEKNEGIKSLYYLIKELYEEKENDLWELKNINLEILDDKERIIKGYKFKEDVYFFKEGDKKYYLRTLLNNLIEKNQNENRDKVRKNKEFSDLKEIFKKYKDRKIKLLLESINNNKINLEYKKENVNEEIYGINPTNDREMTFYELLKEIIEKKDEQKSILEEKLDNFDITNFLENIEKIFNEETEINIIKGKVLNELREYIREKEENNSDYKLKQIYNLELKKYIENNFSYKKQKSKSKNSENDYLYLNFLKKIMFIEEVDEKKGINKEKFKNKINSNFKNLFVQHILDYGKLLYYKENDEYIKNTGQLETKDLEYIKTKETLIRKMAVLVSFAANSYYNLFGRTENNILTQEISDDLLLGKIENEIYIKGEKNRRYVFKEKMLNYFFNPEIFGDNKIVELLSAISSSIYNIRNGVNHFDKMILGKYNNGLDLKDSNTIKDYFNFKKKEIQQDLKDRFISNNLQYYYTENEIKKYFEKYKFEILKTKASFAPNFKRILTKGENLSISESNNSYEFFKAYSENSDKNTEYNEFMKTRNFLLKELYYNNFYTEFLNNKAKFREAVEKVKKNKKRRGGKSYDVIGNYNFSDNIPEYISYIHKSEMERIEINTEKNRKDTSRHIRDFIEEVFLEGFIKYLDNNNFKFLKKRNEVDKERKEIVRNLNIQIEGLDILNENDSEILNLYLFFNMIDNKRISEFRNDMIKYKQFLAKRQNTENKFLEIDIEKIEAIIEFVIITKEKLEILEGETKEQEKDNMNALFNKFYSSASEYDEKLRKFIEEAILDDKKNTPFYSTDGKTPIVHGNLEKMRKYGTENFLSKVLKDNKYTLNNMTTKEKFEAEVSDELKEYKILEKVNRFKENGKPKKVIEYYNDCRCYLHKEWIEKKKSEEEFEHKEIYKKIIEEIRKYNYLENKEKLQNVYLLHEILSDLLARNVAFLNKWERDFKFIVIAIKQFLKEDDKEKVNKFLNPCKPDGSKDNFSVTNYRNKMKSVINKIHENFMSLLFLNDNLAIRGITADNFTWGNLRNYIAHFEYLHKEKDTISFITQANLLIKLFSYDKKVQNRILESMKKILKKYNMDIEFKRNDEDEELNYEIKETTSKKGKLLGEENKFKLLENEFFENVEKMLGYKD

SEQ ID NO: 193 - protein, 1161 aa, Artificial
  Synthetic
MKVTKVDGISHKKYIEEGKLVKSTSEENRTSERLSELLSIRLDIYIKNPDNASEEENRIRRENLKKFFSNKVLYLKDSVLYLKNRNEKNAVQDKNYSEEDISEYDLKNKNSFSVLKKILLNEDINSEELEIFRKDVEAKLNKINSLKYSFEENKANYQKINENNVEKVGGKSKRNIIYDYYRESAKRNDYINNVQEAFDKLYKKEDIEKLFFLIENSKKHEKYKIRECYHKIIGRKNDKENFAKIIYEEIQNVNNIKELIEKVPNMSELKKSQVFYKYYLDKEELNDKNIKYAFCHFVEIEMSKLLKNYVYKKPSNISNDKVKRIFEYQNLKKLIENKLLNKLDTYVRNCGKYNYYLQVGEIATSDFIARNRQNEAFLRNIIGVSSVAYFSLRNILETENENDITGRMRGKTVKNNKGEEKYVSGEVDKIYNENKQNEVKENLKMFYSYDFNMDNKNEIEDFFANIDEAISSIRHGIVHFNLELEGKDIFAFKNIVPSEISKKMFQNEINEKKLKLKIFRQLNSANVFRYLEKYKILNYLKRTRFEFVNKNIPFVPSFTKLYSRIDDLKNSLGIYWKTPKTNDDNKTKEIIDAQIYLLKNIYYGEFLNYFMSNNGNFFEISREIIELNKNDKRNLKTGFYKLQKFEDIQEKTPKEYLANIQSLYMINAGNQDEEEKDTYIDFIQKIFLKGFMTYLANNGRLSLIYIGSDEETNTSLAGKKQEFDKFLKKYEQNNNIEIPHEINEFVREIKLGKILKYTESLNMFYLILKLLNHKELTNLKGSLEKYQSANKEEAFSDQLELINLLNLDNNRVIEDFELEADEIGKFLDFNGNKIKDRKELKKFDTNKIYFDGENIINHRAFYNIKKYGMLNLLEKIADKAKYKISLKELKEYSNKKNEIEKNYTMQQNLHRKYARPKKDEKFNDEDYKEYEKAIGNIQKYTHLKNKVEFNELNLLQGLLLKILHRLVGYTSIWERDLRFRLKGEFPENQYIEEIFNFDNSKNVKYKSGQIVEKYINFYKELYKDNVEKRSIYSDKKVKKLKQEKKDLYIRNYIAHFNYIPHAEISLLEVLENLRKLLSYDRKLKNAVMKSVVNILKEYGFVAKFKIGADKKIGIQTLESEKIVHLKNLKKKKLMTDRNSKELCELVKVMFEYKMEEKKSEN

SEQ ID NO: 194 - protein, 1412 aa, Artificial; identical to SEQ ID NO: 53
  Synthetic

SEQ ID NO: 195 - protein, 1162 aa, Artificial
  Synthetic
MKVTKVDGISHKKYIEEGKLVKSTSEENRTSERLSELLSIRLDIYIKNPDNASEEENRIRRENLKKFFSNKVLHLKDSVLYLKNRKEKNAVQDKNYSEEDISEYDLKNKNSFSVLKKILLNEDINSEELEIFRKDVEAKLNKINSLKYSFEENKANYQKINENNVEKVGGKSKRNIIYDYYRESAKRNDYINNVQEAFDKLYKKEDIEKLFFFIENSKKHEKYKIRECYHKIIGRKNDKENFAKIIYEEIQNVNNIKELIEKVPDMSELKKSQVFYKYYLDKEELNDENIKYAFCHFVEIEMSKLLKNYVYKKPSNISNDKVKRIFEYQNLKKLIENKLLNKLDTYVRNCGKYNYYLQDGEIATSDFIARNRQNEAFLRNIIGVSSVAYFSLRNILETENKDDITGKIRGKTRIESKTGEEKYIPGEVDKIYNENKQNEVKENLKMFYSYDFNLDNKNEIEDFFVNIDEAISSIRHGIVHFNLELEGKDIFAFKNIAPSEISKKMFQNEINEKKLKLKIFRQLNSANVFRYLEKYKILNYLKRTRFEFVNKNIPFVPSFTKLYSRIDDLKNSLGIYWKTPKTNDDNKTKEIIDAQIYLLKNIYYGEFLNYFMSNNGNFFEISREIIELNKNDKRNLKTGFYKLQKFEDIQEKTPKKYLANIQSLYMINAGNQDEEEKDTYIDFIQKIFLKGFMTYLANSGRLSLMYIGNDEQINTSLAGKKQEFDKFLKKYEQNNNIEIPHEINEFVREIKLGKILKYTESLNMFYLILKLLNHKELTNLKGSLEKYQSANKEETFSDELELINLLNLDNNRVTEDFELEANEIGKFLDFNGNKIKDRKELKKFDTKKIYFDGENIIKHRAFYNIKKYGMLNLLEKIADKAKYKISLKELKEYSNKKNEIEKNSTMQQNLHRKYARPRKDEKFNDEDYKEYEKAIGNIQKYTHLKNKVEFNELNLLQGLLLKILHRLVGYTSIWERDLRFRLKGEFPENQYIEEIFNFDNSKNVKYKSGQIVEKYINFYKELYKDNVEKRSIYSDKKVKKLKQEKKDLYIRNYIAHFNYIPHAEISLLEVLENLRKLLSYDRKLKNAVMKSVMNILKEYGFVAKFKIGADKKIEIQTLESEKIVHLKNLKKEKLTTNRNSKELCKLVKVMFEYKMEEKKSEN

SEQ ID NO: 196 - protein, 1064 aa, Artificial
  Synthetic
MRGDYMKITKIDGISHKKYKEKGKLIKSNEIEKDVTEERFNDIEVKTTELFQKTLDFYVKNYEKCEEQNKERREKAKNYFSKVKLIVDNKKITIFNENTEKIEIEGFNEYDVRDEKYFNVLNKILKEENCTEEDLEVFENDLQKKLNQIQSIKNSLEENKAHFKKESVNNTADRVKGNNKKSLFYEYYRNSSKHQEYVNNIFEAFDKLYSNSHEDMNNLFSAITKDSNDRNIKKIREAYHEILNKNKIEFGEELYKKIQDNINNFDKLLEIEPEIKELTKSQIFYKYYIDKVSLDGTNIKHCFSHLVEIEVNQLLKNYVYSKRSTNKEKLENIFEYCKLKNLVKNKLVNKLNSYIRNCGKYNSYINNNDVVNSEKISEIRTKEAFLRSIIGVSSSAYFSLRNILNTDNTQDITNKVKGEVEKLYQENKKVKLEERLKLFFGNNFDINNQQEIEDFLMNIDKIISNIRHEIIHFKIEANAHSIFDFNNVTLGNKAKNIFNNEINEERIKFKIFKQLNSANVFDYLSDENITEYMGKVIFSFTNRNIPFVPSFRKIYNRVQDLANSLKIKEWKISDESEGKDAQIYLLKNIFLDFIQKIFLKGFFEFIKNNYNYLLELKKIQDKKNIFDSEMSEYIAGEKTLEDVGEINEIIQKIEIMKIDKILNLTDKINCFYLLLKLLNYKEITELKGNLEKYQILSKTDIYEKELILLNIVNLDNNKVKIEKFKISAEEIGKFIEKISRNKKIKTFEELRNFEKRENTGEYYNVYSDDKNIKNIRNLYNIKKYGMLDLLERISEKSNYCIKKEDLEEYSELRKQLEDEKTNFYKIQKDLHYEYQKKYKNFSKKNNPEDYEKYKESIKNIEKYVHLKNKIEFNELNLLQSLLLKILHRLVGFTSIWERDLRFRLIGEFPDELDVEDIFDHRERYRGTRGQICKKYDQFISVHIEYQNNNKMKNIKFDDNNPIRNYIAHFNYLPTPKYSILKMLGKLRELLDYDRKLKNAVMKSIKDILEEYGFKAEFVINPDKEIILNSVKSVEIIHLKKNDLNSHRNSEDLCKLVKAMLEYSE

SEQ ID NO: 197 - protein, 1382 aa, Artificial; identical to SEQ ID NO: 166
  Synthetic

SEQ ID NO: 198 - protein, 1416 aa, Artificial
  Synthetic
LGREWFLLPSPKITNLSPVNRRHFMKILRSKGQSYTQKSAAVGHEGGELGRGLKPFNSTGSSGEIDPSSLVNFIVSDPDLAMRQLVSALDKVVRKRPLRAFNVNAYVDRVKIAAYLWRLLKPHLPEEIRELGQTNKTWMSRVHSSYATDEIDEASPKTDKNAAIIEKYAEKANNDFKLGTAGARPAATRESLRGMWHDSLWRPSHEDTAQAIFDHVFTQEMLIRRAEKDPPDNFRSSKGKSNASGRGLAAARAESMAKSVHDPRVKKGEEPKKKRDWRDEHAEIYFKKLPLTPESSRKVDVAERIILALQDHVERNAANLGSIIGRAIFEHFGALKGTYERDDENVRHLVNLNNAVRTFYADLADTQRLRIAFDPKLRERHNQRKLTAKGDPGDAGDGFTRLLPADAGALREKMAAVDGNRDISRWIRLGRLVVHAADADDNSKFNQAEFERRLDYFATSAGQSQIKRNETFARVWRSAATMSLRTLKAWADPDNKAVKLAASEAQTDNRDIAAEEVSEIAIKNLNTHHFNAFNAVLFGDRLIKGQSRASLFTATEDSKDQAQRDMRAFLRLGSGMRNAISHLITKPRLARLLKVGIVSDAGHVPKHTAEKLKKLFTFDKNLRRYMIAQELDRLQIARFANETQVGNFIQQFSMLPLAEPVPVPRFMSVLARARALGDHVQKEVSKDRKGTQVRLNETIDDALRGLAKVQVDPETQAGQGPESCKLGLLRHLYDTGFRNWLARDGSGRTEVKAVLATLAKSKAQRVNAHKTEKRLHFTPDDSLVQTLLDEGYDSLPELFAELDARSAQLQRSFNRFKSDTKAQRQKSGWVDEFKQELFAHLFALYIQKAGFDWLYSLTARDSISSVKPIDPATISLPELPNQEWHERFHAWLYLLPLAEVSKLRHQMIKSRVLEIKGSDQPNEGEQKVLAEADMLMALHLSVRDAGYAGEEHKPLLDLLAKANPKTDFRTLVYGDVANFEKLMSTEKDDQNFSLAGTRRGLRDMLRVGNAAILSSIFKYHPLGPEEIGLFADKAQRDASGRAASLRDDLKKQLLDVYHQWTPKGTEAETQRNDALKTLAKHYQAAATDAAMKGFCSHAARLGDHLALHDLIMRISARLADYAWLWERDRAYVYLGMLWDNMGGRLEISVQPGTKSKAMTVSVTAPQNKSFALWNENGAFATDKSRAFDLKNLSPEHEDIFRDHFIGREEHPKDRARIKELMKAGTTFHVPRVSLGPVRIRNDFAHFNFLSFANPKDTKQDNNDDTINRTPNFTYLVNAARSLVSHDRKLKNAVAKSIAEIIEDEGLEITWTLGHERLRKARVAPRLMPHLEFLPRDLDDCRFALPRVSARYASMVKALFDHDHGGNRTREKTGKKDKDDKDIYAARGPLKYPAFPKESRVPPEIGSWSAYHGRDKA

SEQ ID NO: 199 - protein, 1400 aa, Artificial
  Synthetic
MAKHLRPISESYTDFREPERDRRLGRGLHHDHEGDQIRPAALPGYLSANPKALLRQTIAVLDKVVKKRNRLSAMHPEAYRDRVYLAEALWMRLIARIREVEKIDEAEISELRRLWNAKSHPYAMYEVVPSGPLNDRNGQAIQKYRDADGPQDPVIARTDFEGVWHGRFWQEEPGRVDYGAIADRIIAHLFDQEVVIGGGPRRIGSVSVPKGDPNGTPGPETRRGLIVARGEAISRSASDPRTPSGKLQAQATWTTCAEARYFGDDGKGGSDIAKAIFEELEKPENHAGPIYPSWFGSRLFDHFGSFKKSLPLERKDPFKDQIWALHNAVRQYYQRLAKSDRFRIALRKAQADVPDKSELLSLLPKDRQHLLLVLGGKKRNAEMSEFIRLGKLFVHASDALHDFREDDPAALEAFEKRMTFLATSIGQSEIKQIETFARTWRNAVGLTLRTLKGLADPKGKMGNDENRDLCTKDVMREVVDDDYEKFDQDQFERHIPIIFGAKYLPDGKRHLPDGKRRSRASIFTGNRDKSHQAELLWAMMCVVRSVRNRTNHFNVRRALLRLLENGIVHPIAGDPSKQNADSRNLQHVSPAALDAFKELLKFDLAIQKDAVRTALKQAKADEFVEMDNLKHLVAHLSGTDDITVLNIPRFAAVMDKVRRLADNNDVDLAPGLVTLQKSLPPKDDQKESDAARCRYRLLLELYQSGFRGWLSGIQSDAERNRELCHWAVLQVGRSKDARKTKYDARTKRYYRSPISLIDDLGLDRYDDISALLDALAAQSTREQGQDLRYSPDARVQRQGANRIEEFRQELFAHIFARYLAEPGPEDPDFGWIGEIDTKRDCCDLSVALDGFQPPEQAFRADWHSQFYAWLYMVPPIEASRLRHQMRKSASMDGKWSETLELSCGERKERDERAQGILADMDRLFSLYTKVQAAGFSGQEHEGALEEKGLFYQDASFFKEVYQEEGTANYHTTFPGTRSGLRQLVRYAHLPPLTGIFEKHKVTAGEVKSFAGLHNEKRRDPDKINCVKQRESFRGEILQSIKDIPKPKDKSYSKFLSDLEEKCRNYQTVATAAAIHNFQANGARLNDHVRLHQIVMRVLTRLTDYALIWERDRLFAFVGMLYKETGGTGLKPAFGPGIKRNASPQIGILVTAPDLLRRSKTEPGQVFIPYLDPETGFDAPPFEERCKMLSEDHARKFQLHFIDAGERPSDLTLRSNEKPGGYDACKTFKRGTRKKTIRDDLAHHNILDLPGRRGLNLTYVVNAVRSLMSYDRKLKNAVPKSIKRILGEEGLIIEWQMKDDRLKKPTIYPDVETHLTMVPPHMMSAPVSFTLPRASVRLVSMTRAMFDFGGSGYGDEVVLAGKTVKQAVYPDAFTARFPQTPETLKKETRLVFTSEKEQISD

SEQ ID NO: 200 - protein, 1257 aa, Artificial
  Synthetic
MKIVHPYGSSRSQSDAKASRRVLIDNTRERRPHPIPRFAGVHDLAAAAEGANDELVIAQWISIVDKIARKPSGRNKPTREQRDLREKLGNACWVRMTCGNHLPGLDKRREHLNKLWWFKIHPYGPGTEEPRRRKDGSLPASAEAKGRWYEVFAGDSARDPADARTLAEIVAERIERHLYVQKYRLGPDSRPKEMGLIAARAYSIEGNVLRVPEGSDTGDDRPTWSDEDINVYTQPGDPVRAIRAAAEALEAQKGRLRLSDAAKMLFEHWPKVFRNAEGKVLDVPGARQQYPGMFALHDQLKQCYRRLLKRARKDTPEHRRDAAARKREERKLSTLLPRDLKAALRLSDMQTRNAELAALVRLGKVIHYTAAQGIADQTRAVIDNWPDDVEASRFWQSDGQAEIKRAEAFVRIWRQALVLANLTLRDWADYRGDILGTEGQKQEALANATAALRSSDPARRDRFDRKLVLLFGNRATVLGLATDEDRIALLRALIDGAANLRHASFHFKGRGELLVELEKLPDNFSEPVKAAAGALWQADVKDRTARLKAVLVGAHADKYLTQKQAEQVFALLHANAAELPLPRFARVLERRKNAWDEDKGIRLPEPPNRRKLEEQKARLCLYTLLTLVYERPFRTWLTEQQTAAIARWRDRAVNRASAAAKAQNAKDDEIARQVIAARAADLPVLPEGGDIRHFFFDLSAATASEMRVQRGYASDAENARNQAGFIDDLLCDVMILAFSAYLEEKALGWLLDIRPDQPPSESPTCSLKALPEPKPDLAPQRWQTALYLILHVLPVESVGQLLHQLRRWGIAAGRDSRLREDERARLDRLFAAMTLYLDMHDAKFEGGDALAGCGPLCELFASKEDGFRRVFRDPEPGAQLDRRVPHRGLREIMRFGHLPVLNAIRGGKTIDDKTIDRVLAMEAAPDDGRSPIAKLQQRREDLHEAWVQSKEPDAARPFGQSELEDYCKTLADVVRHRAESNVVYLVDHVRAHRTVMAVLGRLVDYAGLFERDLYFVTLALLHRHGLRPDDLSTSTGVNHLGKGRIISALYQHKKDDTALAVLRDLAAHFTKVWESGNPKVRIRNDLMHFNMLQKAPPAPHLTHWVNQARQLMDYDRKLKNAVSKSVIELLAREGIVLRWDINATAASHDLVNADLSSRCAVHLGGQALRRKGADRRDKGAPIAERLHGENYVVMIANAFEGTAKETTTILDDLLQVDWAASVAPRGRPKEVGAQRPPSDRQRARRGNHDSRRNLASN

SEQ ID NO: 201 - protein, 1182 aa, Artificial
  Synthetic
MKGGSMKITKVDGLSHYKKQDKGILKKKWRDLDERKQREKIEERYNKQIESKIYKEFFRLKNKKRIEKEEDQNIKSLYFFIKEMYLNEENEEWELKNINLEILDDKERVIKGYKFKEDVYFFKEGDKKYYLRTLLNNLIEKIQNENRDKVRKNKEFSDLKEIFKKYKDRKIKLLLESINNNKINLEYKKENVNEEIYGINPTNDREMTFHELLKEIIEKKDEQKSILEEKLDNFDITNFLENIEKIFNEETEINIIKGKVLNELREYIREKEENNSDYKLKQIYNLELKKYIENNFSYKKQKSKSKNGKNDYLYLNFLKKIMFIEEVDEKKGINKEKFKNKINSNFKNLFVQHILDYGKLLYYKENDEYIKNTGQLETKDLEYIKTKETLIRKMAVLVSFAANSYYNLFGRTENNILTQEISDDLLLGKIENEIYIKGEKNRRYVFKEKMLNYFFNPEIFGDNKIVEVLSAISSSIYNIRNGVNHFDKINLGQYNNLDLSEIKKYFIEKRDKIKEKVKEKFSSNNLQYYYAKKEIENYFKAYEFEILKEKIPFAPNFKRIIKKGEDLFNNKKNKKYEYFKNFDKNIAEEKKEFLKTRNFLLKELYYNNFYKEFLSKKEEFKKVVIEVKEEKKNRGNINNKKSGVSFQSIDDYDTKINISDYIASIHKKEMERVEKYNEEKQKDTAKYIRDFVEEIFLTGFINYLEKDKRLHFLKEEFSILCNNNNNVVDFNININEEKIKEFLKENDSKTLNLYLFFNMIDSKRISEFRNELIKYKQFTKRRLDEKKEFLGIEIELYETLIEFVILTREKLDTKKSEEIDAWLVDKLYVKDNNEYKEYEEILKLFVDEKILSSKEAPYYATDNKTPILLSNFEKTRKYGTQSFLSEIQSNYKYSKVEKENIEDYNKKEEIEQKKKSNIEKLQDLKVELHKKWEQNKITEREIKKYNDTIKEIREYNYLKNKEELQNVYLLHEMLSDLLARNVAFFNKWERDFKFIVIAIKQFLRENDKEKVNEFLNPHKSDGSRDNFSVTNYRSKMKSIINNIHENFMSLLFLNNNLATGGIQMGRNNNFTWGNLRNYIAHFEYLHKEKDTISFLNQANLLIKLFSYDKKVQNHIIKSMKTLLEKYNIEIGFEISNDSEEIFEYKIKYINSKKGKMLGKNNEFEILENEFVRNVKALLEYSK

SEQ ID NO: 202 - protein, 1161 aa, Artificial; identical to SEQ ID NO: 99
  Synthetic

SEQ ID NO: 203 - protein, 1316 aa, Artificial
  Synthetic
LTRLPSEAGPTQDFGVCNQAVFAFLRVLPLTCGGSPSCRRVVERHFARGFINHRPHVKLPAIFRGVASMRIVRPYGSSRSRKSGEEVRRVLVDSTAERTEWDIPPFARSHDKLVIAQWISTIDKIACKPAGRKKPTPAQYALREKLGNVCWLRMTEGGHLPGAAGADREHLNNIWWFKIHPYGTETEEPRPRRDGSLPPSAELKGRWFEAFAGTWDPEKTSARETVDILAQIAERIEKHLYETEYRLGQNKRPKRLGRIEARAESIEGNVLHVPIASEDQRNQPTWTEDDKQAYTRNRDPIHAIRQAAEKLESNKGRISLSDAAEVLFGHWAKIFVYHETGKPMGVRDASERHPGMFALHQTLKECYRRLLKRTRKDTRHHRKENPDGRRLSALLPRNLDDALRLMRMQAANAELAELVRLGKIIHYAASEGRADRAKSIREHWPQNVAQSRFWQSDGQAEIKRAEAFVRVWRQVLALAGLTLKDWLSFPGDLLGGDRTKNAAIKNAIEALRTDASKHERFDRKLNVLFGERTDLLGVGSADDRVDLLCALVDGAANLRHAIFHFKGRGQLLDELARLPAHLSAPVKQASERLWEKDVTECTARLKKTLVGAHVEEFITQEQAMQVFVLVADNTLAELPLPRFARILERRKNAWEETIRLPEPANLRALEDSARLCQYTLLKLVYERPFRAWLTKQDAQAISNWIDRAVARATEAAKALNAQGSEAGRKVIAARAADLPKPSVGGDITEFFFALSAATASEMRVQSGYETDREKAREQAEYINDLLCDVTILAFDAYTAQAKLGWLLDIARDRPATCLIAELPDPQRDLAAEPWQSALYLILHVLPVESVGQLLHQLLRWKTAAGRDVEWSEKDQARLQRLLATMTLYLDMHDAKFEGGSALAGCEEFAGLFESEAGFRKVFPAVLDENAELRIPRRGLREIVRFGHLPLLKAICGVKKIDEDTIDRVFSIEGVLEGGESQIAQMQKRREELHDAWIVTKRGPAIEKDADGEAMKRFGAEELHEYCEILTNVSRHREQSNFVNLVDHVRAYRLVLAVFGRLVDYVGLFERDLYFVTLALLHQRGLRAEDLLEQGGLEHLYGGRIIFALDRRRTDTPKAAEISMELAKHFTELWTKGNPNRRIRNDLAHLNTLQGTGFAPRLTHWVNQTRQLMAYDRKLKNAISKSVLDLLDREGIKLRWTMDVSDNTHDLTNATLATRCAEHLGNKKLTLKGAGPKDREVPINERLHSESYVAMVASAFEGTPIATRSILDDLSRVAWEASVAPRRLPRDPRQGPPRKPFPGGRNRRDFSGTSHHT

SEQ ID NO: 204 - protein, 1389 aa, Artificial
  Synthetic
MGNLFGHKRWYEVRDKEDYKIRRKVKVKRNYDGNKYILNINENNNKEKIDNNKFIREFVNYKKNDNVLREFKRKFHAGNILFKLKGNKRSIEDSNDFLKTEEVVLDKEIYGQSEKLRNEKGITKKDILKEINKQKIDNSVKKISMNTNSGKTIVINFSDKLKKDKDDYQITLNIISEDELERKRKIYDIFKMINMDLYQIIKEIIENEVQKVFKNRYYEEHLREKLLKDDEIDVILTNFMKIREKIESNPEIMGFVKFYLNVGGDKKKSENKKMFVEKILNINVDLTEEDIVDFIVKELKFWNITKRIEKVKEFNNKSLENKRNRTYIKSYVLLDKHEKFKRDRENKKDKIVKLFVKDIHNDKMEEKINHILSEFKIKELIEKLKENTENKNFDTEIFGIFKKHYKVNFDSKKFSNKSDEEKELYKIIYRYLKGRIEKILVNEQKVRLKKTEKIEIEKILNESILSEKILKRVKQYTLEHIMYLGKLRHNDIVKMTVNTDDFSRLHAKEELDLELITFFASTNMELNKIFNGKEKVTDFFGFNLNGQKITLKEKVPSFKLNILKKLNFINNENNIDEKLSHFYSFQKEGYLLRNKILHNSYGNIQETINLKGEYENVENLIKELKVSNEEISKSLNLDIIFEGKVDIINKINSLEIGEYKDKKYLPSFSKIVPEIMRKFREINKDKSFDIESEKIILNAVQYVNKILYEKITSNEENEFIKTLPDKLVKKNNNKENKNSLSIEEYYKNAQISSSKGDKKAIKKYQNKVTNTYIEYLENTFVEVIDFSNFNLNFDEIKTKIEERKYSKSKITIDSISTNINITNDIEYIISIFALLNSNTYINKIRNRFFATSVWLEKQNSTKEYDYKNIISILDEVLLTNLLRENNITDILDLKNAIIDAKIVENDEAYIKNYIFESNEEKLKKRLFCEELIDKEDIRKIFEDKNFKFKNFIKKTGNENFTIDFDILFNLECNSELNAKKVIGQNSQRLNLFIKNTIDEYKSKIKTSFSSEFLGKYKKEIDNLVEDTESENKNKFEKIYYPEEHKNELYIYKKNLFLNIGNPNFDKIYGIISKDIKNVNTEILFDDDIRKNKISEIDAILKNLNDKLNGYSNDYKAKYVNKLKENDDFFAKNMKNENYSSFGEFEKDYNKVSEYKKIRDLVEFNYLNKIESYLIDINWKLAIQMARFERDMHYIVNGLRELGIIKLSGYNTGISRAYPKRNGSDGFYTTTAYYKFFDEESYKKFEKICYGFGIDLSENSEINKPENESIRNYISHFYIVRNPFADYSIAQQIDRVSNLLSYSTRYNNSTYASVFEVFKKDVDLDYDKLKTKFKLFDDEKNNDIKILKIKDLIESKKVSVLELKSYNSDYIKNLIIELLTKVENKDEISS

SEQ ID NO: 205 - protein, 1193 aa, Artificial
  Synthetic
MKVTKIDGLSHKKFEDEGKLVKFKNNKNINEIKERLKKLKELKLDNYIKNPENVKNKDKDAEKETKIRRTNLKKYFSEIILRKEDEKYILKKTKKFKNINQEIDYYDVKSKKNQQEIFDVLKEIKIKETEKEEIITFDSEKLKKVFGEDFVKKEAKIKAIEKSLKINKANYKKDSIKIGDDKYSNVKGENKRSCIYEYYKKSENLKKFEENIREAFEKLYTEENIKELYSKIEEVLKKTHLKSIVREFYQNEIIGESEFSKKNGDGISILYNQIKDSIKKEENFIEFIENIGNLELKDLTKSQIFYKYFLENEELNDENIKFAFCYFVEIEVNNLLKENVYKIKRFNEGNKKRIKNIFEYDKLKKLIVYKLENKLNNYVRNCGKYNYHMENGDIATSDINMRNRQTEAFLRSIIGVSSFGYFSLRNILGVNDDDFYEIEEGLTEEERKNESNVLKKAKEDITSKSIFEKVVDKSFEKKGIRSIKENLKMFYGDSFDKANGDELKQFFVNMLNAITSIRHSVVHYDMNTNSENIFNFSDIEVSRLLKSIFEKETDKRELKLKIFRQLNSAGVFDYWENWKIKKYLENIKFEFVNKNIPFVPSFTKLYNRIDNLKGSNALNLGYINIPKRKEARDSQIYLLKNIYYGKFVENFVNNKENFEKVFKKIIEINKNAGRNKQTNFYKLEKFETLKANTPTEYLEKLQSLHKINYDKEKVEEDKDTYVDFVQKIFLKGFINYLQKSNSLKPLNLLNLKKDEVINSEKSSYDEKLKQWENNGSKLSEMPKEIYEYIKKIQINKINYSDRMSIFYLLLKLIDHKELTNLRGNLEKYESMNKNKIYSEELNIVNLVSLDNNKVRTNFSVEAEDIGKFLKTETSIKNNKQLNNFSEIFADGQNVIKHRSFYNIKKYGILDLLEKIVAKADLKITKEEIKKYKNLQKELEKNDFYKIQEKIHRKYNQKPNLISRTENKKDFNDYKKAIENIQNYTQLKNKIEFNDLNLLQDLLFRILHRLAGYTSLWERDLQFKLKGEFPEDKYIDEIFNSDRNNNQKYKSGGIAYKYVDFLIEKEEGKRAGKNKVKKRSEKEGSFIIRNYIAHFNYIPDAEKSILEILEELRELLKYDRKLKNAVMKSIKDIFKEYGFIIEFGISHESNSKKIKVVNVESEKIKHLKNNGLVTTRNSEDLCNLVKVMLEYKKS

SEQ ID NO: 206 - protein, 1161 aa, Artificial
  Synthetic
MKVTKVDGISHKKYIEEGKLVKSTSEENRTSERLSELLSIRLDIYIKNPDNASEEENRIRRENLKKFFSNKVLHLKDSVLYLKNRNEKNTVQDKNYSEEDISEYDLKNKNSFSVLKKILLNEDINSEELEIFRKDVEAKLNKINSLKYSFEENKANYQKINENNVEKVGGKSKRNIIYDYYRESAKRNDYINNVQEAFDKLYKKEDIEKLFFLIENSKKHEKYKIREYYHKIIGRKNDKENFAKIIYEEIQNVNNIKELIEKVPDMSELKKSQVFYKYYLDKEELNDKNIKYAFCHFVEIEMSQLLKNYVYKRLSNISNDKIKRIFEYQNLKKLIENKLLNKLDTYVRNCGKYNYYLQVGEIATSDFIARNRQNEAFLRNIIGVSSVAYFSLRNILETENENDITGRMRGKTVKNNKGEEKYVFGEVDKIYNENKQNEVKENLKMFYSYDFNMDNKNEIEDFFANIDEAISSIRHGIVHFNLELEGKDIFAFKNIAPSEISKKIFQNEINEKKLKLKIFRQLNSANVFRYLEKYKILNYLKRTRFEFVNKNIPFVPSFTKLYSRIDDLKNSLGIYWKTPKTNDDNKTKEIIDAQIYLLKNIYYGEFLNYFMSNNGNFFEISREIIELNKNDKRNLKTGFYKLQKFEDIQEKTPKEYLANIQSLYMINAGNQDEEEKDTYIDFIQKIFLKGFMTYLANNGRLSLIYIGSDEETNTSLAEKKQEFDKFLKKYEQNNNIKIPYEINEFLREIKLGNILKYTERLNMFYLILKLLNHKELTNLKGSLEKYQSANKEETFSDELELINLLNLDNNRVTEDFELEANEIGKFLDFNGNKIKDRKELKKFDTNKIYFDGENIIKHRAFYNIKKYGMLNLLEKISDEAKYKISIEELKNYSNKKNEIEKNHTTQENLHRKYARPRKDEKFTDEDYKEYEKAIGNIQKYTHLKNKVEFNELNLLQGLLLKILHRLVGYTSIWERDLRFRLKGEFPENQYIEEIFNFDNSKNVKYKSGQIVEKYINFYKELYKDNVEKRSIYSDKKVKKLKQEKKDLYIRNYIAHFNYIPHAEISLLEVLENLRKLLSYDRKLKNAVMKSVVNILKEYGFVAKFKIGADKKIGIQTLESEKIVHLKNLKKKKLMTDRNSEELCKLVKVMFEYKMEEKKSEN

SEQ ID NO: 207 - protein, 1373 aa, Artificial
  Synthetic
MAKHLRPIGESYTDFLDETEFVRLGRGLHRGHHGVQIPPTELPSYLAEYRKALMRQVVAVLDKVVGKRRRLSGMHPEAYRDRVHLAEALWVRLVARVKEIGTPPDPSELLDLRRMWNAKAHPYAEYDVVPRAPLNDGNGQKILECREVDDPKIERSDFEGRWHGRFWQSEPGPVDYNAIADRIFAHLFDQEAVIGGGPRREGNVTVPDEDINGQPGPATGKGLIIARGQSIVKSASDPRRSSKKVQRTWDKAVERRYFGDDGKGGSDIAKAIYEELGDPATLADPIYASWFGSRLYDHFGSFKNSLPLELKDPFKEQIWALHNSVRQFYQRMAKSDRFRLALQNARSEVPDRSELLALLPKDHDHLLLVLGGKKKNAEMSELIRLGKLFVHASDVLHDFDANDAAALDAFKRRMSFLATSIGQSEIKQTETFARTWRGAVGLTLRTVKGLADPRGIIGTPDNRDLGTAGPMKDAFNKFDQPHFQQHMTIIFGNKELQAEGNPTRSSVFTANGDKDHQAELLWGFLCVVRSVRNRTNHYNVRRALFRLLDEGIVSPMPSDPKKERVENRNLCTVSPTALEAFRRLLNFDLAIQKEAVRTALEQAKASEFVEEGKLRGLVSELAGTEDMPALHIPRFSAVMDKVRRLADNRDVGLDPILSTLQRSLPPTDKQAESDAARCRYRLLLELYKSGFRSWFSGIQSNEENNREICHWAVKQVGRAKDARKSEYDKKTKRHYRSPNSLIDDLGLDKFDDLTDLLEALASQSTREHDQNLKYVPDARVQSQMSNRIEEFRQELFAHIFTKYLDTHDFGWIGAIEVRREACDLADVVSAFEVRDQKFDADWHSQFYAWLYMVPPIEASRLRHQMRKSAVMDDKWSTTLELTSGDRKTRDDHAQDVLADMDRLFSLYTKVQAAGFNGQEHESALGSKSLFYEDGNQFDEVYSPDTETHNKTFPGTRRGLRQLVRYAHLPALEGVFKKHRITKAEVETFVALYDENRRDPGSVAHMLRREKLRTEILRSIHDGPKPKDKDFWPKLEAKCLEYRTVATETAIYNFQANAARLNDHARLHQIVMRVVARLTDYALIWERDRLFAFVGMLYRQTGGTGINPAMRHAEKTNAPPRIGILVSDSALAKKLNSNSAEVFIPYLDTETGFDAPRFDDLCTLLSHEHAKEFRFHFLEVGEENSKDEARRLNEETMGHRKRPAFKRGTRRQGIRNDLAHHNVLDLAGGAGPNLTYMVNAVRSLLSYDRKLKNAVPKSIKRILGEEGLIIEWQMNYDRLKKPTVYPNVETHLTMVPPRHMTAPVSFTLPRASVRLASMVKAVFDFGSSGYGEERMIGGRTAKQAVYPDDFTRRFPQTPMGLKQATRLVFASENS

SEQ ID NO: 208 - protein, 1161 aa, Artificial; identical to SEQ ID NO: 99
  Synthetic

SEQ ID NO: 209 - protein, 1182 aa, Artificial; identical to SEQ ID NO: 201
  Synthetic

SEQ ID NO: 210 - protein, 1382 aa, Artificial
  Synthetic
MKLSKEKHTRSAVANEEQNIGGILYRFPGKSIGGVKDQMLRRDKEVKKLYNVFNQIQVGTKPKKWNNDEKLSPEENERRAQQKNIKIENYKWREACSKYVKSSQKTINYVIFYSYGKAENKLRYMRKNEDILKKMQEEEKLPKFSGGKLEDFVAYTLRKSLVVSKYDTQEFDSVAAMVVFLECIGKSNISDHEKEIVCKLLELIRKDFSKLDPNVKGSQGANIVRSVRNQNMIVQPQGDRFLFPQVYAKENETVTNKNVEKEGLNEFLLNYANLDDEKRAESLRKLRRILDVYFSAPNHYEKDMDITLSDNIEKEKFNVWEKHECGKKETGLFVDIPDVLMEAEAENIKLDAVVEKRERKVLNDRVRKQNIICYRYTRAVVEKYNSNEPLFFENNAINQYWIHHIENAVERILKNCKAGKLFKLRKGYLAEKVWKDAINLISIKYIALGKAVYNFALDDIWKDKKNKELGIVDERIRNGITSFDYEMIKAHENLQRELAVDIAFSVNNLARAVCDMSNLGNKESDFLLWKRNDIADKLKNKDDMASVSAVLQFFGGKSSWDINIFKEAYKGKKKYNYEVRFIDDLRKAIYCARNENFHFKTALVNDEKWNTELFGKIFERETEFCLNVEKDRFYSNNLYMFYQVSELRNMLDHLYSRSVSRAAQVPSYNSVIVRTAFPEYITNVLGYQKPGYDADTLGKWYSACYYLLKEIYYNSFLQSDRALQLFEKSVKTLSWDDKKQQRAVDNFKDHFSDIKSACTSLAQVCQIYMTEYNQQNNQIKKVRSSNDSIFDQPVYQHYKVLLKKAIANAFADYLKNNKDLFGFIGKPFKANEIREIDKEQFLPDWTSRKYEALCIEVSGSQELQKWYIVGKFLNAMSLNLMVGSMRSYIQYVTDIKRRAASIGNELHVSVQDVEKVEKWVQVIEVCSLLASRTSNQFEDYFNDKDDYARYLKSYVDFSNVDMPSEYSALVDFSNEEQSDLYVDPKNPKVNRNIVHSKLFAADHILRDIVEPVSKDNIEEFYSQKAEIAYCKIKGKEITAEEQKAVLKYQKLKNRVELRDIVEYGEIINELLGQLINWSFMRERDLLYFQLGFHYDCLRNDSKKPEGYKNIKVDENSIKDAILYQIIGMYVNGVTVYAPEKDGDKLKEQCVKGGVGVKVSAFHRYSKYLGLNEKTLYNAGLEIFEVVAEHEDIINLRNGIDHFKYYLGDYRSMLSIYSEVFDRFFTYDIKYQKNVLNLLQNILLRHNVIVEPILESGFKTIGEQTKPGAKLSIRSIKSDTFQYKVKGGTLITDAKDERYLETIRKILYYAENEEDNLKKSVVVTNADKYEKNKESDDQDKQKEKKNKDNKGKKNEETKSDAEKNNNERLSYNPFANLNFKLSN

SEQ ID NO: 211 - protein, 1382 aa, Artificial; identical to SEQ ID NO: 210
  Synthetic

SEQ ID NO: 212 - protein, 949 aa, Artificial; identical to SEQ ID NO: 43
  Synthetic

SEQ ID NO: 213 - protein, 1330 aa, Artificial
  Synthetic
MKREKNITIMKISKVNHRRTAVALNCDKSELGGILYEAPVQKDKNGNYNDVIAETGKVVNEALDKKSRLYTPFNNQKVIIDKNLQRYANNLKRCYINFVKQYVNNKSFNYKAMQFIPDIQNPKTNDAVNYRTDRDNVYNKNKYYDKQTKSKSKKFIYEKIVIPQNEQNIVISALVNCSLRKSLRKDVSYKTKSGEIKTYNLPELVKKSMRFYCLEGQREPDEKEKYEMYILFSYMKEDKRTKNTDLLVKSISNQNTKVKVEDIDGNKLLKLSIADTKKKPLWEYLIKYADSSRQRELMYDIRKKIILYVAGIEEYENIKEDSGLSKVSWSKYNISDNKMFFDINSCTDKRKQNLEIKIREANIEHYRNASSKLCDDESIFWFQHFEGVIETLFSKKSKISEERLGCTYICDYLWKDFLSYLAAKYIDLGKGVYHFTMKDKLDMLNKNEAVTDLRFGIVSEKYEKGITSFDYERIKAEEELDRNIAAYVTFAADIFAKSVIKSDYRTKKDNNSDVLQYSDKEFRNSEVIRDNAEKNILQYWGGYSRWGTENSKLPENNKVSDFGKLNVSDLCIDIKKHLAGIRNSSIHYTTKIKNESAADGSNVKILFEKDLADINIIYADKYYSNNVWMFYSLEDINKLIAFLYKEKRVIRQVQIPSFSRILKRKAMQDVINEIFKDDFDENIVNPELKEKYRNSLYFMLKEIYYNAFIIQPELKEKFKDKIKTMKSELYNKLKTIDKKEYKALYCMLSNEESALKNFADRIYSVDGDNVSFADICKILMTDYNMQNQEKKNIESMEQKKKNKGKDENYKHFPLLLHKVLKELFIEYLKQTHELEFLRNNICIKSDVTMESFESQIKGVEIYKDLKEKIDKNNSLLDWYVIAHFLMPKQLNHLIGNIKNYIQFATNIDKRAESVKNLTESGMVKRIQYYDDIVRTLEFSAQYIGKISNNINDYFNSEDEYVSFLSKYVGFINDKSEDVLTELKDFCREKINNGSQIIGIYYGGDNVIINRNVIYAQMYSNAEVFSNIYKKVTKNDIINYYEKQNDLKDVFKSGVCQNEDEQRSLCEFQQLKNRIELTELSTYADMVNDFMAQFVEWAYLRERDLMYFQLGIHYIRLFYSDNVLDEKYHKLSDNVIDIEEGALLYQIVAMYDYELRIFETDNSGNAKRIGQGGPGKSIPVFLKKYCSGTDVYECGLELFEDINQHEHIIRFRNDIAHMRYMSNQAMNIMSIVSNIYKSFFAYDTKLKKSISLVFKNILMRYGVIADLVFSYNNKNQSIKDDMDINIINIKNLKSDKYVYKIVNEDIVKQVEIEIRNQVFLEQLHNLLYFSR

SEQ ID NO: 214 - protein, 1382 aa, Artificial
  Synthetic
MKLSKEKHIRSAVANEEQNIGGVLYHVPGTDTIDLKDQMLIRDRDVKQLYKVFNQIQVGNKPKKWKKDEKLSPEENERRAQQKNIKMKNYKWREACSEYVESSQRTINDVLFYSYMEADKKIRNMRKNEDILKKMQEVTKLPKFSGGKLEDFVAYTLRKSLVVSKNSTQEFDSVAAMVVFLECIGKSNISDHEKEIVCKLLELIRKDFSKLDPNVEGSQGANIVRSVRNQNMIVQPQGDRFSFPQVSDKEKKTVTNKNVEKEGLNEFLLNYANLDDEKRAEILRKLRRILDVYFSAPNHYEKDMDITLSDNIDKEKFNVWKKYECGKKVTDLFVDIPDVLMEAEAENIKLDAVVEKRERKVLADRVRRQNIICYRYTRAVVEKYNSNESLFFENDAINQYWIHHIENAVERILKNCKAGKLFKLRMGYLAEKVWKDAINLISIKYIALGKAVYNFALDDIWKDKKDKELGIVDERIRNGITSFDYEMIKAYENLQRELSVDIAFSVNNLARAVCDMSNLKDRESDFLLWKKEDIADKLKNKDDMASVSAVLQFFGGKSSWDINIFKEAYKGKNKYNYEVRFIDDLRKAIYCARNENFHFKTALVNNEKWNTELFGKIFERETEFCLNVEKDRFYSNNLYMFYPVSELRNMLDQLYSRSVSRAAQVPSYNSVFIRKNFPEDITNVLRYQKPGYDADTLGKWYSACYYLLKEIYYNSFLQSDKALQLFEKSVKTLSWDDEEQKRAVDNFKNHFSDIKSACTSLAQVCQIYMTEYNQQNNQIKKVRSSNDSIFDQPIYQHYKVLLKKAIANAFAAYLKNNKDLFGFIGKPFKANEIREIDKEQFLPDWTSRKYESLCIEVSGSQELQKWYIVGKFLNARSLNLMAGSMRSYIQYVTDIKRRAASIGNELHVSVQDVEKVEKWVQVIEVCSLLAFRTSNQFEDYFNDKDDYARYLKSYVDFSNADMPSEYSALVDFSNEEQSDLYVDPKNPKVNRNIVHSKLFAADHILRDIVEPVSKDNIEEFYDQKAEIVYCKIKGKDITAEEQKAVLKYQKLKNRVELRDIVEYGEIINELLGQLINWSFMRERDLLYFQLGFHYNCLRNNSEKKEAYQKIEVNGDSIKDAILYQIIGMYVNGVAVYAPDEKGDILKEQCTKGGAGGKISAFNRYSEYLGLDKLTLYNAGLEIFEVVAEHDDIINLRNGIDHFKYYLGDYRSMLSIYSEVFDRFFTYDIKYQKNVLNLLQNILLRHNVIVEPVLESGFKTIGKQTTSGAKLSIRSIKSDTFQYKVKGGSLITDAKDERYLKTIRKILYYVENEEDNLKKSVVVTNADKYEKNKESDDQNKQKEKKNKDNKGKKNEETKSDAGKNNNERLSYNPFANLNFKLPN

SEQ ID NO: 215 - protein, 1168 aa, Artificial
  Synthetic
MGSGKYRITKIGRDWDENKKRIILKRVVSNGKVKYINENDNVDVDITETYYGILSNNKAKFLGSNEQFIFKVNKMKRNIKNDCVIIKDYTEEEFEKLDKKIFFSRKIKVNNEDREKICRNFYEDEREIMKKRFEEAKKFNNIIFNICNKIFKLEYLDYIDEKVYEIFQNEIKVKDVKNLKEAFKQQEKGLETDKLLAISFNKKRNNVLLEFIQKITKQEFKNQKELENWFSQSGEKYCKEIFKIYSNMSQKEKYFKLLGHRNQGIASIYDEKKETLQRRLKLGDYSKYDLKKYYQKDYKEEAIKELKDKNKEELEREIEKLIKENYKIDELCYEISNLEFSFVDSKKENKDKMSEIIVKIKEHYKNNVNIEERLENKEKYILSMIHNYVKGRYRKCLELQQKENVDLENLGKRIKEIFDSNQVTKKLKKSILNKVNNYKIFETKFQNPNIESSDDLEILKAEETFLNKLSTAVSKVGYTLNTLLEVSPEKDILENYNMVVELCNNNSTTEIYKVYPELEKNEKLLQGMIHFIQGIRQQSLHPKISWNFETKNLKPEKLERLKEKKNIKMRDCVVHEDNLDKKEKSEVEIKRYFEKIEEKLPDYFIEKYESNNVFNIYRNFVDKIMEAVKNFNFKENNTIDYLFPKFHKIYKRMYKSENIDDRQNGARKYLLQTIYYYYFQYKIENDKNDIFKYLNLYKNKIKAKKISYSYIIDNKNVNNKNIEILYRNIQREGMLNNRLSQMNNEWIEFIVVQFSEFLTNKKLNWILDDLSEYKKKEKLDENNKNKLLKILKQKMNKKIIYSNDSYVFISLAQFLDLKEISNLIHDIKKFVQFREKNASKYKPEKNELYIEELKKVLYILKVMLEHKERVIQKHYLESYDEDISIIYGKEIEKKDIKDIEIEIKIKNENQEVNQEVIVINQPLYKSGDDENSSWIILYGIEQAKRNGTFKFFEGFFNLNDDIKLCKENIKKYEELYNKRKENQIKVDEYISSEENNNIDEIKEINNNKQLFYYYKNMIYGDGLKKGYDFINDIYSHYLSWAYRIERDYSIYKVKIYNGKIKNFRNEIAHFNYFQKTNKSLLELLNDFYDIFDYNLKYQRDVQNVINNIFEKYQIVRKDGGPVVFYCKTDKKLKLSENLVPKKHSKYPEIKLIHEKYVMFFRKLFEYKK

SEQ ID NO: 216 - protein, 1050 aa, Artificial
  Synthetic
LLNEDINSEELEIFRKDVEAKLNKINSLKYSFEENKANYQKINENNVEKVGGKSKRNIIYDYYRESAKRNDYINNVQEAFDKLYKKEDIENLFFLIENSKKHEKYKIREYYHKIIGRKNDKENFAKIIYEEIQNVNNIKELIEKVPDMSELKKSQVFYKYYLDKEELNDKNIKYAFCHFVEIEMSKLLKNYVYKKPSNISNDKVKRIFEYQSLKKLIENKLLNKLDTYVRNCGKYNYYLQDGEIATSDFIARNRQNEAFLRNIIGVSSVAYFSLRNILETENENDITGRMRGKTVKNNKGEEKYVSGEVDKIYNENKQNEVKENLKMFYSYDFNMDNKNEIEDFFANIDEAISSIRHGIVHFNLELEGKDIFAFKNIVPSEISKKMFQNEINEKKLKLKIFRQLNSANVFRYLEKYKILNYLKRTRFEFVNKNIPFVPSFTKLYSRIDDLKNSLGIYWKTPKTNDDNKTKEIIDAQIYLLKNIYYGEFLNYFMSNNGNFFEISREIIELNKNDKRNLKTGFYKLQKFEDIQEKTPKEYLANIQSLYMINAGNQDEEEKDTYIDFIQKIFLKGFMTYLANNGRLSLIYIGSDEETNTSLAEKKQEFDKFLKKYEQNNNIKIPYEINEFLREIKLGNILKYTERLNMFYLILKLLNHKELTNLKGSLEKYQSANKEETFSDELELINLLNLDNNRVTEDFELEADEIGKFLDFNGNKIKDRKELKKFDTKKIYFDGENIIKHRAFYNIKKYGMLNLLEKISDEAKYKISIEELKNYSNKKNEIEKNHTTQENLHRKYARPRKDEKFTDEDYKEYEKAIGNIQKYTHLKNKVEFNELNLLQGLLLKILHRLVGYTSIWERDLRFRLKGEFPENQYIEEIFNFDNSKNVKYKSGQIVEKYINFYKELYKDNVEKRSIYSDKKVKKLKQEKKDLYIRNYIAHFNYIPHAEISLLEVLENLRKLLSYDRKIKNAVMKSVVDILKEYGFVVKFKIGADKKIEIQSLKSEEIVHLKKLKLKDNDKKKEPIKTYRNSKELCKLVKVMFEYKMEEKSSEK

SEQ ID NO: 217 - protein, 1380 aa, Artificial; identical to SEQ ID NO: 143
  Synthetic

SEQ ID NO: 218 - protein, 1161 aa, Artificial
  Synthetic
MKVTKVDGISHKKYIEEGKLVKSTSEENRTSERLSELLSIRLDIYIKNPDNASEEENRIRRENLKKFFSNKVLHLKDSVLYLKNRKEKNAVQDKNYSEEDISEYDLKNKNSFSVLKKILLNEDINSEELEIFRKDVEAKLNKINSLKYSFEENKANYQKINENNVEKVGGKSKRNIIYDYYRESAKRNDYINNVQEAFDKLYKKEDIEKLFFLIENSKKHEKYKIRECYHKIIGRKNDKENFAKIIYEEIQNVNNIKELIEKVPDMSELKKSQVFYKYYLDKEELNDENIKYAFCHFVEIEMSKLMKNYVYKKPSNISNDKVKRIFEYQSLKKLIENKLLNKLDTYVRNCGKYNYYLQDGEIATSDFIARNRQNEAFLRNIIGVSSVAYFSLRNILETENENDITGRMRGKTVKNNKGEEKYVSGEVDKIYNENKQNEVKENLKMFYSYDFNMDNKNEIEDFFANIDEAISSIRHGIVHFNLELEGKDIFAFKNIAPSEISKKMFQNEINEKKLKLKIFRQLNSANVFRYLEKYKILNYLKRTRFEFVNKNIPFVPSFTKLYSRIDDLKNSLGIYWKTPKTNDDNKTKEIIDAQIYLLKNIYYGEFLNYFMSNNGNFFEISREIIELNKNDKRNLKTGFYKLQKFEDIQEKTPKEYLANIQSLYMINAGNQDEEEKDTYIDFIQKIFLKGFMTYLANNGRLSLIYIGSDEETNTSLAEKKQEFDKFLKKYEQNNNIEIPYEINEFLREIKLGNILKYTERLNMFYLILKLLNHKELTNLKGSLEKYQSANKEETFSDELELINLLNLDNNRVTEDFELEANEIGKFLDFNGNKIKDRKELKKFDANKIYFDGENIIKHRAFYNIKKYGMLNLLEKISDEAKYKISIEELKNYSNKKNEIEKNHTTQENLHRKYARPRKDEKFTDEDYKEYEKAIGNIQKYTHLKNKVEFNELNLLQGLLLKILHRLVGYTSIWERDLRFRLKGEFPENQYIEEIFNFDNSKNVKYKSGQIVEKYINFYKELYKDNVEKRSIYSDKKVKKLKQEKKDLYIRNYIAHFNYIPHAEISLLEVLENLRKLLSYDRKLKNAVMKSVVDILKEYGFVATFKIGADKKIGIQTLESEKIVHLKNLKKKKLMTDRNSEELCELVKVMFEYKMKEKKSEN

SEQ ID NO: 219 - protein, 1384 aa, Artificial; identical to SEQ ID NO: 117
  Synthetic

SEQ ID NO: 220 - protein, 1360 aa, Artificial; identical to SEQ ID NO: 92
  Synthetic

SEQ ID NO: 221 - protein, 1423 aa, Artificial
  Synthetic
MRILRSKGTSYTRFEGRRQSHKDLSDPAHEKDPSLRQLPSRGLLLKTKAASSGGARSLSEKIWDSRSLPDQLERDRDLALRQYIQWLDKALKKPRNLRLLDMPSYVARTHLGTCLWDLFAELQFEDSTPDDPIYKQYLTRWQTKVHPYARHEVNWQKPETDGNAEEINQTQGTPCKEPDLAMSTTRWTSVFGVPVGASTMDAYREAASKIHEHLLFQELTIQGDERESQRHPSGYGFMNKRGEIITLDATDPRDCDRFERYKNWSEELEELYFQYGDVARQIASGFKNEPKAGKPKQRIGAALYEHFGKVLQDSKIPDEKRQELWNLHNRIRHFYRTLAGSRRLLEALRSDDTNKLRFLLPKNSEELLDRVVGKRNASRLNRKVRLGKIIAHSIDLSAGYGGSNFNALVHEAMNYYTTSVGQSDIKRNEAFVRILRNAVAFSMRTHATWLEEGLDQQAKAFGTGDRPVASKEASRDLSERDTAAGALLHTPLHKIIPHARLIFGSRVYEFAFDSTSVQEARKSRSRTDVLFDGSEQDKEVLWGLLRLAALVRNRSYHFNTKKRFLSALENGLLRAPANKGDRKPFSDRDGSIVDSPALMRLESLLDYDLKLDAQILSQTLTALRFHHHVPTEMRSANLLTLGRLPASDDRVTPKFMTLIQKGKDLASNDAADLVPDLLQQFSALQLHDLSKDHGSVNHDRIGILRLLYNRAFPNWLEQIEKSEEASVKVFKEILKNKRARRESYLKQTKRVLADDELLADTLLGKATTIAELEEAFTAEALSSQERELDDTLTEPAQTSDKPVSPTHPPSNPYVPDRSQQSGETGALQGFRCEVYAYLFAQFIQENHFGWVWSMAEPAGSEATKVAVAEVTRDPGQQPSWLRQFYAWLYLVPADQIALLQHQFRKTKILEEKAKRERAILFPAARPTGGVPASSNGENAAIKEMPARDQMFAIMQANEDKADSLRALDRVMGLYTRVHAAGFSGEEFAIAKQFFSDGNVFDELFATAEAEETLMLPGTISGLQQLARLGTLNVLKSTFTKHQVTQQEARALKNFVKDGELAPFIAKQNLHAKLQTAWKEKPCNEVLLRQDVEKYREAAAEVAGYNFDIAAARLSDFANTHHLLISILGRLADFTAIWERDRDCLLLALAFDHHPHLEFVSSGKGDVFVKDPGKEEAFQVYWRQSGFVGMHRRSDFLVFARCAEQPWLQRFFGLPRDNERHRTEHTLDVARQLRLNPELQRQGKTELKPNVGHRFEVSRIRNDLAHFNVLDFQPDLRKPGKHSGRRSLNLTYVINAVRALMSYDRKFKNAVPKAIADIAQKQGMGLSWTFNRDRLLNAVLTPAFHSHLDFIRFEDGSRPTFSLPVVSPRRLSMTRALFDFGNSGYLVDTATGKLLAYPEHVSKLCLLRKTPTRLFGSGKSASDS

SEQ ID NO: 222 - protein, 916 aa, Artificial
  Synthetic
MKLSKEKHTRSAVANNGDIKSAEVNNGNTKSEEVNNGDIRSAVANEEQNIGGILYRFPGKSIDGVKDQMLRRDKEVKKLYNVFNQIQVGTKPKKWNNDEKLSPEENERRAQQKNIKMKNYKWREACSKYVESSQRIINDVIFYSYRKAENKLRYMRKNEDILKKMQEAEKLSKFSGGKLEDFVAYTLRKSLVVSKYDTQEFDSVAAMVVFLECIGKNNISDHEREIVCKLLELIRKDFSKLDPNVKGSQGANIVRSVRNQNMIVQPQGDRFLFPQVYAKENETVTNKNVEKEGLNEFLLNYANLDDEKRAESLRKLRRILDVYFSAPNHYEKDMDITLSDNIEKEKFNVWEKHECGKKETGLFVDIPDVLMEAEAENIKLDAVVEKRERKVLNDRVRKQNIICYRYTRAVVEKYNSNEPLFFENNAINQYWIHHIENAVERILKNCKAGKLFKLRKGYLAEKVWKDAINLISIKYIALGKAVYNFALDDIWKDKKNKELGIVDERIRNGITSFDYEMIKAHENLQRELAVDIAFSVNNLARAVCDMSNLGNKESDFLLWKRNDIADKLKNKDDMASVSAVLQFFGGKSSWDINIFKDAYKGKKKYNYEVRFIDDLRKAIYCARNENFHFKTALVNDEKWNTELFGKIFERETEFCFNVEKDRFYSNNLYMFYQVSELRNMLDHLYSRSVSRAAQVPSYNSVIVRTAFPEYITNVLGYQKPGYDADTLGKWYSACYYLLKEIYYNSFLQSDRALQLFEKSVKTLSWDDKKQQRAVDNFKDHFSDIKSACTSLAQVCQIYMTEYNQQNNQIKKVRSSNDSIFDQPVYQHYKVLLKKAIANAFADYLKNNKDLFGFIGKPFKANEIREIDKEQFLPDWTSRKYEALCIEVSGSQELQKWYIVGKFLNARSLNLMVGSMR

SEQ ID NO: 223 - protein, 1168 aa, Artificial
  Synthetic
MKITKIDGISHKKYIKEGKLVKSTSEENKTDERLSELLTIRLDTYIKNPDNASEEENRIRRENLKEFFSNKVLYLKDGILYLKDRREKNQLQNKNYSEEDISEYDLKNKNNFLVLKKILLNEDINSEELEIFRNDFEKKLDKINSLKYSLEENKANYQKINENNIKKVEGKSKRNIFYNYYKDSAKRNDYINNIQEAFDKLYKKEDIENLFFLIENSKKHEKYKIRECYHKIIGRKNDKENFATIIYEEIQNVNNMKELIEKVPNVSELKKSQVFYKYYLNKEKLNDENIKYVFCHFVEIEMSKLLKNYVYKKPSNISNDKVKRIFEYQSLKKLIENKLLNKLDTYVRNCGKYSFYLQDGEIAISDFIVGNRQNEAFLRNIIGVSSTAYFSLRNILETENENDITGRIKGKTVKNNKGEEKYISGEIDKLYDNNKQNEVKKNLKMFYSYDFNVDNKNEIEDFFANIDEAISSIRHGIVHFNLELEGKDIFTFKNIVPSQISKKMFQDEINEKKLKLKIFKQLNSANVFRYLEKYKILNYLNRTRFEFVNKNIPFVPSFTKLYSRIDDLKNSLCIYWKIPKANDNNKTKEITDAQIYLLKNIYYGEFLNYFMSNNGNFFEIIKEIIELNKNDKRNLKTGFYKLQKFENLQEKTPKEYLANIQSFYMIDAGNKDEEEKDAYIDFIQKIFLKGFMTYLANNGRLSLMYIGNDEQINTSLAGKKQEFDKFLKKYEQNNNIEIPHEINEFVREIKLGKILKYTESLNMFYLILKLLNHKELTNLKGSLEKYQSANKEEAFSDQLELINLLNLDNNRVTEDFELEADEIGKFLDFNGNKVKDRKELKKFDTKKIYFDGENIIKHRAFYNIKKYGMLNLLEKISDEAKYKISIEELKNYSNKKIEIEENHTTQENLHRKYARPRNDEKFNDEDYKKYEKAIRNIQQYTHLKNKVEFNELNLLQSLLLRILHRLVGYTSIWERDLRFRLKGEFPENQYIEEIFNFDNSKNVKYKNGQIVEKYISFYKELYKDDTEKISIYSDKKVKELKKEKKDLYIRNYIAHFNYIPNAEVSLLEVLENLRKLLSYDRKLKNAVMKSVVDILKEYGFVVKFKIGADKKIEIQSLKSEEIVHLKKLKLKDNDKKKEPIKTYRNSKELCKLVKVMFEYKMKEKKSEN

SEQ ID NO: 224 - protein, 1149 aa, Artificial; identical to SEQ ID NO: 8
  Synthetic

SEQ ID NO: 225 - protein, 1179 aa, Artificial
  Synthetic
MKITKIDGVSHYKKQDKGILKKKWKDLDERKQREKIEERYNKQIESKIYKEFFRLKDGKRITREEKDQNIKSLYFFIEELYLSKKNEEWELKNINLEILDDKERIIKGYKFKEDVYFFKEGDKKYYLRTLLNNLIEKIQNENRDKVRKNKEFSDLKEIFKKYKDRKIKLLLESINNNKINLEYKKENVNEEIYGINPTNDREMTFYELLKEIIEKKDEQKSILEEKLDNFDITNFLENIEKIFNEETEINIIKGKVLNELREYIREKEENNSDYKLKQIYNLELKKYIENNFSYKKQKSKSKNGKNDYLYLNFLKKIMFIEEVDEKKGINKEKFKNKINSNFKNLFVQHILVYGKLLYYKENDEYIKNTGQLETKDLEYIKTKETLIRKMAVLVSFAANSYYNLFGRVSGDILGTEVVKSSKTNVIKVGSHIFKEKMLNYFFDSEIFDANKIVEILESISYSIYNVRNGVGHFNKLILGKYKKKDININKRVEEDLNNSEEIKGYFIKKRGEIEKKIKERFLSNNLEYYYAKERIENYFEVYEFEILKEKIPFAPNFKRIIKKGEDLFNNKKNKKYEYFKNFDKNSAEEKKEFLKTRNFLLKELYYNNFYKEFLSKKEEFKKIVIEVKEEKKNRGNNKKSGVSFQSIDDYDTKINISDYIASIHKKEMERVEKYNEEKQKDTAKYIRDFVEEIFLTGFINYLEKDERLHFLKEEFSVLCNSNNNIIDFNVNINEEKIKEFLKENDSKTLNLYLFFNMIDSKRISEFRNELIKYKQFTKKRLDEEKEFLGIKIELYETLIEFVILTREKLDTKKSEETDAWLVDKLYVKENNAYKEYEEILKLFVDEKILSSKEAPYYATDNKTPILLSNFEKTRKYGTQSFLSEIQSNYKYSKVEKENIEDYNKKEEIEKKEKSNIEKLHDLKVELHKKWEKNKITEKEIKKYSDTIKEIREYNYLKNKEELQNVYLLHEILSDLLARNVAFFNKWERDFKFIVIAIKQFLRENDKGKVNEFLNPPDDSNGKKVYFSVSRYKNTVENIDGIHKNFMNLIFLNNKFMNRKINRINCTIWVYFRNYIAHFVYLHTKNEKISLINQINLLIKLFSYDKKVQNHILKSTKTLLEKYNIQINFEISNDKNEVFKYKIKDRLYSKKGKMLGKNNKFEILEKEFLENVKTLLECSK

SEQ ID NO: 226 - protein, 1187 aa, Artificial; identical to SEQ ID NO: 122
  Synthetic

SEQ ID NO: 227 - protein, 1101 aa, Artificial
  Synthetic
MRISKVKVKDGGKDKMVLVHRKTTGAQLIYSEQAVSNETNNILPVKKMDSFNLSILNKTIIKFETVKKQKLNLDQYKIVEKIFKYPKQELPKQINAEEILQFLNHKFQEPVKYWKNGKEESFNLTLLIVEAVKTQEKRKLQPYYDWKAWYIQTKSDLLKKSIENNRIDLTENLSKRKKALLAWETEFTTSGSIDLTHFHKVYMTDVLCTALQKVEPSADERGKMNSNAYHRGLKKALQNHQPAIFGTREAPNEVNRADNQLSIYHLEVVKYLEHYFPIKTSKRRNTADDISHYLKAQTLKTTIEKQLVNAIRANIIQQGKTNHHELKADTTSNDLIRIKTNEAFVLNLIGTCAFAANNIRNMVDKEQISDILGKREFIDSLTKSRISSQLYSFFFGENLSTNKAEKETQLWGIRGAVQQIRNNVNHYKKDALTTIFNICKFENPTDADPKQQTNYVDSIYKTLFIKELEKIPEAFAQQLKTGGALSYYTVENLKTLLTTFQFSLCRSTIPFAPGFKKVLNGGINYQNAKQDESFYELMLERYLRKENFAEEAYNARYFLLKLIYNNLFLPKFTADRKAFADSVGFVQLQNRKQAENSKRPKAFAFEAVRPMTAADSIADYMAYVQSELMQEQNKKEEKATDETRINFEKFVLQVFIKGFDSFLRAKEFDFVQVPQPQLTTTDSNQQKADKLNQLEASITADCKLTAQYAKTDDATHIAFYVFCKLLDAGHLSNLRNELIKFRGSVKDFDFHHLLEIIEICLLSADVVPTDYRDLYSSGADCLARLRPFIEQGADIKNWSDLYVQTDKQTPVIHAGIELSVKYGTTALLEQLITCNPKFRVMEDNFTKWSAQKKEIEEKVNKHTNLHQQWVEAKEKDDRERVKSKKNFVREYVKKNYVDYINNCIEINNYNWLDNKLHFVHLNHLHHLTIDILGRMAGFVALWERDFQYITKYTAAKEGTDALSFDGGLPRLKDKQEYYNKLFLSDKYTKVRNHIAHFNYLTKDAADFALLDLINELRELLHYGRKLKNAVSKAFIDLFEKHGMILKLKLNTDHQLVVESIEPKKIYHLGSTAKDKPEYQYTTNQVMTVYCNMCRSLLEMKK

SEQ ID NO: 228 - protein, 1168 aa, Artificial
  Synthetic
MKVTKVDGISHKKYIEEGKLVKSTSEENRTSERLSELLSIRLDIYIKNPDNASEEENRIRRENLKKFFSNKVLHLKDSVLYLKNRNEKNAVQDKNYSEEDISEYDLKNKNSFSVLKKILLNEDINSEELEIFRKDVEAKLNKINSLKYSFEENKANYQKINENNVEKVGGKSKRNIIYDYYRESAKRNDYINNVQEAFDKLYKKEDIENLFFLIENSKKHEKYKIREYYHKIIGRKNDKENFAKIIYEEIQNVNNIKELIEKVPDMSELKKSQVFYKYYLDKEELNDKNIKYAFCHFVEIEMSKLLKNYVYKKPSNISNDKVKRIFEYQSLKKLIENKLLNKLDTYVRNCGKYNYYLQDGEIATSDFIARNRQNEAFLRNIIGVSSVAYFSLRNILETENENDITGRMRGKTVKNNKGEEKYVSGEVDKIYNENKQNEVKENLKMFYSYDFNMDNKNEIEDFFANIDEAISSIRHGIVHFNLELEGKDIFAFKNIVPSEISKKMFQNEINEKKLKLKIFRQLNSANVFRYLEKYKILNYLKRTRFEFVNKNIPFVPSFTKLYSRIDDLKNSLGIYWKTPKTNDDNKTKEIIDAQIYLLKNIYYGEFLNYFMSNNGNFFEISREIIELNKNDKRNLKTGFYKLQKFEDIQEKTPKEYLANIQSLYMINAGNQDEEEKDTYIDFIQKIFLKGFMTYLANNGRLSLIYIGSDEETNTSLAEKKQEFDKFLKKYEQNNNIKIPYEINEFLREIKLGNILKYTERLNMFYLILKLLNHKELTNLKGSLEKYQSANKEETFSDELELINLLNLDNNRVTEDFELEADEIGKFLDFNGNKIKDRKELKKFDTKKIYFDGENIIKHRAFYNIKKYGMLNLLEKISDEAKYKISIEELKNYSNKKNEIEKNHTTQENLHRKYARPRKDEKFTDEDYKEYEKAIGNIQKYTHLKNKVEFNELNLLQGLLLKILHRLVGYTSIWERDLRFRLKGEFPENQYIEEIFNFDNSKNVKYKSGQIVEKYINFYKELYKDNVEKRSIYSDKKVKKLKQEKKDLYIRNYIAHFNYIPHAEISLLEVLENLRKLLSYDRKIKNAVMKSVVDILKEYGFVVKFKIGADKKIEIQSLKSEEIVHLKKLKLKDNDKKKEPIKTYRNSKELCKLVKVMFEYKMEEKSSEK

SEQ ID NO: 229 - protein, 1168 aa, Artificial; identical to SEQ ID NO: 215
  Synthetic

SEQ ID NO: 230 - protein, 1165 aa, Artificial
  Synthetic
MKISKVNHVRTGTTVTQMQGEGIIYVNPSQNKNAKKDLTEHIKKLNEKAKVLYSPINPVNSITVSMDKNEKQDVNASAKAIKYLVNGILRKNENGIPDCDSLLSQIREKAREAHTSSINPDKLAEKIVDRCLRKKLCKKSEIAKALFAAILSSNKAERLNLLDKDEVKAFFDLAHEDYYKTEQLKEIEDSIVKKDVRVQVKEGMDGEKHLVLSSADNPKKHFYFDFIKEYTSKDNAGREEMLIRFRQLIILFYSGVKAYHLSIGSDVGAWTFGSSLPDVADNFNDEAAALITECQIQQAEKEKYGKKKNILSDKLKNCKYGTPEYRNLLGQETDCKTAIASCNSAIGNAQKKIKVLLADTICNNYRTAVKTEGLAEGDIFWIGYIQGIAEKLFEKKSSYTMYKMSTKYLYEVTFNEWLSFVALKVIDMGKAVYHFAMPDCSDICSGAEIRAGKVQPLFEDGITSFDYERIKAKETITREFAVHATYAAGIFSNAVADKEYRLHTETDEKGRTLNFEDPLQYKEKEWVQALVPDAKKKLLMFFGGQSGWDGTEIAAKSDLEVTSAFQEMINVIRNSNYHYAGSIVSPKEETITIMRGLFDKEFSELGRILREKYYSNNVPVYYGIGDIDKLMTFLYTGESKREAQIPSFGNIFKKKDIPDFVKKNIAGSLLAKYNVQELEKFRSALYFVLKEIYYYGFLKETNIKDRFLAFLNKSKNSAKNPDAYNSFQSRLKDLDADCSFGEICQMYMTDYNQQNQGNYKVKSQTQEEKDRKDDKGHKYEHFKMLLYVTIQGAFTDYLAEKKEIFSFLMAPDLKENFFGSNAAKGFISSWKADLFNETKKVLSEDAYVLSWYALAHLLSPKQLNHLQGDIKSYIQFVGEINAREKSVLGRERDTRLTDTTGDFEKILKVLEFVMNFVGKTSNVLTDYFADADDYAKHLYSYVSYAGKKEEKNNAALAAFCQKAITQKDITLTDKIGIYHDGINPIVNTNVVKAMMYGNETILSEAVSKVSGDLFHGDIVSYFRLKKELEKVFEKGECANREEQTKLREFQNLKNRVELYDIAVFTDIINDYMGELVNMAYLRERDLMYYQLGYHYLRQEYATVEEKYKTISEENICITSGALLYQIMAMYSYNLPIIYKGKEGTYKYSNGGKINKFVKNYCGENL

SEQ ID NO: 231 - protein, 1380 aa, Artificial; identical to SEQ ID NO: 153
  Synthetic

SEQ ID NO: 232 - protein, 1382 aa, Artificial; identical to SEQ ID NO: 210
  Synthetic

SEQ ID NO: 233 - protein, 1380 aa, Artificial; identical to SEQ ID NO: 143
  Synthetic

SEQ ID NO: 234 - protein, 1388 aa, Artificial
  Synthetic
MGNLFGHKKWYKADKIIKDKKGKESTIKQEVRIKRNYSVDRYTLNTNNKEKNNINNEDFVNQFIEYKTNNDIFKKFTRKFHMGNILFKLKGNKRSIEDSNDFLKTEEIILDKEVYGQSEKLRNEKGITKQGILKEINYRGINESNDSILIKTKFGKEIKINFTDEAKKNKNEYQITLKIIPENELKIKREVYDVFKMINMDLYQIIKEIIENEVQKVFKNRYYEEYLREKLLKDDKTGVILTNFIEIREKIKSNLEIMGFVKFYLNVGGDKKKSENKKIFVEKILNINVDLTVEDIVDFIVKELKFWNITKRIEKLQEKTVNRADEDIENTYINTYVLLDKHEKFKKYNRNKKDTIVKSFIKDIKDNTMKQKINQILRKFKIDELIKKTEKELKRGNCDTEIFGIFKVHYQEMFSSEKFEKKSDEEKELYKIIYRYLKGRIEKILVNEQKVRLKKIEKILNESILSEKILKRVKQYTLEYIMYLGKLVHNKINMATVNTNDFFRLHAKEELDLELITFFASTNMELNKIFNGKEKVTDFFGFNLNGQKITLKEKVPSFKLNILKKLNFINNENNIDEKLSHFYSFQKKGYLLRNKILHNSYGNIQETINLKGEYENVENLIKELKVSNEEISKSLNLDIIFEGKVDIINKINSLEIGEYKDKKYLPSFSKIVPEIMRKFREINKDKSFDIESEKIILNAVQYVNKILYEKITSNEENEFIKTLPDKLVKKNNNKENNNSLSIEEYYKNAQISSSKGDKKAIKKYQNKVTNAYIEYLENTFAEVIDFSNFNLNFDEIKTKIEERKYSKSKITVDSISTNINITNDIEYIISIFALLNSNTYINKIRNRFFATSVWLDKQNSTKEYDYENIIDILDKILSINLLRENNIADILDLKNTIIEAKIVENNEECIKNYIFENNEEELKKRLFCEELVNKEDVLKIFEDKNFKFKNFIKKTGNENFTINFDILFNLECNSELNVKKVMGQNSQRLNLFIKNTIDEYKSKIKTSFSSEFLEKYKKEIDNLVEDTESENKNKFEKIYYPKEHKNELYIYKKNLFLNIGNPNFDKIYELISKDIKNANTEILFDDDIRKNKISEIDAILKNLNDKLNGYSNDYKAKYVNKLKENDDFFAKNMKNENYSSFGEFEKDYNKVSEYKKIRDLVEFNYLNKIESYLIDINWKLAIQMARFERDMHYIVNGLRELGIIKLSGYNTGISRAYPKRNGSDGFYTTTAYYKFFDEESYKKFEKICYGFGIDLSENSEINKPENESIRNYISHFYIVRNPFVDYSIAEQIDRVSNLLSYSTRYNNSTYASVFEVFKKDVNLDYDKLKTKFKLFDDEKNDNIKILKIENLIESKKVSVLELESYNSDYIKNLIIELLTKIENTNDTL

SEQ ID NO: 235 - protein, 1161 aa, Artificial; identical to SEQ ID NO: 29
  Synthetic

SEQ ID NO: 236 - protein, 1168 aa, Artificial; identical to SEQ ID NO: 30
  Synthetic

SEQ ID NO: 237 - protein, 1199 aa, Artificial; identical to SEQ ID NO: 28
  Synthetic

SEQ ID NO: 238 - protein, 1412 aa, Artificial; identical to SEQ ID NO: 53
  Synthetic

SEQ ID NO: 239 - protein, 949 aa, Artificial; identical to SEQ ID NO: 43
  Synthetic

SEQ ID NO: 240 - protein, 1101 aa, Artificial; identical to SEQ ID NO: 73
  Synthetic

SEQ ID NO: 241 - protein, 1330 aa, Artificial
  Synthetic
MKREENITIMKISKVNHRRTAVALNGDKSELGGILYEAPVQKDKNGNYNDVIAETGKVVNEALDKKSRLYTPFNNQKVIIDKNLQRYANNLKRCYINFVKQYVNNKSFNYKAMQFIPDIQNPKTNDEVNYRTDRDNVYNKNKYYDKQTKSKSKKFIYEKIVIPQNEQNIVISALVNCSLRKSLRKDVSYKTKSGEIKTYNLPELVKKSMRFYCLEGQREPDEKEKYEMYILFSYMKEDKRTKNTDLLVKSISNQNTKVKVEDIDGNKLLKLSIADTKKKPLWEYLIKYADSSRQRELMYDIRKKIILYVAGIEEYENIKEDSGLSKVSWSKYNISDNKMFFDINSCTDKRKQNLEIKIREANIEHYRNASSKLCDDESIFWFQHFEGVIETLFSKKSKISEERLGCAYICDYLWKDFLSYLAAKYIDLGKGVYHFTMKDKLDMLNKNEAVTDLRFGIVSEKYEKGITSFDYERIKAEEELDRNIAAYVTFAADIFAKSVIKSDYRTKKDNNSDVLQYSDKEFRNSEVIRDNAEKNILQYWGGYSRWGTENSKLPENNKVSDFGKLNVSDLCIDIKKHLAGIRNSSVHYTTKIKNESAADGSNVKILFEKDLADINIIYADKYYSNNVWMFYSLEDINKLIAFLYKEKRVIRQVQIPSFSRILKRKAMQDVINEIFKDDFDENIVNPELKEKYRNSLYFMLKEIYYNAFIIQPELKEKFKDKIKTMKSELYNKLKTIDKKEYKALYCMLSNEESALKNFADRIYSVDGDNVSFADICKILMTDYNMQNQEKKNIESMEQKKKNKGKDENYKHFPLLLHKVLKELFIEYLKQTHELEFLRNNICIKSDVTMESFESQIKGVEIYKDLKEKIDKNNSLLDWYVIAHFLMPKQLNHLIGNIKNYIQFATNIDKRAESVKNLTESGMVKRIQYYDDIVRTLEFSAQYIGKISNNINDYFNSEDEYVSFLSKYVGFINDKSEDVLTELKDFCREKINNGSQIIGIYYGGDNVIINRNVIYAQMYSNAEVFSNIYKKVTKNDIINYYEKQNDLKDVFKSGVCQNEGEQRSLCEFQQLKNRTELTELSTYADMVNDFMAQFVEWAYLRERDLMYFQLGIHYIRLFYSDNALDEKYHKLSDNVIDIEEGALLYQIVAMYDYELRIFETDNSGNAKRIGQGGPGKSIPVFLKKYCNGTDVYECGLELFEDINQHEHIIRFRNDIAHMRYMSNQAMNIMSIVSNIYKSFFVYDTKLKKSISLVFKNILMRYGVIADLVFSYNNKNQSIKDDMDINIINIKNLKSDKYVYKIVNEDIVKQVEIEIRNQVFLEQLHNLLYFSR

SEQ ID NO: 242 - protein, 1101 aa, Artificial; identical to SEQ ID NO: 227
  Synthetic

SEQ ID NO: 243 - protein, 1284 aa, Artificial; identical to SEQ ID NO: 63
  Synthetic

SEQ ID NO: 244 - protein, 1225 aa, Artificial; identical to SEQ ID NO: 65
  Synthetic

SEQ ID NO: 245 - protein, 1284 aa, Artificial; identical to SEQ ID NO: 63
  Synthetic

SEQ ID NO: 246 - protein, 1225 aa, Artificial; identical to SEQ ID NO: 65
  Synthetic

SEQ ID NO: 247 - protein, 1194 aa, Artificial; identical to SEQ ID NO: 18
  Synthetic

SEQ ID NO: 248 - protein, 1412 aa, Artificial; identical to SEQ ID NO: 53
  Synthetic

SEQ ID NO: 249 - protein, 1330 aa, Artificial
  Synthetic
MKREKNITIMKISKVNHRRMAVALNGDKSELGGILYEAPVQKDKNGNYNDVIAETGKVVNEALDKKSRLYTPFNNQKVIIDKNLQRYANNLKRCYINFVKQYVNNKSFNYKAMQFIPDIQNPKTNDAVNYRTDRDNVYNKNKYYDKQTKSKSKKFIYEKIVIPQNEQNIVISALVNCSLRKSLRKDVSYKTKSGEIKTYNLPELVKKSMRFYCLEGQREPDEKEKYEMYILFSYMKEDKRTKNTDLLVKSISNQNTKVKVEDIDGNKLLKLSIADTKKEPLWEYLIKYADSSRQRELMYDIRKKIVLYVVGIEEYENIKEDSGLSKVSWSKYNISDNKMFFDINSCTDKRKQNLEIKIREANIEHYRNASSKLCDDESIFWFQHFEGVIETLFSKKSKISEERLGCAYICDYLWKDFLSYLAAKYIDLGKGVYHFTMKDKLDMLNKNEAVTDLRFGIVSEKYEKGITSFDYERIKAEEELDRNIAAYVTFAADIFAKSVIKSDYRTKKDNNSDVLQYSDKEFRNSEVIRDNAEKNILQYWGGYSRWGTENSKLPENNKVSDFGKLDVSDLCIDIKKHLAGIRNSSVHYTTKIKNESAADGSNVKILFEKDLADINIIYADKYYSNNVWMFYSLEDINKLIAFLYKEKRVIRQVQIPSFSRILKRKAMQDVINEIFKDDFDENIVNPELKEKYRNSLYFMLKEIYYNAFIIQPELKEKFKDKIKTMKSELYNKLKTIDKKEYKALYCMLSNEESALKNFADRIYSVDGDNVSFADICKILMTDYNMQNQEKKNIESMEQKKKNKGKDENYKHFPLLLHKVLKELFIEYLKQTHELEFLRNNICIKSDVTMESFESQIKGVEIYKDLKEKIDKNNSLLDWYVIAHFLMPKQLNHLIGNIKNYIQFATNVDKRAESVKNLTESGMVKRIQYYDDIVRTLEFSAQYIGKISNNINDYFNSEDEYVSFLSKYVGFINDKSEDVLTELKDFCREKINNGSQIIGIYYGGDNVIINRNVIYAQMYSNAEVFSNIYKKVTKNDIINYYEKQNDLKDVFKRGVCQNEGEQRSLCEFQQLKNRIELTELSTYADMVNDFMAQFVEWAYLRERDLMYFQLGIHYIRLFYSDNVLDEKYHKLSDNVIDIEEGALLYQIVAMYDYELRIFETDNSGNAKRIGQGGPGKSIPVFLKKYCNGTDVYECGLELFEDINQHEHIIRFRNDIAHMRYMSNQAMNIMSIVSNIYKSFFVYDTKLKKSISLVFKNILMRYGVIADLVFSYNNKNQSIKDDMDINIINIKNLKSDKYVYKIVNEDIVKQVEIEIRNQVFLEQLHNLLYFSR

SEQ ID NO: 250 - protein, 1169 aa, Artificial
  Synthetic
MQIIKPYGRSHVEADVAGQRKRILAPRSDPDSRIDVETFASSDDRLVIAQWISVIDKIARKPSAGRAPSYEQRSFREKLGDAAWDRLVAGGRLPGAADPGKREALREVWQWKIAPYSVGEVPGSRPSRASAKGRWYDRFPGAAVDVGAADTVAMARGIEEHLHGGTAGRKGLIAARAQSIAANVARAPSPAYSGGCGDGWTLEDERYYAAAGNVALQIRQAAELREQGKDPKKLRRVSPDVAGRILYAHYGRLFRGPDGLALKIAESRAAAPGLFNLHCAVKDSYSRLLSRRLYVPERDTGLPAETRPLSKLLPDTMEALFALVDAKGANRDLNALVRLGKVIHYEAAGSDLDAPEAAVANWPAEVESSRYWTSDGQLDIKRSEAFVRIWRRVLGLAGRTLTDWADPAGTIGGDILMRKQRERALGHEFDPDAHARKLDLLFGGRATIFSFADEADQRALLNFALQGVYDLRNAAFHFTGSGGFARALAKCCRAAAPLVLEAARSLWALDCADRSRLGVAIARAAQFDRFFGEEEIARLVEAAAGRRVGALPLPRLVRVLQRAGNALAGTDAEARRLDMPSRSKLRDPATFCRFEALKLLYEGPFRDWLSSRGSADVNGFIDFAVARSTAAARTLNGKGESRREASIVSRASKLGRLRPGETVSDFFFRLSAESATEFRVQRAYQSDRGRARAQADYIEKLKLDVVALPFGEFLAGAGFDFVTELAPGTAQAAGSSLAIAPPEAGIGPAAEGWQVALYFFLHLVPVDDVARLMHQVQRWDSNAPRSGAAAVSSAGLLVVLALYCDMHDAKFEGRAALSQVEPFRDLFESPGDFDRIFPVMGPDELRLSRRGLREVMRFGHVAPLRSVFRKQWIGTGDVREFLAANRPDPDGSSPIARLQAEREALHELWVRQGRGFTAADRDRYRVVLGQVVRYRHLAAHVTLTDHIRLHRLLVAIWSRLVDFTGLWERDLYFVTLALIHFEGRTPREALGSKALYFLARGQIIEALRKARLSAFAESVLSLHFTGIWKEGSRATRIRNKIAHFAMLRQADAPDLTYWINQCRELLRHDRKLRNAVPASIKELLRQTGIEIEWRLRGDDHDLGASRVTTRRAKHLGSGSVTEDLNGERFVAMTAALFGDSAPHTTVQRPPRRADAHPGRPQFVRPSPRL

SEQ ID NO: 251 - protein, 1250 aa, Artificial
  Synthetic
MQMKISKIKNSRPGISVAENKNEEPLSRQSLLYYAPVKDGKIRLESKDLEQHVTECNEKAQKLYNVITPEINFYRDENRQKMVENLAKNFNAVINNALRSIRNPKEKKEQRVEKEVAFILNLSKKSIKMKKDVFVKSTDLIVKFPENNKYNKKNDKGTGSKEADIQRIISDLVLRKLKKTLRKEVKLENGYRMQMTEITISLMSAICLYGNAESFDPAILKAFFEKVDSDYTKYKYVEQIVKSIESQSAKLKVIEKDGRHLLISANADHRKKKYVFEFMRMYAAADEKEKRELTEHIQDLIGLYLCGKAGYENAENRFSDMIESHNCICGKIEEILNELEKPENLSQQKKENLKNTTVKVMALKYRAAVNYLADEVGKTVLGEIREKKVRSCADLYWIEYIDSTVEKLLLKSRNKKRYRYEIGFLSKHIWKEWTQYISGKYIEIGKGVYHFAIPDLSGALEGESVSICEVKPEYRNGVSGFDYERIRAEESLEREMEKYVLFAVNNFARAVTPEEEREKSGHEDVLLMKTLSEIEESQTKEERQKKHDNNVKNAITLYADADRRILQFFGGQSRFREKEDSLINLYSGEDLYKEIRKELYAIRNITFHYTTKAEKDQTQKHDLAEYLFEEEFSDITELFREKYYANNVWKYYDAEVINTIMENIYCGRKYRAAQVPAFKNIISRPELPQVMNGFVKGNSLRRLMNCPDRDVINKYWSALFFVLKELYYYDFLQEQKKPEDNVKERFFRAIKKLSGQEKDDEKQKAWESFGNRIDQIGRDRSFGAICQGLMIEYMLQNSDISMVQTETDNGKANNKKQIYKHYRTLLYNCISEAFIEYLREKWKELRTPVLTAKEWSKEEFCRVDGLKHLSLFDHLKETFNDAESGSSWYMAAHFINQKYLNHLLGSIRNYLQFTEDIEDRAISLGDCVDNKREEKNLRYRNTLEILEFVAQFCERTTNVMEDYFESNQEYAEYLSDFVDYNTTKKETDIEKALYSFCKQKFKVDGKEYMAGIYYDGENLIPNRNIIRANMYGNTSCLKPCMDRITLKEIRTMYADQNKLDLVLKEGVCHTEEEQKAYREYQNEKNRIELFDVCTYTQILNDMQARLIGWSYMRERDLMYYQLGYYYTKLFWTDSISEEDARRRLVGNLVNVEDGAILYQILAFNSYNLPIIANKNNTVTLLKDEGSIGGKAITAFFKNYENAEMIYKEALDLFENMDEHAAIINTRNYIEILYLICDYPHKHYTFKHFEA

SEQ ID NO: 252 - protein, 1135 aa, Artificial; identical to SEQ ID NO: 147
  Synthetic

SEQ ID NO: 253 - protein, 1186 aa, Artificial; identical to SEQ ID NO: 58
  Synthetic

SEQ ID NO: 254 - protein, 1161 aa, Artificial
  Synthetic
MKVTKVDGISHKKYIEEGKLVKSTSEENRTSERLSELLSIRLDIYIKNPDNASEEENRIRRENLKKFFSNKVLHLKDSVLYLKNRNEKNAVQDKNYSEEDISEYDLKNKNSFSVLKKILLNEDINSEELEIFRKDVEAKLNKINSLKYSFEENKANYQKINENNVEKVGGKSKRNIIYDYYRESAKRNDYINNVQEAFDKLYKKEDIEKLFFLIENSKKHEKYKIRECYHKIIGRKNDKENFAKIIYEEIQNVNSIKELIEKVPDMNELKKSQVFYKYYLDKEELNDENIKYAFCHFVEIEMSKLLKNYVYKKPSNISNDKVKRIFEYQSLKKLIENKLLNKLDTYVRNCGKYNYYLQDGEIATSDFIARNRQNEAFLRNIIGVSSVAYFSLRNILETENENDITGRMRGKTVKNNKGEEKYVSGEVDKIYNENKQNEVKENLKMFYSYDFNVDNKNEIEDFFANIDEAISSIRHGIVHFNLELEGKDIFAFKNIAPSEISKKMFQNEINEKKLKLKIFRQLNSANVFRYLEKYKILNYLKRTRFEFVNKNIPFVPSFTKLYSRIDDLKNSLGIYWKTPKTNDDNKTKEIIDAQIYLLKNIYYGEFLNYFMSNNGNFFEISREIIELNKNDKRNLKTGFYKLQKFEDIQEKTPKEYLANIQSLYMINAGNQDEEEKDTYIDFIQKIFLKGFMTYLANNGRLSLIYIGSDEETNTSLAEKKQEFDKFLKKYEQNNNIEIPHEINEFVREIKLGNILKYTERLNMFYLILKLLNHKELTNLKGSLEKYQSANKEETFSDELELINLLNLDNNRVTEDFELEADEIGKFLDFNGNKIKDRKELKKFDTNKIYFDGENIIKHRAFYNIKKYGMLNLLEKISDEAKYKISIEELKNYSNKKNEIEKNHTTQENLHRKYARPRKDEKFTDEDYKEYEKAIGNIQKYTHLKNKVEFNELNLLQGLLLKILHRLVGYTSIWERDLRFRLKGEFPENQYIEEIFNFDNSKNVKYKSGQIVEKYINFYKELYKDNVEKRSIYSDKKVKKLKQEKKDLYIRNYIAHFNYIPHAEISLLEVLENLRKLLSYDRKLKNAVMKSVVDILKEYGFVATFKIGADKKIGIQTLESEKIVHLKNLKKKKLMTDRNSEELCKLVKVMFEYKMEEKKSEN

SEQ ID NO: 255 - protein, 1373 aa, Artificial; identical to SEQ ID NO: 104
  Synthetic

SEQ ID NO: 256 - protein, 1287 aa, Artificial; identical to SEQ ID NO: 105
  Synthetic

SEQ ID NO: 257 - protein, 1268 aa, Artificial
  Synthetic
MKVSKVNHRKAAVAVNKKSVTVNGILYDAPVKKNVKTGNMSAYVSSKYVIDNVVKNSSRLYSPFSSKRIVIDREKIRIADRLKQCYVNFVKYYLSNGSLNEQQMRFNPNNTYMTDSRVHFCAPSGIDKESLINSIVDSSLRKSLKRTYRFETNYGEKITFNLPDLVKKSIKIYCTDEKRKLNDREEQEMYVLFSYMYEDKYKDRQKVLIANSISNQATKVKVCDDESSLIKLSIADTKKKPLWDFIVDYANSDKNGQYTILRNIRKSIVLFVCGVDVYRNIENNDNLDIWKWEEYGIQESQLFVKIENCYTTKDEDIALNEIRNVNLDHYMKAIGVLDDERSKFWFQHYENTIEALFSKKSKRKIERIKTVYLCEYLWKNFCSYVALKYIDLGKGVYHFTMSDKLSLMNKNTNENGIKFGEVDSRFNKGISSFDYERIKAEETIDRNISTYTTFATNIFAKSVIKDSYIQKKAGNSDALQYDGETYYNRKAINPDALKRVLQYWGGQSRWKSELEELNVAELCIDIKNRLSKIRNSGVHYTSTSALKGNDDDSIVGMLIKKDFDDIKDVYASKYYSNNVWMFYNTDKISKMMEYLYQDDSNIRDAQIPAFNSVIKRKDMAEVIEKIIKKNSYKTIKEPYQREKYRSCLYFMLKEIYYNRFIKQDDLKDQVIQIIDSNTELIGDNSRAVDNLKKRIHDVDSQTMSFGELCQVIMTDYNMQNQENKSIKSKERQDKDRKNGIDNSYKHFPLLLHHLIKVSFLKFIKTDEKLAFIREPRITEYDKTLEQFEAQIQTVDIYNSLKMMVAENKSLLDWYTLAHFLMPKQLNHLIGDIKNYIQYLSNIDKRAGSVKNNKCASTEVKIRQYSEIVRILDFSLQYIGRVSNDVTDYFVDEDEYAAFLSKYVEFSGNDTVSMKAFCQSRTANGKHTIGLYCDGANPIMNRNIAYAKMYGNDEILSYIYNKVTKKDIEKYYVSQDNLEKVFADGKCQDVQQQNALCDFQKMKNHIELTEVSIYTDILNDFMAQFISWAYLRERDLMYFQLGLNYIRMFYGTYELEEKYNKLHGENINIEKGALLYQIVAMYSHELPIYKVDESDIAILAEKQGSSGASIKSFVTEYCKEEMKKAYTYENGLEFFEDVNQHDNLSKLRNDFAHMRYMSARDKSIMDIVSEIYNGFFIYDTKLKKSVSFIFKNILMRYAVDVNIEFCHKGDNEDTNNLIRIKDEVGLYSDKYTYKVEDNDTVDIEVRNSEFLEQLKKLLEYKKESKGSEL

SEQ ID NO: 258 - protein, 1188 aa, Artificial
  Synthetic
MRIVKPYGRSHVEPAATGSTRRVLRLRPPNDKDAKDIEAFARSHEELVIAQWISALDKIATKPSGKDGASDAQRAFRERLGNAAWTLLETKGLLPGLVTRREHLTMLWRAKVHPYGSTPYRPKRGKPAPSLKGRRYERFAGQLEVDKVDAAAIAASIHAHLHGTAVPAVRPGLIATRARSIAENVLRPPQRLPNEERSWSDDDERAYAAAGDVAREIQELAIAIEEDASQRRRGKPLTRSPFALRDAAPALRGQYGRLLVDASGDALPIAQARAAFPGLFGLHMAVRDCYSRILKDHRKSSVVRILPRDMEELLRLVGAKLTNRDLNAMVRLGKVIHYQSSLGVEDSPENVAANWPADVSGSEFWTSAGQAQIKRNEAFVRVWRHVLALAQRTLTDWIDPQGKTQGDILLANPPFNRDAYNRKSDLLFGKRASLFKGVETFENVVLTLARRETAALRHGSFHFKGLGGFTKVLAEVPKTDASVLAAVRTLWEDDLSERAQRLRQTLRGAHVEYFLDEAQGRRLLSAVLADSGPATLPLPRFRRILQRAHNAWAKETDGPGLPEPANRMDIKTYPALHCRYVALKHVYERPFRHWLEQRDAASLNRHIDRAVDRGTKAARDLNAGDDEDRRRIIVARAASLGRLAEDDNVQDFFFELSAETAGEMRVQRGYASDAEAAREQAGYIEDLKCDVLALTFADYLKAAGLDFIRILAPETPRPDNAAYNLDAIEAPEIDTPGEDWQRVLYFILHLVPVEDVGRLLHQTRKWEILAGDETLSPSVRDRLRGIQLALELYLDMHDAKFEGGAALVGTGAFKDLFETARIFDDIFPSQPGSAQTADDERRVPKRGLCEIMRFGHRPALQPIFSRYRVTEREVEEVRAMEWPVDGTSEIARLQDRRERLHKGWTENKSGLSGDDLRAYVAALREVAAHRHLAAHVTLTNHVRLHRLLMAVLGRLVDYSGLWERDLYFVTLALIHRAGRRPADVLPADGLRFLANGQIVEAVRRLEPDLQSRLLDCLGDIDKNGKVRIRNRFAHFNMLQPGNLPVDLTRCVNDARELMAYDRKLRNAVTQSVKELLAREGLMLGWAMGADHRLSAATLATRQAQHLGKTRRGEKGWHERKLRPIPILEDLHGRRFVDMAAALFGGTRLEPERSLLDHPLDRIEWNPTPKNRYGSRPTSGQGRRNVVPR

SEQ ID NO: 259 - protein, 1217 aa, Artificial
  Synthetic
MRIIKPYGRSHVEGVATEQPRRKLRLNTRPDISRDIPGFAQSHDALIIAQWISAIDKIATKPKPDQKPTQRQMNLRTTLGDAAWQHLMAKNLLPAAKDPAIREKLHLIWQSKIAPWGASRPQEEKRGKPTPKGGWYERFCGALSPEAITQNVARQIAKDIYDHLYVAAKRKGREPVKQGESSNKPGKFKPDRKLSLIEERAESIAKNALRPGTHAPCPWGQDDQAIYEQAGDVATKIYDDARDYLEDKKRRSGNRNTSSVQYLPRDLAVKILYAQYGRVFGPDTTIKAALDEQQSLFALHTAIKDCYHRLVNDARKRHILRILPRNMAALFRLVRAQYDNRDINALIRLGKVIHYHAGEQGKDEHHGIRDYWPSQQDIQNSRFWGSDGQADIKRHEAFSRIWRHIIALASRTLHDWADPDSQKFTGDDDDILMRAGAIESNVWDAGRYERKCDVLFGAQASLFCGAEDFEKATLKQAITGTGNLRNATFHFKGKARFENELQRLADDVPVDVQSAIAALWQKDAEGRTRQIAETLQAVLAGHFLSERQNRHILATLMAAMAQPGDVPLPRLRRVLARHDSICQRGRILPLPPCPDRAKLEESPALTCQYTVLKMLYDGPFRAWLAQQNSTILNHYIDSTIARTNKAAQDMNGRKLAPAEKDLITARAADIPRLSVDEKMVDFLGRLTAATATEMRVQRGYQSDGEKAQKQAGYIGEFECDVIARAFSDFLGQSGFDFVLKLKADTPKPDAAQCDVAALIAPGDVPALTPQAWQQVLYFILHLVPVDDASRLLHQTRKWQALEKKGKDKEVKKEKDKEVKKEDEKPDIADLQSVLMLYLDMHDAKFTGGAALHGIEKFAEFFVEKADFRAVFPPQSLQDQDRSIPRRGLREIVRFGHLPLLQHMSGTVKITHDNVVAWQTARTPDATGTSPIARRQKQREELHALAVERPARFRNADLHNYMHALVDVIKHRQLSAQVTLSDQVRLHRLMMGVLGRLVDYAGLWERDLYFVLLALLYHHGVTPDDVLKGQGKRKLADGQVVEALKPKNRKAAAPVGVFDDLDHYGIYQDDRQSIRNGLSHFNMLRGGTAPDLSHWVNQTRRLVAHDRKLKNAVAKSVIEMLAREGFDLDWTIEPDSGKHILRHGKIRTRQAQHFQKSRIRIEKKSAKPDKNDTVKIRENLHGDAMVERVARLFAARAQKYRDITTEKRLDHLFLKPKG

SEQ ID NO: 260 - protein, 1227 aa, Artificial
  Synthetic
MLIIKPYGRSHVDTSPNGRRRTLHLNTTPTNSKDIAEFAKSDPRLVIAQWISAIDKIATKPKANTRPTAAQRAFRKKLGEACWQYIETHQLVPGLDDKEINPKLHTLWWSKIEPYDKKDFSPKRKPPAVGGRWYKRFAGEAKPEHVDGASIAEKLHEHLYVSEYRIDATRPNKRKGRINARAESIEKNVLKPPQKSVEGWNAKDEADYLRAGDIAQAIYAAAETAHNTKDHNGRARPRRLTLSEASVELFKQYGHLFRDKSGTPLSIEEAKAQHTHLFDLHMAVKDFYKRRLKHSKRQNILTSLPKDSAALFTLLKVTKQNQDLAGLVRLGKVIHYEMSHQAWESGKPAETEEAEWNRLKGLMTSWSRADRFAQYWPKNIEESAFWTSKGQEEIQRHEAFVRIWRHIMTLANRTLTDWAYPDTHISHDIFEGKKINHALKQVSAEQHKRKLDLLFGKHGDLLASNNLAPKILETAIKRMAYLRNNSFHFTDKRIFATALTRLTENVPNEVKPSLSALWQADNADRTAAIGRAMQAVHATAYFDETQNRNIFTAVKGAPPSLLALPRFRRIIVRAENAWGHEKDRPGLPEPANRQALEDPARLCQYATTKQLYDGPFRHWLDTRSAQTVNLYIGRAVDRATKAAQNMNGKQKTDEEKALIASRATHLPRLDETKGGETIRDFFFRLAASTATEMRVQKGYESDGGNAQKQAEFIEDLKCDVVALALADYLAKHHFTFILSLKPETPLPTEEINLESFATSDAKQRNTSERASDWQAVLYFLLHLIPVDDASRLLHQIRKWMVLEAKSKAEGTRPIQTPDTTILKTVETLELYLAMHDTKFEGGMELTGTDGFKDFYESETGFKKLFSNPENVEDHTVPRRGLREVMRFGHLPLLRQVCGQQTISDSQITEWETANNASPGGHSPIAAQQHKREALHEEYVKSTNTFSIAKIKDYATALSFVSRHRTLAAHVTLSNHVRAHRIMMAVLARLADYAGLWERDLYFVTLAVCYQRGLRPDVVFKNDGLSELAKRQPIKAQSKKLGTSDSNAVQQEIVRYFGNVHVEGNDDVKTRNDLAHFNMLQGGTLNLTEWVNQTRQLMRHDRKLKNAVTQSVRELLAREGLDLTWQIDANAHPHLLHRATLATRYAIHLQKVKGLQPKLLEPLHGEDFIAMICALFNGKAVGGIDPVKHMDMACLDLQRLCLQKNQGRTGTKKPHGKGRSRMQRRSKK

SEQ ID NO: 261 - protein, 1161 aa, Artificial
  Synthetic
MKVTKVDGISHKKYIEEGKLVKSTSEENRTSERLSELLSIRLDIYIKNPDNASEEENRIRRENLKKFFSNKVLHLKDSVLYLKNRKEKNAVQDKNYSEEDISEYDLKNKNSFSVLKKILLNEDINSEELEIFRKDVEAKLNKINSLKYSFEENKANYQKINENNVEKVGGKSKRNIIYDYYRESAKRNDYINNVQEAFDKLYKKEDIEKLFFLIENSKKHEKYKIRECYHKIIGRKNDKENFAKIIYEEIQNVNNIKELIEKVPDMSELKKSQVFYKYYLDKEELNDKNIKYAFCHFVEIEMSQLLKNYVYKRLSNISNDKIKRIFEYQNLKKLIENKLLNKLDTYVRNCGKYNYYLQVGEIATSDFIARNRQNEAFLRNIIGVSSVAYFSLRNILETENENDITGRMRGKTVKNNKGEEKYVSGEVDKIYNENKQNEVKENLKMFYSYDFNMDNKNEIEDFFANIDEAISSIRHGIVHFNLELEGKDIFAFKNIVPSEISKKMFQNEINEKKLKLKIFRQLNSANVFRYLEKYKILNYLKRTRFEFVNKNIPFVPSFTKLYSRIDDLKNSLGIYWKTPKTNDDNKTKEIIDAQIYLLKNIYYGEFLNYFMSNNGNFFEISREIIELNKNDKRNLKTGFYKLQKFEDIQEKTPKKYLANIQSLYMINAGNQDEEEKDTYIDFIQKIFLKGFMTYLANNGRLSLMYIGNDEQINTSLAGKKQEFDKFLKKYEQNNNIEIPHEINEFLREIKLGKILKYTESLNMFYLILKLLNHKELTNLKGSLEKYQSANKEETFSDELELINLLNLDNNRVTEDFELEANEIGKFLDFNGNKIKDRKELKKFDTKKIYFDGENIIKHRAFYNIKKYGMLNLLEKIADKAKYKISLKELKEYSNKKNEIEKNYTMQQNLHRKYARPKKDEKFNDEDYKEYEKAIGNIQKYTHLKNKVEFNELNLLQGLLLKILHRLVGYTSIWERDLRFRLKGEFPENQYIEEIFNFDNSKNVKYKSGQIVEKYINFYKELYKDNVEKRSIYSDKKVKKLKQEKKDLYIRNYIAHFNYIPHAEISLLEVLENLRKLLSYDRKLKNAIMKSVVNILKEYGFVAKFKIGADNKIGIQTLESEKIVHLKNLKKKKLMTDRNSEELCKLVKVMFEYKMEEKKSEN

SEQ ID NO: 262 - protein, 1287 aa, Artificial; identical to SEQ ID NO: 105
  Synthetic

SEQ ID NO: 263 - protein, 1373 aa, Artificial; identical to SEQ ID NO: 104
  Synthetic

SEQ ID NO: 264 - protein, 949 aa, Artificial; identical to SEQ ID NO: 43
  Synthetic

SEQ ID NO: 265 - protein, 1373 aa, Artificial; identical to SEQ ID NO: 104
  Synthetic

SEQ ID NO: 266 - protein, 1287 aa, Artificial; identical to SEQ ID NO: 105
  Synthetic

SEQ ID NO: 267 - protein, 1425 aa, Artificial; identical to SEQ ID NO: 3
  Synthetic

SEQ ID NO: 268 - protein, 1412 aa, Artificial
  Synthetic
MKLSKEKHTRSAVANNGDIKSAEVNNGNTKSEEVNNGDTRSAVANEEQNIGGILYRFPGKSIDGVKDQMLRRDKEVKKLYNVFNQIQVGTKPKKWNNDEKLSPEENERRAQQKNIKMKNYKWREACSKYVESSQRIINDVIFYSYRKAKNKLRYMRKNEDILKKMQEAEKLSKFSGGKLEDFVAYTLRKSLVVSKYDTQEFDSVAAMVVFLECIGKNNISDHEREILCKLLELIRKDFSKLDPNVKGSQGANIVRSFRNQNMIVQPQGDRFLFPQVYAKENETVTNKNVEKEGLNEFLLNYANLDDEKRAESLRKLRRILDVYFSAPNHYEKDMDITLSDNIEKEKFNVREKHECGKKETGLFVDIPDVLMEAEAENIKLDAVVEKRERKVLNDRVRKQNIICYRYTRAVVEKYNSNEPLFFENNAINQYWIHHIENAVERILKNCKAGKLFKLRKGYLAEKVWKDAINLISIKYIALGKAVYNFALDDIWKDKKNKELGIVDERIRNGITSFDYEMIKAHENLQRELAVDIAFSVNNLARAVCDMSNLGNKESDFLLWKRNDIADKLKNKDDMASVSAVLQFFGGKSSWDINIFKEAYKGKKKYNYEVRFIDDLRKAIYCARNENFHFKTALVNDEKWNTELFGKIFKRETEFCLNVEKDRFYSNNLYMFYQVSELRNMLDHLYSRSVSRAAQVPSYNSVIVRTAFPEYITNVLGYQKPGYDADTLGKWYSACYYLLKEIYYNSFLQSDRALQLFEKSVKTLSWDDEEQKRAVDNFKKYFSDIKSACTSLAQVCQIYMTEYNQQNNQIKKVRSSNDSIFDQPIYQHYKVLLKKAIANAFADYLKNNKDLFGFIGKPFKANEIREIDKEQFLPDWTSRKYEALCIEVSGSQELQKWYIVGKFLNARSLNLMVGSMRSYIQYVTDIKRRAASIGNELHVSVHDVEKVEKWVQVIEVCSLLASRTSNQFEDYFNDKDDYARYLKSYVDFSNVDMPSEYSALVDFSNEEQSDLYVDPKNPKVNRNIVHSKLFAADHILRDIVEPVSKDNIEEFYSQKAEIAYCKIKGKEITAEEQKAVLKYQKLKNRVELRDIVEYGEIINELLGQLINWSFMRERDLLYFQLGFHYDCLRNDSKKPEGYKNIKVDENSIKDAILYQIIGMYVNGVTVYAPEKDGDKLKEQCVKGGVGVKVSAFHRYSKYLGLNEKTLYNAGLEIFEVVAEHEDIINLRNGIDHFKYYLGDYRSMLSIYSEVFDRFFTYDIKYQKNVLNLLQNILLRHNVIVEPILESGFKTIGEQTKPGAKLSIRSIKSDTFQYKVKGGTLITDAKDERYLETIRKILYYAENEEDNLKKSVVVTNADKYEKNKESDDQNKQKEKKNKDNKGKKNEETKSDAEKNNNERLSYNPFANLNFKLSN

SEQ ID NO: 269 - protein, 1222 aa, Artificial
  Synthetic
MRITKVKVEAGKPDENKGKMVLIHRKIKQGNLILEDFSKSERTGTSHKELPDCTKSVLYEYKNESFELSLSKQTIAGDKELKTPRCKQCQDRTDCKACKDRTKAIKELRKKVEGLIKEVIHVAVEKQEKTEYSARFNTATSEDDMRCCLKTKFQGILRYKSTTGESFELNLPKCLAAYSQTKDAKTLTPYRDWIDSYLQKKRSFLEKSILNNRIVVNCSNEDTEQLSKRKQALHLWANEYETKKKIELGTLCSKYNINALSTSLNNKFNSLLQSGKGIKKSKFPHRGPDLVDANTNFELKKELQLHQSSVFGTKATLVINNIFKENRENVQLAIYNLEVVKYLEHYFPIKRKKQLLTVDQVRYYLKETTIRERVQMQLENAIRMHLLQQGKLENHNLKEDVDSNALSVIKRDEFFMLNFVEMCAFAANNIRNIIDKEQVNDILGKSDFERSLAKGNFDENRYKLFYGVDLKSDTSHSAFDIQALWAMRGAVQQIRNEVIHYHTDTLNKIFKLDKFEYKDDANAEECKYTNTVFQTLLESSIHQLDEYFIEQLRSNNVLSYYALDSLNHLLGYCTISLRKSSIPFAPGFKNVYALGANLQYGNTSMNLKNYLLKDEKGQSIDPTKTKSSHAYPAFRFILKLVYNHIFLSRFLDNTQQDAFKEAVTFVLQNNREEAAKATKPTKGKPNFHSHQDKQEPEKYAFKEIREMQVGETISSYMSYIHSYSVQEKERKGDENDNTRHNTDKFIEKVFTKGFDSFLSTLPTAFLYSPEDEQEVENEDYQALAIGQQVQHCIKSDNGTHILFFTFCKLLDGNHLSDLRNEWLKYYASDRTDSFHYDFALDIIELCLLGKDKEIVPTKEDIICYINTFVEGNEKSNRAWTEFYFQSDQNPVEYASINLLRKHGTLELLKLIVGDTYKVTQRDYDEWKTLKESIENDVNEREIIHKEWVELENKRTEWYKKNGRPSNKAEKDKINRMFQLPDSRLNKYKELCIRIERYNWLDNKLHLVHLKKLHNLIVQLLSRMARFVALWDRDFVHLDASRTEDEYRLTSFVNLRNLKYEADNKKFMDNYQDSIYRKDGSKIEEHDIPLIKTCVNNIKQPLYRETFFMKNDNAFSDRNFIAHFNYITKSAEHSMVDLVNRLRMLMAYDRKLRNAVSKSIIHVFEQNGMELKFKCITRGETEHKLELESIKSKKMSLLKGKLEIDQVSEEYCRLCKRLLEMKK

SEQ ID NO: 270 - protein, 1382 aa, Artificial; identical to SEQ ID NO: 166
  Synthetic

SEQ ID NO: 271 - protein, 1360 aa, Artificial; identical to SEQ ID NO: 92
  Synthetic

SEQ ID NO: 272 - protein, 1360 aa, Artificial; identical to SEQ ID NO: 74
  Synthetic

SEQ ID NO: 273 - protein, 1358 aa, Artificial
  Synthetic
MKISKEGHKRMSVTLKKENMQKNDADKTKGQILPLPEGEGLEKYIQKRVANTQKLYKVLGPSAVSVPNEKEKETIDCFNDFIKNIILKNVNTQPAEKRNRNAVEYMKTKGNVNTVFIDVDRKCIHKLVPLHLRGTLKKYVKIEKDGQRIEVYIPDVIEKLVFAVAHGTQFDHLIAEIEEEELIVCLHMIFKDYTKEDIIANTAKSIEKQDVKVQVLGTGEDARLQLASADNEKKKYIFLFLKKFACAVSEKERNDLLREFRELLVLFYCGTAAYEEVKEWKNGIPIWDFDFLSKMVSDISWFFSQECSEKLMEREQLRREKDKDKKRQNKSKIKDIDVEVKGILANLITERYRESIKLLQSLLGEEEYKEKCFWLEYIENDAEKILCSKKALTENKLDTVWLCNNTWRNFLSFLCSKAVDMGKAVYHFAMPDLEQLESGEPIKAGMIKPQFQQGITSFDYERIKAEENLERSFMTAISFALNNFSAAVCPPENYEKKNKEDVLFMGDKDLREEMYPNASWHIMQYFGGISQWKDSCFEDIVMLEDADLNEEFVLEVKGAMSLIRNSAFHYAASAAQGTLDKGSYLVELFERERDNLGSKYRKKYVSNNVPMFYKVEDIDRLMHCLYGEQKVLESQIPSFRNVITRKSLPDIIVKFVKGKPYGKIQKNVETASKFHSALYFVLKEIYYNGFLQEENLMERFMVSFNNEWNKVKESSGNKKKEAAMKDFSRRISELQQNGKRLTFGELCQAIMTDYNMQNNQKKVRLNKKDNLPDEKYKHFKMLLLVCLRETFIDYLKKDVAGEKFDCAFLREPGLKENVYENLTEEQFCKGWKIDRYKNLINENGQYDSWLISWFILAHFMTPKHLNHLCGEIKSYLSYVHNIERRRFDAMRVQVEENKEKRQKYEQVLEILNLAAEYCGQVSNERTDYYESEEEYARHISMYVAFEEKNSERPLEEQLYGFCNQKADGGPASRIGIFYDGENPILNRNVVLTKLYGAERLLSECLQKERVTKAEIEKHYKHTKKLEAVFKYGTCKNQEQEQERRTYQQQKNRIELVDILKYSDLLNDFMSQLISWCYLRERDRMYFQIGLHYIRLYYGENLVEKNSKFRVLQSKEAKAGEKKGINLVDGAVLYQIAAIYTYEYPVYALDEAGNAIVSKAAKIGSTTANGINAFWKEYCNEDASTYEVGLSLFENPLEEKELIEFRNYIDHFKYYSRRDRSILNLYSQVFANYFRHDRKLKKSVTFILKNILARHFIIARTVLAEVEVEKKDGRKDKKNPIIRKYSQTEIRIPTENGLQSDDTLHKYTKEDVDNEYKKKMNNSKGEKGKIPPKEGGKYSIPMYDEKFIQRLYCILNYAK

SEQ ID NO: 274 - protein, 1391 aa, Artificial
  Synthetic
MKLSKVTYRVKDKNAKYKKEYNVRAAVANNSENAGGVLYHVPGVDLIDLKEQMLDRDRSVRLLYNIFNQIQTGTKPKKWENDETLSVDENERKAKEQNIKIMNYKWREACSEYIEKSQSTINSVLFYSYEESGYKTKRMNDNEAIIVKMQYENRLSHFTGGKLEDFVAYTLRNSLVVSRYDNQEFDSVNAMVVFINNIGNGNISDKDKKTICKLADLIRNDFSKLNPNVQSSQGANMVRSVRNQNMVVQPQGDIVSFPLVSDEGKNTVTNKNVEKKGLNEFLLNYANLDDEERMENLRKLRRIIDVYFSSPSHYQKDMDISLSDNIDKTKFVVWKKHETGKKNTELFVDIPDELFTAETEKIKLDAVLEKQARKRLTDSIRKQNMICYRYTRAVVEKYNSTENLFFENDSINQYWIHHIENAVERILKSCKAETLFKLRRGYLTEKVWKDAINLISIKYIALGKVIYNFTVDDIWKDKKVKNLGSIDEKIKHGITSFDYEMIKAQEALQRELAVNVAFAANNLARAVCDMTNLKDKESDFLIWNKKDIANKLKNKDDMASVSVVLQFFGGKSSWDIDAFREAYKGNKYNYEVCFIDDLRKAVYAARNESFHFKTALVNNDIWNTEFFGKLFIKETEICLDIEKDRFYSNNLPVFYSDNDLKKMLDHLYNNKVSRAAQVPSYNSVMVRKYFPENITSTLKYQKPGYDEDTLEKWYSACYYLLKEIYYNSFLQSDEALALFEESVNNLKGDNKDQELAVKNFRNNYKNIKSSCTSFSQVCQMYMTEYNQQNNQFKKVRSSKDSIVDKPIYQHYKLLLKKVIANAFASYLQHNEELFGFIGKPLKVNCLKEIDKEQFLPEWTSKKYVSLCEEVRKSPELQKWYIVGKFLNSRSLNLMAGSMRSYIQYVNDIKRRADGIGNELHVIAQNLDVVNKWVQVIEVCLLLSSRVSNEFEDYFYDKDDYAAYLKSYVDFDNSDMPSEYSALVEFSDQGKVDLYVDPSNPKVNRNIVQSKLFAADYILRDIIEPVSKDEIEDFYNQKDEITTCKIKGAELTDEEQKKILKYQKLKNRVELRDVVEYGEIINELLGQLINWSFMRERDLLYFQLGFHYNCLRNDSAKPEEYKNLVLDDISIKDAILHQIIGMYVNGVAIYAPGKDKNKLESQCVKGRVGGKIGAFCGYSLYLKLAADTLYNAGLEVFEVLPEHEDIINLRNGIDHFKFYLGGYRSIISLYSEVFDRFFTYDMKYQKNVLNLLQNILLRHNVIIEPIFESGIKKIGKDTKPCAKLCISSIKSDSFEYKIKDGTLITDAKDKGYLETIKKILFYPEVEPEVRILSSKDSFEQNNQYGYMKGKSENNKNNKNKKNKKNNGNRDEKKNSDGLTYSPFFDLPFELPE

SEQ ID NO: 275 - protein, 1382 aa, Artificial; identical to SEQ ID NO: 154
  Synthetic

SEQ ID NO: 276 - protein, 1380 aa, Artificial
  Synthetic
MKLSKEKQIRSAVANKEKNTEGVLYRFPGADIGGVQAQMLVRDRDVKQLYNVFNQIQLGNKPKEWMNDEKLSPEENERRAQQKNIKMKNYKWRKACSKYVESSQRAINDILFYSYKEADKKIRNMSKNEDILIKMQNAEKLSKFSGGKLEDFVAYTLRKSLVVSKYGNQEFDSIAAMVVFLECIGKSNISDREKEIVYKLLDLIRKDFSKLDPSIQDSQGANIVRSIRNQNMIVQPQGDRFSFPQVSDEEKKTVTNKNAEKDGLNEFMLNYANLDEEKRAEVLRKLRRILDVYFSAPSHYEKDMDITLSDNVNKEKFYVWKKHECGKKENGLFVDIPDVLVEAEAESIKLDAVVEKRERKVLADRVRRQNIICYRYTRAVVEKYNSNEPIFFENDAINQYWIHHIENAVERILKNCKTGTLFKLRKGYLAEKVWKDAINLISIKYIALGKAVYNFALDDIWKDKKDKKLGIVDERIRNGITSFDYEMIKAHENLQRELAVNIAFSVNNLARAVCDMSNLGDKESDFLLWKRNDIADKLKNKDDMASVSAVLQFFGGKSSWDINIFKEAYKGKKKYNYEVQFIDDLRKAIYCARNENFHFKTALVNNEKWNTELFGKIFERETEFCLNVEKDRFYSNNLYMFYPVSELRNMLDHLYSRSVSRAAQVPSYNSVLFRTVFPEYITNVLRYQKPGYDADTLGKWYNACYYLLKEIYYNSFLQSDKALQLFEKSVRTLRWDDKKQQRAVDNFKNHFSDIKSACTSLAQVCQIYMTEYNQQNNQIKKVRSSNDSIFDQPIYQHYKVLLKKAIANAFAAYLKNNKNLFGFIGKPFKANEIREIDKEQFLPDWTSKKYESLCIEVSENQELQKWYIVGKFLNARSLNLMVGSMRSYIQYVTDIKRRAASIGNELHVCAQDVEKVEKWVQVIEVCLLLSSRTSNQFEDYFKDKDDYARYLKSYVDFSNADMPSEYSALVKFSEEEQSDLYVDTNNPKVNRNIVHSKLFAADHILRDIVEPVSKGNIEEFYSQKAEIVYCKIKGKEITAEEQKAVLKYQKLKNRVELRDIVEYGEIINELLGQLINWSFMRERDLLYFQLGFHYNCLRNDSEKPEEYEKIEADENSIKDAILYQIIGMYVNGVAIYAPEKNGDKLKEQCVQGRVGAKVTSFNRYSEYLGLDELTLYNAGLEIFEVVAEHDDIINLRNGIDHFKYYLGDYRSMLSIYSEVFDRFFTYDMKYQKNVLNLLQNILLRHNVIVEPVLESGVKTIGEQTKPGAKLSVRSIKSDTFQYKVKGGTLITDAKDERYLETIRKILYYADDEDADTKKPVIVTNVDKYEKNKESEDEDKQKGKENRGKKNTETRSDAEKNNNDRLSYNPFANFDFKLPNK

SEQ ID NO: 277 - protein, 1412 aa, Artificial; identical to SEQ ID NO: 53
  Synthetic

SEQ ID NO: 278 - protein, 1382 aa, Artificial
  Synthetic
MKLSKEKHIRSAVANEEQNIGGVLYHVPGTDTIDLKDQMLIRDRDVKQLYKVFNQIQVGNKPKKWKKDEKLSPEENERRAQQKNIKMKNYKWREACSEYVESSQRTINDVLFYSYMEADKKIRNMRKNEDILKKMQEVTKLPKFSGGKLEDFVAYTLRKSLVVSKNSTQEFDSVAAMVVFLECIGKSNISDHEKEIVYKLLELIRKDFSKLDPNVKDSQGANIVRSVRNQNMIVQPQGDRFLFPQVSDKEKKTVTNKNVEKEGLNEFLLNYANLDDEKRAEILRKLRRILDVYFSAPNHYEKDMEITLSDNIDKEKFNVWKKYECGKKVTGLFVNIPDVLMEAEAENIKLDAVVEKRERKILADRVRRQNIICYRYTRAVVEKYNSNESLFFENDAINQYWIHHIENAVERILKNCKAGKLFKLRKGYLAEKVWKDAINLISIKYIALGKAVYNFALDDIWKDKKDKELGIVDERIRNGITSFDYEMIKAYENLQRELAVDIAFSVNNLARAVCDMSNLKDRESDFLLWKKEDIADKLKNKDDMASVSAVLQFFGGKSSWDINIFKEAYKGKNKYNYEVRFIDDLRKAIYCARNENFHFKTALVNNEKWNTELFGKIFERETEFCLNVEKDRFYSNNLYMFYPVSELRNMLDQLYSRSVSRAAQVPSYNSVFIRKNFPEDITNVLRYQKPGYDADTLGKWYSACYYLLKEIYYNSFLQSDKALQLFEKSVKTLSWDDEEQKRAVDNFKNHFSDIKSACTSLAQVCQIYMTEYNQQNNQIKKVRSSNDSIFDKPIYQHYKVLLKKAIANAFAAYLKYNKNLFGFIGKPFKANEIREIDKEQFLPDWTSTKYESLCIEVSGSQELQKWYIVGKFLNARSLNLMAGSMRSYIQYVTDIKRRAASIGNELHVSVQDVEKVEKWVQVIEVCSLLAFRTSNQFEDYFNDKDDYARYLKSYVDFSNADMPSEYSALVDFSNEEQSDLYVDPKNPKVNRNIVHSKLFAADHILRDIVEPVSKDNIEEFYDQKAEIVYCKIKGKDITAEEQKAVLKYQKLKNRVELRDIVEYGEIINELLGQLINWSFMRERDLLYFQLGFHYNCLRNNSEKKEAYQKIEVNGDSIKDAILYQIIGMYVNGVAVYAPDEKGDILKEQCTKGGAGGKISAFNRYSEYLGLDKLTLYNAGLEIFEVVAEHDDIIKLRNGIDHFKYYLGDYRSMLSIYSEVFDRFFTYDIKYQKNVLNLLQNILLRHNVIVEPVLESGFKTIGKQTTSGAKLSIRSIKSDTFQYKVKGGSLITDAKDERYLKTIRKILYYVENEEDNLKKSVVVTNADKYEKNKESDDQNKQKEKKNKDNKGKKNEETKSDAGKNNNERLSYNPFANLNFKLPN

SEQ ID NO: 279 - protein, 1412 aa, Artificial
  Synthetic
MKLSKEKHTRSAVANNGDIKSAEVNNGNTKSEEVNNGDTRSAVANEEQNIGGILYRFPGKSIDGVKDQMLRRDKEVKKLYNVFNQIQVGTKPKKWNNDEKLSPEENGRRAQQKNIKMKNYKWREACSKYVESSQRIINDVIFYSYRKAKNKLRYMRKNEDILKKMQEAEKLSKFSGGKLEDFVAYTLRKSLVVSKYDTQEFDSVAAMVVFLECIGKNNISDHEREIVCKLLELIRKDFSKLDPNVKGSQGANIVRSVRNQNMIVQPQGDRFLFPQVYAKENETVTNKNVEKEGLNEFLLNYANLDDEKRAESLRKLRRILDVYFSAPNHYEKDMDITLSDNIEKEKFNVWEKHECGKKETGLFVDIPDVLMEAEAENIKLDAVVEKRERKVLNDRVRKQNIICYRYTRAVVEKYNSNEPLFFENNAINQYWIHHIENAVERILKNCKAGKLFKLRKGYLAEKVWKDAINLISIKYIALGKAVYNFALDDIWKDKKNKELGIVDERIRNGITSFDYEMIKAHENLQRELAVDIAFSVNNLARAVCDMSNLGNKESDFLLWKRNDIADKLKNKDDMASVSAVLQFFGGKSSWDINIFKEAYKGKKKYNYEVRFIDDLRKAIYCARNENFHFKTALVNDEKWNTELFGKIFKRETEFCLNVEKDRFYSNNLYMFYQVSELRNMLDHLYSRSVSRAAQVPSYNSVIVRTAFPEYITNVLGYQKPGYDADTLGKWYSACYYLLKEIYYNSFLQSDRALQLFEKSVKTLSWDDEEQKRAVDNFKKYFSDIKSACTSLAQVCQIYMTEYNQQNNQIKKVRSSNDSIFDQPIYQHYKVLLKKAIANAFADYLKNNKDLFGFIGKPFKANEIREIDKEQFLPDWTSRKYEALCIEVSGSQELQKWYIVGKFLNARSLNLMVGSMRSYIQYVTDIKKRAASIGNELHVSVQDVEKVEKWVQVIEVCSLLASRTSNQFEDYFNDKDDYARYLKSYVDFSNVDMPSEYSALVDFSNEEQSDLYVDPKNPKVNRNIVHSKLFAADHILRDIVEPVSKDNIEEFYSQKAEIAYCKIKGKEITAEEQKAVLKYQKLKNRVELRDIVEYGEIINELLGQLINWSFMRERDLLYFQLGFHYDCLRNDSKKPEGYKNIKVDENSIKDAILYQIIGMYVNGVTVYAPEKDGDKLKEQCVKGGVGVKVSAFHRYSKYLGLNEKTLYNAGLEIFEVVAEHEDIINLRNGIDHFKYYLGDYRSMLSIYSEVFDRFFTYDIKYQKNVLNLLQNILLRHNVIVEPILESGFKTIGEQTKPGAKLSIRSIKSDTFQYKVKGGTLITDAKDERYLETIRKILYYAENEEDNLKKSVVVTNADKYEKNKESDDQNKQKEKKNKDNKGKKNEETKSDAEKNNNERLSYNPFANLNFKLSN

SEQ ID NO: 280 - protein, 1412 aa, Artificial; identical to SEQ ID NO: 53
  Synthetic

SEQ ID NO: 281 - protein, 1387 aa, Artificial; identical to SEQ ID NO: 93
  Synthetic

SEQ ID NO: 282 - protein, 1388 aa, Artificial
  Synthetic
MKLSKVTYRVKDKNAKYKKEYNVRAAVANNSENAGGVLYHVPGVDLIDLKEQMLDRDRSVRFLYNIFNQIQTGTKPKEWGNDETLSVDENERKAKEQNIKIMNYKWREACSEYIKKSQSTINSVLFYSYEESGYKTKRMNDNEAIIVKMQYENRLSHFTGGKLEDFVAYTLRNSLVVSRYDNQEFDSVNAMVVFINNIGNGNISDKDKKTICKLADLIRNDFSKLNPNVQSSQGANMVRSVRNQNMVVQPQGDKVSFPLVSDEGKNTVTNKNVEKKGLNEFLLNYANLDDEERMENLRKLRRIIDVYFSSPSHYQKDMDISLSDNIDKTKFDVWKKHETGKKNTGLFVDIPDELLTAETEKIKLDAVLEKQARKRLTDSIRKQNMVCYRYTRAVVEKYNLTENLFFENDYINQYWIHHIENAVERILKSCKAETLFKLRMGYLTEKVWKDAINLISIKYIALGKVIYNFAVDDIWKDKKVKNLGSIDEKIKHGITSFDYEMIKAQEALQRELAVNVAFAANNLARAVCDMTNLKDKESDFLIWNKKDIANKLKNKDDMASVSVVLQFFGGKSSWDIDAFREAYKGNKYNYEVCFIDDLRKAVYAARNESFHFKTALVNNDIWNTEFFGKLFIKETEICLDIEKDRFYSNNLPVFYSDNDLKKMLDHLYNNKVSRAAQVPSYNSVMVRKYFPENITSTLKYQKPGYDEDTLEKWYSACYYLLKEIYYNSFLQSDEALALFEESVNNLKGDNKDQELAVKSFRNNYKNIKSSCTSFSQVCQMYMTEYNQQNNQFKKVRSSKNSIFDKPIYQHYKLLLKKVVANAFALYLQNNKELFGFIGKPLKVNCLKEIDKEQFLPEWTSKKYVSLCEEVRKSPELQKWYIVGKFLNSRSLNLMAGSMRSYIQYVNDIKRRADGIGNELHVIAQNLDVVDKWVQVIEVCLLLSSRVSNEFEDYFYDKDDYAAYLKSYVDFDNSDMPSDYSALVEFSDQGKVDLYVDPSNPKVNRNIVQSKLFAADYILRDIIEPVSKDEIEDFYNQKDEITTCKIKGAELTDEEQKKILKYQKLKNRVELRDVVEYGEIINELLGQLINWSFMRERDLLYFQLGFHYNCLRNDSAKPEEYKNLVLDNISIKDAILHQIIGMYVNGVAIYAPGKDENKLESQCAQGGAGGKIGAFCRYSLYLKLAADTLYNAGLEVFEVLPEHEDIIKLRNGIDHFKFYLGGYRSIMSLYSEVFDRFFTYDMKYQKNVLNLLQNILLRHNVIIEPIFESGIKKIGKDTKPCAKLCISSIKSDSFEYKIKDGTLITDAKDKRYLETIKKILFYPEVESEVRILSSKDSFEQNNQYGYMKWKSENNKNKKNKKNNGNRDEKKNSDGLTYNPFLDLPFELPE

SEQ ID NO: 283 - protein, 1360 aa, Artificial; identical to SEQ ID NO: 92
  Synthetic

SEQ ID NO: 284 - protein, 1366 aa, Artificial
  Synthetic
MKLSKENHIRSAVVISGKEGNIAGTLYKIPGEGTVDLKKWMLERDKAVKSLYNIFNQIQLGNEPKEWKENRNLSTEENTRRMHQKKVKIQNYKMKKACSRYVNTISRTINELLFFYKTTKTTQNNKVKYDKLKMMHKNEDIISKMKNENILQQFKVEGKNGKLEKGKLEDFVTLALRSSLVVSRYKGKDFDSVAAVAVFLENIGNNNISHEDERTINILLDLIREDFTKLNPNIDNTMGARLIRSVTNQNMLVQPQNDRFSFPCVHDSGKSKVSNKNVEKSGLDNFLLDYANLDKDIRENYLRKLRRIIDIYFSAPITYQKDMDVALSEVVVKDKFDVWKKHNEGKKDNNTFVKVPEVLIKAETDHEKLDTVIEKQARKELADRVREQNMTCYRYTQAVVKKYNAKEALFFENDDINQYWIHHIENAVERILKSCKIGTLFKLHNGYLIEKVWKDAINLISIKYIALGKVVYNFALDDIWNDNKVKRLGDISEKIRSGITSFDYEMLKAQETLQRELAVNVAFSANNLARAVCNMSALSDKTSDFLLWQPDDINNKMKKSTGNDEDNEKNKRAVCAVLQFFGGKSLWNDVDFEKAYKNAGKHGYGVYFINDLRKAIFAARNESFHFKTASVNNEKWNVEFLGRMFEKETEFCLDIEKDRFYSNNLPMFYKSSNLEKMLNHFYSKNISRAAQVLSYNTVFVRKTFPEYVNNVLKYKKPGTDAEILDKWYSACYYLLKEIYYNSFLQSKDAFKYFENAVYNLNSKNINHDSSGQKLSRDEMKRKKAAESFQRRFVEIKRVSDSSISYVCQVFMTDYNQQNNQNKKVRSSNDSLLDKPIYQHFKMLLKETIKSAFAAYLKDNNNKDLFGFIGEPLKINKNDDVKVIKKEEFLPDWKSEKYSLLIEKVKKSPKLQMWYIVGKFLNARSLNLMAGSMRSYLQYVSDINRRANVVGNKLHVEVLDKDTVKDWIQVIEVCLLLASRTSNQFDDYFNDGDDYAGYLKSYVDFSDKNMPSAYSALVYFSDQGKIDLYIDPKNPKINRNIVQSKLFAADHILGNGQIVQPVSKDDIAEFYNLKAKIADSKIKGENISEKEQRNILRYQRLKNKVELRDIVEYGEIINELLGQLINWSFMRERDLLYFQLGFHYNCLRNNSEKPEEYKKIEADDISINDAVLYQIIGMYVNGIPVYTSDNNKLKGECANGGAGGKITAFCEYSEYLGFKKATLYESGLELFEVLAEHDDIIKLRNGIEHFKYYLGNYRSIMSLYSEVFDRFFTYDLKYQKNVLNLLQNILLRHNIVIVPEFESGTKKVGKNIKQSAKISIKNIQSDKFTYKIKGGTTSIDAKDDRYLETIKKILYYPEYDKDSGGVC

SEQ ID NO: 285 - protein, 1476 aa, Artificial
  Synthetic
MKITKVRVKENNERYSAQHYRNVYNGMLHKVSNNEFVDTGKHLDNINNSTKALDKSFIDRLVVPKESKNYDSAVHNFLQKIFKDKKIGDAKEKFIQNLNGNTKKYKACLSLSDEGQKFCNGKLKEIVGKVASNNIFYKDTGNIDNSINKMLEKIQNSMNPENGFNIDKLIVPRDDANYNDKVYFFIQDVKNDKDSVKQNLESYQLVEKMTDDDLLNKAYMALSSKGKAFFTKEERKIIFENIITGQKITADDEKKIITDMQSVASDHKEQIRKSIINNNINVDPSSRLRQYFINSFVVSKDDVNYNDRVHDFIHKLCISNIDISKLKKYPLKNVATEQDVQQTLSAEGRAFCDGKLSKVITAFATNDIKGITQNDLGCIKQKINEATLSSISEDNANLYERYSDYNNGNPNCSRNIFEKNINENYNQKRLSHGEWLVQFIANNSINDERFKTFERLFQYDELSCKLTECLKKYKTELNKLNSIEEGDKEGQKQIRQYKKDCLIEIHDIYKQHEVKHYKDKEGESTKKHEMYFAYYIREVREYFNHYFPLQNNTRKQSINKRDITNFITYIDKYANIEKIKTIVKYQILNKLTSQLILEGKLAYFSDSFDQFTSDDLELIHVQEAFKKQLMTSILWATNRLRFIMLGEQDTAQLGDILLQGNFDKALDMVKSNKCETIKKLKWFLNGIDGTNDTDDTDDKTSVLLTNIHNAIYYTHRNNIYHFSKEYFLEDKNFYIDGNDQLTKDLYDNDKDSVKVAFKEKIRSMNLYTCYPSEVHSAILGKISFSLSHPNISIIPSFKNVYNKGKSLQNGNDGAKRSQGKGIQGLEWFVLPAEDEKKLLNSSEEVRVYRNFLQLIYEYEFLPSIYEFLPSINKTEITNLEGLHESAIELNKESAKKRQVEAKKPKINNNEFKYEIIETFGNDFFKNAPQGEFSKEDCEEYFRKLQSLMVKKENENQESKDKGTLKPGSDKDKNIYVDFVRDLYVFAFNQFLENNYSQVKDGLTHPQYNKDNEFECCELKIDADSLPEQAPQLYLMARLLDADQLNDLRHQFIRYNGSIKDIYKDEKDIASKVKEIIDILTMVNLTSVNYTEDLKIFLGGNDDSNQKQQEKCEELYKPFMNGDVKKLWGEESSQDLYVQQGGTPILHKGIGVAYRSGCFDLYKVLYSKAVSNKINKKDCEDYLAYNNTNEGAIKSNIEEAQQNREELHKKIVEKEFNDLPYDYKISNINDYEIVAKKVDSYNKLRNKVTFNDLYSLGQLHRDILSRFIGFAVDWERDMHFLLISLTKYGLMKEAKENPKYINKTIVEFISDKFFNHENGGAASNICEEFRKNEKLKELFKELYQSNNIDSFYKMFDIRNWVAHLNHIQPGSKTDRSLVDAINDLRKLLSYDRKRKNAVTKAIIEMMEKEKIRLTFESDCGHDFKLYKVESEQITHLKKISIKQYKNGKNQLTSMSFDIPARSEEFCKLVEQLFDWKA

SEQ ID NO: 286 - protein, 1388 aa, Artificial; identical to SEQ ID NO: 103
  Synthetic

SEQ ID NO: 287 - protein, 1382 aa, Artificial; identical to SEQ ID NO: 168
  Synthetic

SEQ ID NO: 288 - protein, 1353 aa, Artificial; identical to SEQ ID NO: 188
  Synthetic

SEQ ID NO: 289 - protein, 1357 aa, Artificial
  Synthetic
MQMKISKIKNSRPGISVAENKNEEPLSRQSLLYYAPVKDGKIRLESKDLEQHVTECNEKAQKLYNVITPEINFYRDENRQKMVENLAKNFNAVINNALRSIRNPKEKKEQRVEKEVAFILNLSKKSIKMKKDVFVKSTDLIVKFPENNKYNKKNDKGTGSKEADIQKIISDLVLRKLKKTLRKEVKLENGCRMQMTEITISLMSAICLYGNAESFDPAILKAFFEKVDSDYTKYKYVEQIVKSIESQSAKLKVVEKDGRHLLISANADHRKKKYVFEFMRMYAAADEKEKRELTEHIQDLIGLYLCGKAGYENAENRFSDMTESHNCICGKIEEIFNGLEELENLSQQKKEKLKNTTVKVMALKYRAAVNYLADEVRKTVLGEIREKKVCSCADLYWIEYIDSTVEKLLLKSRNKKRYRYEIGFLSKHIWKEWTQYISGKYIEMGKGVYHFAIPDLSGALEGESVSICEVKPEYRNGVSGFDYERIRAEESLEREMEKYVLFAVNNFARAVTPEEEREKSGHEDVLLMKTLSEIEESQTKEERQKKHDNNVKNAITLYADADRRILQFFGGQSRFREKEDSLINLYSGEDLYKEIRKELYAIRNITFHYTTKAEKDQTQKHDLAEYLFEEEFSDITELFREKYYANNVWKYYDAEVINTIMENIYCGRKYRAAQVPALKNIISRPELPQVMNGFVKGNSLRRLMNCPDRDVINKYWSALFFVLKELYYYDFLQEQKRPEDNVKERFFRAIKKLSGQEKGDKEQKAWESFENRIDQIGRDRSFGAICQGLMIEYMLQNSDISMVQTETDNGKANNKKQIYKHYRTLLYNCISEAFIEYLREKWKELRTPVLTAKEWSKEEFCRVDGLKHLSLFDHLKETFNDAESGSSWYMAAHFINQKYLNHLLGSIRNYLQFTEDIEDRAISLGDCVDNKREEKNLRYRNTLEILEFVAQFCERTTNVMEDYFESNQEYAEYLSGFVDYNTTKKETDIEKALYSFCKQKFKVDGKEYMAGIYYDGENLIPNRNIIRANMYGNTSCLKPCMDRITLKEIRTMYADQNKLDMVLKEGVCHTEEEQKAYREYQNEKNRIELFDVCTYTQILNDMQARLIGWSYMRERDLMYYQLGYYYTKLFWTDSISEEDARRRLVGNLVNVEDGAILYQILAFNSYNLPIIANKNNTVTLLKDEGSIGGKAITAFFKNYENAEMIYEEALDLFENMDEHAAIINTRNYIEHFKYFIKSDRSMMDLYSEIYDRFFRHDHNRKKNVPDSLKNVLADNFMIVDIDMELGSKKVGEKKKGFREHKAARIEFTDSGIRSTDMTYTIKPDIKDNKKVLVPARSEVFLKQFRKILEYRIQDKTQ

SEQ ID NO: 290 - protein, 1169 aa, Artificial; identical to SEQ ID NO: 23
  Synthetic

SEQ ID NO: 291 - protein, 1231 aa, Artificial
  Synthetic
MKVTKIDGLSHKKFEDEGKLVKIEDASQKNETLERLEKLKEIKLGNYIKNPDKTKDKDNKKRRKGLKEYFSEITLRKENEKYVLLKGKKLKKINNDIKDTDIKVKYKKEEVFDVLKKILKLNLLANDVEEKIQFDSIKLKNVFGKDFVKKELQIKSIEESLEKNKADYRKEFIEIENDKYGNVKGENKKNRIYEYYKKSETHEKFRKNIIEAFEKLYKKDDIEKLYTQIIEISKKMHLKSKVRELYKNVIIKRSCDDFSKKNKEGISVLYSQIMNSVKKNEKFVKFVKNIELKDLTKSQIFYKYFLENEELNDENIKNIFCYFVEIEVSDLLKGNVYKVSKIYENKIKNIFEYNKLKKLVINKLENKLNNYVRNCGKYNYHMENGDIATSDINMRNRQTEAFLRSMIGVSSFGYFSLRNILGVNDDDFYEIEEDLTEEERKNESNVLKKAKEDITSKSIFEKVVDKSFEKKGIHSIRENVKMFYGDSFDKANEDELKQFFVNMLNAITSIRHRVVHYNMNTNSENIFNFSDIEVSRLLKSIFEKETDKRKLKLKIFRQLNSAGVFDYWENWKIKKYLENMKFEFVNKNIPFVPSFTKLYNRIDNLKGSNALNLGYINIPKRKEARDSQIYLLKNIYYGKFVEEFIKNNDNFEKIFREIIEINKNAGTNKQTNFYKLEKFEKLKANTPTEYLEKLQSLHKINYNREKIEEDKDIYVDFVQKIFLKGFISYLQKSNSLKPLNLLNLKKDEVINSEKSFYDEKLKQWENNGSNLSEMPKEIYKYIKEIKINKTNYSDRMSIFYLLLKLIDHKELTNLRGNLEKYESMNKNKIYSEELNIVNLVSLDNNKVRTNFSVEAEDIGKFLKTETSIKNINQLNNFSGIFADGENVIKHRSFYNIKKYGILDLLEKIVAKADLKIAKEEIKKYENLQKELEKNDFYKIQEKIHRKYNQKPNLISRTENKKDFNDYKKAIENIQNYTQLKNKIEFNDLNLLQGLLFRILHRLTGYTSLWERDLQFKLKGEFPEDKYIDEIFNSDRNNNQKYKSGGIAYKYVDFLIEKEEGKRAGKNKVKKRSERERSFIIRNYIAHFNYIPDAEKSILEILEELRELLKYDRKLKNAVMKSIKDIFKEYGFIIEFGISHESNSKKIKVLNVESGKIKHLKNNGLVTTKDIFKEYGFIIEFGISHESNSKKIKVLNVESEKIKHLKNNGLVTTRNSKDLCKLVKVMLEYKKS

SEQ ID NO: 292 - protein, 1265 aa, Artificial
  Synthetic
MKITKRKWEREPPLFFYRDAESGKLVMQGDKLRDFTDTLFSEKSVKAVFERSLKSRLLKSCDKDGKRLEKNEITELVESLCKKSLCKDTRLKKSIEEVRRLPPKTAIEQCNKSLSGYGKSFTAPGSTKTLHAVLLDLINGNDVQKAMAEAELEKIHQALIKGIDHRINRVRNSIKGNKIPLIIKDDGSIAANNDRAAWLLELLQPAQSIHSSQPGYKADFYPVLTEMERIFSFEKLSREIRTQTDRYNGKAQLIAKAADETLRNYLRDLWEKYPDRHRDMKYYFQAVHEYFRENFPIRRKREGARNRQELLANKDALSRLLEPKHIENAVRRKLINQCTQINILYGKLYEYCCKSDNMLTVDSETLQRIQVLEAVKKQAMTAVLWSISRLRYFYENNYKDISKIDILSDKQEVKDFRKKFLTCNTYSDEFVQACKEKLQDFFPLEVKNEKCNCDGGQKYKDAEETCKDIEEIFSDDRKLCNGLLMECVFYIRSLRLKIFHYKNMSFTQALKKIVDEVEEEENKNEKEKKNILLHLYKRDRNNLNKAFAYKISSMNIPLYYRDDLLSRIFTKDGAEFSLYSANNQMTPSFRRVYERGKNLRLEWERKHMNEQAIMECDEKNSLENECYLKWFKQLNNTYETDDTDAKAGVNTDDEACANVYINEDVGADTKADTEDTNADAQRAVRNLLQLIYKHHFLPEVQKNDALVTSKISKVLERNKKLAEERSEKQAEKRSRALKIEWERPREVRNFAYKEVVNLYREGMPLSDFLEELQRKISETEKENRELAQNKADYAQRFIREVFAEAFNSFMQERYGDVYDEIMNPQKNTEQAKKWIEIDDAVNLCTTFDKNEIEKYLLVLYPVMRLLDEKELSELQQQMLRLRASMSEWQGETDFSEDIKIAEKIEELAELVKLTEPDTKYAEETWKSRAQKEFEQFVEGSMSDYGTFYLHSNKSNPVIRRNMTRLLRSGAIEVYKRVLSSRKQATKSDYDIYCGRQWVMEDSDGRYITFVEYAQRVLQQLHSKYAVSPSRFSEADHKSYDNILQWLEEYNQAKRNLDFGTLYETCGINMEILSRWVGFVQDWERDMYFLLLAWVKQGKLYQIKEEDVEGIFAKGNVIRKLFDTLKDRNMDAFKSVYCLCDDTEMNFVKVRNDIAHLDLLRSSNWTVGENQSGSVMEWYINRLRSLLSYDQKRMNAVTKTMQEIFRKHNIEVKFTMERGGKLKFKEVKPECIEHLKKSRFREEMKIEISSRGERFLSNLEGLMKYS

SEQ ID NO: 293 - protein, 1288 aa, Artificial
  Synthetic
MKLTRKRIGQGRNNQKVTAAFYRDMASGLLYVDSEDNDRTEEIINSMDFERSWRGRILKNAESGKNPFNMFVKGLIVANEAIVCKPVFNNDIDITKFMNKYLTDFGRNLKAPGSDITLKDIIRKMQGGAPEEEIRRELEKIKEMIGNDIRKRKEQLSESIANNRIPFSTVNNKLMPSARKMKWLYKLLDGENGAFNGQMLDEYWNKYNYRKLEAVIIEEIESLQDKNARSISKAVSRAVRDYHRNFRTDYNDTALREPDGTGHNNNDTAGNPDKEGFLLFLKAVEQHFKKYYPVKSKHSSDARDKSLCDEKNYKFYCSHDFVKNEVSRSIINQLVSGLIQQGKLLHYFYDGGTWQQDFLNSYGLSYIQVEEAFKKSLMSSLSWGINRLTTFFIDGITEGLGGRSNDAGLIDDILLENQKIRAFRENFYNSLRDNRSKEGKELQKRFIEKLAACYPVIVKDDGEKSGDDIEKLIGLVEEARNSVAYLRHSSFHFKKVSLPEMLKDLNDDKAYHNTGQKGHKAAKADYSIAEELFRRDIDRLYDAFREQIRSLGIVEYYPTGLISDCFKTCGMEFTLYSPQNSLIPSFKKVYKRGSNLYKAYKEKVQNVSDGQEEKNARTDQKDQEEFKELGWYIEVSNNEPGWLAYKNLLQLIYYHAFLPEVYQNEALITGFINRTKDWNRKEAEKAAAKKNDFNRNKDRAFMAYRYEAVPDYQGEPLEDYFKVLQREQMARAKEVSEGSAENNTYIQFIQDVIVWAFGAYLERLVNYREALQKPSLQEKKVNEALNELLPEKMEESQFFMVCRFNKDKINNSGEHITSAGKTQIGQRKDLLCFYLFLRLLDAREVSGLQHQFIRYRCSLKERRLPDNRRDIEEEIELFEELEELMELVRYTVPSVTELLGRAGSGFDTVIQDHFREFFDNRALENDDIRKLYYQSDEKTPVPRKHMALLMRSAPLRLYKDMFRNYYLITEKECLEFIQLSRNIDSYQGRLNELHKQLEQVKVKSVKINNQKGKTYSFLEDKDAQKVAEYEDNLNTVIRYKHLQRKLTFEALYTIFRVHVDVAARMIGYAQDWERDMFFLLKSLEYNGKIRYGMVESIFSEGSIVRKLQIILSPDEKEILCMLCWHKKLSDKEFYYRIRIRNPIAHLNHFTQTSANPNGSLEAMLNDLRSLLHYDRKRQNTVTKTINDILLKDYNIRIKWKRTLSNKNNGKMEFKIVEPLENEPIVHLKHIRKGDKCRVHNKAHMLRKQEAWLHKGIIENAHDGDILRCIYRLLAFRYPPVRTYGIHKK

SEQ ID NO: 294 - protein, 1259 aa, Artificial
  Synthetic
MKLTRRKIEEGKKYRATFYRDTTRGLLYFDSEKVDSTEKVVNSMNFVRSMRGRILKHAEKGDNPFYHLVDGLVNPVAPIASEPVDMKGKDISEVINKNLTEFGKKLKAPDSIYTLEELILKIQSKDNPDEIKSELQKIRKCLETDIKNRKEQLITSIANNNIPFSVINGKLKPASRKMQWLFKLLTERTRMKPEDKVPSIEEKLDKYWERYNYKKLEKLITDNVEKLENEPAARVIANTVFKCVRDYHHNLRLSLSESSEEDQDFKLFIKEVEQHFKKYYPVKSKDSNSEYDNFLCKDNNYRFYCSCHIVKREVNRSIINQLVAGLIQQGKLLHYFYDYEKGLWQKDFLNSHGLSYIQVEEAFKKSLMSALTWGINRLIFFYYDGKEKFPDKSDILLNPKKDKKYNINDYRKNYYKRIKDDSKHFKEKLAACFSVKVKEENNRNNDSVDKLIDLVEVTRKSVANIRHNIFHYKEESLLKILESGGQKKENEKSNQNGKSIKYNVAKEFFIRDIKNLTDAFREQIRSLGILEYYPLSLLINCFDACGLEFKLYTSQNSMIPSFGKVYKKGYNLYKSDNNKHKGLHWYIEVPNQDQGRLAYKNLLQLIYYYAFLPEVKENETLITDFINSTKEWNQKEATNAKNKSKAKSMQSDESNNIAYRYEAMPDYKGEPLSDYLELLQREQMLREKQVQEKEADNNYYIPFIQDVVVRAFDAYLSRMDKYRDSLQAPALQPKEDVEKALNELICANGGKYVLKTRFQKYLPFNEIQSDKQEKPNNEREEKNNQELSQKEKGLLSFYLLLRLLDGKVISELQHQFVRYRCSLKERKLYNYNNVNQDELISALEELEELMELVRYTIPSALPQSLSGKKESDFKDLIERHFNDFFEEKVINKIDFYYQSDAKSPIPRKPMTLLVRSAPLPLYQQMLKDYYHITEEDINEYLKLSNGIVDEQNRLNELHKKLEHVKVQSRKISNKTGKSNYVNYLTEEDAGMVEEYEETLIKVIKYKNLRRKLTFESLYEIFQVHVNIIARLIGFAEDWERDMFFLLLALSYGKYILCSESNVKAMFSNGYVVGAITKKDGYLKNDHKLLYELCWHEVRNDRDLWRIMKDRLDIRNSIDHLNHFTQSETGPLPSLEVTLNKVRDMLCYDRKRQNAVTKTIKDMLLKEHHIRIEWESYTDNEKKYQLKIKSVNDMPVVHLKHLRIDGQKKDEKKKVDTKAFKYDKQEVWLHKGVQETAHDGNFLKCIDRLLTFSFNSANPK

SEQ ID NO: 295 - protein, 1388 aa, Artificial; identical to SEQ ID NO: 103
  Synthetic

SEQ ID NO: 296 - protein, 1157 aa, Artificial
  Synthetic
MKVTKVDGISHKKYIEEGKLVKSTSEENRTSERLSELLSIRLDIYIKNPDNASEEENRIRRENLKKFFSNKVLHLKDSVLYLKNRKEKNAVQDKNYSEEDISEYDLKNKNSFSVLKKILLNEDVNSEELEIFRKDVEAKLNKINSLKYSFEENKANYQKINENNVEKVGGKSKRNIIYDYYRESAKRNDYINNVQEAFDKLYKKEDIEKLFFLIENSKKHEKYKIRECYHKIIGRKNDKENFAKIIYEEIQNVNNIKELIGKVPDMSELKKSQVFYKYYLDKEELNDKNIKYAFCHFVEIEMSKLLKNYVYKKPSNISNDKVKRIFEYQSLKKLIENKLLNKLDTYVRNCGKYNYYLQDGEIATSDFIARNRQNEAFLRNIIGVSSVAYFSLRNILETENENDITGRMRGKTVKNNKGEEKYVSGEVDKIYNENKKNEVKENLKMFYSYDFNMDNKNEIEDFFANIDEAISSIRHGIVHFNLELEGKDIFAFKNIVPSEISKKMFQNEINEKKLKLKIFKQLNSANVFNYYEKDVIIKYLKNTKFNFVNKNIPFVPSFTKLYNKIEDLRNTLKFFWSVPKDKEEKDAQIYLLKNIYYGEFLNKFVKNSKVFFKITNEVIKINKQRNQKTGHYKYQKFENIEKTVPVEYLAIIQSREMINNQDKEEKNTYIDFIQQIFLKGFIDYLNKNNLKYIENNNNNDNNDIFSKIKIKKDNKEKYDKILKNYEKHNRNKEIPHEINEFVREIKLGKILKYTESLNMFYLILKLLNHKELTNLKGSLEKYQSANKEETFSDELELINLLNLDNNRVTEDFELEANEIGKFLDFNENKIKDRKELKKFDTNKIYFDGENIIKHRAFYNIKKYGMLNLLEKIADKAKYKISLKELKEYSNKKNEIEKNYTMQQNLHRKYARPKKDEKFNDEDYKEYEKAIGNIQKYTHLKNKVEFNELNLLQGLLLKILHRLVGYTSIWERDLRFRLKGEFPENQYIEEIFNFDNSKNVKYKSGQIVEKYINFYKELYKDNVEKRSIYSDKKVKKLKQEKKDLYIRNYIAHFNYIPHAEISLLEVLENLRKLLSYDRKLKNAVMKSVVDILKEYGFVAKFKIGADKKIGIQTLESEKIVHLKNLKKKKLMTDRNSKELCELVKVMFEYKMEEKKSEN

SEQ ID NO: 297 - protein, 1141 aa, Artificial
  Synthetic
MKITKIDGISHKKYKEKGKLIKSNEIEKDITEERFNDIEAKTTELFQKTLDFYVKNYENSEDQNKERREKAKNYFSKVKILVDNKKITICNENTEKMEIEDFNEYDVRNRKFFNVLNKILNRENCTEEDLEVFENDLQKRIGRIKSIKNSLEENKAHFKKESINNNINYDKVKGNNKRSIFYEYYKNSLKHQEYINNIFEAFDKLYSNSHEAMNNLFSEITKDSKDRNIRKIREAYHEILNKNKTEFGEELYKKIQDNRNNFDKLLEIEPEIKELTKSQIFYKYYIDKVNLDETSIKHCFCHLVEIEVNQLLKNYVYSKRNINKEKLENIFEYCKLRNLVKNKLVNKLNNYIRNCGKYNAYISNNDVVVNSEKISEIRTKEAFLRSIIGVSSSAYFSLRNILNTDNTQDITNKVDKEVDKLYQENKKIELEEILKLFFGNYFDINNQQEIKVFLMNIDKIISSIRHEIIHFKMETNAQNIFDFNNVNLGNTAKNIFSNEINEEKIKFKIFKQLNSANVFDYLSNKDITEYMDKVVFSFTNRNVSFVPSFTKIYNRVQDLANSLEIKEWKIPDESEGKDAQIYLLKNIYYGKFLDKFLNEENGIFISIKDKITGFYKLEKFEKIEETNPKKYLEIIQSLYMINIEEIDSEGKNIFLDFIQKIFLKGFFEFIKNDYNYLLELKKVQDKKNIFDSKMSEYIAGEKTLEDMEEINEIIQDIKITEIDKILNQTDKINCFYLLLKLLNYKEITELKGNLEKYQILSKTNVYEKELMLLNIVNLDNNKVKIENFKISAEEIGKFIEKINIEEINKKIKTFGELRNFEKGENTGEYYNIYSDDKNIKNIRNLYNIKKYGMLDLLEKISEKTNYCIKKKDLKEYSKLRKQLEDKKKENEKIEDEKTNFYKIQEYLHSKYQQEPKKILWKKNKNDYEKYKKSIENIEKYVHLKNKIEFNELNLLQSLLLKILHRLAGFTSIWERDLRFRLTGEFPDELDVEDIFNHRKRYKGTGKGICKKYDRFINTHTEYKNNNKMKNVKFVDDNPVRNYIAHFNYLPTPKYSILKMMEKLRKLLDYDRKLKNAVMKSIKDILEEYGFKAEFIINSDKEIILNSVKSVEIIHLGKEDLKSHRNSEDLCKLVKAMLEYSE

SEQ ID NO: 298 - protein, 1388 aa, Artificial
  Synthetic
MKLSKVTYRVKDKNAKYKKEYNVRAAVANNSENAGGVLYHVPGVDLIDLREQMLDRDRSVRLLYNIFNHIQTGTKPKKWGNDETLSVDENERKAKEQNIKIMNYKWREACSEYIEKSQSTINSVLFYSYEESGYKTKRMNDNEAIIVKMQYENRLSHFTGGKLEDFVAYTLRNSLVVSRYDNQEFDSVNAMVVFINNIGNGNISDKDKKTICKLADLIRNDFSKLNPNVQSSQGANMVRSVRNQNMVVQPQGDKVSFPLVSDEGKNTVTNKNVEKKGLNEFLLNYANLDDEERMEKLRKLRRIIDVYFSSPSHYQKDMDISLSDNIDKTKFDVWKKHETGKKNTELFVDIPDELLTAETEKIKLDAVLEKKARKRLTDSIRKQNMICYRYTRAVVEKYNSTENLFFENDSINQYWIHHIENAVERILKSCKAETLFKLRRGYLTEKVWKDAINLISIKYIALGKVIYNFTVDDIWKDKKVKNLGSIDEKIKHGITSFDYEMIKAQEALQRELAVNVAFAANNLARAVCDMTNLKDKESDFLIWNKKDIANKLKNKDDMASVSVVLQFFGGKSSWDIDAFREAYKGNKYNYEVCFIDDLRKAVYAARNESFHFKTALVNNDIWNTEFFGKLFIKETEICLDIEKDRFYSNNLPVFYSDNDLKKMLDHLYNNKVSRAAQVPSYNSVMVRKYFPENITSTLKYQKPGYDEDTLEKWYSACYYLLKEIYYNSFLQSDEALALFEESVNNLKGDNKDQELAVKNFRNNYKNIKSSCTSFSQVCQMYMTEYNQQNNQFKKVRSSKDSIVDKPIYQHYKLLLKKVIANAFASYLQHNEELFGFIGKPLKVNCLKEIDKEQFLPEWTSKKYVSLCEEVRKSPELQKWYIVGKFLNSRSLNLMAGSMRSYIQYVNDIKRRADGIGNELHVIAQNLDVVNKWVQVIEVCLLLSSRVSNEFEDYFYDKDDYAAYLKSYVDFDNSDMPSEYSALVEFSDQGKVDLYVDPSNPKVNRNIVQSKLFAADYILRDIIEPVSKDEIEDFYNQKDEITTCKIKGAELTDEEQKKILKYQKLKNRVELRDVVEYGEIINELLGQLINWSFMRERDLLYFQLGFHYNCLRNDSAKPEEYKNLVLDDISIKDAILHQIIGVYVNGAAIYAPGKDKNKLESQCVKGRVGGKIGAFCGYSLYLKLAADTLYNAGLEVFEVLPEHEDIINLRNGIDHFKFYLGGYRSIISLYSEVFDRFFTYDMKYQKNVLNLLQNILLRHNVIIEPIFESGIKKIGKDTKPCAKLSIRSIISDSFEYKIKDGNLIADAKDKRYLETIKKILFYPEVEPEVRILSSKDSFEQNNQYGYMKEKSENNKNKKNKKNNGNRDEKKNSDGLTYNPFLNLPFELPE

SEQ ID NO: 299 - protein, 1357 aa, Artificial
  Synthetic
MQMKISKIKNSRPGISVTENKNEEQLSRQSLLYYAPVKDGKIRLESKDLEQHVTECNEKAQKLYNVITPEINFYKDENRQKMVENLARNFNAVINNALRSIRNPKEKKERRVEKEVAFILNLSKKSIKLKKNVFVKSTDLIVKFPENNKYNKKNSKGTGSKEAYIQKMISDLVLRKLKNTLRKEVKLENGCRMQMTEITISLMSAICLYGNAESFDPAILKAFFEKVDSDYTKYKYVEQIVKSIESQSAKLKVVEKDGRHLLISANADHRKKKYVFEFMRMYAAADEKEKRELTEHIQDLIGLYLCGKAGYENAENRFSDMIESHNCICGKIEEILNELEKPENLSQQKKENLKNTTVKVMALKYRAAVNYLADEVGKTVLGEIREKKVRSCADLYWIEYIDSTVEKLLLKSRNKKRYRYEIGFLSKHIWKEWTQYISGKYIEIGKGVYHFAIPDLSGALEGESVSICEVKPEYRNGVSGFDYERIRAEESLEREMEKYVLFAVNNFARAVTPEEEREKSGHEDVLLMKTLSEIEESQTKEERQKKHDNNVKNAITLYADADRRILQFFGGQSRFREKEDSLINLYSGEDLYKEIRKELYAIRNITFHYTTKAEKDQTQKHDLAEYLFEEEFSDITELFREKYYANNVWKYYDAEVINTIMENIYCGRKYRAAQVPAFKNIISRPELPQVMNGFVKGNSLRRLMNCPDRDVINKYWSALFFVLKELYYYDFLQEQKRPEDNVKERFFRAIKKLSGQEKGDKEQKAWESFENRIDQIGRDRSFGAICQGLMIEYMLQNSDISMVQTETDNGKANNKKQIYKHYRTLLYNCISEAFIEYLREKWKELRTPVLTAKEWSKEEFCRVDGLKHLSLFDHLKETFNDAESGSSWYMAAHFINQKYLNHLLGSIRNYLQFTEDIEDRAISLGDCVDNKREEKNLRYRNTLEILEFVAQFCERTTNVMEDYFESNQEYAEYLSGFVDYNTTKKETDIEKALYSFCKQKFKVDGKEYMAGIYYDGENLIPNRNIIRANMYGNTSCLKPCMDRITLKEIRTMYADQNKLDMVLKEGVCHTEEEQKAYREYQNEKNRIELFDVCTYTQILNDMQARLIGWSYMRERDLMYYQLGYYYTKLFWTDSISEEDARRRLVGNLVNVEDGAILYQILAFNSYNLPIIANKNNTVTLLKDEGSIGGKAITAFFKNYENAEMIYEEALDLFENMDEHAAIINTRNYIEHFKYFIKSDRSMMDLYSEIYDRFFRHDHNRKKNVPDSLKNVLADNFMIVDIDMELGSKKVGEKKKGFREHKAARIEFTDSGIRSTDMTYTIKPDIKDNKKVLVPARSEVFLKQFRKILEYRIQDKTQ

SEQ ID NO: 300 - protein, 1318 aa, Artificial
  Synthetic
VAVVLNPDVVRRSRDYITLISRMSSMRLTDPEPPLETASRSRRLVSRRLFKGLRVAGREDRCVRATSDHSTAGSMIRYPHVFGEGSMQIIRPYGSSRSKQGQDGLRRVLVEKTSGRAEQDIPTYARTHEELVIAQWISTIDKIARKPTSRKKPSADQRAFRDKLGNACWVRLMGSGRLKDINDARRAYLSDLWWFKIHPYELGIDEPRPRRDGSMPAAPKVEGRWYKVFAGDGAPQMSGPEKIAEIAERIERHLYESERRLGPDARPRKLGKIESRAESISGSVLRMANGAHTEQPGWSKDDERAYTETGDPVVSIRVEAESTERNKGRASLPLAAEVLFKHWGKVFLDPDTGTAMSYIAAQAKHPGMVALHMELKQCYRRLLKRTRKDTREHRKRDPDERKLSRLLPRNLAEALSLSAKQDANAELGHLVRLGKVIYYTASDGEADCAGAIGRNWPDKVETSRFWSSEGQAEIKRAEAFVRIWRHALVLGGLTLKDWVSMKEPFPGDILGGDRQLTSALAPERFDRGPFDRKLQLLFGNRSNAFVFADDGQRLDLLRGLIGGAANLRHAAFHFKGRGQLLRALAELPGKFSNRLQEAARGLWRDDASHRADRLKATLRGVHIEHFVTKEQAEQALALLLEEARAELPLPRLSRVLLRAENAWGRDDAVKLPEPANRRALEAPPRQCQYTLLKLIYERPFRSWLRDRRADVVSQWIDRAVARATRAAKTINAKGDDVARRMIAAKAEKLPKPAAGSDMIDFFFDLSAATAGEMRVQRGYESDREQARDQADHIDQLLCDVVILAFNEYLSERQLDWILTLKADQPVTGERAFSLDDLQTVAMPVEDVDDWQVALYLLLHLLPVEAVAKLLHQLFKWDITATREGRLPRDESQRLHRLFATLTLYLDMHDAKYEGGSPLAEYADVQELFATARGFGRVFPSDASLEADRRIPKRGLREILRLGHLPLVKAIAGGRRIEEATIDRVFAFETTPDGGGLTPIAALQQRREELHDRWVRQKNLDEYDLREYCEAVSKISGHRQDSNFMNLVDHVRAHRTILSVLGRLVDYVGLFERDLYFTTLALIKLHDERPDAIFDERGLRLFHNGQIIFALGALRGGSAKVAAIKGNLARHFTEVWVQNNDAKDIRNDLAHLNMLQGAHPVPKLTYWINQTRQLMGYDRKLKNAVSKSIIDLIDREGIELKWAMRVERGSHDLADATLAARSAKHLGKKQLTLDGSSGRSRLTLEESLHGLGFVTMIATSFEGKAQAVASIGDHLPKVDWKTSAQRGPRHGSGQGRSQRPSSGGKKFRPSSTRNETGRR

SEQ ID NO: 301 - protein, 1412 aa, Artificial
  Synthetic
MKLSKEKYTRSAVANNGDIKSAEVNNGNTKSEEVNNEYIRSAVANEKQNIGGVLYHAHGTDTIDLQDQMLRRDKEVKKLYNVFNQIQVGTKPKKWNNDEKLSPEENERRAQQKNIKMKNYKWREACSKYVESSQRIINDVIFYSYRKAENKLRYMRKNEDILKKMQEAEKLSKFSGGKLEDFVAYTLRKSLVVSKYDTQEFDSVAAMVVFLECIGKNNISDHEREIVCKLLELIRKDFSKLDPNVKGSQGANIVRSVRNQNMIVQPQGDRFLFPQVYAKENETVTNKNVEKEGLNEFLLNYANLDDEKRAESLRKLRRILDVYFSAPNHYEKDMDITLSDNIEKGKFNVWEKHECGKKVTDLFVDIPDVLMEAEAENIKLDAVVEKRERKVLTDRVRRQNIICYRYTRAVIEKYNSNEPLFFENNAINQYWIHHIENAVERILKNCKAGKLFKLRKGYLAEKVWKDAINLISIKYIALGKAVYNFALDDIWKDKENKELGIVDERIRNGITSFDYEMIKAHENLQRELAVDIAFSVNNLARAVCDMSNLGNKESDFLLWKRNDIADKLKNKDDMASVSAVLQFFGGKSSWDINIFKEAYKGKKKYNYEVRFIDDLRKAIYCARNENFHFKTALVNDEKWNTELFGKIFERETEFCLNVEKDRFYSNNLYMFYQVSELRNMLDHLYSRSVSRAAQVPSYNSVIVRTAFPEYITNVLGYQKPGYDADTLGKWYSACYYLLKEIYYNSFLQSDRALQLFEKSVKTLSWDDKKQQRAVYNFKDHFSDIKSACTSLAQVCQIYMTEYNQQNNQIKKVRSSNDSIFDQPVYQHYKVLLKKAIANAFADYLKNNKDLFGFIGKPFKANEIREIDKEQFLPDWTSRKYEALCIEVSGSQELQKWYIVGKFLNARSLNLMVGSMRSYIQYVTDIKRRAASIGNELHVSVQDVEKVEKWVQVIEVCSLLASRTSNQFEDYFNDKDDYARYLKLYVDFSNVDMPSEYSALVDFSNEEQSELYVDPKNPKVNRNIVHSKLFAADHILRDIVEPVSKDNIEEFYSQKAEIAYCKIKGKEITAEEQKAVLKYQKLKNRVELRDIVEYGEIINELLGQLINWSFMRERDLLYFQLGFHYDCLRNDSKKPEGYKNIKVDENSIKDAILYQIIGMYVNGVTVYAPEKDGDKLKEQCVKGGVGVKVSAFHRYSKYLGLNEKTLYNAGLEIFEVVAEHEDIINLRNGIDHFKYYLGDYRSMLSIYSEVFDRFFTYDIKYQKNVLNLLQNILLRHNVIVEPILESGFKTIGEQTKPGAKLSIRSIKSDTFQYKVKGGILITDAKDERYLETIRKILYYAENEEDNLKKSVVVTNADKYEKNKESDDQNKQKEKKNKDNKGKKNEEIKSDAEKNNNERLSYNPFANLNFKLSN

SEQ ID NO: 302 - protein, 1221 aa, Artificial
  Synthetic
MMQIIKPYGRSVVDTGTGEPTQRKLQDKNQQQHDISQFVHEHAELVVAQWISVIDKIARKPHANGKNAGKCGLPTAGQYQLRDILGTAAWVEVLKHLSPGMDAQRQQYLETLWYSKIHPYGKQTQEQEKAIPLQGRWYQRFVGDVLPENVDVALAKQVAERIHLHLYEAALRINPEVSARRKGSIQAQAETITNNTLHPVVPPMTWSKADWSAYNRYDVAERIYLEAKYRLEQKQDARQKKQPIQPEWRIDGSLAGKLLFEHWAQVFKGSDGKSRISEAKTHAAGLFALHMAVKDFYTRLFDSNRKEETLVKFLLPQKKKALQEKLTQKLQNTDVAARIRLGKIQYYRKAQGEVVPLANSRFWGSDGQAEIKRAEAFVRVWRHVLGQANLTLANWASLASPADLWGGDSFFGHFSTHINGKLFATDIGLDSRRTVFDQNLHLLFGDAAGLFQSDDETRKASILLAHKCGGALRNAAFHFKGRAKFLQALENDLPQAAQSGLQMQLSKLWDEAQNQQGSRLLKILEGAHVFHVCTQEQVQQLVNTLGNVSAGELPLPRFGRVIERNHHARLGTNLPVRGNRQAMEQHPARKCQYVMLKLLYERAFRVWLENTTDEVFSVWLETALERTTNAARNNPNVQGKSQHERELVMARAAKLPISMRSKGGKGKEKSIRQFFYDLSAATASEMRVQRGYASDAGKAREQAEYIDELLRDVVALAFREFIRANGFDWLLDIDPQQELRETRCCLMEHIRFPAIAPRSNAWQPVLYFLLHLMPVGEVSQLLHQLAKWEILAKPEQARTDEEGMRLHALQQTLKLYLDMHDSHYTGAESMPAVERAVLDTFATFYETRNGLDKVFEDQGNGRDGARYLPQRGLREIRRFGHVPVLQALVKDKITAQDVTHCLQQETVPANGKLSPVAQAQQRRETLHGEWVKERKQFKAYRDYAAALQTVVVHRQLSNHIRLVDHVAAHRIVMKVLARLADFSGLFERDLTFVTLAALHEHQLQPEDFFVIDNPPRYNNRGELEKDGLTLFKNGQVIEALGKVQACRDALKHQIVGQVNLDVHRSVRNDFAHFNMLYGKQRTTESATNRVIKCPAAQGLNLTCWVNCARNLMSYDRKLKNAVSQSIIELMEREGFILTWEMDTNHQLCSPKLQSRQVEHLGGQRFPLVKDERKKLTIRENLHSVGMVKLLAHAFGAVAEDVKDISTLDLNTVKWVKKDATL

SEQ ID NO: 303 - protein, 1221 aa, Artificial; identical to SEQ ID NO: 302
  Synthetic

SEQ ID NO: 304 - protein, 1268 aa, Artificial
  Synthetic
MKVSKVNHRRAAVAVNKKSVTVNGILYDAPVKKNVKTGNMSAYVSSKYVIDNVVKNSSRLYSPFSSKRIVIDREKIRIADRLKQCYVNFVKYYLSNGSLNEQQMRFNPNNTYMADSRVHFCVPSGIDIESLINSIVDSSLRKSLKRTYRFETNYGEKNTFNLPDLVKKSIKIYCTDEKRKLNDREEQEMYVLFSYMYEDKYKDRQKVLIANSISNQATKVKVCDDESRLIKLSIADTKKKPLWDFIVDYANSDKNGQYTILRNIRKSIVLFVCGVDVYRNIENNDNLDIWKWEEYGIQESQLFVKIENCYTTKGEDIALNEIRNVNLDHYMKAIGVLDDERSKFWFQHYENTIEALFLKKSKRKIERIKTAYLCEYLWKNFCSYVALKYVDLGKGVYHFTMSDKLSLMNKNTNENGIKFGEVDSRFNKGISSFDYERIKAEETIDRNISTYTTFATNIFAKSVIKDSYRQKKAGNSDALQYDDETYYNRKAMNPYALKRVLRYWGGQSRWKSELEELNVAELCIDIKNRLSKIRNSGVHYTSTLALKGNDDDSIVGMLIKKDFDDIKDVYASKYYSNNVWMFYNTDKISKMMEYLYQDDSNIRDAQIPAFNSVIKRKDMAEVIEKIIKKNSYKTIKEPYQREKYRSCLYFMLKEIYYNRFIKQDNLKDQVIQIIDSNTELIGDNSRAVDNLKKRIHDVDSQTMSFGELCQVIMTDYNMQNQENKSIKSKERQDKDRKNGIDNSYKHFPLLLHHLIKVSFLKFIKTDEKLAFIREPRITELDKTLEQFEAQIQTVDIYNSLKMMVAENKSLLDWYTLAHFLMPKQLNHLIGDVKNYIQYLSNIDKRAGSVKNNKSASTEVKIRQYSEIVRILDFSLQYIGRVSNDVTDYFVDEDEYAAFLSKYVEFSGNDIVSMKAFCQSRTANGKHTIGLYCDGANPIMNRNIAYAKMYGNDEILSYIYNKVTKKDIEKYYVSQDNLEKVFADGKCQDVQQQNALCDFQKMKNHIELTEVSIYTDILNDFMAQFISWAYLRERDLMYFQLGLNYIRMFYGTYELEEKYYKLHGENINIEKGALLYQIVAMYSHELPIYKVDESGIAILAEKQGSSGASIKSFVTEYCKEEMKKAYTYENGLELFEDVNQHDDLSKLRNDFAHMRYMSARDKSIMDIVSEIYNGFFIYDTKLKKSVSFIFKNILMRYAVDVNIEFCHKGDNEDTNNLIRIKDEVGLYSDKYTYKVEDNDTVDIEVRNSEFLEQLKKLLEYKKESEGSEL

SEQ ID NO: 305 - protein, 1105 aa, Artificial
  Synthetic
MRVSKVNVKVDVNGKKVNKMVLMHRSTEKGALIYTNEQNVDRTKEIIPSKKRESFDLSILNKTLIRYETVKKQHLDRNKYKDIEAIFKSKKLPGTIDDESIIPFLNHKFHFMVTYYKKGDKHSFALSECIKKAVATKNINELQPYYDWAEWYIDDKSEKIKKSIVNNLIPIDNEPSKRQKALLAWEKEFTDSGKLELREFHNLFNTDILIADLCRVEMGELRDNGTPKDSNAYHRKLKKALQDHQSVVFGKRDNPNVDKRDNAQLAIYNLEIVKYLEHYFPIKSSERRNTADDISYYLKTDTLKNTITRQLENALRANLLRNGKYQHHGLNADTTSDSLTNLKRDEAFVMNLITTSAFAANNIRNIVDSEQAEDILVKRLFTTSLQKDKVNLHTYKLFFPEVEADINAQSLWAMRGAVQQIRNNVAHYKKDALKTIFNVTDFEFPLQGDNPKYSETIYKQLFEKELEKLPEAFALQLKSGGVLAQYSFQHLKQLLEKVEFQLCRTVVPFAPGFKKVMKGGSGYQNSKQDEKFYNLELNAFRSKDDYSEEAWNGRYFLLKTIYNYLFLPEFMDNSIGFADTVAWLLKKNKLQAQGGNAYAFADVRFMQRGESIADYMAYVQSQWMHEQNKKEDSKEDDTRINFEKFVLQLFIKGFDTFLQSAEYAFINVPQPQINLSDSNQLQADKMNALEKAIRPLCRISRKYIKPEKDEQIAFYVYCKLLDANHLSALRNELIKFRLSSGNESLNHLPEIIELCLIGVDAVPTDYRQIYATREQCLDRLKPFVADGADYAHWSDLYVQTDQETPVIHAGIELSVKYGTAALLEQLIASQPAFKINDDNFGKWNNLKKDIQEKMAKHTEFHKAWVEAKEKDDKERRERVRSRSNFAQQFIRKNEEDYINNCIEINNYNWLDNKLHFEHLKRLHSLTIELLGRMAGFVALWERDFQYMDRQRVKLQGGALLNFDHGVPNEKAVKPHDAYFKRVFLCDDDYRQIRNHIAHFNYLTTGAEDHSLIDMINWLRKLLQYDRKLKNAVSNAFIDLFDKHGMVLKLKFDDQKHELLVESIYPKKIYHLGTSKKDKEKSLTTNQVQTAYCNLCKALLEMKKEH

SEQ ID NO: 306 - protein, 1155 aa, Artificial
  Synthetic
MKLTATKNSSNAQFYRDKTKGQLISTKVNNTSKIIEKSDKTKDIIENLDHKRSLKGRILINPDSKGKIKLNTNEFKIKIHIEKIINTLIYNNHMSELYDEKPTLSDDEKKDENLKKIINNTLSVYGKKIKYNSNSKNLEEILICYFKNEDITSEFENIRNYFQTVITHKKEKLVKSIKNNKIPFDLDNNSLQPNSEKMKWLFSFIKNGVITAEIKENTFLKDIYKYENLEKVLNEELNNQIKNNKPVMTKKLYQMVLDYNQDIYINHINGENEQDSFYLNEIREHFRRYLVISKKSNTKNQNGYNEKIKPEKIRHHIAYEFVTENIQKHIINQLVAGLIQYGKLHHYFYDKTTSSWQKEKLNSDGLSEIQVEEAFKKQILTSISSGIAKLNYFYNHGSQNESKINTDKNVDVLDSDKVQLQLTSDTDDTEFKISTCFPIDLAKDYLNLEKFIDTIRGNIDKIRNNTFHFKKNELKNLFNDGSYNNTNITFIKELFQRDLNSVQESFKEQIRSSGITEYCSFELLKNIFQENSFDFQLYSPQYPMSPSFKNIYKRGCNLSNATVKDEKIKWIKPLDADAENDGQLAYKNLLQLIYYHCFLPYVFKNESYLIKYIKTTKDWNQQKAKNDRQNRHQYRYENMPFYNNNKFTSLNDYFQNLQRLQSIYENDEDAKHENYYLDFIQDIFLLAFDNYLEDKLKNYKYKLIFSEKLVDSSLESLETLEKLFEKTNTILKMNVNSSFENNLNFYAFLRVLEKRELNNLLHQIIKYRTSKNEESLREIEELITLVQYTIPLQTADEHFQNELKNHFKYFFEDENFNNNCELYYQSDKKTPIAHRSMSLMGRSGIMALFKVMFSTDYKIKKEDFDNYLKMIDSAELINDETPKSIQDKQKKVHDLHRELVSKKIINIKNKDEIDKLEEYEKLVKEIKEYEHLRHKLTFETLYKVYKIYIDIISRLASFAEDWERDMYFMMIALKELNHINQNVDIDEIFNYNPVDKKTVSQKFKENLGKTIKNKNLVLFLFWMDNSKNNSNNFLVRNSIAHLNHMNQYKLNDAHSQKNIIELINRIRILLAYDLKRQNSVTKSIIEILEKQHDIKIKFTGKKDNNNYNFELNSVESDNIIHLKKIQKDKDNKIKIPTHDELTIKLVEKLLTFKFQ

SEQ ID NO: 307 - protein, 1221 aa, Artificial; identical to SEQ ID NO: 302
  Synthetic

SEQ ID NO: 308 - protein, 1221 aa, Artificial; identical to SEQ ID NO: 302
  Synthetic

SEQ ID NO: 309 - protein, 1330 aa, Artificial
  Synthetic
MKREKNITIMKISKVNHRRTAVALNGDKSELGGILYEAPVQKDKNGNYNDVIAETGKVVNEALDKKSRLYTPFNNQKVIIDKNLQRYANNLKRCYINFVKQYVNNKSFNYKAMQFIPDIQNPKTNDAVNYRTDRDNVYNKNKYYDKQTKSKSKKFIYEKIVIPQNEQNIVISALVNCSLRKSLRKDVSYKTKSGEIKTYNLPELVKKSMRFYCLEGQREPDEKEKYEMYILFSYMKEDKRTKNTDLLVKSISNQNTKVKVEDIDGNKLLKLSIADTKKKPLWEYLIKYADSSRQRELMYDIRKKIILYVAGIEEYENIKEDSGLSKVSWSKYNISDNKMFFDINSCTDKRKQNLEIKIREANIEHYRNASSKLCDDESIFWFQHFEGVIETLFSKKSKISEERLGCAYICDYLWKDFLSYLAAKYIDLGKGVYHFTMKDKLDMLNKNEAVTDLRFGIVSEKYEKGITSFDYERIKAEEELDRNIAAYVTFAADIFAKSVIKSDYRTKKDNNSDVLQYSDKKFRNSEVIRDNAEKNILQYWGGYSRWGTENSKLPENNKVSDFGKLDVSDLCIDIKKHLAGIRNSSVHYTTKIKNESAADGSNVKILFEKDLADINIIYADKYYSNNVWMFYSLEDINKLIAFLYKEKRVIRQVQIPSFSRILKRKAMQDVINEIFKDDFDENIVNPELKEKYRNSLYFMLKEIYYNAFIIQPELKEKFKDKIKTMKSELYNKLKTIDKKEYKALYCMLSNEESALKNFADRIYSVDGDNVSFADICKILMTDYNMQNQEKKNIESMEQKKKNKGKDENYKHFPLLLHKVLKELFIEYLKQTHELEFLRNNICIKSDVTMESFESQIKGVEIYKDLKEKIDKNNSLLDWYVIAHFLMPKQLNHLIGNIKNYIQFATNIDKRAESVKNLTESGMVKKIQYYDDIVRTLEFSAQYIGKISNNINDYFNSEDEYVSFLSKYVGFINDKSEDVLTELKDFCREKINNSSQIIGIYYGGDNVIINRNVIYAQMYSNAEVFSNIYKKVTKNDIINYYEKQNDLKDVFKSGVCQNEGEQRSLCEFQQLKNRIELTELSTYADMVNDFMAQFVEWAYLRERDLMYFQLGIHYIRLFYSDNVLDEKYHKLRDNVIDIEEGALLYQIVAMYDYELRIFETDNSGNAKRIGQGGPGKSIPVFLKKYCNGTDVYECGLELFEDINQHEHIIRFRNDIAHMRYMSNQAMNIMSIVSNIYKSFFVYDTKLKKSISLVFKNILMRYGVIADLVFSYNNKNQSIKDDMDINIINIKNLKSDKYVYKIVNEDIVKQVEIEIRNQVFLEQLHKLLYFSR

SEQ ID NO: 310 - protein, 1221 aa, Artificial; identical to SEQ ID NO: 302
  Synthetic

SEQ ID NO: 311 - protein, 1384 aa, Artificial; identical to SEQ ID NO: 117
  Synthetic

SEQ ID NO: 312 - protein, 1161 aa, Artificial; identical to SEQ ID NO: 218
  Synthetic

SEQ ID NO: 313 - protein, 1382 aa, Artificial; identical to SEQ ID NO: 131
  Synthetic

SEQ ID NO: 314 - protein, 1221 aa, Artificial; identical to SEQ ID NO: 302
  Synthetic

SEQ ID NO: 315 - protein, 1221 aa, Artificial; identical to SEQ ID NO: 302
  Synthetic

SEQ ID NO: 316 - protein, 1330 aa, Artificial; identical to SEQ ID NO: 130
  Synthetic

SEQ ID NO: 317 - protein, 1372 aa, Artificial
  Synthetic
MKLSKEKQIRSAVANKEKNTEGVLYRFPGDDIGGVQAQMLVRDRDVKQLYNVFNQIQLGNKPKEWMNDEKLSPEENERRAQQKNIKMKNYKWRKACSKYVESSQRAINDILFYSYKEADKKIRNMSKNEDILIKMQNAEKLSKFSSGKLEDFVAYTLRKSLVVSKYGNQEFDSIAAMVVFLECIGKSNISDHEKEIVYKLLDLIRKDFSKLDPSIQDSQGANIVRSIRNQNMIVQPQGDRFSFPQVSDEEKKTVTNKNVEKDGLNEFMLNYANLDEEKRAEVLRKLRRILDVYFSAPSHYEKDMDITLSDNVNKGKFYVWKKHECGKKENGLFVDIPDVLVEAEAESIKLDAVVEKRERKVLADRVRRQNIICYRYTRAVVEKYNSNEPIFFENDTINQYWIHHIENAVERILKNCKTGTLFKLRKGYLAEKVWKDAINLISIKYIALGKAVYNFALDDIWKDKKDKKLGIVDERIRNGITSFDYEMIKAHENLQRELAVNIAFSVNNLARAVCDMSNLGDKESDFLLWKRNDIADKLKNKDDMASVSAVLQFFGGKSSWDINIFKEAYKGKKKYNYEVQFIDDLRKAIYCARNENFHFKTALVNNEKWNTELFGKIFERETEFCLNVEKDRFYSNNLYMFYPVSELRNMLDHLYSRSVSRAAQVPSYNSVLVRTVFPEYITNVLRYQKPGYDADTLGKWYNACYYLLKEIYYNSFLQSDKALQLFEKSVRTLRWDDKKQQRAVDNFKNHFSDIKSACTSLAQVCQIYMTEYNQQNNQIKKVRSSNDSIFDQPIYQHYKVLLKKAIANAFAAYLKNNKNLFGFIGKPFKANEIREIDKEQFLPDWTSKKYESLCIEVSENQELQKWYIVGKFLNARSLNLMVGSMRSYIQYVTDIKRRAASIGNELHVCAQDIEKVEKWVQVIEVCLLLSSRTSNQFEDYFKDKDDYARYLKSYVDFSNADMPSEYSALVKFSEEEQSDLYVDTNNPKVNRNIVHSKLFAADHILRDIVEPVSKGNIEEFYSQKAEIVYCKIKGKEITAEEQKAVLKYQKLKNRVELRDIVEYGEIINELLGQLINWSFMRERDLLYFQLGFHYNCLRNDSEKPEEYEKIEADENSIKDAILYQIIGMYVNGVAIYAPEKNGDKLKEQCVQGRVGAKVTSFNRYSEYLGLDELTLYNAGLEIFEVVAEHDDIINLRNGIDHFKYYLGDYRSMLSIYSEVFDRFFTYDMKYQKNVLNLLQNILLRHNVIVEPVLESGVKTIGEQTKPGAKLSVRSIKSDTFEYKVKGGTLITNAKDKRYLETIRKILYYADAEDADSKKPVIVTNADKYEKNKESEDEDKQKGKENRGKKNTETRSDAEKNNNERLSYNPFAN

SEQ ID NO: 318 - protein, 1287 aa, Artificial; identical to SEQ ID NO: 105
  Synthetic

SEQ ID NO: 319 - protein, 1373 aa, Artificial; identical to SEQ ID NO: 104
  Synthetic

SEQ ID NO: 320 - protein, 1388 aa, Artificial; identical to SEQ ID NO: 103
  Synthetic

SEQ ID NO: 321 - protein, 1380 aa, Artificial; identical to SEQ ID NO: 153
  Synthetic

SEQ ID NO: 322 - protein, 1287 aa, Artificial; identical to SEQ ID NO: 105
  Synthetic

SEQ ID NO: 323 - protein, 1373 aa, Artificial; identical to SEQ ID NO: 104
  Synthetic

SEQ ID NO: 324 - protein, 1330 aa, Artificial
  Synthetic
MKREKNITIMKISKVNHRRTAVALNGDKSELGGILYEAPVQKDKNGNYNDVIAETGKVVNEALDKKSRLYTPFNNQKVIIDKNLQRYANNLKRCYINFVKQYVNNKSFNYKAMQFIPDIQNPKTNDAVNYRTDRDNVYNKNKYYDKQTKSKSKKFIYEKIVIPQNEQNIVISALVNCSLRKSLRKDVSYKTKSGEIKTYNLPELVKKSMRFYCLEGQREPDEKEKYEMYILFSYMKEDKRTKNTDLLVKSISNQNTKVKVEDIDGNKLLKLSIADTKKKPLWEYLIKYADSSRQRELMYDIRKKIILYVAGIEEYENIKEDSGLSKVSWSKYNISDNKMFFDINSCTDKRKQNLEIKIREANIEHYRNASSKLCDDESIFWFQHFEGVIETLFSKKSKISEERLGCAYICDYLWKDFLSYLAAKYIDLGKGVYHFTMKDKLDMLNKNEAITDLRFGIVSEKYEKGITSFDYERIKAEEELDRNIAAYVTFAADIFAKSVIKSDYRTKKDNNSDVLQYSDKEFRNSEVIRDNAEKNILQYWGGYSRWGTENSKLPENNKVSDFDKLDVSDLCIDIKKHLAGIRNSSVHYTTKIKNESAADGSNVKILFEKDLADINIIYADKYYSNNVWMFYSLEDINKLIAFLYKEKRVIRQVQIPSFSRILKRKAMQDVINEIFKDDFDENIVNPELKEKYRNSLYFMLKEIYYNAFIIQPELKEKFKDKIKTMKSELYNKLKTIDKKEYKALYCMLSNEESALKNFADRIYSVDGDNVSFADICKILMTDYNMQNQEKKNIESMEQKKKNKGKDENYKHFPLLLHKVLKELFIEYLKQTHELEFLRNNICIKSDVTMESFESQIKGVEIYKDLKEKIDKNNSLLDWYVIAHFLMPKQLNHLIGNIKNYIQFATNIDKRAESVKNLTESGMVKRIQYYDDIVRTLEFSAQYIGKISNNINDYFNSEDEYVSFLSKYVGFINDKSEDVLTELKDFCREKINNGSQIIGIYYGGDNVIINRNVIYAQMYSNAEVFSNIYKKVTKNDIINYYEKQNDLKDVFKSGVCQNEDEQRSLCEFQQLKNRIELTELSTYADMVNDFMAQFVEWAYLRERDLMYFQLGIHYIRLFYSDNVLDEKYHKLSDNVIDIEEGALLYQIVAMYDYELRIFETDNSGNAKRIGQGGPGKSIPVFLKKYCNGTDVYECGLELFEDINQHEHIIRFRNDIAHMRYMSNQAMNIMSIVSNIYKSFFAYDTKLKKSISLVFKNILMRYGVIADLVFSYNNKNQSIKDDMDINIINIKNLKSDKYVYKIVNEDIVKQVEIEIRNQVFLEQLHNLLYFSR

SEQ ID NO: 325 - protein, 1216 aa, Artificial
  Synthetic
MRIIRPYGESRTERSDHLKRVLYDKTQSRERHEIGRYAQAHGELVIAQWISIIDKIATKPQGEQGATEEQYKLRDRLGEAAWTRLKADGRLELDDAKRAEFLSAVWNFKIHPYGERRFKPKQPRHGNLGSSPSARGRWYMRFAGDTSPERVNAEDVVQRISEHLYSSEYRKSASAKKKTTGLIAARAASIEKNTLRALPNSTAGWSKSDEAHYAKFGDVAAEIHSAVVVLERSGKRVSLEVAGRVLFEHWPKVFFDPLSRKALGIADARNSHPGLFSLHMAVKDAYARVLKRHKKGAGAGARKGSQATARLSVILPKDMPGLIRLITAQKDNQNINRQIRLGRILHYTASGEWSDSTTAVDAKWPTDILESPFWASDGQAKIKRAEAFVRVWRHQIALARLTLTDWASMRKPLSRDILGDRAAANLVIHQDNFSSELFDRKAALLFGVQSKIFAADDASKKEVLKCVIEEMSELRNQAFHFKGLREFLVSIDRLSFSDLVQKSARQIWEADSSRRSHRLKETLRAAHAEVYFSATQCEALLRRVTTQVDSDLPLPRFSRLLRRAKSCPDRAAIKLPPPANRSDLEQPWRLCQYTALKLLYERPFRTWLEARSADELNAWIGRAVQRATDAAHSQNYRKYKLAQKVISARASSLPRPTKGQKIRDFFFALSSATASEMRVQRGYESDGEKARNQADFIDNLLCDVMSLALCQFISSEAFLWILIAPVDPYLVGKRKCQLDAFELPIPSFEAKEWQVSLYFLLHLIPVGDVAQLHHQVAKWEITAGRDEGIELEDMNRILRLQTTLKLYMDMHDEKFEGDARLEGCEGFRDLFETNSGFEQVFPKSSSPDDDRHLPRRGLREIMRYGHLQMVMGFLPKQKISDGEVAEYLETMRASGPNGQSEIAIHQAQREELHEKWSRARPQLLSGDEYRAYCEVLTKIVKHRQAAARINLTAIVHFHHQVMTLLGRLADFSGLFERDLYFVTLAILYQYGLSPQRAFEDKGLGYLKEGRIFKALENLISEHKGKIKVELKHYFGPEWDSWDGRRGTRNRLAHFNMLRSHAPRLDMTEWVNSTRRLMSYDRKLKNAVSQSIREMMKRNGIELSWQMDTGGKNHELTSAVVSSASVVHLGGIRLVEFSGSASNSNKTQAITEALHGTPYVQMVAALFGGKTQQFDDITGRDLSNIDWQSTERKAQNTGGRGAMGTLRPRREEKVRRE

SEQ ID NO: 326 - protein, 1137 aa, Artificial
  Synthetic
MKITKIGGISHKKYGEKGKLIKSNEIEKDVIEERFNDIEKKTKELFLKTLDSYVKNYEKCEEQNKERREKAKNYFSKVKLIIDNEKITICNENTEKIEIEDFNEYDVRNRKYFNILNKILNGENCTEEDLEVFENDLQKKLNQIQSIKNSLEENKAHFKKESVNNTADRVKGNNKKSLFYEYYRNSSKHQEYVNNIFEAFDKLYSNSHEDINNLFLEITKDSNDRNIRKIREAYHEILNKNKTEFGEELYKKVQNNINNFDKLLEIEPEIKELTKSQIFYKYYIDKVSLDGTNIKHCFSHLVEIEVNQLLKNYVYSKRSTNKEKLENIFEYCKLRNLVKNKLVNKLNSYIRNCGKYNGYISNNDVVNSEKISEIRTKEAFLRSIIGVSSSAYFSLRNILNTDNTQDITNKVDKEVDKLYQENKKIELEERLKLFFGNYFDINNQQEIKAFLMNIDKIISSIRHEIIHFKMEANAQNIFDFNNINLGNVTKNIFSNEINEEKIKFKIFKQLNSANVFDYLSNKDITEYMGKAVFSFINRNISFVPSFTKIYNRVQDLANSLEIKEWKIPDESEGKDAQIYLLKNIYYRKFLDEFLNEKNGKFIRMKDKVIELNRKQNKKTGFYKLEKFEKIEETNPKKYLEIIQSLYMINIEEIDSEEKNIFLDFIQKIFLKGFFEFIKNDYNYLLKLEKVQDKKNIFDKEMSEYTAGEKALGDMKEINKIAQKIKVAEIDKILNQTDKINCFYLLLKLLNYKEITELKGNLEKYQILSKNNIYEKELMLLNIVNLDNNKVKIENFKISSEEIGKFIEKISRNKKIEIFEELRNFEKIENTGEYYNVYSDDKNIKNIRNLYNIKKYGMLSLLEKISEKTNYCIKKKDLEEYSELRKQLEDEKTDFYKIQKDLHYEYQKKYKNFSKKNNTEDYEKYKKSIENIEKYVHLKNKIEFNELNLFQSLLLKILHRLVGFTSIWERDLRFRLIGEFPDELDIIEIFNHNNRNNSVYKSGQICPKYEQFISTHIEYQNNNKMKNIKFDDNNFIRNYIAHFNYLPTPKYSILKMIEKLRELLDYDRKLKNAVMKSIKDILEEYGFKAEFVINSDKEIILNSIKSTEIIHLKKNDLKSHRNSEDLCKLVKTMFEYKK

SEQ ID NO: 327 - protein, 1204 aa, Artificial
  Synthetic
MKVTKIDGISHKKFEDEGKLVRYTGNFNIKNEMKERLEKLKELKLSNYIKNPENVKNKDKNKEKETKSRRENLKKYFSEIILRKKEEKYLLKKTRKFKNITEEINYDDIKKRENQQKIFDVLKELLEQRINENDKEEILNFDSVKLKEAFGEDFIKKESKIKAIEESLEKNRADYRKGFVELENGKYEDVKGQNKRSLVFEYYKNPENREKFKENIKYAFENLYIEENIKNLYSEIEEIFEKVHLKSKVRDFYQNGIIGESEFSEKDEEGISILYKQIINSVEKKEKFVEFLQKVKIKDLTRSQIFYKYFLENEELNDENIKYVFSYFVEIEVNKLLKENVYKTKKFNEGNKYRVKNIFNYDKLKNLVVYKLENKLNNYIRNCGKYNYHMENGCVATSDTNMKNRQTEAFLRSILGVSSFGYFSLRNILGVNDNDFYEMEEELTEDERKNENFILKKAKEDITSKNIFEKVVDKSFEKKGIYQIKENLKMFYGNSFDKVDKDELKKFFVNMLEAITSVRHRIVHYNINTNSENIFDFSNIEVSKLLKNIFEKEIDTRELKLKIFRQLNSAGVFDYWESWVIKKYLENVKFEFVNKNVPFVPSFKKLYDRIDNLKGWNALKLGNNINIPKRKEAKDSQIYLLKNIYYGEFVEKFVNDNKNFEKIVKEIIEINRGAGTNKKTGFYKLEKFETLKANTPIEYLEELQSLHKISYDKEKIEEDKDIYVDFVQKIFLKGFVNYLKKLDSLKSLNLLNLRKDETITDKKSVHDEKLKLWENSGSNLSKMPEEIYEYVKKIKISNINYNDRMSIFYLLLKLIDYRELTNLRGNLEKYESMNKNEIYSEELTIINLVNLDNNKVRTNFSLEAEDIGKFLKSSIPIKNVAQLNNFSKIFADGENVIKHRSFYNIKKYGILDLLEKIVAKADLKIAKEEIKKYENLQKELEKNDFYKIQEKIHRKYNQKPNLILRTENKKDFNDYKKAIENIQNYTQLKNKIEFNDLNLLQSLLFRILHRLAGYTSLWERDLQFKLKGEFPEDKYIDEIFNFDNSKNKIYNEKNKRGGSIVSKYGYFLAEKDGEIQESRARDKKKKKIIKKEGLEIRNYIAHFNYIPDAEKSILEMLEELRELLKYDRKLKNAVMKSIKDIFKEYGFIVEFTISHTKNGKKIKVCSVKSEKIKHLKNNELITTRNSEDLCELVKIMLEYKELQK

SEQ ID NO: 328 - protein, 1210 aa, Artificial
  Synthetic
MKITKRKWEDVPPLFFHRDKDSGRLIRQDDREHDYTDELFRKTTVDSIFIRSLQNRLLRSQDKEGNKIGRNEITELVENLCKGAEIQKSIDEIKDSKSNVKALCDKTLTDYGKSFAAEEGRTTLYEAILNLAKGNAIQKAMAEAELKQIHEALKKEKEDRINRVQNSIKNNKIPLKVNEDGTISANNDRASWLLELLKPVASEHDKGDRYPVLTEMEGIVSFDKLCEEVRNKIHGRKGRTRSIAMSVDEAVKEYLKELWKKHADRHRDMRYYFQAVKEYFKENFPIRTKQKGAGIRQSLLKEDTVVARLLDPKHMAKAVRRKLINQSIQMHILYGKLYEYCCREDRNLPANSETLQLIQVLEAFKKQLMTAVLWSVSRLCYFYEFYSGDILLAEEYRRDFLNQKNDHKDIQACKEKLQDFFPLAELQEKIRECADKDINNIKDKITNDVLACNNLLEECVFCISKLRNNIFHYKNLSFTQALKHIANENKEEDIPIILRLYKQDCENVNKAFANRISSMNLPLYYSTEFLLRIFKKQGAELSLYSTKNQMTPSFKRVYERGKNLRLEYEREPMRSNIANEYDKDPQSDYWMRWFSQFATGTVDTNAGIKGEMEDYPHASVNLGIEIEAGTNIDAQRAMRNLLQLIYKHHFLPEVQKDETVVTDVIPKVLERNRKLSEVRNRSDKTYGYKEIEELCKKNKGKKDSLSELMKDLQRKVSETEKEKRELAREKTDYAQRFILDIFAEAFCNFMDERYEDEYQEIMSPIKNEEEAKKWTEMFTDKADKDNKDKLLVLKTSFDKDNVEKYLLVLYPLMRLLDDKELSELQQQMLRFRASVSGWQGGTDFSEDIAMAEKIEELAELVKLTEPESQYAEEAWKNRAIGVFEQFVEGKMAEYGTFYIQNDSLTQVPRGNMRKLLRSGVIGVYNKVLASCKQATKADYGAYSGDHWSIEDPDGNPIKSAEQAQALLQRLHKKYTESPSQFSDDDHKLYDKTLRQLDAYNRAMKNLSFGSLYEICRIHMETLSRWVGFVQDWERDMYFLLLAWTKQGKLLNVTETDVIEIFEKGSVIYKMNKKLKNGDRYAFTSIYRNNNDEKLEFLQIRNFIAHLHLLRKSEWKGDKKAGYSVIEDYINKLRFLLSYDQKRMNAVTKAMQQIFEKHKVIVKFMVEKGGMLKVKDVKPGIIEHLKQTKRIEIPCHGERFTDSLLVLMKYQ

SEQ ID NO: 329 - protein, 1396 aa, Artificial
  Synthetic
MAKHLRPISESYTDFREPEKDRRLGRGLHHDHEGDQIRPAALPGYLSANPKALLRQTIAILDKVVKKRNRLSAMHPEAYRDRVYLAEALWMRLISRIREVEKIDEAEISELRRLWNAKSHPYAMYEVVPSGPLNDRNGQAIQKYRDADGPEDPVIARTDFEGVWHGRFWQEDPGRVDYGAIADRIIAHLFDQEIVIGGGPRRIGSVSVPEGDPNGTPGPETARGLIVARGEAISRSASDPRTPSGKLQAQATWTICAEARYFGDDGKGGSDIAKAIFEELEKPENHAGPIYPSWFGSRLFDHFGSFKKSLPLERKDPFKDQIWALHNAVRQYYQRLAKSDRFRIALRKAQADVPDKSELLSLLPKDRQHLLLVLGGKKRNAEMSEFIRLGKLFVHASDALHDFREDDPAALEAFEKRMTFLATSIGQSEIKQIETFARTWRSAVGLTLRTLKGLADPMANRGSPRNRDISTKEVMIDAFKQFDQRHFERHIPIIFGLKNLKGGDCPSRASIFTGNKHKFTGNKHKSQQAELLWAMMCVVSTVRNRTNHFNVRRALIRLLEGGIVHPIPGDPSKLNVANRKPQQVSPAALDAFKELLEFDLAIQKDAVRTALEQAKADEFVEMDNLKHLVAHLAGTDDITALNLPRFAAVMDKVRRLADNNDVDLAPGLVTLQKSLPPKDDQKESDAARCRYRLLLELYQSGFRGWLSGIQSDAEGNRELCHWAVQQVGRSKDARKTKYDARTKRYYRSPISLIDDLGLDRYDDISALLDALAAQSTREQGQDLKYTPDARVQRQGANRIEEFRQELFAHIFAKYLGKPGPEDPDFGWIGEIDTKRDCCDLGEVLKSFQPPEQAFRADWHSQFYAWLYMVPPIEASRLRHQMRKSASMDGKWSETLELSCGERKERDERAQGILADMDRLFSLYTKVQAAGFSGQEHEGALEEKGLFYQDASFFKEVYQEEGTANYHTTFPGTRSGLRQLVRYAHLPPLTGIFEKHKVTADEVKSFAGLHNEKRRDPDKINCVKQREGFRGEILQSIKDIPKPKDKSYSKFLSDLEEKCRNYQTVATAAAIHNFQANGARLNDHVRLHQIVMRVLTRLTDYALIWERDCLFAFVGMLYKETGGTGLKPAFGPGVRKNALPQIGILVTAPDLLRRAETESDHVFIPYLDPETGFDAPKFEDRCKLLSEVHCQKFQLHFIDAGERPSDQMLRSNEKPGGYDACKTFKRGTRKQDIRNDLAHQNILDHPGRRGLNLTYVVNAVRSLVSYDRKLKNAVPKSIKRILGEEGLIIEWQMKDDRLKKPTIYPDVETHLTMVPPHMMSAPVSFTLPRASVRLVSMTRAMFDFGGSGYGDEVVLAGKTVKQAVYPDAFTARFPQTPETLKKETRLVFTSEKEQISD

SEQ ID NO: 330 - protein, 1168 aa, Artificial
  Synthetic
MKVTKVDGISHKKYIEEGKLVKSTSEENRTSERLSELLSIRLDIYIKNPDNASEEENRIRRENLKKFFSNKVLHLKDSVLYLKNRKEKNAVQDKNYSEEDISEYDLKNKNSFSVLKKILLNEDINSEELEIFRKDVEAKLNKINSLKYSFEENKANYQKINENNVEKVGGKSKRNIIYDYYRESAKRNDYINNVQEAFDKLYKKEDIETLFFLIENSKKHEKYKIRECYHKIIGRKNDKENFAKIIYEEIQNVNNIKELIEKVPNMSELKKSQVFYKYYLDKEELNDKNIKYAFCHFVEIEMSKLLKNYVYKKPSNISNDKVKRIFEYQSLKKLIENKLLNKLDTYVRNCGKYNYYLQDGEIATSDFIARNRQNEAFLRNIIGVSSVAYFSLRNILETKNENDITGRMRGKTVKNNKGEEKYVSGEVDKIYNENKQNEVKENLKMFYSYDFNMDNKNEIEDFFANIDEAISSIRHGIVHFNLELEGKDIFAFKNIVPSEISKKMFQNEINEKKLKLKIFKQLNSANVFRYLEKYKILNYLNRTRFEFVNKNIPFVPSFTKLYSRIDDLKNSLYIYWKIPKANDNNKTKEITDAQIYLLKNIYYGEFLNYFMSNNGNFFEIIKEIIELNKNDKRNLKTGFYKLQKFENLQEKTPKEYLANIQSLYMIDAGNKDEEEKDAYIDFIQKIFLKGFMTYLANNGRLSLMYIGNDEQINTSLAGKKQEFDKFLKKYEQNNNIEIPHEINEFVREIKLGKILKYTESLNMFYLILKLLNHKELTNLKGSLEKYQSANKEEAFSDQLELINLLNLDNNRVTEDFELEADEIGKFLDFNGNKVKDRKELKKFDTKKIYFDGENIIKHRAFYNIKKYGMLNLLEKISDEAKYKISIEELKNYSNKKNEIEKNHTTQENLHRKYTRPRKDEKFNDEDYKKYEKAIRNIQQYTHLKNKVEFNELNLLQSLLLRILHRLVGYTSICERDLRFRLKGEFPENQYIEEIFNFDNSKNVKYKNGQIVEKYISFYKELYKDDMEKISIYSDKKLKELKKEKKDLYIRNYIAHFNYIPNAEISLLEMLENLRKLLSYDRKLKNVIMKSIVDILKEYGFVVTFKIEKDKKIRIESLKSEEVVHLKKLKLKDNDKKKEPIKTYRNSKELCKLVKVMFEYKMKEKKSEN

SEQ ID NO: 331 - protein, 1330 aa, Artificial
  Synthetic
MKREKNITIMKISKVNHRRTAVALNGDKSELGGILYEAPVQKDKNGNYNDVIAETGKVVNEALDKKSRLYTPFNNQKVIIDKNLQRYANNLKRCYINFVKQYVNNKSFNYKAMQFIPDIQNPKTNDAVNYRTDRDNVYNKNKYYDKQTKSKSKKFIYEKIVIPQNEKNIVISALVNCSLRKSLRKDVSYKTKSGEIKTYNLPELVKKSMRFYCLEGQREPDEKEKYEMYILFSYMKEDKRTKNTDLLVKSISNQNTKVKVEDIDGNKLLKLSIADTKKKPLWEYLIKYADSSRQRELMYDIRKKIILYVAGIEEYENIKEDSGLSKVSWSKYNISDNKMFFDINSCTDKRKQNLEIKIREANIEHYRNASSKLCDDESIFWFQHFEGVIETLFSKKSKISEERLGCAYICDYLWKDFLSYLAAKYIDLGKGVYHFTMKDKLDMLNKNEAVTDLRFGIVSEKYEKGITSFDYERIKAEEELDRNIAAYVTFAADIFAKSVIKSDYRTKKDNNSDVLQYSDKEFRNSEVIRDNAEKNILQYWGGYSRWGTENSKLPENNKVSDFGKLDVSDLCIDIKKHLAGIRNSSVHYTTKIKNESAADGSNVKILFEKDLADINIIYADKYYSNNVWMFYSLEDINKLIAFLYKEKRVIRQVQIPSFSRILKRKAMQDVINEIFKDDFDENIVNPELKEKYRNSLYFMLKEIYYNAFIIQPELKEKFKDKIKTMKSELYNKLKTIDKKEYKALYCMLSNEESALKNFADRIYSVDGDNVSFADICKILMTDYNMQNQEKKNIESMEQKKKNKGKDENYKHFPLLLHKVLKKLFIEYLKQTHELEFLRNNICIKSDVTMESFESQIKGVEIYKDLKEKIDKNNSLLDWYVIAHFLMPKQLNHLIGNIKNYIQFATNIDKRAESVKNLTESGMVKRIQYYDDIVRTLEFSAQYIGKISNNINDYFNSEDEYVSFLSKYVGFINDKSEDVLTELKDFCREKINNGSQIIGIYYGGDNVIINRNVIYAQMYSNAEVFSNIYKKVTKNDIINYYEKQNDLKDVFKSGVCQNEGEQRSLCEFQQLKNRIELTELSTYADMVNDFMAQFVEWAYLRERDLMYFQLGIHYIRLFYSDNVLDEKYHKLSDNVIDIEEGALLYQIVAMYDYELRIFETDNSGNAKRIGQGGPGKSIPVFLKKYCNGTDVYECGLELFEDINQHENIIGFRNDIAHMRYMSNQAMNIMSIVSNIYKSFFVYDTKLKKSISLVFKNILMRYGVIADLVFSYNNKNQSIKDDMDINIINIKNLKSDKYVYKIVNEDIVKQVEIEIRNQVFLEQLHNLLYFSR

SEQ ID NO: 332 - protein, 1330 aa, Artificial
  Synthetic
MKREKNITIMKISKVNHRRMAVALNGDKSELGGILYEAPVQKDKNGNYNDVIAETGKVVNEALDKKSRLYTPFNNQKVIIDKNLQRYANNLKRCYINFVKQYVNNKSFNYKAMQFIPDIQNPKTNDAVNYRTDRDNVYNKNKYYDKQTKSKSKKFIYEKIVIPQNEQNIVISALVNCSLRKSLRKDVSYKTKSGEIKTYNLPELVKKSMRFYCLEGQREPDEKEKYEMYILFSYMKEDKRTKNTDLLVKSISNQNTKVKVEDIDGNKLLKLSIADTKKEPLWEYLIKYADSSRQRELMYDIRKKIVLYVVGIEEYENIKEDSGLSKVSWSKYNISDNKMFFDINSCTDKRKQNLEIKIREANIEHYRNASSKLCDDESIFWFQHFEGVIETLFSKKSKISEERLGCAYICDYLWKDFLSYLAAKYIDLGKGVYHFTMKDKLDMLNKNEAVTDLRFGIVSEKYEKGITSFDYERIKAEEELDRNIAAYVTFAADIFAKSVIKSDYRTKKDNNSDVLQYSDKEFRNSEVIRDNAEKNILQYWGGYSRWGTENSKLPENNKVSDFGKLDVSDLCIDIKKHLAGIRNSSVHYTTKIKNESAADGSNVKILFEKDLADINIIYADKYYSNNVWMFYSLEDINKLIAFLYKEKRVIRQVQIPSFSRILKRKAMQDVINEIFKDDFDENIVNPELKEKYRNSLYFMLKEIYYNAFIIQPELKEKFKDKIKTMKSELYNKLKTIDKKEYKALYCMLSNEESALKNFADRIYSVDGDNVSFADICKILMTDYNMQNQEKKNIESMEQKKKNKGKDENYKHFPLLLHKVLKELFIEYLKQTHELEFLRNNICIKSDVTMESFESQIKGVEIYKDLKEKIDKNNSLLDWYVIAHFLMPKQLNHLIGNIKNYIQFATNIDKRAESVKNLTESGMVKRIQYYDDIVRTLEFSAQYIGKISNNINDYFNSEDEYVSFLSKYVGFINDKSEDVLTELKDFCREKINNGSQIIGIYYGGDNVIINRNVIYAQMYSNAEVFSNIYKKVTKNDIINYYEKQNDLKDVFKRGVCQNEGEQRSLCEFQQLKNRIELTELSTYADMVNDFMAQFVEWAYLRERDLMYFQLGIHYIRLFYSDNVLDEKYHKLSDNVIDIEEGALLYQIVAMYDYELRIFETDNSGNAKRIGQGGPGKSIPVFLKKYCNGTDVYECGLELFEDINQHEHIIRFRNDIAHMRYMSNQAMNIMSIVSNIYKSFFVYDTKLKKSISLVFKNILMRYGVIADLVFSYNNKNQSIKDDMDINIINIKNLKSDKYVYKIVNEDIVKQVEIEIRNQVFLEQLHNLLYFSR

SEQ ID NO: 333 - protein, 1330 aa, Artificial; identical to SEQ ID NO: 332
  Synthetic

SEQ ID NO: 334 - protein, 1223 aa, Artificial
  Synthetic
VKLSKRKINADGKAVAFYRDLFHGKLYLVSEKHDYTRETVDKMDFERSWRGRILKDAEKKFNPFYSIVDGLVKSDRNVTININLSNGNKSSDVGMLIRDNLTWFGRRLKAPDSEYTLEALICKILAGENQDEIRANLEKLKNIIQESIERQKDGLCKSIQNNRIPFSLNGDKIEASSKKMKWLYSFLDGKIDEHMLDDYWVIYKYNELENKINQNVDGIKNKDARSISKAVSKAVHEHHHQIRIRGINNDQLLFLKAVEQHFKKYYPVKSKHSSNVYDEKLKQEKNYKFYYSENFVKGEVRRSIVNQLVSGLIQQGKLLHYFYDETQGWQKDYLNSYGLSYIQVEEAFKKSLMDSISWAINRLYYFVYDPDDSENEINDNIVTLYRDIISALGNITIDENGNLYDKINNPITCETKNGPQIVKLMSRIYYHEVKDEKGNNFYPEQDKFSKKVAQYFPIRDKDSFNTIARLFYEAKESIAHLRHQNFHYRKNSLIDILASSKGSWNKSKLMLVRDIYYIHNYFREHIRSTGILDYYPVEFLKECIEACGLNFNLYAPNNSLWPSFSKVYKKGSNLYKSEKDHKGLKWYIEVANHDAGSLAYKNFLKLIYYHSFLPAVTQEQSLITNFINSTKKWNREEAGKAAQRRNNDKSKNSDSSVKAYRYEAMPDYKGEPLADYFKALQKEQIAQANKVQEGEAEKNNYILFIQDVFVRAFDDYLSRLEKYREKLQSPTKQDINVNDALEMLVPKARGKSSIRMKCSFEGTHNIEDNILCFYPFLRLLDAKELSTLQHQFVRYRCSLNERTLPESQETMKEELIKFLIELEELIELVRFTIPATRSDKVESVYKTMFEVHFSDFLDKDVLKNQECSRLYLQSNGKTAIPRKHMMLLARSAPMPLYRKMFKDYYRITEAECLEYIKLGQTIEQDINKLTELHKELEKARLKFNLEDNHNGKSDPNYDKLVQKVKDYAEKLQCVVRYKHLRRKLTFESLYKLFSIHVDLHGVMLAFVQNWERDMFFLLTALKYMGYVKGKSDDCVDRIFAKGKVIHNLLNSKEYLRDDDKNLLASLCWNESSKSNIKENKIKVRNVISHLNHFTQSSNNKQPSIEEMINNLRYLLYYDRKRQNAVTKSIKDLMLKEHNIKISWKNATNAQGNVELKTKRVEDATIEHLKHICKGKSCNSNKVPCPINQNDKANSCGLLEQSNSTELLRCLDRLITFEYTSANP

SEQ ID NO: 335 - protein, 1217 aa, Artificial
  Synthetic
MKITKRKWENIPPVFIYRDVESGKLFTECDRQQDYTDKLFQDECSASDVFKISLQNRLFRMQKDGKTRVKNEITELVACLCKNTDLRNSINKVKKLPLNVAEKKCNETLSDYGKSFTAEGGTKTLFNALLDLVKGNDEERALAEAELVKIQKILQEEIKHRKKRIYSSIRNNKIPLLIKEDGSIEANSDRTAWLLDLLQPVQSSLQHDSDDFYPVLTEMEKIFDYDKLSNDINRQLTLCDGKTRSIAKAADEVLKKHFHELWENHPDNHRHMKYYFQAVKEYFKENFPIKAKTAGARKRQDLLTDKAVLSRLLEPKHMANVVRRKLINQSTQMHILYGKLYEYCCKGDKRLPVNSDTLQRIQVTEAVKKQVMTAVLWSISRLCYFYQYDGDILNDKNVVDVKDYRENFLVKQYTTAFVQACKEKLQYFFPLDKVQDAYNDENVAILKIIRDDRQLCNKLLKECVTCVKHLRVNIFHYKNMGFAQTLKKISAEIENELDKSTSILLWLYQNDRKNLGKAFANRIRSMNLPLYYSNDLLTRIFTKQGLEFSLYSPNNQMTPSFKRVYERGKNLRSEYERRLIHECTTKGHDVKTSLENECELKWFRQLKNMTVTSESVINTDIKNDITGNIDNESELEMDAFFESETYISADSDAQRALQNLLQLIYKHHFLPEVMKDDTIVTSKVSKVLDRNRTLAVDRSKSDKASDFGYRAVEEIYHDGMKLSELMKELQRKISETEKKNEELEQDKTDYAQRFVRELFAEAFNDFLQERYGEEYYDMMHPQRNERDEKEWINESVNLRTSFDENKIEGYLLVFYTVMRLLDGKELSELQQQMLRFRASMLNWTGEADFDEDIKMIEKIEELAELVRLTEAAPVYTEEVWRKRAKEEFNQLIEGDMSDYGTFYLQTDGSSPVLHRSMLKLMRSGVMGVYRQVLHDRKQATKHDYNIYCDRHWVLMDSDRRMVTFAEYAQRILQELHDKYATSPKCFPQTDHRSYGNILQWIDEYNHAKSNLNFETLYEICSIHMEILSRWVGFVQDWERDMYFLLLAWVKQGKLYGISEEDILSIFEKGKIVSKLKSKLKGGNTNAFFSIYRLDKDKETDFIRVRNDIAHLDLLREKGWTDVENKDCSVMEWYINRLRSLLSYDQKRMNAVTKTMQKIFERHKAEVTFRVERGGKIKFDSVNPVMIEHLKEFKGISVPSRGETFISNLEKLMKYSGR

SEQ ID NO: 336 - protein, 1210 aa, Artificial; identical to SEQ ID NO: 328
  Synthetic

SEQ ID NO: 337 - protein, 1405 aa, Artificial
  Synthetic
LFLWIIEEIIYEIIKLYKDLKEEIIMGNLFGYKRWYEVRDKEDYKIKRKVKVKRNYDGNKYILNINENNNKEKIDDNKFIREFVNYKKNDNVLREFKRKFHAGNILFKLKGKERIKRIENDDDFLETEEVVLYIEVYGKSEKLKALGITKKKIIDEAIRQGITKDDKKIEIKRQKIEINIRDKYTNKTVDDCSVILRIIENDELETKKSIYEIFKNINMNLYKIIEKIIVNKTEKVFENRYYEEHLREKLLKDDKTEVILTNFMEIREKIKSNLEIMGFVKFYLNVGGDKKKSENKKIFVEKILNINVDLTVEDIVDFIVKELKFWNITKRIEKVKEFNNKSLENKRNRTYIKSYVLLDKHEKFKIERENKKDKIVKFFVENIKNNSIKEKIEKILAEFKINELIKKLEKELKKGNCDTEIFGIFKKHYKVNFDSKKFSKKSDEEKELYKIIYRYLKGRIEKILVNEQKVRLKKMKKIEIEKILNESILSEKILKRVKQYTLERIMYLGKLVHNNIDMTTVNTNDFSMLHAKEELDLELITFFASTNMELNKIFSRKNINNDGNIDFFGGDGEKNYILDKKISNSKIEIIRKLDFIDNKNDITNNFIEKFIKIGTNERNRILHANNKGREIQEAKDNYGKVTKIIEDLKISDEEVSKALNLDVVFKDKKNIITKINDIKISEENNNDIKYLPSFSKVLPEILNLYRNNPKNEPFDTIETEKIVLNALIYVNKELYKKLILEDDLEENGSKNIFLQELKKTLGNIDEIDENIIENYYKNAQISASKGNNKAIKKYQKKVIECYIGYLRKNYEELFDFSDFKMNIQEIKKQIKDINDNKTYERITVKTSDKTIVINDDFEYIISIFALLNSNAVINKIRNRFFATSVWLNTSEYQNIINILDEIMQLNTLRNECITENWNLNLEEFIQKMLDVEKEIGNFEIKTKKEIFDIHYEEIKNDMIVKINDNKIQKILNKCLKEITGFSSNNEYMFKNLGKLTLEERDFILSNKKLIEKNIDEIIGEKLDAIKEKVLLKKVFNSEFLEKYKEEIDNLVEDTESENKNKFEKIYYPKEHKNELYIYKKNLFLNIGNPNFDKIYGIISKDIKNANTEILFDDDIRKNKISKIDAILKNLNDKLNGYSNDYKAKYVNKLKENDDFFAKNIQNENYSSLGEFEKDYNKVSEYKKIRDLVEFNYLNKIESYLIDINWKLAIQMARFERDMHYIVSGLNYLYIIRLEKDRNQDRSSPYPKYKNGVLDYTKSYYNFKDYQEFMDICLKFGINLSENSEINKPENESIRNYISHFYIVRNPFADYSIAEQIDRVSNLLSYSTRYNNSTYASVFEVFKKDVDLDYDELKKKFKLIGNNDILERLMKPKKVSVLELESYNSNYVKNLIIKLLTKIEKTNDKL

SEQ ID NO: 338 - protein, 1135 aa, Artificial; identical to SEQ ID NO: 147
  Synthetic

SEQ ID NO: 339 - protein, 1360 aa, Artificial; identical to SEQ ID NO: 101
  Synthetic

SEQ ID NO: 340 - protein, 1388 aa, Artificial; identical to SEQ ID NO: 102
  Synthetic

SEQ ID NO: 341 - protein, 1330 aa, Artificial
  Synthetic
MKREKNITIMKISKVNHRRTAVALNGDKSELGGILYEAPVQKDKNGNYNDVIAETGKVVNEALDKKSRLYTPFNNQKVIIDKNLQRYANNLKRCYINFVKQYVNNKSFNYKAMQFIPDIQNPKTNDAVNYRTDRDNVYNKNKYYDKQTKSKSKKFIYEKIVIPQNEQNIVISALVNCSLRKSLRKDVSYKTKSGEIKTYNLPELVKKSMRFYCLEGQREPDEKEKYEMYILFSYMKEDKRTKNTDLLVKSISNQNTKVKVEDIDGNKLLKLSIADTKKKLLWEYLIKYADSSRQRELMYDIRKKIILYVAGIEEYENIKEDSGLSKVSWSKYNISDNKMFFDINSCTDKRKQNLEIKIREANIEHYRNASSKLCDDESIFWFQHFEGVIETLFSKKSKISEERLGCAYICDYLWKDFLSYLAAKYIDLGKGVYHFTMKDKLDMLNKNEAVTDLRFGIVSEKYEKGITSFDYERIKAEEELDRNIAAYVTFAADIFAKSVIKSDYRTKKDNNSDVLQYSDKEFRNSEVIRDNAEKNILQYWGGYSRWCTENSKLPENNKVSDFGKLDVSDLCIDIKKHLAGIRNSSVHYTTKIKNESAADGSNVKILFEKDLADINIIYADKYYSNNVWMFYSLEDINKLIAFLYKEKRVIRQVQIPSFSRILKRKAMQDVINEIFKDDFDENIVNPELKEKYRNSLYFMLKEIYYNAFIIQPELKEKFKDKIKTMKSELYNKLKTIDKKEYKALYCMLSNEESALKNFADRIYSVDGDNVSFADICKILMTDYNMQNQEKKNIESMEQKKKNKGKDENYKHFPLLLHKVLKELFIEYLKQTHELEFLRNNICIKSDVTMESFESQIKGVEIYKDLKEKIDKNNSLLDWYVIAHFLMPKQLNHLIGNIKNYIQFATNIDKRAESVKNLTESGMVKRIQYYDDIVRTLEFSAQYIGKISNNINDYFNSEDEYVSFLSKYVGFINDKSEDVLTELKDFCREKINNGSQIIGIYYGGDNVIINRNVIYAQMYSNAEVFSNIYKKVTKNDIINYYEKQNDLKDVFKSGVCQNEDEQRSLCEFQQLKNRIELTELSTYADMVNDFMAQFVEWAYLRERDLMYFQLGIHYIRLFYSDNVLDEKYHKLSDNVIDIEEGALLYQIVAMYDYELRIFETDNSGNAKRIGQGGPGKSIPVFLKKYCSGTDVYECGLELFEDINQHEHIIRFRNDIAHMRYMSNQAMNIMSIVSNIYKSFFAYDTKLKKSISLVFKNILMRYGVIADLVFSYNNKNQSIKDDMDINIINIKNLKSDKYVYKIVNEDIVKQVEIEIRNQVFLEQLHNLLYFSR

SEQ ID NO: 342 - protein, 1208 aa, Artificial
  Synthetic
MQIIKPYGRSFTETNQRVLLDKHRDKHDISPFAASHEKLVIAQWVSVIDKIVRKPNPKAKISLPTPQQYQLRETLGNAAWLELNKRLPCSDHAVFWRSKIHPYGHATQEQEPAPLLQGRWYQRFVGDIEPTAITENVAQIIAERIASHLYEAELRLSPEAEPRGKGKIQAQAESIEKNTLHQPKLSATWCDADWTAYNRHDVAERIYLEAKFRLEQKQEARKNKQPMQLEWRIDRSLTGKILFEHWAKVYSGTDGKSRITEAKQEKPGLFHLHMAVKDFYTRLFDRDRRDETLVEFLLPRKKKALREKLEQKSKNTDLAASIRLGKILYYREAESETVPLANSRFWGSEGQAEIKRAEAFVRVWRHVLGQSNLTLANWASLASPDELWEKDSFDSKFLDHVEKLFAKDNGLDKRRQEFDQNLNLLLGDGASAFMADDDSRQAAIRLAYDVGSALRHAAFHFKGRDKFLEVLDKDLSDKGQASGLLLPLNKLLATAQEKQDERLLATLEGAHVFQVCTQAQVQQLVNSICAIPTGDLPLPRFGRVIERNHNAGLKTGLPSRVNRQAMEQNPAQKCQYVVLKMLYERPFRVWLEGATDAMLSTWLTTALNRSTTAARNNPDVSRKPQDERELVTSRAAKLPIAIGGKDGQGKNKSIRQFFHDLSAATASEMRVQRGYASDAEKAREQAEYIDELLRDVVALAFKDFLDGKGLCWLLDIDPKQALQPIRCCPTENIQLPASTLQIVNWQPVLYFLLHLMPVGEVSQLLHQLAKWEILAKPEQARNDTEGIRIKALQHTLKLYLDMHDSQYTGDDAMPTVERDVLTTFSSFYENPRVFAQVFENQGNGRERAQYLPQRGLREIRRFGHTPVLQTLVKKKITAEDVSRCLTAEAPLKNGIYSVVAEAQSQREALHAQWVKERKQFEWYQDYAAALKKVVAHRQDSNHIRLVDHVAAHRIVMKVLARLADFSGLFERDLTFVTLATLHEHQLKPEDFFVTDNPPKYNKKGKMEDDGLTLFKKGQIIEAMGKVQVSRNAVKQAIVGRVNLDLYRSIRNDFAHFNMLYGKQRTTESPSNKMLRCSVAMGLNVTCWVNCARDLMSYDRKLKNAVSQSIMELLEREGFILTWEMNSHHQLCNATLESRVVHHLGDKKFPLKEDKRAFCRITESLHSDAFVRMLAVAFGGAAHPNQDIGTLDLQTVNWEGAKAKWAGSQ

SEQ ID NO: 343 - protein, 1387 aa, Artificial; identical to SEQ ID NO: 93
  Synthetic

SEQ ID NO: 344 - protein, 1412 aa, Artificial
  Synthetic
MKLSKEKHTRSAVANNGDIKSAEVNNGNTKSEEVNNGDTRSAVANEEQNIGGILYRFPGKSIDGVKDQMLRRDKEVKKLYNVFNQIQVGTKPKKWNNDEKLSPEENERRAQQKNIKMKNYKWREACSKYVESSQRIINDVIFYSYRKAKNKLRYMRKNEDILKKMQEAEKLSKFSGGKLEDFVAYTLRKSLVVSKYDTQEFDSVAAMVVFLECIGKNNISDHEREIVCKLLELIRKDFSKLDPNVKGSQGANIVRSVRNQNMIVQPQGDRFLFPQVYAKENETVTNKNVEKEGLNEFLLNYANLDDEKRAESLRKLRRILDVYFSAPNHYEKDMDITLSDNIEKEKFNVWEKHECGKKETGLFVDIPDVLMEAEAENIKLDAVVEKRERKVLNDRVRKQNIICYRYTRAVVEKYNSNEPLFFENNAINQYWIHHIENAVERILKNCKAGKLFKLRKGYLAEKVWKDAINLISIKYIALGKAVYNFALDDIWKDKKNKELGIVDERIRNGITSFDYEMIKAHENLQRELAVDIAFSVNNLARAVCDMSNLGNKESDFLLWKRNDIADKLKNKDDMASVSAVLQFFGGKSSWDINIFKDAYKGKKKYNYEVRFIDDLRKAIYCARNENFHFKTALVNDEKWNTELFGKIFERETEFCLNVEKDRFYSNNLYMFYQVSELRNMLDHLYSRSVSRAAQVPSYNSVIVRTAFPEYITNVLGYQKPGYDADTLGKWYSACYYLLKEIYYNSFLQSDRALQLFEKSVKTLSWDDKKQQRAVDNFKDHFSDIKSACTSLAQVCQIYMTEYNQQNNQIKKVRSSNDSIFDQPVYQHYKVLLKKAIANAFADYLKNNKDLFGFIGKPFKANEIREIDKEQFLPDWTSRKYEALCIEVSGSQELQKWYIVGKFLNARSLNLMVGSMRSYIQYVTDIKRRAASIGNELHVSVHDVEKVEKWVQVIEVCSLLASRTSNQFEDYFNDKDDYARYLKSYVDFSNVDMPSEYSALVDFSNEEQSDLYVDPKNPKVNRNIVHSKLFAADHILRDIVEPVSKDNIEEFYSQKAEIAYCKIKGKEITAEEQKAVLKYQKLKNRVELRDIVEYGEIINELLGQLINWSFMRERDLLYFQLGFHYDCLRNDSKKPEGYKNIKVDENSIKDAILYQIIGMYVNGVTVYAPEKDGDKLKEQCVKGGVGVKVSAFHRYSKYLGLNEKTLYNAGLEIFEVVAEHEDIINLRNGIDHFKYYLGDYRSMLSIYSEVFDRFFTYDIKYQKNVLNLLQNILLRHNVIVEPILESGFKTIGEQTKPGAKLSIRSIKSDTFQYKVKGGTLITDAKDERYLETIRKILYYAENEEDNLKKSVVVTNADKYEKNKESDDQNKQKEKKNKDNKGKKNEETKSDAEKNNNERLSYNPFANLNFKLSN

SEQ ID NO: 345 - protein, 1432 aa, Artificial
  Synthetic
MKISKIKNSRPGISVGENKNEAQLSRQSLLYYAPVKDGKVRMESKDLEQHVTECNEKAQKLYNVITPEIDLCKEENREWIVEDLTKNFNAVINNALRSIKNPKEKREERVEKEVAFILNLNKNSIKIKKDVFVKSTDLIVKFSANNKYNKKNDKGTGSKEEAYIREMISNLVLRKLKKTLRKEVKLENGCKMQMTEITISLMSAICLYGNVESFDPVILKAFFEKVDSDYTKYKYVEQIVKSIESQSAKLKVAEKDGKHLLIPANADHRKKKYVFEFMRKYAAAGEKEKREITEHIQDLIGLYLCGKSGYENAENRFSDMTESHNCISGEIEEIFNEIEKLENSYKQKREEKKKTREELDKIQEVRKGNKRNTNSNNQNYKNNKTDSDKKENQADANENKLKENELRDKIRRLSKELENLDSEVRIKKEKLKNTTVKEMALKYRAAVNYLADEVGKTVLGEIKEKKVRSCADLYWIEYIDSTVEKLLLKSRNKDRYRYEIGFLSKHIWKEWTQYISGKYIEMGKGVYHFAIPDLSGALEGESVSICEVKPEYRNGVSGFDYERIRAEESLEREMEKYVLFAVNNFARAVTPEEEREKSGHEDVLLMKTLSEIEESQTEEERQKKHDNNVKNAITLYADADRRILQFFGGQSRFRKKEDSLINLYSGEDLYKEIRKELYAIRNITFHYTTKADKDQTQKHELTEYFFEEEFSDITELFREKYYTNNVWKYYDIEVINNIMGKIYCGRKYRAAQVPAFNNIISRPALPQLMDGFVKGNSLRRLMNCPDRDVIKKYWSSLFFVLKELYYYDFLQEQEKPEDNIKERFFRAMEKESGQAKDGKEQKAWESFENRIDQIGRERSFGAICQGLMVEYMLQNRDISMVQIETGDGKTNKKQIYKHYRTLLYICIRSAFTEYLREKWEELRTPVLTVKEWSKEEFCRTDGLKHLSLFDHLKETFNDAESGSFWYMAAHFINQKYLNHLIGSIRNYLQFTEDIEDRALSLGDCADNKREEKNLRYRNTLEILEFVAQFCERTTNVMEDYFESNQEYAAYLSGFVDYNVSKKETDIEKALYGFCRQKFKVDGKEYMAGIYYDGENLIPNRNIIRANMYGNVSCLKPYMDRITLKEIRTMYADQNKLDTVLREGVCRTEEEQKAYREYQNEKNRIELFDLCTYTQILNDMQARLIGWSYMRERDLMYYQLGYYYTKLFWTDAISEEDARRRLVGELVNVEDGVILYQILAFNSYNLPIIANKNNTVTFLKGEGSIGGKAITAFLKNYENAERIYEEALDLFENTDEHAAIINTRNYIEHFKYFIKSDRSMMDLYSEVYDRFFRHDHNRKKNVPDSLKNVLADNFMIADISMELGSKKVGEKKKGFREHKSARIEFTDKGIRSTDMTYTVKPDPKDSKKDEKVLVPARSEVFLKQFQKILEYRI

SEQ ID NO: 346 - protein, 1215 aa, Artificial
  Synthetic
VHGNAESFDPVILKAFFKEIDKDYMKNEQMEEIVRSIESQSVKAKVAEKDGKYLLLPANADHRKKKYAFEFMRKYAAAEAEGKQELTEHIQALIGLYLCGESEYQDAKNCFYDMVENHECMSGEIEEIYNTIKELKNLSRQKREERKEIKEKIREIEKSGKGDKRTPNNNSNKSCKNDKKDNDNKENDINLNENDLKKAIEEIDKELAKIPLEICINNEKLNNAVIKTMSVKYRAAVKYLVSKGKKTVLGEIKEKKDCSCADLYWIDYIDNTVKKLLLDSRNKGMYRYEISFLSNHIWKEWTQYISGKYIELGKGVYHFAIPDLSGALEGKPVSVCEVKPEYRKGISGFDYERIKAEESLDREMEEYVLFAVNNFARAAAPENEREKPGHEDVLIMKTSDELIAENKKNQEPIVLYKDADRRILQFFGGQSRFREKEDSFINLYSGEDLYKEIRNELYTVRNITFHYTTKAEKGQIQKHEMAEYFFEEELADISGVFRKKYYSNNVWKFYDMEVINDLMDKIYSGRKYRAAQIPAFNNIISRPALPQIINGFVKGNSLKKIMNYPDREIIKQYWSALFFVLKELYYYDFLQEQENPEENIRERFLRVLARKLEETSDAKEQKAWESFDKRISEIGRKRSFGEICQGLMIEYMLQNNDSPMVRKENIHKRTQSRDTQIYKHYRTLLYICIRDAFIEYLKEKWQGLREPVLIKKEWSEEEFCHPDNVEHLSLYDHLKDLFHSTASGPSWYIAAHFINPKYLNHLIGSIRNYLQFTEDIERRAVSLGKCVDNEREEKNLRYRNTLEILEFVLQFCGKTTKVMEDYFESNEVYAAYLSDFVDYKTPKNITDIETALHIFCEQKVNVDRKESMVGIYYDGGNLIPNRNIIRANMYGNVSCLKASMDKIKYAEIRKMYIDKSKLDSVLKEGVCRTKEDQKALKEFQNEKNRIELLDLSTYTEILNDMQAILIGWTYMRERDLMYYQLGYYYTKLFWTDSISEEDERRKLTGDEVNIEDGAILYQILAFNTYHLPVISNKKNTVSFVKDNGSIGGKALRAFFRNFENAIPIYLEGLNLFENTDEHDDIIDTRNYIEHFKYFIKSDRSMMDLYSEVYDRFFRHDHKLKKSVPEVLTNILARNFMDARIYMKLGSKQVVKEKTGVSREHKASKIVFTDKGIESTALTYTIKPDSKDNKKEAKILVDARSEVFLKQFQKILEYRA

SEQ ID NO: 347 - protein, 1161 aa, Artificial; identical to SEQ ID NO: 99
  Synthetic

SEQ ID NO: 348 - protein, 1001 aa, Artificial
  Synthetic
MICKKKLNQIQSIKNSLEKNKAHFKKESINNTTDRVKGNNKKSLFYEYYRNSSKHQEYVNNIFEAFDKLYSNSHEDINNLFLEITKDSNNRNIRKIREVYHEILNKNKTEFGEELYKKIQDNISNFDKLLEIEPEIKELTKSQIFYKYYIDKVSLDGTNIKHCFFHLVEIEVNQLLKNYVYSKRSTNKEKLENIFEYCKLRNLVKNKLVNKLNSYIRNCGKYNSYINNNDVVNSEKISEIRTKEAFLRSIIGVSSSAYFSLRNILNTDNTQDITNKVKGEVEKLYQENKKVKLEERLKLFFGNNFDINNQQEIEDFLMNIDKIISNIRHEIIHFKIEANAHSIFDFNNVTLGNKAKNIFNNEINEERIKFKIFKQLNSANVFDYLSDENITEYMGKVIFSFTNRNIPFVPSFRKIYNRVQDLANSLKIKEWKISDESEGKDAQIYLLKNIYYGEFLDDFLNEKNEKFIKIKDEIIELNKNQNKITGFYKLEKFEKIEEKNPKKYLEIIQSLYMINIEEIDNEEKNIFLDFIQKIFLKGFFEFIKNNYNYLLELKKVQDKKNIFDREMSEYIAGEKTLEDMEEINKIIQDIKITEIDKILNQTDKINCFYLLLKLLNYKEITELKGNLEKYQILSKTDIYEKELMLLNIVNLDNNKVKIENFKISAEEIGKFIEKISRNKKIKTFEELRNFEKRENTGEYYNVYSDDKNIKNIRNLYNIKKYGMLDLLERISEKSNYCIKKEVLKEYDKLKKKLEDKKTDFYKIQKDLHYKYQKEYKNFSKKNNPEDYEKYKESIKNIEKYVHLKNKIEFNELNLLQSLLLKILHRLVGFTSIWERDLRFRLIGEFSDELDVEDIFDHRERYRGTRGQICKKYDQFISVHIEYQNNNKMKNIKFDDNNPIRNYIAHFNYLPTPKYSILKMLEKLRELLDYDRKLKNAVMKSIKGILEEYGFEAEFIINPDKEIILNSVKSIEIIHLGKNDLKSHRNSEDLCKLVIAMLEYSE

SEQ ID NO: 349 - protein, 1412 aa, Artificial; identical to SEQ ID NO: 53
  Synthetic

SEQ ID NO: 350 - protein, 1208 aa, Artificial; identical to SEQ ID NO: 342
  Synthetic

SEQ ID NO: 351 - protein, 1101 aa, Artificial; identical to SEQ ID NO: 73
  Synthetic

SEQ ID NO: 352 - protein, 1168 aa, Artificial
  Synthetic
MKVTKVDGISHKKYIEEGKLVKSTSEENRTSERLSELLSIRLDIYIKNPDNASEEENRIRRENLKKFFSNKVLHLKDSVLYLKNRNEKNAVQDKNYSEEDISEYDLKNKNSFSVLKKILLNEDINSEELEIFRKDVEAKLNKINSLKYSFEENKANYQKINENNVEKVGGKSKRNIIYDYYRESAKRNDYINNVQEAFDKLYKKEDIEKLFFLIENSKKHEKYKIREYYHKIIGRKNDKENFAKIIYEEIQNVNNIKELIEKVPNMSELKKSQVFYKYYLNKEELNDKNIKYAFCHFVEIEMSQLLKNYVYKGLSNISNDKIKRIFEYQNLKKLIENKLLNKLDTYVRNCGKYNYYLQDGEIATSDFIARNRQNEAFLRNIIGVSSVAYFSLRNILETENENDITGRMRGKTVKNNKGEEKYVSGEVDKIYNENKQNEVKENLKMFYSYDFNMDNKNEIEDFFANIDEAISSIRHGIVHFNLELEGKDIFAFKNIAPSEISKKMFQNEINEKKLKLKIFRQLNSANVFRYLEKYKILNYLKRTRFEFVNKNIPFVPSFTKLYSRIDDLKNSLGIYWKTPKTNDDNKTKEIIDAQIYLLKNIYYGEFLNYFMSNNGNFFEISKEIIELNKNDKRNLKTGFYKLQKFEDIQEKIPKEYLANIQSLYMINAGNQDEEEKDTYIDFIQKIFLKGFMTYLANNGRLSLIYIGSDEETNTSLAEKKQEFDKFSKKYEQNNNIKIPYEINEFVREIKLGKILKYTERLNMFYLILKLLNHKELTNLKGSLEKYQSANKEETFSDQLELINLLNLDNNRVTEDFELEADEIGKFLNFNGNKVKDRKELKKFDTKKIYFDGENIIKHRAFYNIKKYGMLNLLEKISDEAKYKISIEELKKYSNKKNKIEKNHKMQENLYRKYARPRKDEKFTDEDYESYKQAIKNIEEYTHLKNKVEFNELNLLQSLLLRILHRLVGYTSIWERDLRFRLKGEFPENQYIEEIFNFENKKNVKYKSGQIVEKYIKFYKELHQNDEVKINKYSSANIKVLKQEKKDLYIRNYIAHFNYIPHAEISLLEVLENLRKLLSYDRKLKNAVMKSVVDILKEYGFVVKFKIGADKKIEIQSLKSEEIVHLKKLKLKDNDKKKEPIKTYRNSKELCKLVKVMFEYKMEEKKSEN

SEQ ID NO: 353 - protein, 1228 aa, Artificial
  Synthetic
MNNKSFNYKAMQFIPDIQNPKTNDAVNYRTDRDNVYNKNKYYDKQTKSKSKKFIYEKIAIPQNEQNIVISALVNCSLRKSLRKDVSYKTKSGEIKTYNLPELVKKSMKFYCLEGQREPDEKEKYEMYILFSYMKEDKRTKNTDLLVKSISNQNTKVKVEDIDGNKLLKLSIADTKKKPLWEYLIKYADSSRQRELMYDIRKKIILYVAGIEEYENIKEDSGLSKVSWSKYNISDNKMFFDINSCTDKRKQNLEIKIREANIEHYRNASSKLCDDESIFWFQHFEGVIETLFSKKSKISEERLGCAYICDYLWKDFLSYLAAKYIDLGKGVYHFTMKDKLDMLNKNEAVTDLRFGIVSEKYEKGITSFDYERIKAEEELDRNIAAYVTFAADIFAKSVIKSDYRTKKDNNSDVLQYSDKEFRNSEVIRDNAEKNILQYWGGYSRWGTENSKLPENNKVSDFGKLDVSDLCIDIKKHLAGIRNSSVHYTTKIKNESAADGSNVKILFEKDLADINIIYADKYYSNNVWMFYSLEDINKLIAFLYKEKRVIRQVQIPSFSHILKRKAMQDVINEIFKDDFDENIVNPELKEKYRNSLYFMLKEIYYNAFIIQPELKEKFKDKIKTMKSELYNKLKTIDKKEYKALYCMLSNEESALKNFADRIYSVDGDNVSFADICKILMTDYNMQNQEKKNIESMEQKKKNKGKDENYKHFPLLLHKVLKELFIEYLKQTHELEFLRNNICIKSDVTMESFESQIKGVEIYKDLKEKIDKNNSLLDWYVIAHFLMPKQLNHLIGNIKNYIQFATNIDKRAESVKNLTESGMVKRIQYYDDIVRTLEFSAQYIGKISNNINDYFNSEDEYVSFLSKYVGFINDKSEDVLTELKDFCREKINNGSQIIGIYYGGDNVIINRNVIYAQMYSNAEVFSNIYKKVTKNDIINYYEKQNDLKDVFKSGVCQNDDEQRSLCEFQQLKNRIELTELSTYADMVNDFMAQFVEWAYLRERDLMYFQLGIHYIRLFYSDNVLDEKYHKLRDNVIDIEEGALLYQIVAMYDYELRIFETDNSGNAKRIGQGGPGKSIPVFLKKYCNGTDVYECGLELFEDINQHEHIIRFRNDIAHMRYMSNQAMNIMSIVSNIYKSFFVYDTKLKKSISLVFKNILMRYGVIADLVISYNNKNQSIKDDMDINIINIKNLKSDKYVYKIVNEDIVKQVEIEIRNQVFLEQLHNLLYFSR

SEQ ID NO: 354 - protein, 1360 aa, Artificial; identical to SEQ ID NO: 75
  Synthetic

SEQ ID NO: 355 - protein, 1412 aa, Artificial; identical to SEQ ID NO: 53
  Synthetic

SEQ ID NO: 356 - protein, 1161 aa, Artificial
  Synthetic
MKVTKVDGISHKKYIEEGKLVKSTSEENRTSERLSELLSIRLDIYIKNPDNASEEENRIRRENLKKFFSNKVLHLKDSVLYLKNRKEKNAVQDKNYSEEDISEYDLKNKNSFSVLKKILLNEDINSEELEIFRKDVEAKLNKINSLKYSFEENKANYQKINENNVEKVGGKSKRNIIYDYYRESAKRNDYINNVQEAFDKLYKKEDIEKLFFLIENSKKHEKYKIRECYHKIIGRKNDKENFAKIIYEEIQNVNNIKELIEKVPDMSELKKSQVFYKYYLDKEELNDKNIKYAFCHFVEIEMSKLLKNYVYKKPSNISNDKVKRIFEYQNLKKLIENKLLNKLDTYVRNCGKYNYYLQDGEIATSDFIARNRQNEAFLRNIIGVSSVAYFSLRNILETENENDITGRMRGKTVKNNKGEEKYVSGEVDKIYNENKQNEVKENLKMFYSYDFNMDNKNEIEDFFANIDEAISSIRHGIVHFNLELEGKDIFAFKNIAPSEISKKMFQNEINEKKLKLKIFRQLNSANVFRYLEKYKILNYLKRTRFEFVNKNIPFVPSFTKLYSRIDDLKNSLGIYWKTPKTNDDNKTKEIIDAQIYLLKNIYYGEFLNYFMSNNGNFFEISREIIELNKNDKRNLKTGFYKLQKFEDIQEKTPKEYLANIQSLYMINAGNQDEEEKDTYIDFIQKIFLKGFMTYLANNGRLSLIYIGSDEETNTSLAEKKQEFDKFLKKYEQNNNIKIPYEINEFLREIKLGNILKYTERLNMFYLILKLLNHKELTNLKGSLEKYQSANKEETFSDELELINLLNLDNNRVTEDFELEANEIGKFLDFNGNKIKDRKELKKFDTNKIYFDGENIIKHRAFYNIKKYGMLNLLEKIADKAKYKISLKELKEYSNKKNEIEKNYTMQQNLHRKYARPKKDEKFNDEDYKEYEKAIGNIQKYTHLKNKVEFNELNLLQGLLLKILHRLVGYTSIWERDLRFRLKGEFPENQYIEEIFNFDNSKNVKYKSGQIVEKYINFYKELYKDNVEKRSIYSDKKVKKLKQEKKDLYIRNYIAHFNYIPHAEISLLEVLENLRKLLSYDRKLKNAVMKSVVNILKEYGFVAKFKIGADKKIGIQTLESEKIVHLKNLKKKKLMTDRNSEELCKLVKVMFEYKMEEKKSEN

SEQ ID NO: 357 - protein, 1139 aa, Artificial
  Synthetic
MCMKITKIDGISHKKYKEKGKLIKSNEIEKDVTEERFYDIKTKTTELFLKTLDFYVKNYEQCEEQNKERREKAKNYFSKVKLIIENRKITIFNENTEKIEIEGFNEYDVRDEKYFNVLNKILKEENCTEEDLEVFENDLQKRIGRIKSIKNSLEENKAHFKKESVNNTADRVKGNNKKSLFYEYYRISSKHQEYANNIFEAFDKLYSNSHEAMNNLFSEITKDSKNRNIRKIREAYHEILNKNKTEFGEELYKKIQDNISNFDKLLEIEPEIKELTKSQIFYKYYIDKVNLDETSIKHCFCHLVEIEVNQLLKNYVYSKRNINKEKLENIFEYCKLRNLVKNKLVNKLNNYIRNCGKYNAYISNNDVVVNSEKISEIRTKEAFLRSIIGVSSSAYFSLRNILNTDNTQDITNKVDKEVDKLYQENKKIELEEILKLFFGNYFDINNQQEIKVFLMNIDKIISSIRHEIIHFKMETNAQNIFDFNNVNLGNTAKNIFSNEINEEKIKFKIFKQLNSANIFNYLSNKDIREYMGKVVFSFINRNISFVPSFTKIYNRVQNLANSLEIKEWKIPDESEGKDAQIYLLKNIYYGKFLDKFLNEENGIFISIKDKIIELNKNKNQNEDKHCKFKKFESVNEKNPKKYLEIIQSLYMINIEKIDSERKNVFLDFIQRIFLKGFFEFIKNDYNYLLELKKVQDKKNIFDSKMSEYIAGEKTLEDMEEITEIIQDIKITEIDKILNQTDRINCFYLLLKLLNYKEITELKGNLEKYQILSKTNIYEKELMLLNIVNLDNNKVKIENFKISAEEIGKFIEEINKNKKIKTFEELRNFEKGENTGEYYNIYSDDKNIKNIRNLYNIKKYGMLDLLEKISEKTNYCIKKKDLEEYSKLRKQLEDEKTNFYEIQKYLHFKYQKKPKKILWKNNKNDYEKYKKSIENIEKYVHLKNKIEFNELNLLQSLLLKILHRLVGFTSIWERDLRFRLTGEFPDELDVEDIFDHRKRYKGTGGGICKKYDRFINTHTEYKNNNKMENVKFDDNTPVRNYIAHFNYLPTPKYSILKMIEKLRKLLDYDRKLKNAVMKSIKDILEEYGFKAEFIINSDKEIILNPVKPVEIIHLGKEDLKSRRNSEDLCKLVKAMLEYSK

SEQ ID NO: 358 - protein, 1191 aa, Artificial
  Synthetic
MKVTKIDGLSHKKFEDEGKLVKIEDASQKNETLERLENLKGIKLGNYIKNPDKTKNKDNKKRRKGLKEYFSEITLRKENEKYVLLKGKKLKKINNDIKDTDIKAKDKKEEVFDILKEILKLNLLANDAEEKIQFDSIKLKNVFGKDFVKKELQIKSIEESLEKNKADYRKEFIETENHKYGNVKGKNKRSRIYEYYKKSENHKKFEDNIREAFEKLYTEENIKELYSKIEQVLKKTHLKSIVREFYQNEIIGESEFSKKNGDGISILYNQIKDSIKKEKNFIEFIENIGNLELKDLTKSQIFYKYFLENEELNDENIKFVFCYFVEIEVSDLLKGNVYKASKIYENKIKNIFEYGKLKNLIVYKLENKLNNYVRNCGKYNYHMENGDIATSDINMRNRQTEAFLRSMIGVSSFGYFSLRNILGVNDDDFYEIEEDLTEEERKNESNVLKKAKEDITSKSIFEKVVDKSFEKKGIHSIRENVKMFYGDSFDKANEDELKQFFVNMLNAITSIRHRVVHYNMNTNSENIFNFSDIEVSRLLKSIFEKETDKRELKLKIFRQLNSAGVFDYWEDWEIEKYLKNIEFKFVNKNIPFVPSFTKLYNRIDDLKGNNALKLGAINIPKRKEARDSQIYLLKNIYYGEFIEKFVNNNDNFEKIFREIIEINKNAGTNTKTKFYKLEKFETLKANTPTEYLEKLQSLHKINYDKEKVEEAKDIYVDFVQKIFLKGFINYLQKSNSLRPLNLLNLKKDEVINSEKSSYDEKLKQWENNGSNLSKMPEEIYEYIKKIQINKINYSDRMSIFYLLLKLIDHKELTNLRGNLEKYESMNKNKIYSEELNIVNLVSLDNNKVRANFSVEAEDIGKFLKTETLIKDARQLNNFSERFSDGENVIKHRSFYNIKKYGILDLLEKIVAKADLKITKEEIKKYENLQKELEKNDFYKIQEKIHRKYNQKPNLISRTENKKDFNDYKKAIENIQNYTQLKNKIEFNDLNLLQSLLFRILHRFAGYTSLWERDLQFKLKGEFPEDKYIDEIFNSDGNNNQKYKNGGIADKYADFLIEKEEEKSGEILKKNQRIKRKKKIKEDLEIRNYIAHFNYFPDATKSILELLEELRELLKYDRKLKNAVMKSVKDIFKEYGFIVEFGISHESNSKKIKVVNVESEKIKHLKNNGLVTTRNSEDLCDLVKVMLEYKKS

SEQ ID NO: 359 - protein, 1330 aa, Artificial; identical to SEQ ID NO: 324
  Synthetic

SEQ ID NO: 360 - protein, 1678 aa, Artificial
  Synthetic
MEDVEGAVYPVDLHSDGDGERDHGIISPVKEKVEETLPEFICKGTYKGVPLCDDNKNRIRGRKGKYHLFVLLKSDAGKKHLLAENANMLVKDDWAANRYFHMASSVVNRLIFHNPLYSGGQMPAIKLDIATRATGDIDKMGNGIKEEFQKQKYRVKKGNNREYYSIMNADIYRTLIAQEMVNSGKINIRIEKLNIKSICYDSSGQGMEFLYLADSICSILGYRLTKTGSSADDWLVQIKERICDLNRDNENLIFGYDEIDNYFSNAWGQFENKDMFKALSVIYDAKWMKGEFAKHYQNEWFPFLEEQLRRRATPELFLQSVDQLHAFLQTNNIDQEKLLYIMQQLESMVEGVSNRFKSKESKERALYKLYDAGVAVYCHIGDATKAQGYYEKCRLHVVYVSLDDYMKTNNRLIVLLEDAFQWDEALNKAKENLDILQMIAKGATVSPKNFLDCLQKSAETIKFERRKKKSGNVVWVPVKLEEDYKKYGTSLQEQVEQAVHFNIKRSLSKETVIHSVCKILISFFQKNQITLKEEESRLLIQALDKDIRKEKQLKYIEKSIQLQNTKVQPVQVDGKTVLALSGAKHPKKKIIFDFLVRYANASQSDQENMLIQMRKWILLFVCGEQAYKEAEEKGISTRGFAAEHGDIPGTFGGDVYSKISDLQEIKKQDKGASERLKVSKLKKEIAAMINDTLTTVYREIKGMDGVAEEDMFWIEYIQKEVQKVLLKKNKLATGIEYKIQNKYLCNQVWKNWVSFIAGKYVDMGKGVYHFVMPECNSNINELEVCEVQDFYKKGISSFDYEMIKAEETLERDMAVAVTFAVNNFSRAIIKKESERTTSQNEDVLQYTEKEFEKYCDGENIHKNILQYFGGISKWEDCEIVHASGFEVFDTIKKNINCVRNASYHYSQNLEKREVRNKYVDMLCRHEVDNYTEIIKDKYYSNNLYRFYPESTLKRLMDELYSEVKERPAQIPAFNRIINKQKIAAFLSTVIKGNKLKKVIGNVEDASLFYPAMIFLLKEIYYNAFICNENCKKWVEEAALKNAENEKDKNKKEANKNFILRLEQLHTESFGDMCQQLMTALDLQNNRDHRVNTNADQLKYKHFRILLYNAIYEAFANFIKSKEQKLYSLYDAVREPVLQTNLKTREEFLSGWTAHRYDTKIDKITGNSILSAWYVTSHFLAPRQVNHLAGSMKNYRQFVNDIGDRRNKVESKQSYRKTEIYEDVVMVLELVDASSGQISNEVKDYFGSDEEYARHLSKYVDFSDEKAKNNMEEPSCRMLLQLFSENRQQTGDGDMIDIYYKNNVILNRNIVLSKMYGLDICENGWWQKVTLENDILNYYKLKRELSSGSKFTGTAVFEKGRCEFPEEQEKLKKFQNIKNRVELLDVMTYEEILIDLYSQLVSWAYMRERDLLYMQLGVAYLALNYGDKSYRTRSREMFGDDRLNSMEGPGPVNIKNGALLYQLIAMNNPCMTLYEVENGKATPAKKAGNSIGARVGCLYKGYLNCREEVYKNGLYFFENYQLHDYIVKHVRNEIDHFKYFRKPVKSLLELYSEIYTYFFTYDKKLQKSVTFILLNILEKYFVRAKIQMGYKKVEVKNDKKEMIPVIETDINIEKAHSLYMFYNQIKYREQDSKEDKKAYNDYKSRYDLDIGKGVLKLEARDDLFVKQLLELLSYKESMR

SEQ ID NO: 361 - protein, 1167 aa, Artificial
  Synthetic
MKVTKVGGISHKKYTSEGRLVKSESEENRTDERLSALLNMRLDMYIKNPSNTETKENKKRIGKLKKFFSNKMVYLKDNTLSLKNGKKENIDREYSETDISEYDVRDSKNFAVLKKIYLNENVNSEELEVFRKDIKKKLNKINSLKYSFEKNKANYQKINENNIEKVEGKSKRNIIYDYYRESAKRDAYVSNVKEAFDKLYKEEDIAKLVLKIENLTKLEKSKIREFYHEIIGRKNDKENFAKIIYEEIQNVNNMKELIEKVPDMSELKKSQVFYKYYLDKEELNDENVKYVFCHFVEIEMSKLLKNYVYKKPSNISNDKVKRIFEYQSLKKLIENKLLNKLDTYVRNCGKYNYYLQDGEIATSDFIARNRQNEAFLRNIIGVSSVAYFSLRNILETENKDDITGKMRGKTRIESKTGEEKYIPGEVDQIYYENKQNEVKNKLKMFYGYDFDMDNKKEIEDFFANIDEAISSIRHGIVHFNLDLDGKDIFAFKNIVPSEISKKMFQNEINEKKLKLKIFRQLNSANVFRYLEKDRILDYLRSTRFEFVNKNIPFVPSFTKLYDRIDDLKISLNIYWKTPKTNDDIKTKEITDAQIYLLKNIYYGKFLDYFMSRNGNFFEISREVIKLNKNNKKNVKTGFYKLQKFENLEARSPKEYLAKVQSLYIINVANQDEEEKNTYIDFIQKVFLKGFITYLANNRRLSLMYIGSDEEVNNSLAEKKQEFDKFWRKYEENNDIEIPDEINEFLKEIKLGKILKNSAKLNIFYLILKLLNNKEFTNLKGNLEKYHSANEVNIFSDELELINFLNLDNNKVKEDFEFEADEIGKFLNFNGNKIKNREELKKFDTTKMYFYKENIIKYRAYYNIKKYGMLNLLEKIADKAGYKISIEELKKYSNKKNEIEKNHKMQENLHRKYARPRKDEKFTDEDYESYKQAIKNIEEYTHLKNKVEFNELNLLQGLLLRILHRLVGYTSIWERDLRFRLKGEFPENQYIEEIFNFENKKNMKYKSGQIVEKYIKFYKELHQNDEVKINKYSSANIKVLKQEKKDLYIRNYIAHFNYIPHAEISLLEVLENLRKLLSYDRKLKNAVMKSVVDILKEYGFVVKFKIGADKKIEIQSLKSEEIVHLKKLKLKDNDKKKEPIKTYRNSKELCKLVKVMFEYKMEEKSSEK

SEQ ID NO: 362 - protein, 1349 aa, Artificial
  Synthetic
MKISKVNHTKSAVAKNEGMIKGILYQDPGSEEDLQKRFSTLNRNAQRLYKILNQVQVGEKQNRRSRYEVIINGKDGLNNKLQDLLFIRQDNRLAVKNSEAVLKKLHSWNLQVKGKEVSNDDLDDILTLYLRKSLRKGKAGLRTLFRNSGNTDISQEDQEKISEFVTILREDYTKNNFGKKIRKSIENQNLIVQPVQTGNRGVLALSTKKDSRSGREKQSFSDFLTNYANLDSEKRMDLLRKLRRLVDLYFNADGNTDSLTLPKEVNIEPDYNVWATHEAGKTNNKTFAEYPEILSQGDDSNSGERKTLDSVEVREARGSLKESIRKRNIECYRKSLAIIKENKELFFTDDELNHYWIHHIENAVERILSTTGNGKRLTREKLRIGYLSEKVWKDCLNTMSIKYIAVGKAVYHFALDDLADTEKDTDLLKIADKALDGITSFDYEEIKANETLQREVAVDVSFAANNLSRATVKTIKGKEDFLVWNAKDIRENMRYKEDGRTLKTILQFFGGASRWDLNLFKNAYNVSPDYEIKFLDDLRKIIFFLRNESFHFTTQATGDYDWNTNLIGEMFAEDADVCMALEKKKFYSNNLPMFYNSSDLQKILDFLYKENPSRASQVPSFKTVFVRKNFPDFLASHGFSFAGGDAETRLKWQNALYYLLKEIYYNAFLTSSDVKDDFFKALDGLPAENEDALNDFRRRCRDFKNKKEYGLPEICQFIMTEYNEQNAGNRKVRSSKADQMNPKIFQHYRLLLMHTLQSAFSIFLDRQDVLKVLKHSGRKRELMPEEEFLNSWSSTMYKDTINAVKGSQKLQAWYITARFLNARTLNLLVGSLRSYIQYARDVYRRAQETENQVITYEENTVQTCEKVLPVLDLCMKLSSVYSNKLTDYFFDNEEYAKYLSNYVNFYNAQVGDGSTFAQLQAFDDKGLYMDKMNPIANRNIVMAKLFGPVSVLSETMSPVTEQDIKDYYDKREEIAGYMVKGQCSSKEEQESVIEYQRLKNHVELRDAVEFGEIINELLGQLINWSYLRERDLLYFQLGFHYLCLNNDDAKKPEGYIHITRENGTKINGAILSQVAGMYINGIPVFAPDKAGKLTAQSSKGSAGKKIGSFGSYAERILHENKKEAQEVLYNAGLELFETLREHDNVVHVRNAIDHFKYYTVKKMDNQEDGTPHSILDYYSEVFDRFFEYDVKYQKTVVSMLQNVLLRHFVLFFPSFSTGKKVVGSAEVKDRAQISAQTNGISSDTLTYKIQDCSDLIIDAKSEKYREVIGKILYYPYPMPDDIIGGEHQKKGGKEENSRRKSGRNPGKFRQGKKEREQEEKELNNYKKKNNTAKSVGTSIGDILNGLNIK

SEQ ID NO: 363 - protein, 1268 aa, Artificial; identical to SEQ ID NO: 257
  Synthetic

SEQ ID NO: 364 - protein, 1425 aa, Artificial
  Synthetic
VALQLYIILYRVSLFCAIFWDMLIYRYNAIFNPQGCQKSKKCTRVEDSKVKISKENHKRTAVVVKKNRVGGVVYKVPGGSGIDLNEYLAKRSRDIKILYNIFNQIQAGTAPSEYEWKDYLSESENKRREAQKTIQKANYELRSACGDYAKKANSVIGKIIFSAKTKRILSDEQIISNMKAQRLYRFKGRLEDFVLLTLRKSLIVSNNNGEVFDSRNAVTVFLKNIGKENISEDDEREIKRLLALIRKDYNKWNPGGQSSHKMYSDKKASSGAMVIRSIEHQNMVVQPKEDRLRLSEISSVGKNTKTKQTEKAGLEAFLTEYAQIDANSRMEYLKKLRRLLDTYFAAPSSYIKGAEVSLPENINYSSELKVWERHEAAKKVNIYFVEIPEALLKAEQNNNKIDSVEKEHSLEQLRADIRRRNIACYHFTNALAADKRYPTLFFENMAMNQYWIHHMENAVERILKKCNVGTLFKLKIGYLSEKVWKDVLNLLSIKYIALGKAVYHFALDDIWNEASVKKLGKMNAHTLEGISSFDYEMVKAQEDLQREMAVGVAFSANNLARATCQMNNLADKESDFLLWDDNKVIAKHIKYTEKGKTLSAILQFFGGRSSWDTSLFENAYSDSNYELQFLNDLRRAIYAARNETFHFKTAAIDEGSWNTRLFGNMFEKEAEICLSVEKNKFYSNNLALFYTQKDLKVILDRLYGKEYSRAAQIPSYNTILSRKSFPDFLKQLLKLQGPVYDLAVRDQWYSACYYLFKEVYYNLFLQDVSAKELFEDAVKELEGADEKQKRAVENFKKRYREISISASLADICQSFMTEYSQQNNKDRKVRSANDGIFNEPIYQHYKMLLRESLKVAFASYIKNNKELEFVFNPTKKPFEVSQDRFLPDWSSEKYDTLISEVKNSPELQKWYIVGKFMNARMLNLTIGSMRSYLQYVNDIQKRAASLGERQLHLFVGNVEQVKKWIQVLECCLLLSVRISNEFKDYFINEDAYASYLKGYVDFEDSVMPSDYSALLAFSDEGKIDLYVDASNPKVNRNIIQAKLYAPDLVLKKVVKKISKDECKEFYEKKEQILQIKNKGDEVSWEEQQKILEYQKLKNRVELRNLAEYGELINELLGQLINWSYLRERDLLYFQLGFHYSCLMNESKKPDAYKTICIDDAVSIENAVLYQIIAMYINGFPVYVPKKGKLKAECKISGGGIKVPAFCRWASTIEEKKLELYCAGLELFEVVSEHGNVIDLRNKIDHFKYYQGNDSILSLYGEIFDRFFTYDMKYRKNVLNHLQNILLRHNVVIKPVIGKDIKKVGKEETKDRAAFLLEEVSSDRFTYKVKEGERKIDAKNRLYLETVRDILYFPNRAVNDKGEDVIICSQKAQDLDEEKTDRDKKHDKRKNGSWKKNGDNQGEKSKLEEAYSNRITWNPFAGTKLD

SEQ ID NO: 365 - protein, 1382 aa, Artificial
  Synthetic
MKLSKEKHTRSAVANEEQNIGGILYRFPGKSIDGVKDQMLRRDKEVKKLYNVFNQIQVGTKPKKWNNDEKLSPEENERRAQQKNIKMKNYKWREACSKYVESSQRIINDVIFYSYRKAKNKLRYMRKNEDILKKMQEAEKLSKFSGGKLEDFVAYTLRKSLVVSKYDTQEFDSVAAMVVFLECIGKNNISDHEREIVCKLLELIRKDFSKLDPNVKGSQGANIVRSVRNQNMIVQPQGDRFLFPQVYAKENETVTNKNVEKEGLNEFLLNYANLDDEKRAESLRKLRRILDVYFSAPNHYEKDMDITLSDNIEKEKFNVWEKHECGKKETGLFVDIPDVLMEAEAENIKLDAVVEKRERKVLNDRVRKQNIICYRYTRAVVEKYNSNEPLFFENNAINQYWIHHIENAVERILKNCKAGKLFKLRKGYLAEKVWKDAINLISIKYIALGKAVYNFALDDIWKDKKNKELGIVDERIRNGITSFDYEMIKAHENLQRELAVDIAFSVNNLARAVCDMSNLGNKESDFLLWKRNDIADKLKNKDDMASVSAVLQFFGGKSSWDINIFKEAYKGKKKYNYEVRFIDDLRKAIYCARNENFHFKTALVNDEKWNTELFGKIFKRETEFCLNVEKDRFYSNNLYMFYQVSELRNMLDHLYSRSVSRAAQVPSYNSVIVRTAFPEYITNVLGYQKPGYDADTLGKWYSACYYLLKEIYYNSFLQSDRALQLFEKSVKTLSWDDKKQQRAVDNFKDHFSDIKSACTSLAQVCQIYMTEYNQQNNQIKKVRSSNDSIFDQPVYQHYKVLLKKAIANAFADYLKNNKDLFGFIGKPFKANEIREIDKEQFLPDWTSRKYEALCIEVSGSQELQKWYIVGKFLNAMSLNLMVGSMRSYIQYVTDIKRRAASIGNELHVSVQDVEKVEKWVQVIEVCSLLASRTSNQFEDYFNDKDDYARYLKSYVDFSNVDMPSEYSALVDFSNEEQSDLYVDPKNPKVNRNIVHSKLFAADHILRDIVEPVSKDNIEEFYSQKAEIAYCKIKGKEITAEEQKAVLKYQKLKNRVELRDIVEYGEIINELLGQLINWSFMRERDLLYFQLGFHYDCLRNDSKKPEGYKNIKVDENSIKDAILYQIIGMYVNGVTVYAPEKDGDKLKEQCVKGGVGVKVSAFHRYSKYLGLNEKTLYNAGLEIFEVVAEHEDIINLRNGIDHFKYYLGDYRSMLSIYSEVFDRFFTYDIKYQKNVLNLLQNILLRHNVIVEPILESGFKTIGEQTKPGAKLSIRSIKSDTFQYKVKGGTLITDAKDERYLETIRKILYYAENEEDNLKKSVVVTNADKYEKNKESDDQDKQKEKKNKDNKGKKNEETKSDAEKNNNERLSYNPFANLNFKLSN

SEQ ID NO: 366 - protein, 1315 aa, Artificial
  Synthetic
MAETLTFTNLYDILTLIDSGLNLHINLGVIIMKLTRRRISGNSVDQKITAAFYRDMSQGLLYYDSEDNDCTDKVIESMDFERSWRGRILKNGEDDKNPFYMFVKGLVGSNDKIVCEPIDVDSDPDNLDILINKNLTGFGRNLKAPDSNDTLENLIRKIQAGIPEEEVLPELKKIKEMIQKDIVNRKEQLLKSIKNNRIPFSLEGSKLVPSTKKMKWLFKLIDVPNKTFNEKMLEKYWEIYDYDKLEANITNRLDKTDKNARSISRAVSDELREYHKYLRTNYNRFVSGDRPAAGLDNGGSAKYNPDKEEFLLFLKEVEQYFKKYFPVKSKHSNKSKDKSLVDKYKNYCSYKVVKKEVNRSIINQLVAGLIQQGKLLYYFYYNDTWQEDFLNSYGLSYIQVEEAFKKSVMTSLSWGINRLTSFFIDDSNTVKFDDITTKRAKEAIESNYFNKLRTCSRMQDHFKEKLAFFYPVYVKDKKDRPDDIEKLIVLVKNAIESVSYLRNRIFHFKKSSLLELLKELDDKNSGQDKIDYSVAAEFIKRDIENLYDVFREQIRSLGIAEYYKADMISDCFKTCGLEFALYSPKNSLMPAFKNVYKRGANLNKAYIRDKGPKETGDQGQNSYKALEEYRELTWYIEVKNNDQSYNAYKNLLQLIYYHAFLPEVRENEALITDFINRTKEWNRKETEERLNTKNNKKHKNFDENDDITVNTYRYESIPDYQGESLDDYLKVLQRKQMARAKEVNEKEEGNNNYIQFIRDVVVWAFGAYLENKLKNYKNELQPPLSKENIGLNDTLKELFPEEKVKSPFNIKCRFSISTFIDNKGKSTDNTSAEAVKTDGKEDEKDKKNIKRKDLLCFYLFLRLLDENEICKLQHQFIKYRCSLKERRFPGNRTELEKETELLAELEELMELVRFTMPSIPEISAKAESGYDTMIKKYFKDFIEKKVFKNPKTSNLYYHSDSKTPVTRKYMALLMRSAPLHLYKDIFKGYYLITKKECLEYIKLSNIIKDYQNSLNELHEQLERIKLKSEKQNGKDSLYLDKKDFYKVKEYVENLEQVARYKHLQHKINFETLYRIFRIHVDIAARMVGYTQDWERDMHFLFKALVYNGVLEERRFEAIFNNNDDNNDGRIVKKIQNNLNNKNRELVSMLCWNKKLNKNEFGAIIWKRNPIAHLNHFTQTEQNSKSSLESLINSLRILLAYDRKRQNAVTKTINDLLLNDYHIRIKWEGRVDEGQIYFNIKEKEDIENEPIIHLKHLHKKDCYIYKNSYMFDKQKEWICNGIKEEVYDKSILKCIGNLFKFDYEDKNKSSANPKHT

SEQ ID NO: 367 - protein, 1412 aa, Artificial; identical to SEQ ID NO: 53
  Synthetic

SEQ ID NO: 368 - protein, 1412 aa, Artificial
  Synthetic
MKLSKEKHTRSAVANNGDIKSAEVNNGNTKSEEVNNGDIRSAVANEEQNIGGILYRFPGKSIDGVKDQMLRRDKEVKKLYNVFNQIQVGTKPKKWNNDEKLSPEENERRAQQKNIKMKNYKWREACSKYVESSQRIINDVIFYSYRKAENKLRYMRKNEDILKKMQEAEKLSKFSGGKLEDFVAYTLRKSLVVSKYDTQEFDSVAAMVVFLECIGKNNISDHEREIVCKLLELIRKDFSKLDPNVKGSQGANIVRSVRNQNMIVQPQGDRFLFPQVYAKENETVTNKNVEKEGLNEFLLNYANLDDEKRAESLRKLRRILDVYFSAPNHYEKDMDITLSDNIEKEKFNVWEKHECGKKETGLFVDIPDVLMEAEAENIKLDAVVEKRERKVLNDRVRKQNIICYRYTRAVVEKYNSNEPLFFENNAINQYWIHHIENAVERILKNCKAGKLFKLRKGYLAEKVWKDAINLISIKYIALGKAVYNFALDDIWKDKKNKELGIVDERIRNGITSFDYEMIKAHENLQRELAVDIAFSVNNLARAVCDMSNLGNKESDFLLWKRNDIADKLKNKDDMASVSAVLQFFGGKSSWDINIFKEAYKGKKKYNYEVRFIDDLRKAIYCARNENFHFKTALVNDEKWNTELFGKIFERETEFCLNVEKDRFYSNNLYMFYQVSELRNMLDHLYSRSVSRAAQVPSYNSVIVRTAFPEYITNVLGYQKPGYYADTLGKWYSACYYLLKEIYYNSFLQSDRALQLFEKSVKTLSWDDKKQQRAVDNFKDHFSDIKSACTSLAQVCQIYMTEYNQQNNQIKKVRSSNDSIFDQPVYQHYKVLLKKAIANAFADYLKNNKDLFGFIGKPFKANEIREIDKEQFLPDWTSRKYEALCIEVSGSQELQKWYIVGKFLNAMSLNLMVGSMRSYIQYVTDIKRRAASIGNELHVSVQDVEKVEKWVQFIEVCSLLASRTSNQFEDYFNDKDDYARYLKSYVDFSNVDMPSEYSALVDFSNEEQSDLYVDPKNPKVNRNIVHSKLFAADHILRDIVEPVSKDNIEEFYSQKAEIAYCKIKGKEITAEEQKAVLKYQKLKNRVELRDIVEYGEIINELLGQLINWSFMRERDLLYFQLGFHYDCLRNDSKKPEGYKNIKVDENSIKDAILYQIIGMYVNGVTVYAPEKDGDKLKEQCVKGGVGVKVSAFHRYSKYLGLNEKTLYNAGLEIFEVVAEHEDIINLRNGIDHFKYYLGDYRSMLSIYSEVFDRFFTYDIKYQKNVLNLLQNILLRHNVIVEPILESGFKTIGEQTKPGAKLSIRSIKSDTFQYKVKGGTLITDAKDERYLETIRKILYYAENEEDNLKKSVVVTNADKYEKNKESDDQNKQKEKKNKDNKGKKNEETKSDAEKNNNERLSYNPFANFDFKLLN

SEQ ID NO: 369 - protein, 1412 aa, Artificial; identical to SEQ ID NO: 53
  Synthetic

SEQ ID NO: 370 - protein, 1412 aa, Artificial; identical to SEQ ID NO: 53
  Synthetic

SEQ ID NO: 371 - protein, 1284 aa, Artificial
  Synthetic
MRMKISKVDHVKSGIDQKLSNQRGMLYKQPQKKYEGKQLEEHVRNLNRKAKALYQVFPASGNPKTEKELQIINSFIKNILIRLDSGKTSEEIVGYINTYSVAGQISGDHIQELVDQHLKESLRKYTCVDDKRIYVPDIIVALLKSKFNSETLQYDNSELKILIDFIREDYLKEKQIKQIVHSIENNSTPLRIAEINGQKRLIPANADNPKKSYIFEFLKEYAQSDPKGQESLLQHMRYLILLYLYGSDKITDDYCEEIGAWNFGSIVMDNEQLFSEEASMLIQDRIYVNQQIQEGRQSKDTAKVKKNKSKYRMLGDKIEHSINESVVKHYQEACKAVEEKDIPWIKYISDHVMSVYSSKNRVDLDKLSLPYLAKNTWNTWISFIAMKYVDMGKGVYHFAMSDVDKVGKQDNLIIGQIDPKFADGISSFDYERIKAEDDLHRSMSGYIAFAVNNFSRAICSDEFRKKDKKEDVLTVGLDEIPLDDNVKRKLLQYFGGASNWDDSIMDIIDDKDLAACIKENLYVARNVNFHFAGSEKVQKKQDDILEEIVRKETGDIGKHYRKVFYSNNVAAFYRDEDIIKLMNHLYQKEKPYQAQIPSYNKVISKTYLPDLIFMLLKGKNRTKISDPSIMNMFRGTFYFLLKEIYYNDFLQASNLKELFREGLKNNVKDKKSEKAYQNFMQRFEELENMGMDFGEICQQIMTDYEQQNKQKKKTATAVVSEKDKKIRTLDNDTQKYKHFRTLLYVGLREAFIIYLKDEKNKEWYEFLREPVKREQPEEKEFVNKWKLNQYSDCSELILKDPLAAAWYVAAHFINQAQLNHLIGDIKNYIQFISDIDRRAKSTGNPVSESTEIQIDRYRQILRVLEFAKFFCGQITNVLTDYYEDENDFSTHVGHYVKFEKKNMEPAHALQAFSNSLYACGKEKKKAGFYYDGMNPIVNRNITLAAMYGNKKLLENAMIPVTEQDIRKYYSLMAELDSTLKNGAVCKSEDEQKNLRHFQNLKNRIELVDVLTLSELLNDLVAQLIGWAYIRERDMMYLQLGLHYIKLYFTDSVSEDSYLRTLDLEEGSIADGAVLYQIASLYSFNLPMYVKPNESSVYCKKHANSVGAKFDIFEKKYCNRDGTVIENGLCLFENIKLHGDLAEFRDYLAHFKYFAKLDKSILELYSKVYDSFFSYNIKLKKSVSYVFTNILLSYFINAKLSFSLCGISDYKPSRNKTVQRRSANISVESVQTDYFTYKLRSIVKNKNGVESIENDNRRCEVVNIAARDKEFVDEVCKVIKYNSDK

SEQ ID NO: 372 - protein, 1412 aa, Artificial; identical to SEQ ID NO: 53
  Synthetic

SEQ ID NO: 373 - protein, 1382 aa, Artificial; identical to SEQ ID NO: 131
  Synthetic

SEQ ID NO: 374 - protein, 1387 aa, Artificial; identical to SEQ ID NO: 93
  Synthetic

SEQ ID NO: 375 - protein, 1380 aa, Artificial; identical to SEQ ID NO: 115
  Synthetic

SEQ ID NO: 376 - protein, 1366 aa, Artificial
  Synthetic
MKLSKENHIKSAVAISGKEGNIAGTLYKIPGEGTVDLKKQMLERDKAVKRLYNIFNQIQLGTQPKEWKENRNLSAEENTRRMHQQAVKIQNYKMKKACSKYVNSIRKTINGLLFYDRIIKTTQQNKVKSDRLKMMRKNEDIISKMKNENILQQFKVEGENGKFEKGKLEDFVTLALRSSLIVSRYKGKDFNSVAAVVVFLDNIGNNNISHEDERTINILLNLIREDFTKLNPNKDNTQGARLIRSVTNQNMLVQPQNDRFSFPSVSDSGKSKVSNKNVEKSGLDNFLLDYANLNKEEREEKLRKLRRIIDVYFSAPITYQKDMDVTLSEEVVKYKFDVWIKHNQGKKDNNMFVDVPDVLVKAETDGEKIDAVIEKQARKELTDRVREQNMICYRYTQAIVKKYNANEALFFENDDINQYWIHHIENAVERILKSCKIGTLFKLRKGYLTEKVWKDAINLISIKYIAIGKVVYNFALDDIWNDNKVKKLGDISEKIRSGITSFDYEMIKAQETLQRELAVNVAFSANNLARAVCDMSNLSDKTSDFLLWKPDDINDKMKKSTGNDDDNEKNKKAVCAVLQFFGGKSLWKDVDFEKAYKNAGKHGYGVYYINDLRKAIFAARNVSFHFKTALVNNEKWNVEFLGKMFEKETEFCLDIEKDRFYSNNLPMFYKSCNLEKMLNHLYSRKVSRAAQVPSYNTVFVRKTFPEYVNNVLKYKKPGTDAEILDKWYSACYYLLKEIYYNSFLQSKDAFKYLEKAVYNLNSKNINHDNSGKKISGDELKRKKASESFQKRFAEIKKVSASSISYVCQVFMTDYNQQNNQIKKVRSSNDSLFDKPIYQHFKMLLKETIKSAFAAYLKDNNNKELFGFIGEPLKIKKNDDTKAVEKEDFLPGWKSEKYSLLIERVKKSPELQMWYIVGKFLNARSLNLMAGSMRSYIQYASDINRRANVMGNKLHVEVLDKDKVKEWIQVIEVCLLLSSRISNQFDDYFIDEDDYAGYLKSYVDFPDKNMPSAYSALVDFSAQGKIDLYVDSKNPKINRNIVQSKLFAADHILGNGQIVQLVSKDDIVEFYNLKAKIADSKIKGENISEKEQRNILRYQKLKNKVELRDIVEYGEIINELIGQLINWSFMRERDLLYFQLGFHYNCLRNNSEKPEEYKKIEADDISINDAVLYQIIGMYVNGIPVYTSDNNKLKGECANGGAGGKIIAFCKYSEYLGFKKATLYEAGLEVFEVVAEHDDIIKLRNGIEHFKYYLGNYRSIMSLYSEVFDRFFTYDLKYQKNVLNLLQNILLRHNVVIVPDFESGTKKVGDNTKQAAKISIKNIQSDKFTYKINGGTASIDAKDDRYLETIKKILYYPEYDKDSSGVC

SEQ ID NO: 377 - protein, 1053 aa, Artificial
  Synthetic
MRVSKVKVGKEMVLMHRTDKEGALVLEESKKNITDKIKCNKKDSFHLSILNQTLVKKNRNKDLETIIYSVIKGGQLKLESDKQLSEIEIKNSLTNKFKEQFYYNNKEGSKMEFNLAALILKFYSTRDIKELQPYKDWVDWYIDFKSERLEKSIIVNKINFQTKRKETLKDFEQELIKTGKINISDIASLYGIEQLIKTFEGIMALYFMQVKKRDFHLNYKLKSALQIHQSKLFSIQSNRDNLKLGLFNIEVTKYFQHYFPIKVEDKRKTDDDVKYYLQEKVLINTISNQIENAVRSTLITKGKFKAHNIELDSINSEILTEIKIKDAFVLNLIDACAFAANNIRNIVDNGQVKDILGNEDFNYSLNKHNVNKELYKIFFDNEYKDINENLWALRGSVQQIRNKIYHYNVNSIADIFNICTYENQKYKNRPYLDTPFKEELKNEIENIPNLILSKFNKNNILKYYSDNDLNAIIEKLKFNLCRPSEMFIPSFKSVFDTARVLPNNHYLGVKNYFSKDNCINEEHYQACRFIAKQIYNYQFLNQSVDDNEFKIVVNEIIESCKNNVAKKNNINKYAFHEIEKMEETDTRVDYLKKIHSQIILSNANKDDKTEKSNFEKFLLYIYIKLFDNFIDQHYKDLIVLGYTYDVNNRVIEKDKIEVEKIKLIEDNDNTAKIVPFYIFCKLLDSNHLSNLRNEIIKYNAISKKNDSTSNRLESSLPIDNLLFIIEMCLLSVDNSYGKPNETYKKFIVDRINTDNLYSAQDNETLILHSNIELLNKYGTISILEKLISHEGSIFKVTQQDYNIWEEKRENIEGKQKEIIELHNKWSQVQEKLKGLKKEEKEKRKKIRKEESDIKDKYKCIVTEVTSFNQLDNKLHFVALRKLHNLTIEILGRFVGFTNMFERDFQYLNDELNSNMKFDKGLPNNIPNEYNKFFLSVNYRDIRNYIAHFNYISNKSIKYSMIDIINELRELLWYDRKLKNAVAKSIIDIFDRNGMELKLKFSITEHKLDIDYIKPKKIYHLGTKKGKFEKDEITTNQVSEEYCKMCEALLVMKK

SEQ ID NO: 378 - protein, 1392 aa, Artificial
  Synthetic
MGNLFGHKRWYEVPDKKNFKIKRKVKIKRNYRGNKYILNINENNNKEKIDNNKFIGEFVNYKKNNNVLKEFKRKFHTGNILFKLKGKEGIIRIENNDDFLETEEVVLYIEVYGKSEKLKALEITKKKIIDEAIRQGITKDDKKIEIKRQKIEINIRDEYTNKTADDYSVILRIIENDELETKKSIYEIFKNINMNLYKIIEKIIVNETGKVFENRYYEEHLREKLLKDDKIDVILTNFIEIREKIKSNLEVMGFVKFYLNVGGDKKKSENKKIFVEKILNTNVDLTVEDIVDFIVKELKFWNITKRIEKVKEFNNKSLENKRNRTYIKSYVLLDKHEKFKIERENKKDKIVKFFVENIKNNSIKEKIEKILAEFKINELIKKLEKELKKGNCDTEIFGIFKKHYKVNFDSKKFSKKSDEEKELYKIIYRYLKGRIEKILVNEQKARLKKMEKIEIEKILNESILSEKILKRVKQYTLEHIMYLGKLVHNNIDITTVNTNDFSRLHAKEELDLELITFFASTNMELNKIFSRKNINNDGNIDFFGGDGEKNYILDKKISNSKIEIIRKLDFIDNKNDITNNFIEKFIKIGTNERNRILHANNKGREIQEAKDNYGKVTKIIENLKISDEEVSKALNLDVVFKNKKDIINKINDIKISEENSNDIKYLPSFSKMLREILNLYRNNPKNEPFDTIETEKIVLNALIYVNKELYKKLILEDDLKENGNKNIFLQELKKTLGNINEKDKNIIESYYKNAQISASKDNNKAIKKYQKKVIECYIKYLEENYKELFDFSDFKMNIQEIKKQIKEINDNKTYKRITIKTSDKSIVINNDFEYTISIFALLNSNTVINKIRNRFFAISVWLNTSEYQNIIEILDEIMQLNTLRNECITENWNHNLKEFIQKMLDVEKEIGNFEIKTKKEIFDIYYEEIKNDMIVKINDNKIQKILNKCLKEITGFSSNNEYMFKNLGKLTLEERDFILSNKKLIEKNIDEIIGEKLDAIKEKVLLKKVFNSEFLEKYKEEIDNLVEDTESENKNKFEEIYYPKEHKNELYIYKKNLFLNIGNPNFDKIYGLISNDIKMADAKFLFNSHGKNIRNNKIAEIDVILKKLNNKLNGYSKEYKEKYIEKLKENNDFFAKNIQNENYNSFEEFKEDYNKVSEYKKIRDLVEFNYLNKIESYLIDINWKLAIQMARFERDMHYIVNGLKKLNFINLNGYNTGISRAYPKYNDSDSNKNCKKFYETTAYYKFFDDKSYRELEDICYEFGIDLRKNSNIQAKEERNIRNYISHFYIVRNPFADYSIAEQIDRVSNLLSYSTRYNNSTYASVFEVFKKDVDLDYDELKKKFKLIGNNDILERLMKPKKVSVLELESYNSDYIKNLIIELLTKIENTNDTL

SEQ ID NO: 379 - protein, 1185 aa, Artificial; identical to SEQ ID NO: 47
  Synthetic

SEQ ID NO: 380 - protein, 1425 aa, Artificial; identical to SEQ ID NO: 3
  Synthetic

SEQ ID NO: 381 - protein, 1425 aa, Artificial; identical to SEQ ID NO: 3
  Synthetic

SEQ ID NO: 382 - protein, 1425 aa, Artificial; identical to SEQ ID NO: 3
  Synthetic

SEQ ID NO: 383 - protein, 1425 aa, Artificial; identical to SEQ ID NO: 3
  Synthetic

SEQ ID NO: 384 - protein, 1389 aa, Artificial
  Synthetic
MKLSKVTYRVKDKNAKYKKEYNVRAAVANNSENAGGVLYHVPGVDLIDLKEQMLDRDRSVRLLYNIFNQIQTGTKPKKWGNDETLSVDENERKAKEQNIKIMNYKWREACSEYIEKSQSTINSVLFYSYEESGYKTKRMNDNEAIIVKMQYENRLSHFTGGKLEDFVAYTLRNSLVVSRYDNQEFDSVNAMVVFINNIGNGNISDKDKKTICKLADLIRNDFSKLNPNVQSSQGANMVRSVRNQNMVVQPQGDIVSFPLVSDEGKNTVTNKNVEKKGLNEFLLNYANLDDEERMENLRKLRRIIDVYFSSPSHYQKDMDISLSDNIDKTKFVVWKKHETGKKNTELFVDIPDELFTAETEKIKLDAVLEKQARKRLTDSIRKQNMICYRYTRAVVEKYNSTENLFFENDSINQYWIHHIENAVERILKSCKAETLFKLRRGYLTEKVWKDAINLISIKYIALGKVIYNFTVDDIWKDKKVKNLGSIDEKIKHGITSFDYEMIKAQEALQRELAVNVAFAANNLARAVCDMTNLKDKESDFLIWNKKDIANKLKNKDDMASVSVVLQFFGGKSSWDIDAFREAYKGNKYNYEVCFIDDLRKAVYAARNESFHFKTALVNNDIWNTEFFGKLFIKETEICLDIEKDRFYSNNLPVFYSDNDLKKMLDHLYNNKVSRAAQVPSYNSVMVRKYFPENITSTLKYQKPGYDEDTLEKWYSACYYLLKEIYYNSFLQSDEALALFEESVNNLKGDNKDQELAVKNFRNNYKNIKSSCTSFSQVCQMYMTEYNQQNNQFKKVRSSKDSIVDKPIYQHYKLLLKKVIANAFASYLQHNKELFGFIGKPLKVNCLKEIDKEQFLPEWTSKKYVSLCEEVRKSPELQKWYIVGKFLNSRSLNLMAGSMRSYIQYVNDIKRRADGIGNELHVIAQNLDVVDKWVQVIEVCLLLSSRVSNEFEDYFYDKDDYAAYLKSYVDFDNSDMPSEYSALVEFSDQGKVDLYVDPSNPKVNRNIVQSKLFAADYILRDIIEPVSKDEIEDFYNQKDEITTCKIKGAELTDEEQKKILKYQKLKNRVELRDVVEYGEIINELLGQLINWSFMRERDLLYFQLGFHYNCLRNDSAKPEEYKNLVLDDVSIKDAILHQIIGMYVNGVAIYAPGKDKNKLESQCVKGRVGGKIGAFCGYSLYLKLAADTLYNAGLEVFEVLPEHEDIINLRNGIDHFKFYLGGYRSIISLYSEVFDRFFTYDMKYQKNVLNLLQNILLRHNVIIEPIFESGIKKIGKDTKPCAKLCISSIKSDSFEYKIKDGTLITDAKDKRYLETIKKLLYYPDIESNVKILLRKDNFNQNKDKKNVNNRKTKNNNKNGNRNRDKNRDKNGGGDGLTYNPFLNLIFDLPE

SEQ ID NO: 385 - protein, 1211 aa, Artificial
  Synthetic
MKLTKVEKARIAVSREKKDSGRIILYTNPEDVKKTSVTTMEQQVSKRIDQANKLYQVFFKSVIPVELNKHFAEISKIAAKCRNTEEFYKKACGYSGYEWTDAKQKKRTSQISRFSYTSSGKNMYVVMDNFVKEYMVQIWQEKDFRNAAVKILCCICDGKKFASKLEKVKKESPDTLKKFIEISGKCEGNPFVDYDTSFLEKVFTLVISQMVKNCDRKSYEQDDKEKIKKSIQKEIQWLSHVQSVTERSFGREGKTYLLFKIRNPYATEERLQTVLIRMRKTLKRGRNRDIAIVLLQGLAQMNQVTFTDTVKHLYQEEEKAFCDFIDAVNRDYYRVNIVKSVRNMDVKVQPDLNDNSILKLSGLGNIKKEALSDTLLRYAASADESDQVLLDIKKLLFEYFLPENSKETSKYTTVQNLWNIPYLPKIFFDYGFENEDSDDDNECAEDIETLCDVEPQYKINQHSLKRRIRYVNYGKYLQMTKNESDRERRYWIHYIKEFVEKNYVDSGRTLSEKNCYASSMMLNCWKEIIRYLCGKYIDIGKAVFHFTNLTAMPKPKDKIIYGQLEEQYKKGISSFDYEAIKAEETLQRDIVQSVVAAAFAFSKSVIDETKMEECQETNKEDILFLSENVLGSLLKENTIKLILRFYGGESSVAQKEYFDQQEIVQEMISHLKSIRNENFHYLDGAKKDNPHKYASILWKNDEMAYQKLTKQRYYANNVGLFYRAEEIQELVQELYSQKNITEAQIPAFRTVLKRKDLPGYMEELGILFPDNTQEKSKGDFEGTLYFLMKEIYYRDFIVKDKAAAYFFKAVDQNKEQSKKEDKHTERAAENFHRYVKSLEKKYNKKEISFGTVCQYIMMEYNQQNTTKQETEIYKHFKMLISLCIRKAFGNYIKETYRFLFHPIYSKQQGEPEYLDTLELESGVKEKNYEWFTLAHFLHPVQLNHLVGDLKSYIQYREDILRRIVFAEQRVYADQQKEVQQKVKTAKEILEVLEFVREVSGRVSNEYTDYYENEEEYAEFLYQYIDFRKREGKSAFESLKYFCQNILDSGTVVDLYADTENPKVLRNIELTRMYAGSNVKIPEYEKITEDEIKMYYQEKNSVALILSRGLCRNEKEQKKVIEFNWKKKRLTLNEITDVFSLVNDLLGKMISFSYLRERDQMYLLLGFYYMALCAENKSENHLGWKGETLDKLESSDSKFDIGGGLVSDSQCF

SEQ ID NO: 386 - protein, 1425 aa, Artificial; identical to SEQ ID NO: 3
  Synthetic

SEQ ID NO: 387 - protein, 1425 aa, Artificial; identical to SEQ ID NO: 3
  Synthetic

SEQ ID NO: 388 - protein, 1214 aa, Artificial
  Synthetic
MKNVFSFVPDKIVKKRMCTMKLTKSKNAQEAFFYRNTHMGKLYMRSAFSEDKTDSTIDNLPFKESLARRILLRCDKTKSHKQNPFKSFMEELIDKEKAVLPSKEVIGYDKTFQAVRYFSPYGRALRIGQGGNGITFEKLLIEHYDNNKDISEELKKISAMLKLRRTYKKDHLKKSIKNNKIVFPLVINEANTSKIGKGEWLLDFINNEKKFTDYKNWYDYAKLYETKLKPLQTNLGYLKNPQVWGGLLYAEVKKYHHELYKTKKSELNCEKKLQEFGFYLNEVQDYFRHYFGSSKAGKSLNKAAKIDRLIEIKEGAVEESYMYKWIKAHITNKITALLIQNGKFMHYKVEHPTSDILSNIQIEESFKKQLFLSIAWATTRLNYFFDYGSNNDVLLGEPKNNSTVGTNIQGDILSEFDEDTTLKNIYQKNIKNTKAYMEYFLAELKKSENNNKNVFQEKVCTTFPIHIQENNSDDTIEALLDILDAAKESISYLRNNVFHPQKEYLYELTLPEKIKGIVEKDYFAKTKEVMKTDISQINSCFKEKIRSALIADVYPLEILQNLFTNCKLSFYLYAPKYELMPAFRKVYQRGANLCSQGGTQRNLSWFYNKPVVSRGADGLRDINDIKQWQAYKNLLQMIYEHSFLPAVHEDESLITKYIYETIQQSQEASRDRNKEYCFRYRNMPKYKSSSLAAYMSNLQRLQSAEESNQHDDTKSKTDNKNYYIDFVQDFFVRAFDRYLEGHLSSIKRYLLPDAGNKLHVTEKEDVETTLSQLFQKENPTICMKDANVINENDEFCLLFYPFLRMLERRELSNLQHQVIRYRCSFKHRLSIEVDSSEKLERLIAMLIFTFPDHIDEEDCYKDMVKKYFGKFVEGSLKDYLDLYFQSGEKLIQQKSMLALMRTGSMALYSEMFSPIYKITSEDYNKYKSYCQLGENPGGKQLSPIEQAQQQLASLHQELCEEKSISKDNEKLRKYKECLVLVHEYSELRRKLTFDLLYEIHLIHVDILGRFASFAADWERDMHFLLLGLYGLGQQNQIDKLLSFKSQEEVDNIFRYMRREKSMTAKFKNALKNEINRKTLEELCLYNCQDGLDKVINVRNTLAHLNHMTQISYKNEYQKSIFELLTAISKLLNYDLKRKNSVTRVLKALLNKYHIKLSLYQKNDDYECISIKSEEIVHLKNLRIRENKKRIELPAQDVLFVECVAKLLDFSYNKK

SEQ ID NO: 389 - protein, 1360 aa, Artificial; identical to SEQ ID NO: 92
  Synthetic

SEQ ID NO: 390 - protein, 1101 aa, Artificial; identical to SEQ ID NO: 73
  Synthetic

SEQ ID NO: 391 - protein, 1387 aa, Artificial; identical to SEQ ID NO: 93
  Synthetic

SEQ ID NO: 392 - protein, 1388 aa, Artificial; identical to SEQ ID NO: 103
  Synthetic

SEQ ID NO: 393 - protein, 1383 aa, Artificial
  Synthetic
MKLSKEKQIRSAVANKEKNTEGVLYRFPGADIGGVQAQMLVRDRDVKQLYNVFNQIQLGNKPKEWMNDEKLSPEENERRAQQKNIKMKNYKWRKACSKYVESSQRAINDILFYSYKEADKKIRNMSKNEDILIKMQNAEKLSKFSGGKLEDFVAYTLRKSLVVSKYGNQEFDSIAAMVVFLECIGKSNISDREKEIVYKLLDLIRKDFSKLDPSIQDSQGANIVRSIRNQNMIVQPQGDRFSFPQVSDEEKKTVTNKNAEKDGLNEFMLNYANLDEEKRAEVLRKLRRILDVYFSAPSHYEKDMDITLSDNVNKEKFYVWKKHECGKKENGLFVDIPDVLVEAEAESIKLDAVVEKRERKVLADRVRRQNIICYRYTRAVVEKYNSNEPIFFENDTINQYWIHHIENAVERILKNCKTGTLFKLRKGYLAEKVWKDAINLISIKYIALGKAVYNFALDDIWKDKKDKKLGIVDERIRNGITSFDYEMIKAHENLQRELAVNIAFSVNNLARAVCDMSNLGDKESDFLLWKRNDIADKLKNKDDMASVSAVLQFFGGKSSWDINIFKEAYKGKKKYNYEVQFIDDLRKAIYCARNENFHFKTALVNNEKWNTELFGKIFERETEFCLNVEKDRFYSNNLYMFYPVSELRNMLDHLYSRSVSRAAQVPSYNSVLVRTAFPEYITNVLRYQKPGYDADTLGKWYSACYYLLKEIYYNSFLQSDKALQLFEKSVRTLRWDDKKQQRAVDNFKNHFSDIKSACTSLAQVCQIYMTEYNQQNNQIKKVRSSNDSIFDQPIYQHYKVLLKKAIANAFAAYLKNNKNLFGFIGKPFKANEIREIDKEQFLLDWTSKKYESLCIEVSENQELQKWYIVGKFLNARSLNLMVGSMRSYIQYATDIKRRAASIENELHVNVQDVEKVEKWIQVIEVCLLLSSRTSNQFEDYFKDKDDYARYLKSYVDFSNADMPSEYSALVKFSEEEQSDLYVDTNNPKVNRNIVHSKLFAADHILRDIVEPVSKSDIEEFYNQKAEIVYCKVKGKEITAEEQKAVLKYQKLKNRVELRDIVEYGEIINELLGQLINWSFMRERDLLYFQLGFHYNCLRNNSEKKEEYKKIQVNGDSIKDAILYQIIGMYVNGVAIYAPEKNGDKLKEQCVQGRVGAKVISFNRYSEYLGLDELTLYNAGLEIFEVVAEHDDIINLRNGIDHFKYYLGDYRSMLSIYSEVFDRFFTYDMKYQKNVLNLLQNILLRHNVIVEPVLESGVKTIGEQTKPGAKLSVRSIKSDTFEYKVKGGTLITNAKDKRYLETIRKILYYADAEDADSKKPVIVTNADKYEKNKESEDEDKQKGKERKTGERKTQKQEVMRKKIIMIVYHIILLQTLILNYQIKI

SEQ ID NO: 394 - protein, 1225 aa, Artificial
  Synthetic
MKITKRKWGEHHPPLYFYRDEDSGRLLAQNDRKQDYTDTLFNDIAQDTFERSLRNRLLKTPEKGDKRFYSNEIVKLVEKLCQGADVAEIMKSMERSEKLRPKNEKEIKNLKKQLYGTLSEYGKRYTAPEGAMTLNDALFYLVEGNPLKQAMAKAELGKIREALIKEKENRINRVRYSIKNNKIPLRIQEDGGITPNNDRAAWLLGLMKPADPAKGITDCYPLLGELEEVFDFDKLSKTLHEKISRCQGRPRSIAMAVDEALKQYLRELWEKSPSRQQDLKYYFQAVQEYFKDNFPIRTKRMGARLRQELLKDKTSLSRLLEPKHMANAVRRRLINQSTQMHILYGKLYAYCCGEDGRLLVNSETLQRIQVHEAVKKQAMTAVLWSISRLRYFYQFEDGDILSNKNPIKDFRDKFLRDTNKYTHEDVEACKEKLQDFFPLKELQEKIKEDAKGLQETDNKQADTTDFKAIGHIVRDDRKLCNQLLAECVSCIGELRHHIFHYKNVTLIQALKRIADKVKPEDLSVLRAIYLLDRRNLKKAFAKRISSMNLPLYYREDLLSRIFKKEGTAFFLYSAKIQMTPSFQRVYERGKNLRREFECERMKAEASNGQNGQDGDRLKWFRQLAAGDSADTHFNWAVEAYAESAADVENNVEFDTDVDAQRALRNLLLLIYRHHFLPEVQKDETLVTGKIHKVLERNRQLSEGQGPNQGKAHGYSVIEELYHEGMPLSDLMKQLQRRISETERESRELAQEKTDYAQRFILDIFAEAFNDFLEAHYGEEYLEIMSPRKDAEAAKKWVKESKTVDLKTSIDEKEPEGHLLVLYPVLRLLDERELGELQQQMIRYRTSLASWQGESNFSEEIRIAGQIEELTELVKLTEPEPQFAEEVWGKRAKEAFEDFIEGNMKNYEAFYLQSDNNTPVYRRNMSRLLRSGLMGVYQKVLASHKQALKRDYLLWSEKHWNVKDENGADISSAEQAQCLLQRLHRKYAESPSRFTEEDCKLYEKVLRRLEDYNQAVKNLSFSSLYEICVLNLEILSRWVGFVQDWERDMYFLLLAWVRQGKLDGIKEEDVRDIFSEGNIIRNLVDTLKGENMNAFESVYFPENKGSKYLGVRNDVAHLDLMRKNGWRLEAGKTCSVMEDYINRLRFLLSYDQKRMNAVTKTLQQIFDRHKVKIRFTVEKGGMLKIEDVTADKIAHLKGSRLSGIEILSHGERFIDTLKALMVYPRG

SEQ ID NO: 395 - protein, 1225 aa, Artificial; identical to SEQ ID NO: 394
  Synthetic

SEQ ID NO: 396 - protein, 1385 aa, Artificial
  Synthetic
MKLSKVTYRVKDKNAKYKKEYNVRAAVANNSENAGGVLYHVPGVDLIDLKEQMLDRDRSVRLLYNIFNQIQTGTKPKKWENDETLSVDENERKAKEQNIKIMNYKWREACSEYIEKSQSTINSVLFYSYEESGYKTKRMNDNEAIIVKMQYENRLSHFTGGKLEDFVAYTLRNSLVVSRYDNQEFDSVNAMVVFINNIGNGNISDKDKKTICKLADLIRNDFSKLNPNVQSSQGANMVRSVRNQNMVVQPQGDIVSFPLVSDEGKNTVTNKNVEKKGLNEFLLNYANLDDEERMENLRKLRRIIDVYFSSPSHYQKDMDISLSDNIDKTKFVVWKKHETGKKNTELFVDIPDELFTAETEKIKLDAVLEKQARKRLTDSIRKQNMICYRYTRAVVEKYNSTENLFFENDSINQYWIHHIENAVERILKSCKAETLFKLRRGYLTEKVWRDAINLISIKYIALGKVIYNFTVDDIWKDKKVKNLGSIDEKIKHGITSFDYEMIKAQEALQRELAVNVAFAANNLARAVCDMTNLKDKESDFLIWNKKDIANKLKNKDDMASVSVVLQFFGGKSSWDIDAFREAYKGNKYNYEVCFIDDLRKAVYAARNESFHFKTALVNNDIWNTEFFGKLFIKETEICLDIEKDRFYSNNLPVFYSDNDLKKMLDHLYNNKVSRAAQVPSYNSVMVRKYFPENITSTLKYQKPGYDEDTLEKWYSACYYLLKEIYYNSFLQSDEALALFEESVNNLKGDNKDQELAVKNFRNNYKNIKSSCTSFSQVCQMYMTEYNQQNNQFKKVRSSKDSIVDKPIYQHYKLLLKKVIANAFASYLQHNEELFGFIGKPLKVNCLKEIDKEQFLPEWTSKKYVSLCEEVRKSPELQKWYIVGKFLNSRSLNLMAGSMRSYIQYVNDIKRRADGIGNELHVIVQNLDVVDKWVQVIEVCLLLSSRVSNEFEDYFYDKDDYAAYLKSYVDFDNSDMPSEYSALVEFSDQGKVDLYVDPSNPKVNRNIVQSKLFAADYILRDIIEPVSKDEIEDFYNQKDEITTCKIKGAELTDEEQKKILKYQKLKNRVELRDVVEYGEIINELLGQLINWSFMRERDLLYFQLGFHYNCLRNDSAKPEEYKNLVLDDISIKDAILHQIIGMYVNGVAIYAPGKDKNKLESQCVKGRVGGKIGAFCGYSLYLKLAADTLYNAGLEVFEVLPEHEDIINLRNGIDHFKFYLGGYRSIISLYSEIFDRFFTYDMKYQKNVLNLLQNILLRHNVIIEPIFESGIKKIGKDTKPCAKLCISSIKSDSFEYKIKDGTLITDAKDKRYLETIKKLLYYPDIESNVKILLRKDNFNQNKDKKNVNNRKTKNNNKNGNRNRDKNSGGDGLTYNPFLNLIFDLPE

SEQ ID NO: 397 - protein, 1380 aa, Artificial; identical to SEQ ID NO: 143
  Synthetic

SEQ ID NO: 398 - protein, 1412 aa, Artificial; identical to SEQ ID NO: 53
  Synthetic

SEQ ID NO: 399 - protein, 1412 aa, Artificial
  Synthetic
MKLSKEKHTRSAVANNGDIKSAEVNNGNTKSEEVNNGDIRSAVANEEQNIGGILYRFPGKSIDGVKDQMLRRDKEVKKLYNVFNQIQVGTKPKKWNNDEKLSPEENERRAQQKNIKMKNYKWREACSKYVESSQRIINDVIFYSYRKAENKLRYMRKNEDILKKMQEAEKLSKFSGGKLEDFVAYTLRKSLVVSKYDTQEFDSVAAMVVFLECIGKNNISDHEREIVCKLLELIRKDFSKLDPNVKGSQGANIVRSVRNQNMIVQPQGDRFLFPQVYAKENETVTNKNVEKEGLNEFLLNYANLDDEKRAESLRKLRRILDVYFSAPNHYEKDMDITLSDNIEKEKFNVWEKHECGKKETGLFVDIPDVLMEAEAENIKLDAVVEKRERKVLNDRVRKQNIICYRYTRAVVEKYNSNEPLFFENNAINQYWIHHIENAVERILKNCKAGKLFELRKGYLAEKVWKDAINLISIKYIALGKAVYNFALDDIWKDKKNKELGIVDERIRNGITSFDYEMIKAHENLQRELAVDIAFSVNNLARAVCDMSNLGNKESDFLLWKRNDIADKLKNKDDMASVSAVLQFFGGKSSWDINIFKEAYKGKKKYNYEVRFIDDLRKAIYCARNENFHFKTALVNDEKWNTELFGKIFERETEFCLNVEKDRFYSNNLYMFYQVSELRNMLDHLYSRSVSRAAQVPSYNSVIVRTAFPEYITNVLGYQKPGYDADTLGKWYSACYYLLKEIYYNSFLQSDRALQLFEKSVKTLSWDDKKQQRAVDNFKDHFSDIKSACTSLAQVCQIYMTEYNQQNNQIKKVRSSNDSIFDQPVYQHYKVLLKKAIANAFADYLKNNKDLFGFIGKPFKANEIREIDKEQFLPDWTSRKYEALCIEVSGSQELQKWYIVGKFLNAMSLNLMVGSMRSYIQYVTDIKRRAASIGNELHVSVQDVEKVEKWVQVIEVCSLLASRTSNQFEDYFNDKDDYARYLKSYVDFSNVDMPSEYSALVDFSNEEQSDLYVDPKNPKVNRNIVHSKLFAADHILRDIVEPVSKDNIEEFYSQKAEIAYCKIKGKEITAEEQKAVLKYQKLKNRVELRDIVEYGEIINELLGQLINWSFMRERDLLYFQLGFHYDCLRNDSKKPEGYKNIKVDENSIKDAILYQIIGMYVNGVTVYAPEKDGDKLKEQCVKGGVGVKVSAFHRYSKYLGLNEKTLYNAGLEIFEVVAEHEDIINLRNGIDHFKYYLGDYRSMLSIYSEVFDRFFTYDIKYQKNVLNLLQNILLRHNVIVEPILESGFKTIGEQTKPGAKLSIRSIKSDTFQYKVKGGTLITDAKDERYLETIRKILYYAENEEDNLKKSVVVTNADKYEKNKESDDQNKQKEKKNKDNKGKKNEETKSDAEKNNNERLSYNPFANFDFKLLN

SEQ ID NO: 400 - protein, 1360 aa, Artificial; identical to SEQ ID NO: 92
  Synthetic

SEQ ID NO: 401 - protein, 1387 aa, Artificial
  Synthetic
MKISKVGHTRTAVGVTENKGPEGLLYIDPSKKAVIDPIERVKDRIRKANNLYSVFGPVNDENDKNRKNEVADTFNGIIKKYTSRNRDKGINSERDKTIYKLDADRLIDDVTYGFKGFVYDDETKKSIDEALNVLLKGTLRREDTKKAFENLFEACIPSSEGSHKEKVEADKDSIKSYIVEPIVKDYSKSKMQKNTIESLKKQNLVVQPVSRGGNTTILAPASSNNRRSSKNSVRLTKAEEKEALTSFLEMFATLSEEDRKDSLMRLRRLADLYFYGKDGVIADTFDVWVRHNEAKQNTAKIVDYTRPDYSVYKIQDDDPEDEVKRKKKEKKIVQKAESGKLRDMLRTRNMELFRTSFKAIDEDSNNLFFEDKNVSKFFIHHIEGEFERIFSNGRSDDFRLETGYISEKVWKGLINYLSIKYIAIGKSVYNFAMDELTKPDGDMSFGRINDAYIKGITSFEYEKISAEETLQRETAVYVSFASNHLSRAVVKADSDIDLMDLKISENQDKLVDKNLITKSILQFFGGKSSWEKFSTDLSAEGFDSYAFLNDIKTLIYQLRNESFHFKTEKKNTDISNPDLISDMFEYECRKACVLEKQKFYSNNLPLYYKDADLNRVLEKLYSTYTDRKSQVPSFERVMKRGDFSEYLRQQGIKPALDDKNLKKFESAVYYLYKQVYYNDFLAHEKDAKNVFIKNIRDMKIHTEIGRNGKSRTVVEDKPIEDFRNRVLELEHYSLSEICQMIMTEYNQQNNQNIKKSQRNVEIFKHYQLGLYKALNEALTIYVKNNNALYGFIKEPHIDPDAELESVEQFLPDYTSAQYEELIKKVSASHELKKWYIMTRFLNPKQTNQLVGALRSYVQYVDSIKRRASETGNALPKFEEAKPINDIIQVIDMCTRICGNTSNNLEDYFEDNEDYADYLEQFLDFEMDESRSDNKAAMLGAFCEDKIEGQRIEIYHDGTNPILNRNIVLAKLYGATGVVSRAIPRVDSNIIKEYYSADKDIESYRKDGGCKTADQQKRLKEYQELKNRVEFRDVVDYSEIINELYGQLINWTYLRERDLMYFQLGFHYMCLNNNSEKPDAYKKIELVDKTDNSRCINGAILYQIVAMYTYGVDLYYRGHKAYPDDKKSRDYTDKKNKWEAFTGQIGQRVPMFALYSGYMNKGNSDVYRPTYDLYTSGLELFEVIDEHDDIIKLRNYIDHFNYYAKRDRSLLGIYSEIFDRFFTYDMKYQKNVPNILSNILAGHLLVPSFVFETGSKMVGKTTKACAKIDLKNKNGLKPDSFTYKLDDDDRKKVKGPSKLMGYVENVIRILYYSEGGETPEIELSEGYYKFSGESSVAKDKTSSKNNNGRKMSSGNGRKPSNNKGGNSSSYRNNNSSGGLTSTPFDAFF

SEQ ID NO: 402 - protein, 1380 aa, Artificial; identical to SEQ ID NO: 143
  Synthetic

SEQ ID NO: 403 - protein, 1382 aa, Artificial; identical to SEQ ID NO: 131
  Synthetic

SEQ ID NO: 404 - protein, 1382 aa, Artificial; identical to SEQ ID NO: 131
  Synthetic

SEQ ID NO: 405 - protein, 1380 aa, Artificial; identical to SEQ ID NO: 153
  Synthetic

SEQ ID NO: 406 - protein, 1412 aa, Artificial; identical to SEQ ID NO: 344
  Synthetic

SEQ ID NO: 407 - protein, 1380 aa, Artificial; identical to SEQ ID NO: 143
  Synthetic

SEQ ID NO: 408 - protein, 1360 aa, Artificial; identical to SEQ ID NO: 92
  Synthetic

SEQ ID NO: 409 - protein, 1380 aa, Artificial; identical to SEQ ID NO: 143
  Synthetic

SEQ ID NO: 410 - protein, 1387 aa, Artificial; identical to SEQ ID NO: 93
  Synthetic

SEQ ID NO: 411 - protein, 1071 aa, Artificial
  Synthetic
MLERDKAVKSLYNIFNQIQLGNEPKEWKENRNLSTEENTRRMHQKEVKIQNYKMKKACSRYVNTISRTINELLFFYKITKTTQNNKVKYDKLKMMHKNEDIISKMKNENILQQFKVEGENGKLEKGKLEDFVTLALRSSLVVSRYKGKDFDSVAAVAVFLENIGNNNISHEDERTINILLDLIREDFTKLNPNIDNTMGARLIRSVTNQNMLVQPQNDRFSFPCVDDSGKSKVSNKNVEKSGLDNFLLDYANLDKDIRENYLRKLRRIIDIYFSAPITYQKDMDVALSEVVVKDKFDVWKKHNEGKKDSNTFVKVPEVLIKSERDHEKLDTVIEKQARKELADRVRKQNMTCYRYTQAVVKKYNAKEALFFENDDINQYWIHHIENAVERILKSCKIGTLFKLHNGYLTEKVWKDAINLISIKYIALGKVVYNFALDDIWNDNKVKRLGDISEKIRSGITSFEYEMLKAQETLQRELAVNVAFSANNLARAVCNMSDLSDKTSDFLLWQPDDINNKMKKSTGNDEDNEKNKRAVCAVLQFFGGKSLWNDVDFEKAYKNAGKHGYGVYFINDLRKAIFAARNESFHFKTASVNNEKWNVEFLGRMFEKETEFCLDIEKDRFYSNNLPMFYKSSNLEKMLNHFYSKNISRAAQVLSYNTVFVRKTFPEYVNNVLKYKKPGTDAEILDKWYSACYYLLKEIYYNSFLQSKDAFKYFENAVYNLNSKNINHDSSGQKLSRDEMKRKKAAESFQRRFVEIKRVSDSSISYVCQVFMTDYNQQNNQNKKVRSSNDSLLDKPIYQHFKMLLKETIKSAFAAYLKDNNNKDLFGFIGEPLKINKNDDVKVIKKEEFLPDWKSDKYSLLIEKVKKSPKLQMWYIVGKFLNARSLNLMAGSMRSYLQYVSDINRRANVVGNKLHVEVLDKDTVKDWIQVIEVCLLLASRTSNQFDDYFIDGDDYAGYLKSYVDFSDKNMPSAYSALVYFSDQGKIDLYIDPKNPKINRNIVQSKLFAADHILGNGQIVQPVSKDDIVEFYNLKAKIADSKIKGENISEIEQRNILRYQRLKNKVELRDIVE

SEQ ID NO: 412 - protein, 1380 aa, Artificial; identical to SEQ ID NO: 143
  Synthetic

SEQ ID NO: 413 - protein, 1412 aa, Artificial; identical to SEQ ID NO: 151
  Synthetic

SEQ ID NO: 414 - protein, 1380 aa, Artificial; identical to SEQ ID NO: 153
  Synthetic

SEQ ID NO: 415 - protein, 1412 aa, Artificial; identical to SEQ ID NO: 151
  Synthetic

SEQ ID NO: 416 - protein, 1387 aa, Artificial; identical to SEQ ID NO: 93
  Synthetic

SEQ ID NO: 417 - protein, 1387 aa, Artificial; identical to SEQ ID NO: 93
  Synthetic

SEQ ID NO: 418 - protein, 1412 aa, Artificial; identical to SEQ ID NO: 151
  Synthetic

SEQ ID NO: 419 - protein, 1380 aa, Artificial; identical to SEQ ID NO: 153
  Synthetic

SEQ ID NO: 420 - protein, 1391 aa, Artificial
  Synthetic
MKISKEGHKRMSVTLKNEEVQKNAADKAEGQILPLEKGQKLKTYIQKRVDSSKRLYKVLGPSAVSKLNVAKSEAVLKCFNDFMKNIIDNNVRVKPADKRDRTAVDYIQNRGFSIEVRDGTKEDKSNENRGKKKEQKEIKKPLSDVYIDVDEAFVHELTRLHLRGTLKKKAKIEKDGTQVDIYIPDIIEKLVFATTHGSQFDSLISQIGEAELTACIHIIFMDYTKEEQIKKIAKSIENQDVKVQVLGKGKDARLQLASADNEKKKYIFLFLEKFACAASEEERDNLLREFRELIVLFYCGTVPYEEIKERKTRIPVWDFSFLSKMVSDVPLSFSQECSEKLAERELLKAETDLERRKENKLKIRDINTEVKRNLERIVAQRYQEGIKILGDVSGEEYKEKRFWLEYIENDAEKVLCSKKTLSENKLDVLWLCENTWRSFLSFICSKAVDMGKAVYHFAMPNLEKIESGKPVRAGEIKPQFRKGITSFDYEKIKAEENLERSFMTAISFALNNFSSAVCPPETYEKEGKEDILFMGDDALQKEMYPNASWRILQYFGGASQWKDSRFEEVSDSQKAVLINESFVPEIRRAMQLIRNSAFHYAASAAQSTLDSTSYLVEIFEREKKLIGSKYRKKYVSNNVPVFYKVEDIDHLMKSLYGSQKVLESQIPSFRNVISRKSLPELINQYFIINGTPYRKMKNDVATSEKFHAALYFVLKEIYYNGFLQEDNLMERFMDSFHDELKEVRDNTSKASAKKVKAMENFEERIKELRKGNKSLSFGEVCQAIMTDYNLQNNQKKVRLNGKDNLPDEKYKHFKMLLLVCLRRTFVDYLQKDVEGERFGCKFLKEPRLKEKIYDNLTEEQFCNGWQTDRYNNLMKGDSSYDSWLISWFIMAHFMTPKHLNHLRGEIKSYLSYVQNIERRRWNATGIQIEDEKEKRKKYEQVLEVLELAAEYCGQVSKERTDYYESEEEYARHISRYIAFDDSKSERPLEEQLYGFCNQKVAGGTANRIGIFYDGENPVLNRNVVIAKLYGTEGLLSECLQDDRVTKADIEKYYKLADSDSLKAVFKYGGCKNQKQEEERREYQQHKNRIELVDILKYSDLLNDFMSQLISWCYLRERDRMYFQMGLHYIRLYYGKNIVEKDSRFRILQSKEVRAGGERGIHLTDGAILYQLAAIYTYEYPVYALDEEGNATVSKKAKSGSTTANSITAFWKEYCEGDASAYEMGLRLFENPIEEGELISFRNYIDHFKYYSQRDRSILDLYSQVFATYFRNDKKLKKSVTFIFKNILARHFVIAKTVLDVHDEPKKDKRKDKKNPKIRTYKQAEIRIAEKDGLESDVTIHKYTKEDLDEAYKKKAEGDRNIRVPKEGGKYSILLYDESFIERLYRILNYHK

SEQ ID NO: 421 - protein, 1185 aa, Artificial
  Synthetic
MRIIKPYGRSVVEKAGPGRLARAVSLHPDPARGVELDNRKSVVEFAASHDRLVIAQWISTIDKIARKPVGEAAATPQQAEFRRRLGDAAWTLIERRALLTGLNDPAVKARLRRLWEFKIAPYKTARAVAKTGTRPPRLKGWWFRRFAGDVEEVDKVDADAVALAIHEHLYSAQYQMRVDDRTRLSGLIAARAESIAGNVLQPHAAARDKDGGWSEDDQRRYAAAGDVAREIRSAAEARERGDGKIGPRRVTSEVAGAALFEHYARLFRGADGKAMGVAQARDQESGLFNLHMAVKDCYARILKGHGKDLAKHGEGRRRVSTLLPPTSVDLFRLLDAMLDNRDLNALVRLGKVIHYESAGAGVDRPADVVDHWPADVADSDYWTSDGQARIKRNEALVRVWRHVLALASRTLTDWADPKGMIGGDILLKDSVETAIANFDAESYKRKIEVLFGGRAALFDGDGDEAFEKDVLRFALHGVAALRNAAFHFKGVGGFAEALKTLGPRQDPRVTAAVDGLWRTDEEGRGRRLLATMRGAHFESFFDQRQNRRLAQALSRASEESLPLPRFAVMLRRAENAWDRLGLPKTANRADLEAPARHCQYVALKLLYERPFRAWLAERDAATLNRFIVCAVERATKAARMLNPGASRELAEAITAKAADLGRLGNDDSVEDFFFRLSAETAGEARVQRGYESDAENARAQASHIENLKADLVALAFRDYLQKADFEFALKLRGDEPLPTKPMCALDEADFVEGEASSAEPPCELYFLLHLVPVDEVGKLLHQLRKWQILAPPAPAATGGPTTAATVAEIRLALELYLDMHDAKFEGGAALVGVEPFKRLFEGDGLFGRIFERPAGDRPGAEDDRRLPRRGLREIMRFGHLRPLLPIFDKQPIRADEVAAYLDAEQVPDGGKSEIARRQERREALHEKWARRRREFSDDDRRAYEEALRFVEEHRHRAARVTLTDHVRLHRLLMAVLGRLVDYSGLWERDLYFVALALIHQAGRRLDEIFAADGLAMLREGRVVEALRKLADIDAARAIAAEVKRRFDGAPDAASRVVKIRNAFAHFNMLRPKRGGATAALDLTAAVNDGRELMAYDRKLKNAVSRSIAELLEREGLAVAWSVNEHRLEATRVSTRQASHLANSGLREDLHGAGYVATVAELFGRTAAKPAAPLARRENRTARGGR

SEQ ID NO: 422 - protein, 1412 aa, Artificial; identical to SEQ ID NO: 151
  Synthetic

SEQ ID NO: 423 - protein, 1412 aa, Artificial; identical to SEQ ID NO: 53
  Synthetic

SEQ ID NO: 424 - protein, 1412 aa, Artificial; identical to SEQ ID NO: 140
  Synthetic

SEQ ID NO: 425 - protein, 1412 aa, Artificial
  Synthetic
MKLSKEKHTRSAVANNGDIKSAEVNNGNTKSEEVNNGDIRSAVANEEQNIGGILYRFPGKSIDGVKDQMFRRDKEVKKLYNVFNQIQVGTKPKKWNNDEKLSPEENERRAQQKNIKMKNYKWREACSKYVESSQRIINDVIFYSYRKAKNKLRYMRKNEDILKKMQEAEKLSKFSGGKLEDFVAYTLRKSLVVSKYDTQEFDSVAAMVVFLECIGKNNISDHEKEIVCKLLELIRKDFSKLDPNVKGSQGANIVRSVRNQNMIVQPQGDRFLFPQVYAKENETVTNKNVEKEGLNEFLLNYANLDDENRAESLRKLRRILDVYFSAPNHYEKDMDITLSDNIEKEKFNVWEKHECGKKETGLFVDIPDVLMEAEAENIKLDAVVEKRERKVLNDRVRKQNIICYRYTRAVVEKYNSNEPLFFENNAINQYWIHHIENAVERILKNCKAGKLFKLRKGYLAEKVWKDAINLISIKYIALGKAVYNFALDDIWKDKKNKELGIVDERIRNGITSFDYEMIKAHENLQRELAVDIAFSVNNLARAVCDMSNLGNKESDFLLWKRNDIADKLKNKDDMASVSAVLQFFGGKSSWDINIFKEAYKGKKKYNYEVRFIDDLRKAIYCARNENFHFKTALVNDEKWNTELFGKIFERETEFCLNVEKDRFYSNNLYMFYQVSELRNMLDHLYSRSVSRAAQVPSYNSVIVRTAFPEYITNVLGYQKPGYDADTLGKWYSACYYLLKEIYYNSFLQSDRALQLFEKSVKTLSWDDKKQQRAVDNFKDHFSDIKSACTSLAQVCQIYMTEYNQQNNQIKKVRSSNDSIFDQPVYQHYKVLLKKAIANAFADYLKNNKDLFGFIGKPFKANEIREIDKEQFLTDWTSRKYEALCIEVSGSRELQKWYIVGKFLNARSLNLMVGSMRSYIQYVTDIKRRAASIGNELHVSVQDVEKVEKWVQVIEVCSLLASRTSNQFEDYFNDKDDYARYLKSYVDFSNVDMPSEYSALVDFSNEEQSDLYVDPKNPKVNRNIVHSKLFAADHILRDIVEPVSKDNIEEFYSQKAEIAYCKIKGKEITAEEQKAVLKYQKLKNRVELRDIVEYGEIINELLGQLINWSFMRERDLLYFQLGFHYDCLRNDSKKPEGYKNIKVDENSIKDAILYQIIGMYVNGVTVYAPEKDGDKLKEQCVKGGVGVKVSAFHRYSKYLGLNEKTLYNAGLEIFEVVAEHEDIINLRNGIDHFKYYLGDYRSMLSIYSEVFDRFFTYDIKYQKNVLNLLQNILLRHNVIVEPILESGFKTIGEQTKPGAKLSIRSIKSDTFQYKVKGGTLITDAKDERYLETIRKILYYAENEEDNLKKSVVVTNADKYEKNKESDDQNKQKEKKNKDNKGKKNEETKSDAEKNNNERLSYNPFANLNFKLSN

SEQ ID NO: 426 - protein, 1412 aa, Artificial; identical to SEQ ID NO: 301
  Synthetic

SEQ ID NO: 427 - protein, 1412 aa, Artificial
  Synthetic
MKLSKEKHTRSAVANNGDIKSAEVNNGNTKSEEVNNGDIRSAVANEEQNIGGILYRFPGKSIDGVKDQMLRRDKEVKKLYNVFNQIQVGTKLKKWNNDEKLSPEENERRAQQKNIKMKNYKWREACSKYVESSQRIINDVIFYSYRKAKNKLRYMRKNEDILKKMQEAEKLSKFSGGKLEDFVAYTLRKSLVVSKYDTQEFDSVAAMVVFLECIGKNNISDHEREIVCKLLELIRKDFSKLDPNVKGSQGANIVRSVRNQNMIVQPQGDRFLFPQVYAKENETVTNKNVEKEGLNEFLLNYANLDDEKRAESLRKLRRILDVYFSAPNHYEKDMDITLSDNIEKEKFNVWEKHECGKKETGLFVDIPDVLMEAEAENIKLDAVVEKRERKVLNDRVRKQNIICYRYTRAVVEKYNSNEPLFFENNAINQYWIHHIENAVERILKNCKAGKLFKLRKGYLAEKVWKDAINLISIKYIALGKAVYNFALDDIWKDKKNKELGIVDERIRNGITSFDYEMIKAHENLQRELAVDIAFSVNNLARAVCDMSNLGNKESDFLLWKRNDIADKLKNKDDMASVSAVLQFFGGKSSWDINIFKEAYKGKKKYNYEVRFIDDLRKAIYCARNENFHFKTALVNDEKWNTELFGKIFERETEFCLNVEKDRFYSNNLYMFYQVSELRNMLDHLYSRSVSRAAQVPSYNSVIVRTAFPEYITNVLGYQKPGYDADTLGKWYSACYYLLKEIYYNSFLQSDRALQLFEKSVKTLSWDDEEQKRAVDNFKDHFSDIKSACTSLAQVCQIYMTEYNQQNNQIKKVRSSNDSIFDQPIYQHYKVLLKKAIANAFADYLKNNKDLFGFIGKPFKANEIREIDKEQFLPDWTSRKYEALCIEVSGSQELQKWYIVGKFLNAMSLNLMVGSMRSYIQYVTDIKRRAASIGNELHVSVQDVEKVEKWVQVIEVCSLLASRTSNQFEDYFNDKDDYARYLKSYVDFSNVDMPSEYSALVDFSNEEQSDLYVDPKNPKVNRNIVHSKLFAADHILRDIVEPVSKDNIEEFYSQKAEIAYCKIKGKEITAEEQKAVLKYQKLKNRVELRDIVEYGEIINELLGQLINWSFMRERDLLYFQLGFHYDCLRNDSKKPERYKNIKVDENSIKDAILYQIIGMYVNGVTVYAPEKDDDKLKEQCVKGGVGVKVSAFHRYSKYLGLNEKTLYNAGLEIFEVVAEHEDIINLRNGIDHFKYYLGDYRSMLSIYSEVFDRFFTYDIKYQKNVLNLLQNILLRHNVIVEPILESGFKTIGEQTKPGAKLSIRSIKSDTFQYKVKGGILITDAKDERYLETIRKILYYAENEEDNLKKSVVVTNADKYEKNKESDDQNKQKEKKNKDNKGKKNEETKSDAEKNNNERLSYNPFANLNFKLSN

SEQ ID NO: 428 - protein, 1291 aa, Artificial
  Synthetic
LKITKIDGYEFRRNFKQGSIVKGNDENIKISDIPHCSLDIFLEKELRRRLLKGLKGEYKNKEKNDKDVKEINNKRMAVKKIIKNIGVKNCRIYFYYKNVRNIEKAVEQLNNFNYPEVNTEGKKITKEEIISYNFKKNSILEKLKFQKIITRLMSKKRLYGGTIFIVFKENNCLLRNMLNIEGLKKYYAQFQNKLQGSIDNNIITKFNNEVVIKDRNSFKYNLYNKLILNNGEFEAQLNEYRNKYDLEKLLKVINFILSCKAECQDPEIADIVSYIKENTQIGQKDLKENKEKINNDKYFKNRVIKKSLIGYQRNHDELQQARKEKSGLNYYDEEVIAYFNKYYPPKKTKNKKKRIPSNSCTLEINVSADQIHRKITNILKNKVVNAAIKSGQLNEFMTNNNKRIEEITSRDIEIIHIQDVFSRKLSSSITYAANAFRNEVFTKDMKKYLNIFGKNSITVNGYELKSYIGIDGIDKKSKNEEIKEYLTTMYNLNKSKSLDQIDKFIEDLKKLGFNLKALNDEDDWRKKITILKGFINEYPEYCRKYKKIEDYFNGGDFLVQDAYKNTSLNIILEFLDENGQLSKLRGENIYPFIRASIYAFRNTSFHYKNTIETQFISKEENGYYEDYKEAINSLKEDLKSRINDIPKIEIHKAYSNAVFRFFDEAKILEFYKENNLFYPKQNNKMPSFKSILKSYYGLKESKLKLGKDLLEQLVALDKLKGESKDIAFKQAQKYLLIKLYNTKYEEILEKIKELSSSYYDKKISKSNDVGNYKNIRKAIKNFKTENNQKYFLNLKSAVQKDKELAILRGKEEGFAFNIEKELTARAFYEVIKKEEYKFIFNSPREEKDIKESDIIKEYENNKVELEKLHINPSNDLIYAFYAMCLMLSKARISELYNNMVSYQQAYMKLADVEKEDIKIYENNNHFIMIDDALEVLRILLYSYKVSFKEGSKAKDNNDNIDENKYLKILEGFIEFTSKDNEEREIEKSELIKFNEVLDGRDQLYIQKDNKTLVKFGQIIEAYKENLLGRYKEYYKNNKIALDEVKRFNELEKDIGDITKEIDAKKEKMKKNSKNNNKTKKEYREKYKKKLEYIWLKNRILFNDVSKMNRLIIDVYSRLNGLIAVLEKDFVHLLKERNPTLRITKKTDIIDSFINNNSLNSIYHYSNKDYNPNGRSPNEQDKEIRNRFAHFHYLRDDKGSSVDFITQLNLLRRLLRIDRKLKNAVTKTVIKTFDKHGFNLVFEFENHEIKSYSLKRNKLTDKYLDNYINVYPNNDFMLEMIEKIIFKDCTKK

SEQ ID NO: 429 - protein, 1382 aa, Artificial; identical to SEQ ID NO: 166
  Synthetic

SEQ ID NO: 430 - protein, 1382 aa, Artificial
  Synthetic
MKLSKEKHIRSAVANEEQNIGGVLYHVPGTDTIGLKDQMLIRDRDVKQLYNVFNQIQVGDKPKKWKNDEKLSPEENERRAQQKNIKMKNYKWREACSKYVESSQRTINDVLFYSYMEADKKIRNMRKNEDILIKMQEVTKLPKFSGGKLEDFVAYTLRKSLVVSKNSTQEFDSVAAMVVFLECIGKSNISDHEKEIVCKLLELIRKDFSKLDPNVEGSQGANIVRSVRNQNMIVQPQGDRFSFPQVSDKEKKTVTNKNVEKEGLNEFLLNYANLDDEKRAEILRKLRRILDVYFSAPNHYEKDMDITLSDNIDKEKFNVWKKYECGKKVTDLFVDIPDVLMEAEAENIKLDAVVEKRERKVLADRVRRQNIICYRYTRAVVEKYNSNESLFFENDAINQYWIHHIENAVERILKNCKAGKLFKLRMGYLAEKVWKDAINLISIKYIALGKAVYNFALDDIWKDKKDKELGIVDERIRNGITSFDYEMIKAYENLQRELSVDIAFSVNNLARAVCDMSNLGDKESDFLLWKRNDIADKLKNKDDMASVSAVLQFFGGKSSWDINIFKEAYKGKNKYNYEVRFIDDLRKAIYCARNENFHFKTALVNNEKWNTELFGKIFERETEFCLNVEKDRFYSNNLYMFYPVSELRNMLDQLYSRSVSRAAQVPSYNSVFIRKNFPEDISNVLRYQKPGYDADTLGKWYSACYYLLKEIYYNSFLQSDKALQLFEKSVKTLSWDDEEQKRAVDNFKNHFSDIKSACTSLAQVCQIYMTEYNQQNNQIKKVRSSNDSIFDQPIYQHYKVLLKKAIANAFAAYLKNNKDLFGFIGKPFKANEIREIDKEQFLPDWTSRKYESLCIEVSGSQELQKWYIVGKFLNARSLNLMAGSMRSYIQYVTDIKRRAASIGNELHVSVQDVEKVEKWVQVIEVCSLLAFRTSNQFEDYFNDKDDYARYLKSYVDFSNADMPSEYSALVDFSNEEQSDLYVDPKNPKVNRNIVYSKLFAADHILRDIVEPVSKDNIEEFYDQKAEIVYCKIKGKDITAEEQKAVLKYQKLKNRVELRDIVEYGEIINELLGQLINWSFMRERDLLYFQLGFHYNCLRNNSEKKEAYQKIEVNGDSIKDAILYQIIGMYVNGVAVYAPDEKGDILKEQCTKGGAGGKISAFNRYSEYLGLDKLTLYNAGLEIFEVVAEHDDIINLRNGIDHFKYYLGDYRSMLSIYSEVFDRFFTYDIKYQKNVLNLLQNILLRHNVIVEPVLESGFKTIGKQTTSGAKLSIRSIKSDTFQYKVKGGSLITDAKDERYLKTIRKILYYVENEEDNLKKSVVVTNADKYEKNKESDDQNKQKEKKNKDNKGKKNEETKSDAGKNNNERLSYNPFANLNFKLPN

SEQ ID NO: 431 - protein, 1380 aa, Artificial; identical to SEQ ID NO: 276
  Synthetic

SEQ ID NO: 432 - protein, 1228 aa, Artificial; identical to SEQ ID NO: 353
  Synthetic

SEQ ID NO: 433 - protein, 1382 aa, Artificial; identical to SEQ ID NO: 166
  Synthetic

SEQ ID NO: 434 - protein, 1382 aa, Artificial; identical to SEQ ID NO: 430
  Synthetic

SEQ ID NO: 435 - protein, 1387 aa, Artificial; identical to SEQ ID NO: 93
  Synthetic

SEQ ID NO: 436 - protein, 1382 aa, Artificial; identical to SEQ ID NO: 166
  Synthetic

SEQ ID NO: 437 - protein, 1382 aa, Artificial; identical to SEQ ID NO: 166
  Synthetic

SEQ ID NO: 438 - protein, 1382 aa, Artificial; identical to SEQ ID NO: 430
  Synthetic

SEQ ID NO: 439 - protein, 1382 aa, Artificial; identical to SEQ ID NO: 430
  Synthetic

SEQ ID NO: 440 - protein, 1382 aa, Artificial; identical to SEQ ID NO: 210
  Synthetic

SEQ ID NO: 441 - protein, 1382 aa, Artificial; identical to SEQ ID NO: 166
  Synthetic

SEQ ID NO: 442 - protein, 1387 aa, Artificial; identical to SEQ ID NO: 93
  Synthetic

SEQ ID NO: 443 - protein, 1387 aa, Artificial; identical to SEQ ID NO: 93
  Synthetic

SEQ ID NO: 444 - protein, 1357 aa, Artificial; identical to SEQ ID NO: 289
  Synthetic

SEQ ID NO: 445 - protein, 1388 aa, Artificial; identical to SEQ ID NO: 103
  Synthetic

SEQ ID NO: 446 - protein, 1387 aa, Artificial; identical to SEQ ID NO: 93
  Synthetic

SEQ ID NO: 447 - protein, 1387 aa, Artificial; identical to SEQ ID NO: 93
  Synthetic

SEQ ID NO: 448 - protein, 1387 aa, Artificial; identical to SEQ ID NO: 93
  Synthetic

SEQ ID NO: 449 - protein, 1387 aa, Artificial; identical to SEQ ID NO: 93
  Synthetic

SEQ ID NO: 450 - protein, 1382 aa, Artificial; identical to SEQ ID NO: 166
  Synthetic

SEQ ID NO: 451 - protein, 1411 aa, Artificial
  Synthetic
MKISKVNHTHAAVVKKNDGKSGGILYVDPSQSGALDLGKRFDSLNRKAQRLYNFFNPVQAGTEPKEVKKRENESDDSYLARKENNNISKANYERRLKWERKIGPINKTIRSVMFYDDDKKNRHVCDSRRVLENLGQQQGLAEQDINEVVTLFLRNSLSKCAENVKTLLRCMGKSGISEQEKVEINELIDFVKKDFEKTEAKNRIIRSIKNQNMTVQPQKGVGDPILRLSDNTNSKSNSIKKDEKEGLNSFISDYADLNPDSRMEMLRKLRRLVDLYFGAPNEYQKGDILNLPQRVNCDPDYDVWKAHEAAKQENEPFADIPKGLLKAYNEKKKLDSVEQKRDQKAIMDGIRARNIICYRYSLAIVENDDRNLFFSDIRINKFWIHHIQSAVERILKNISVEKLYRNDVGYLSEKVWKDLLNYLCVKYIAIGKAVFNFAMEDVYTSEVRDIELGKITKAASEGITSFDYEYIKAGETLQRETAVAVAFAANNVARSIVNIPEPFVVLDKNGKEKEIDMSDFLLWEEKDISDRLRSKEKYDTVGSILQFFGGKSKWDMEVFDQAYNGDPDVGFASDIRKAIYSLRNSSFHFTTANIDKGSWNISLIASLFEKEAKFALTSEKNKLYSNNLCMFYRKSDLKAILDKLYGKYSSRASQVPAFNKVFVRKNFVNELKNMGLAPSFTDDKTLLMWQNSIYYLFKEIYYNAFLTDPAVKKLVIDTVYEIKKNPMAYVNDNKNDKDQTKIGRAANDFADRFIELKNHRLEEICQIIMSEYNLQNQGNRKKKTSNASPFDKDIFQHYKMLLMKVLMISFEKYVKSSFPQIIKTDNAVYEPGSVEDFLPNWESPMYDDLIKEVGQNAELQKWYVVSHFLNGKMLNQLGGSVRSYIQYVQDIKRRAEETGNKLCVPDNTIKEDIKRCHKIVEIIDLCVRSASNISHEFTDYFNDEDDYALYLSKYLDYGTSDSGLSTWAELGRFCNDGEVNYGIYRDALNPIPNRNIVMSKLYGADTIIPKVINRVNEDIIKEYYQMIKEIDQYRIKGKCDSEDEQKKLLHFQKIKNKIEFRDIVEYSELINDLLGQLINWSFLRERDLLYFQLGFHYACLHNKSRKPEGYDIVKRNNGTTVKGTILRQIAGLYINGIGILDKTTSGDYKEAAQAGGSFGRFYSYSNKVMESTGFYAPDDEEGRKNSLYLAGLELFENLNEHESIVKKRNDIDHFKYYMGKAGSLLDLYSEVFDRFFTYDMKYQKNVINMLENILMRYFVIISPKVGSGTKLLDNNGKKERAQIEIISSGICSDEFSYEYSGGNVKTPARNTEFLNTVARILYYPEEIESYSLVKVQGEFSVTRTDGKNRYPEKKNGNNNNQKNRGNRQNYQRNKNHNNKKSSMSETVYTSSSPNESFGYNPFRDLPRDFKM

SEQ ID NO: 452 - protein, 1425 aa, Artificial; identical to SEQ ID NO: 3
  Synthetic

SEQ ID NO: 453 - protein, 1412 aa, Artificial
  Synthetic
MKLSKEKHTRSAVANNGDIKSAEVNNGNTKSEEVNNGDTRSAVANEEQNIGGILYRFPGKSIDGVKDQMLRRDKEVKKLYNVFNQIQVGTKPKKWNNDEKLSPEENERRAQQKNIKMKNYKWREACSKYVESSQRIINDVIFYSYRKAKNKLRYMRKNEDILKKMQEAEKLSKFSGGKLEDFVAYTLRKSLVVSKYDTQEFDSVAAMVVFLECIGKNNISDHEREIVCKLLELIRKDFSKLDPNVKGSQGANIVRSVRNQNMIVQPQGDRFLFPQVYAKENETVTNKNVEKEGLNEFLLNYANLDDEKRAESLRKLRRILDVYFSAPNHYEKDMDITLSDNIEKEKFNVWEKHECGKKETGLFVDIPDVLMEAEAENIKLDAVVEKRERKVLNDRVRKQNIICYRYTRAVVEKYNSNEPLFFENNAINQYWIHHIENAVERILKNCKAGKLFKLRKGYLAEKVWKDAINLISIKYIALGKAVYNFALDDIWKDKKNKELGIVDERIRNGITSFDYEMIKAHENLQRELAVDIAFSVNNLARAVCDMSNLGNKESDFLLWKRNDIADKLKNKDDMASVSAVLQFFGGKSSWDINIFKDAYKGKKKYNYEVRFIDDLRKAIYCARNENFHFKTALVNDEKWNTELFGKIFERETEFCLNVEKDRFYSNNLYMFYQVSELRNMLDHLYSRSVSRAAQVPSYNSVIVRTAFPEYITNVLGYQKPSYDADTLGKWYSACYYLLKEIYYNSFLQSDRALQLFEKSVKTLSWDDKKQQRAVDNFKDHFSDIKSACTSLAQVCQIYMTEYNQQNNQIKKVRSSNDSIFDQPVYQHYKVLLKKAIANAFADYLKNNKDLFGFIGKPFKANEIREIDKEQFLPDWTSRKYEALCIEVSGSQELQKWYIVGKFLNARSLNLMVGSMRSYIQYVTDIKRRAASIGNELHVSVHDVEKVEKWVQVIEVCSLLASRTSNQFEDYFNDKDDYARYLKSYVDFSNVDMPSEYSALVDFSNEEQSDLYVDPKNPKVNRNIVHSKLFAADHILRDIVEPVSKDNIEEFYSQKAEIAYCKIKGKEITAEEQKAVLKYQKLKNRVELRDIVEYGEIINELLGQLINWSFMRERDLLYFQLGFHYDCLRNDSKKPEGYKNIKVDENSIKDAILYQIIGMYVNGVTVYAPEKDGDKLKEQCVKGGVGVKVSAFHRYSKYLGLNEKTLYNAGLEIFEVVAEHEDIINLRNGIDHFKYYLGDYRSMLSIYSEVFDRFFTYDIKYQKNVLNLLQNILLRHNVIVEPILESGFKTIGEQTKPGAKLSIRSIKSDTFQYKVKGGTLITDAKDERYLETIRKILYYAENEEDNLKKSVVVTNADKYEKNKESDDQNKQKEKKNKDNKGKKNEETKSDAEKNNNERLSYNPFANLNFKLSN

SEQ ID NO: 454 - protein, 1412 aa, Artificial; identical to SEQ ID NO: 344
  Synthetic

SEQ ID NO: 455 - protein, 1382 aa, Artificial
  Synthetic
MKLSKEKHIRSAVANEEQNIGGVLYHVLGTDTIGLKDQMLIRDRDVKQLYNVFNQIQVGDKPKKWKNDEKLSPEENERRAQQKNIKMKNYKWREACSKYVESSQRTINDVLFYSYMEADKKIRNMRKNEDILIKMQEVTKLPKFSGGKLEDFVAYTLRKSLVVSKNSTQEFDSVAAMVVFLECIGKSNISDHEKEIVCKLLELIRKDFSKLDPNVEGSQGANIVRSVRNQNMIVQPQGDRFSFPQVSDKEKKTVTNKNVEKEGLNEFLLNYANLDDEKRAEILRKLRRILDVYFSAPNHYEKDMDITLSDNIDKEKFNVWKKYECGKKVTDLFVDIPDVLMEAEAENIKLDAVVEKRERKVLADRVRRQNIICYRYTRAVVEKYNSNESLFFENDAINQYWIHHIENAVERILKNCKAGKLFKLRMGYLAEKVWKDAINLISIKYIALGKAVYNFALDDIWKDKKDKELGIVDERIRNGITSFDYEMIKAYENLQRELSVDIAFSVNNLARAVCDMSNLKDRESDFLLWKKEDIADKLKNKDDMASVSAVLQFFGGKSSWDINIFKEAYKGKNKYNYEVRFIDDLRKAIYCARNENFHFKTALVNNEKWNTELFGKIFERETEFCLNVEKDRFYSNNLYMFYPVSELRNMLDQLYSRSVSRAAQVPSYNSVFIRKNFPEDITNVLRYQKPGYDADTLDKWYSACYYLLKEIYYNSFLQSDKALQLFEKSVKTLSWDNEEQKRAVDNFKNHFSDIKSACTSLAQVCQIYMTEYNQQNNQIKKVRSSNDSIFDQPIYQHYKVLLKKAIANAFAAYLKNNKDLFGFIGKPFKANEIREIDKEQFLPDWTSRKYESLCIEVSGSQELQKWYIVGKFLNARSLNLMAGSMRSYIQYVTDIKRRAASIGNELHVSVQDVEKVEKWVQVIEVCSLLAFRTSNQFEDYFNDKDDYARYLKSYVDFSNSDMPSEYSALVDFSNEEQSDLYVDPKNPKVNRNIVHSKLFAADHILRDIVEPVSKDNIEEFYDQKAEIVYCKIKGKDITAEEQKAVLKYQKLKNRVELRDIVEYGEIINELLGQLINWSFMRERDLLYFQLGFHYNCLRNNSEKKEAYQKIEVNGDSIKDAILYQIIGMYVNGVAVYAPDEKGDILKEQCTKGGAGGKISAFNRYSEYLGLDKLTLYNAGLEIFEVVAEHDDIIKLRNGIDHFKYYLGDYRSMLSIYSEVFDRFFTYDIKYQKNVLNLLQNILLRHNVIVEPVLESGFKTIGKQTTSGAKLSIRSIKSDTFQYKVKGGSLITDAKDERYLKTIRKILYYVENEEDNLKKSVVVTNADKYEKNKESDDQNKQKEKKNKDNKGKKNEETKSDAGKNNNERLSYNPFANLNFKLPN

SEQ ID NO: 456 - protein, 1387 aa, Artificial; identical to SEQ ID NO: 93
  Synthetic

SEQ ID NO: 457 - protein, 1177 aa, Artificial
  Synthetic
MGTGKYRITKIGRNWKENENKNKKRIILKRIVSDGEVKYVNENDNVDIDITETYYGILSNNKAKFLGSNEQFLFKVNKMDRNIKNDYVIIKDYTEEEFEKFDKKIFFSRKIKINNEDREKICRNFYEDEREIMKKRLEEAKNFNNIIFNICNKIFKLEYLDYTDEKVYKIFQKEIKFEDIKNLKEAFKKQENGLETDKLLAISFNKKRNNILLEFIQQIVRQKFEKEKELENWFSHEGEKYCKEIFKIYSNMSQKEKYSKLLGHRNKNIASISEKKETLQRRLKLGNYSDYDLRKYYQKDYKEEAIKELKDKNKEELEREIEELIKKNYKIDKLCDEISNLEFFFVESKKENKDKMSEIIVKIKEHYKKNVNVEEELKNKEKYILSLIHNYVKGRYRKCLELQQKENVDFENLGKRIKEIFDSNEVTKKLKKSIINKVNSYKIFEMKFQNPNIESSDDLEILKAEETFLNKLSTAVSKVGYTLNILLGVSSEEDILKNYNMVGKLCNNNSTTEIYKVYPELEKNEKLLQGMIHFIQGLRQQSLHPKISWNFETENLKPEKLERLKEKKNIKIRDCVVHEYNLDKKEKNEVEIKEYFEKIEKKLPNYFIEKYESNNVFNIYRDSVDKIMEVVKKFNFKEDNTIDYLFPKFHKIYKKMCKLENITCKSENTDDRQNGARKYLLQTIYYYYFQYEIENNRNNIFKYYRNKIKTEKNSYRDKNIEILYRNIQREGMLNNRLLQMNNEWIEFIMIQFIEFISIKKLNWILDDLSEYRKKEKLDENDKNRLLKILKQKMNKNITYSNDSYVFISLAQFLDLKEISNLIHDIKKFVQFREKNISKYKPEKNKVYIEELRKISYILKVMLEHKERVIQKHYLESYDEDISIMYGKDIEKKDIKDIEIKIKNKNQEVINQPLYKSGNDGNSSWIVLYGIEQAKRNGTFKFFEGFFNLNEDIKLCKKDIKKYEKLYNEKEENQKKVDEYIFYERNSYIEKVNNNINIEKTNNNKQLFYYYKNMIYGDGLKKGYDFINDIYSHYLSWAYRIERDCKIYKIKEYENKKNFNEYKFKEYKSIKNFRNEIAHFNYFQKTNKSLLELLNNFYDIFDYNLKYQRDVQKVINNIFEKYQVIREDGGPVIFYCKIEKKLKLSENIIPKKHSKYPEIKLIHEKYVEFFKKLFEYKK

SEQ ID NO: 458 - protein, 1161 aa, Artificial
  Synthetic
MKVTKVDGISHKKYIEEGKLVKSTSEENRTSERLSELLSIRLDIYIKNPDNASEEENRIRRENLKKSFSNKVLHLKDSVLYLKNRKEKNAVQDKNYSEEDISEYDLKNKNSFSVLKKILLNEDINSEELEIFRKDVEAKLNKVNSLKYSFEENKANYQKINENNVEKVGGKSKRNIIYDYYRESAKRNDYINNVQEAFDKLYKKEDIETLFFLIENSKKHEKYKIRECYHKIIGRKNDKENFAKIIYKEIQNVNNIKELIEKVPDMSELKKSQVFYKYYLDKEELNDKNIKYAFCHFVEIEMSQLLKNYVYKRLSNISNDKIKRIFEYQNLKKLIENKLLNKLDTYVRNCGKYNYYLQVGEIATSDFIARNRQNEAFLRNIIGVSSVAYFSLRNILETENENDITGRMRGKTVKNNKGEEKYVSGEVDKIYNENKKNEVKENLKMFYSYDFNMDNKNEIEDFFANIDEAISSIRHGIVHFNLELEGKDIFAFKNIAPSEISKKMFQNEINEKKLKLKIFRQLNSANVFRYLEKYKILNYLKRTRFEFVNKNIPFVPSFTKLYSRIDDLKNSLGIYWKTPKTNDDNKTKEIIDAQIYLLKNIYYGEFLNYFMSNNGNFFEISKEIIELNKNDKRNLKTGFYKLQKFEDIQEKTPKEYLANIQSLYMINAGNQDEEEKDTYIDFIQKIFLKGFMTYLANNGRLSLIYIGSDEETNTSLAEKKQEFDKFLKKYEQNNNIEIPHEINEFLREIKLGNILKYTERLNMFYLILKLLNHKELTNLKGSLEKYQSANKEETFSDELELINLLNLDNNRVTEDFELEVNEIGKFLDFNGNKIKDRKELKKFDTNKIYFDGENIIKHRAFYNIKKYGMLNLLEKIADKAKYKISLKELKEYSNKKNEIEKNYRMQQNLHRKYARPKKDEKFNDKDYKEYEKAIGNIQKYTHLKNKVEFNELNLLQGLLLKILHRLVGYTSIWERDLRFRLKGEFPENQYIEEIFNFDNSKNVKYKSGQIVEKYINFYKELYKDNVEKRSIYSDKKVKKLKQEKKDLYIRNYIAHFNYIPHAEISLLEVLENLRKLLSYDRKLKNAVMKSVVDILKEYGFVATFKIGADKKIGIQTLESEKIVHLKNLKKKKLMTDRNSEELCELVKVMFEYKMKEKKSEN

SEQ ID NO: 459 - protein, 1353 aa, Artificial; identical to SEQ ID NO: 188
  Synthetic

SEQ ID NO: 460 - protein, 1353 aa, Artificial; identical to SEQ ID NO: 188
  Synthetic

SEQ ID NO: 461 - protein, 1353 aa, Artificial; identical to SEQ ID NO: 188
  Synthetic

SEQ ID NO: 462 - protein, 1284 aa, Artificial; identical to SEQ ID NO: 371
  Synthetic

SEQ ID NO: 463 - protein, 1382 aa, Artificial; identical to SEQ ID NO: 210
  Synthetic

SEQ ID NO: 464 - protein, 1382 aa, Artificial
  Synthetic
MKLSKEKHIRSAVANEEQNIGGILYRFPGKSIDGVKDQMLRRDKEVKKLYNVFNQIQVGTKPKKWNNDEKLSPEENERRAQQKNIKMKNYKWREACSKYVESCQRIINDVIFYSYRKAKNKLRYMRKNEDILKKMQEAEKLSKFSGGKLEDFVAYTLRKSLVVSKYDTQEFDSVAAMVVFLECIGKNNISDHEREIVCKLLELIRKDFSKLDPNVKGSQGANIVRSVRNQNMIVQPQRDRFLFPQVYAKENETVTNKNVEKEGLNEFLLNYANLDDEKRAESLRKLRRILDVYFSAPNHYEKDMDITLSDNIEKEKFNVWEKHECGKKETGLFVDIPDVLMEAEAENIKLDAVVEKRERKVLNDRVRKQNIICYRYTRAVVEKYNSNEPLFFENNAINQYWIHHIENAVERILKNCKAGKLFKLRKGYLAEKVWKDAINLISIKYIALGKAVYNFALDDIWKDKKNKELGIVDERIRNGITSFDYEMIKAHENLQRELAVDIAFSVNNLARAVCDMSNLGNKESDFLLWKRNDIADKLKNKDDMASVSAVLQFFGGKSSWDINIFKEAYKGKKKYNYEVRFIDDLRKAIYCARNENFHFKTALVNDEKWNTELFGKIFERETEFCLNVEKDRFYSNNLYMFYQVSELRNMLDHLYSRSVSRAAQVPSYNSVIVRTAFPEYITNVLGYQKPGYDADTLGKWYSACYYLLKEIYYNSFLQSDRALQLFEKSVKTLSWDDKKQQRAVDNFKDHFSDIKSACTSLAQVCQIYMTEYNQQNNQIKKVRSSNDSIFDQPVYQHYKVLLKKAIANAFADYLKNNKDLFGFIGKPFKANEIREIDKEQFLPDWTSRKYEALCIEVSGSQELQKWYIVGKFLNARSLNLMVGSMRSYIQYVTDIKRRAASIGNELHVSVQDVEKVEKWVQVIEVCSLLASRTSNQFEDYFNDKDDYARYLKSYVDFSNVDMPSEYSALVDFSNEEQSDLYVDPKNPKVNRNIIHSKLFAADHILRDIVEPVSKDNIEEFYSQKAEIAYCKIKGKEITAEEQKAVLKYQKLKNRVELRDIVEYGEIINELLGQLINWSFMRERDLLYFQLGFHYDCLRNDSKKPEGYKNIKVDENSIKDAILYQIIGMYVNGVTVYAPEKDGDKLKEQCVKGGVGVKVSAFHRYSKYLGLNEKTLYNAGLEIFEIVAEHEDIINLRNGIDHFKYYLGDYRSMLSIYSEVFDRFFTYDIKYQKNVLNLLQNILLRHNVIVEPILESGFKTIGEQTKPGAKLSIRSIKSDTFQYKVKGGTLITDAKDERYLETIRKILYYAENEEDNLKKSVVVTNADRYEKNKESDDQNKQKEKKNKDNKGKKNEETKSDAEKNNNERLSYNPFANLNFKLSN

SEQ ID NO: 465 - protein, 1387 aa, Artificial
  Synthetic
MKISKEGHKRMSVTLKNEEVQKNAADKAEGQILPLEKGQKLKTYIQKRVDSSKRLYKVLGPSAVSKLNVAKSEAVLKCFNDFMKNIIDNNVRVKPADKRDRTAVDYIQNRGFSIEVRDGTKEDKSNENRGKKKEQKEIKKPLSDVYIDVDEAFVHELTRLHLRGTLKKKAKIEKDGTQVDIYIPDIIEKLVFATTHGSQFDSLISQIGEAELTACIHIIFMDYTKEEQIKKIAKSIENQDVKVQVLGKGKDARLQLASADNEKKKYIFLFLEKFACAASEEERDNLLREFRELIVLFYCGTVSYEEIKERKTRIPVWDFSFLSKMVSDVPLSFSQECSEKLAERELLKAETDLERRKENKLKIRDINTEVKRNLERIVAQRYQEGIKILGDVSGEEYKEKRFWLEYIENDAEKVLCSKKTLSENKLDVLWLCENTWRSFLSFICSKAVDMGKAVYHFAMPDLEKIESGKPVRAGEIKPQFRKGITSFDYEKIKAEENLERSFMTAISFALNNFSSAVCPPETYEKEGKEDILFMGDDALQKEMYPNASWRILQYFGGASQWKDSRFEEVSDSQKAVLINESFVPEIRRAMQLIRNSAFHYAASAAQSTLDSTSYLVEIFEREKKLIGSKYRKKYVSNNVPVFYKVEDIDHLMKSLYGSQKVLESQIPSFRNVISRKSLSELINQYFIINGTPYRKMKNDVATSEKFHAALYFVLKEIYYNGFLQEDNLMERFMDSFHDELKEVRDNTSKASAKKVKAMENFEERIKELRKGNKSLSFGGVCQAIMTDYNLQNNQKKVRLNGKDNLPDEKYKHFKMLLLVCLRRTFVDYLQKDVEGERFGCKFLKEPRLKEKIYDNLTEEQFCNGWQTDRYNNLMKGDSSYDSWLISWFIMAHFMTPKHLNHLRGEIKSYLSYVQNIERRRWNATGIQIEDEKEKRKKYEQVLEVLELAAEYCGQVSKERTDYYESEEEYARHISRYIAFDDSKSERPLEEQLYGFCNQKVAGGTANRIGIFYDGENPVLNRNVVIAKLYGTEGLLSECLQDDRVTKADIEKYYKLADSDSLKAVFKYGGCKNQKQEEERREYQQHKNRIELVDILKYSDLLNDFMSQLISWCYLRERDRMYFQMGLHYIRLYYGKNIVEKDSRFRILQSKEVRAGGERGIHLTDGAILYQLEAIYTYEYPVYALDEEGNATVSKKAKSGSTMANSIKAFCKEYCEGDASAYEMGLRLFENPIEEGESISFRNYIDHFKYYSQRDRSILDLYSQVFATYFRNDKKLKKSVTFIFKNILARHFVITKTVLDVHDEPKKDKKNPKIRTYKQAEIRIAEKDGLESDVTIHKYTKEDLDEAYKKKAEGDRNIRVPKKGGKYSILLYDESFIERLYRILNYHK

SEQ ID NO: 466 - protein, 1360 aa, Artificial; identical to SEQ ID NO: 92
  Synthetic

SEQ ID NO: 467 - protein, 1382 aa, Artificial; identical to SEQ ID NO: 455
  Synthetic

SEQ ID NO: 468 - protein, 1382 aa, Artificial; identical to SEQ ID NO: 210
  Synthetic

SEQ ID NO: 469 - protein, 949 aa, Artificial; identical to SEQ ID NO: 43
  Synthetic

SEQ ID NO: 470 - protein, 1353 aa, Artificial
  Synthetic
MKVTKAEKLRVAVSRKLNNEDKRAVLYKTPNPGQTCGTVKKQLANRVERANKLYGVFFRSDVPETLQYHFEELVTYAAQSTSPNEFRQKASQYRECEKKDKFGKMRKYPIFRCSYAPSGKNMKKVMELYVRERMKDEWQSQAYRTAAIEILLCICNKDFSKQLSRVDARIFADFYNASKACPQPYIGKSTGVLEAAFTSVMKQMSLHAKANASNKIWWLQNQLRTIELNKKIVKISDFKYEYATEDRMRAILVRMRKSLKRGTNGDIAVALLQGIAQMNGKTLSGVLEELSANSETKEQLIKFLKAVHEDYHKTPILKAIRNQDVKVQVHEVDPVSPEGRALDLASINVSKGNERKKYKVALTQTLGNYAKSPKDATQTLKAIKGVLLDYFMWLDSDVKAEFLEDNNLWKIPNRTEEYFDNNFVPIDDKKDDKIEAIEDFASIWRQERVKNSRIKARMNYVNCGKYQQLIKQETDDFRICWISYAKDFVEKNYVSKNRQFTQGDCFSTKMLLECWKEIIRFICGKYIDIGKAVYHFAMPETMNARDSLAYGVLGEKYKEGISSFDYEAIKAEETLQRDIAKAAVAAIHAFSGSVIDDKKPVEDILFIKDEELQEHAKADDVIVKQILRFYGGFSSVEGREKLEGMALAKEVLSQLKAIRNENFHFTQGKRKNVEENIPLTKALWENEEKVYRQTVKETYYSNNVSMFYSQEVIQKLVAELYQNNNVAEAQIPAFRTIWKRKDLPEYIGSLNISWDKTEPKQVIYEGALYFLLKEIYYRDFIKSGEAKKLFFDAVMDNATEMEKSSNADSRNQEKKALANAGKNFRDYVNGLNASTLGEVCQFIQNEYNQQNRGKQEQEIYKHFKMLLPICMRKAFQRYIDEKHSFIKKPGELPQTTEDYLENVKVACPEKKIKLGRWFTFAHFIHPRELNFLIGDFMNYIQYREDVLRRSEHAGQFSDTTERDGEKAVVDHAVQKAKDLLGVLGFVRHISGRVSNEFTDYYADRAEYDEYMAKYFEPDVQIEQYDLYGDAKNAKVIRNIELARMYAGDSLMSASYRKITKKEIETYYAKKDEIAQLQSQGICNSKKEQEDIVAFQKLKNRITLNEVTDLWSLVNELLGNLVSLAYLRERDEMYLFLGFYYMALRHPEGWTNEIMNSVSNEKYAVKEGLVLYQTVAVFDFGTKLLFQNDNQKWEETTGYKWQHFIDNHKESYACILPLFEIAKCETEARAVRNYVDHFKYYSNEDRSILELYGKFYTHLFGYSTRLRKSVLQILAQTLEKHGISAGIQFDGTTVKATRCDMKSVEFTYKYEEKLNEQKTVLRTISLPAKSEGFITAVCEMLKQKKGDHTENTLC

SEQ ID NO: 471 - protein, 1268 aa, Artificial; identical to SEQ ID NO: 76
  Synthetic

SEQ ID NO: 472 - protein, 1387 aa, Artificial; identical to SEQ ID NO: 93
  Synthetic

SEQ ID NO: 473 - protein, 1382 aa, Artificial; identical to SEQ ID NO: 210
  Synthetic

SEQ ID NO: 474 - protein, 1268 aa, Artificial; identical to SEQ ID NO: 76
  Synthetic

SEQ ID NO: 475 - protein, 1268 aa, Artificial; identical to SEQ ID NO: 76
  Synthetic

SEQ ID NO: 476 - protein, 1381 aa, Artificial
  Synthetic
MKLSKEKHTRSAVANEEQNIGGILYRFPGKSIGGVKDQMLRRDKEVKKLYNVFNQIQVGTKPKKWNNDEKLSPEENERRAQQKNIKIENYKWREACSKYVKSSQKTINYVIFYSYGKAENKLRYMRKNEDILKKMQEEEKLPKFSGGKLEDFVAYTLRKSLVVSKYDTQEFDSVAAMVVFLECIGKSNISDHEKEIVCKLLELIRKDFSKLDPNVKGSQGANIVRSVRNQNMIVQPQGDRFLFPQVYAKENETVTNKNVEKEGLNEFLLNYANLDDEKRAESLRKLRRILDVYFSAPNHYEKDMDITLSDNIEKEKFNVWEKHECGKKETGLFVDIPDVLMEAEAENIKLDAVVEKRERKVLNDRVRKQNIICYRYTRAVVEKYNSNEPLFFENNAINQYWIHHIENAVERILKNCKAGKLFKLRKGYLAEKVWKDAINLISIKYIALGKAVYNFALDDIWKDKKNKELGIVDERIRNGITSFDYEMIKAHENLQRELAVDIAFSVNNLARAVCDMSNLGNKESDFLLWKRNDIADKLKNKDDMASVSAVLQFFGGKSSWDINIFKEAYKGKKKYNYEVRFIDDLRKAIYCARNENFHFKTALVNDEKWNTELFGKIFERETEFCLNVEKDRFYSNNLYMFYQVSELRNMLDHLYSRSVSRAAQVPSYNSVIVRTAFPEYITNVLGYQKPGYDADTLGKWYSACYYLLKEIYYNSFLQSDRALQLFEKSVKTLSWDDKKQQRAVDNFKDHFSDIKSACTSLAQVCQIYMTEYNQQNNQIKKVRSSNDSIFDQPVYQHYKVLLKKAIANAFADYLKNNKDLFGFIGKPFKANEIREIDKEQFLPDWTSRKYEALCIEVSGSQELQKWYIVGKFLNAMSLNLMVGSMRSYIQYVTDIKRRAASIGNELHVSVQDVEKVEKWVQVIEVCSLLASRTSNQFEDYFNDKDDYARYLKSYVDFSNVDMPSEYSALVDFSNEEQSDLYVDPKNPKVNRNIVHSKLFAADHILRDIVEPVSKDNIEEFYSQKAEIAYCKIKGKEITAEEQKAVLKYQKLKNRVELRDIVEYGEIINELLGQLINWSFMRERDLLYFQLGFHYDCLRNDSKKPEGYKNIKVDENSIKDAILYQIIGMYVNGVTVYAPEKDGDKLKEQCVKGGVGVKVSAFHRYSKYLGLNEKTLYNAGLEIFEVVAEHEDIINLRNGIDHFKYYLGDYRSMLSIYSEVFDRFFTYDIKYQKNVLNLLQNILLRHNVIVEPILESGFKTIGEQTKPGAKLSIRSIKSDTFQYKVKGGTLITDAKDERYLETIRKILYYAENEEDNLKKSVVVTNADKYEKNKESDDQDKQKEKKNKDNKGKKNEETKSDAEKNNNELLQTLILNYQIKYLR

SEQ ID NO: 477 - protein, 1508 aa, Artificial
  Synthetic
MSKIYGYKKWCNYKEEVRIELGRTERPKIKNDEEHTEINLVVIDEKTEKYKINFNNKEVYLKILYNEKLKKRILEIDKEKNKNRSIKLNYDKETKDYILIFDNKKIRVKREYITKNNNEIPDNTDTKEKNKYIVKSKRDEDKIKITNSKFIEKLIEYKTENNIQKDFNRKFHMGNILFKLKKENILIKGEDIVDEIEVLSRTENLSKKITRKKLKEQLKKQLDKGKLKENSKEIYLTIKNENIKIKLEYNKTKFDRNKEEYILSWKKIDEKERQAKIEVYRKFQNINEKFYYLIENFVNEEQGEVKNLKKRYFRDYIEILFLEKEEEYGKIVEHIEEIKKKNSENKKWNIDKFVEFYSNVGGKKATENKKIFVNKILNYICNSVKLTKEDIVDYIIGELKYWDIAKRVELKKKETQDMPKEKIEKARIKTYVEMDKHEKFKEKGKEKNEIVKLFIKDIESKVIRNKIEKILKEFKIEKLVNDLKDKIKEEENFDTEIFGLYKGHYKSIFKKDGNIEVIGDNFEFEKMPCNEKELYKIIYRYIKGRIEKILINRREIRENSLKIEKILNFDSLLNKIEKRVKQYTLEHIMYLGKIKHNNIDMTKVNTNDFSKLHAKEELDLELIAFFAATNMELNKIFSKKNAEGTENIDFFGGDRERDYILDKKISNSKLKIMRDLKFLDDKNEITENFKSKFIKIGTNERNKILHANDKRRNQKEILENDNDDKTRDQKGTLEDYNKVVSIIQNLKISNEEISKALNLDVVFKGKEKIISKINNIDISKENNKIIKFLPSFSKVLPEILNLYKKMNKNNPFDTIETERIIRNALIYINKELYKKLILEKDLGKENNKYKFLKELKKTLSGTDEVDKPIIENYYKNSQILASKGNNKAIKKYQKKVIECYIEYLKKNYKEIFDFSNFNMDIKKIKQKIKDINDNKTYRRKVIIKSDNKSIEIKNDFEYIISIFALLNNNVVINKIRNRLFAISVWLDRQEYQNIIEVLDEIMQINTLKTEWITENWKLDLKKFIEKMELIEEEFLLTKREFFGKYYEDIKENIKSKFINDYEIKKILDRKFNQIVNFEDDTKIKIKADNLDRNEKKILMPKINPKNLNSVDIISEIDKFIEKIKNRKALKLIFNSKFLKKYKEIIDNLIENEDKFEKVYYPEKNKNELYIYKKNLFLNIGNPNFDNIYELISEDIKVVDTKVLFDNNIRNNEIFEIDEILKYLNNKLNGYSKEYKEKYKDKLEQNSCFFIQNIKHKKYESFEKLKENYNEVSEYKRVRDLVEFNYLNKIESYLIDINWKLAIQMARFERDMHYIVNGLNYLDIIELENNRNENRSSPYPKYKYIDKNDKTKGRELDFATSYYNFKDYPKLVKICLKFGINLSENSEINKPEKKSIRNYISHFYIIREPFKKYSIAEQIDKVSEVMEYSTRYNNSTYNSVFEVFKKDVDLNYNNLKRKFRLSDNCPDNSKTLFEIKNLINPKKVSVLELEHYNSEYVVKLIEKILTKKL

SEQ ID NO: 478 - protein, 1370 aa, Artificial
  Synthetic
VKKNILEVDQIKSKIENSQKLELKEKTKKESEDKAGEDDRLEQILSSCLKKSLRNYSNELAVVINSLRKKQVDEEELDQAISTLREVLSKDIRRKTTKENIKKSIENQNLVVQPESIKDDSDKVFILSKSFKRESDSSRNNKEKKGLAAFLNQYATLDKKTRDQYLKKIRCIIDIYFSVPEKAANDSKNIVDVDIIEAIEKSELSERLKKISDNEINVWKDHVEAKGNNIYFVKLTDHIKEIISDSENQKDAASTHDENLSSVLDKKNNRTLSKDEVNFLRDDIRCINAASYRISTKIINKYADSGLFFDDGKINSYIIHHIENAVERILDGIGSYTLFKLRLGYLSEKVWKDILNLISIKYIAIGKAVYNFAVEDAFDDTKTEKNLGRISENVKNGISSFDYEIIKANETLQREVAVDVTFAANNFSRATVDIDYSIDKEEDFLLWKINQVKSNLKHTEDMNDEDLALTHVLQFFGGRSSWHALEDSYKNYKRQEKDVIFDYGTSLVYDIKNILYEMRNETFHFNTLNNNIGDWNRDLVSKMFSCEVDYFFDVEKNKMYSNNLPMFYNQDKLKGLIDFLYHKEVPRMAQVPSFNTVFVRKNFPDFLQNELHLKPKNILTDAETMLKWENALYYAFKQIYYHVFFDGANDKESDIKNMFIKTLSELNEYGDGVNKEAVSDFYERVIALKDKMSFAEICQNIMSEYNLQNSRDRRHKSSRDAIKNPDIFQHYKLLLNVVIQKAFAKFLNKEKSNTNSRIGFLLDNNIRVNDMMPVEKFCPNWRSGIFDSLKSQVSNDIELQKWYVFGRLLDGKIINQLIGSIRSYIQYEQDVRKRAENVGVKVIRYDKSTIEKFQQILKALEVCVNLSGKFSNDYTDYFSSKEEYAEYLSHFLKYENSKGQCWENLVKFCEGLDDAKIYLDAKNPINNRNIIMSKLYGPYEIIGNVLEANNGRITNDDLKEYSKHAKEIDEYRVRGKARNITEQRSINKFQRLKNRVELRNITEYGELINELLGQMVDWSYLRERDLLYFQLGFHYSCLQNDSSKPKGYKVIKSGNTEVKGAILYQILSMYINGISIFEVDKKGNFVQSEKSLSTGGQIRIFYKYCGFILDKKNDKEKYYDETIYNSGLEVFENINEHENIINLRNAIDHMKYYSLSKEKKDEKDCFTYRAYGILDYYSEIFDRFFTYDMRYKNNVPNMLKNILMRHFIVMYPVFDENGNKKAAGSQNTKNCASIGVQKNGFESDYFTYKFINQNNQQYEQIDTARDFDFLKIVLAILYYPHAISEGLIKNQDDFIKKQNDKFLKTAEKKQGNNSIHKQNQNKRSGYPYVATDSKQRKNDYKNNKSKGNHEDDNNCTTGLGSLLKGIKLDN

SEQ ID NO: 479 - protein, 1287 aa, Artificial; identical to SEQ ID NO: 105
  Synthetic

SEQ ID NO: 480 - protein, 1373 aa, Artificial; identical to SEQ ID NO: 104
  Synthetic

SEQ ID NO: 481 - protein, 1429 aa, Artificial
  Synthetic
MGNLFGYKKWYKVDKIIEGKEGEVTKIKKEVRIKRKYLDNESKYVLNINKQEEEDKSKITNEDFINQFIKYKTKNDIFKKFTEKFHMGNILFKLKGKSQKGKIINDKDFLETEEIVLDKEVYGQSEKLRNEKGITKQGIIKEIIDKGINKSNGSISIKTKFGKKIKINFTDESKKNKNEYQITLKVIPKNELKIKREIYNIFKDINTNLYLTFEEIFNQEKNREIFKNRNYSDFLKEKLLKEKKIKNLLEYFNTIRETIKDNSDNTSSFVKFHLNVGGDKKKSENKKIFVEKILNINVDLTIEDIVDFIVKELKFYGIIKRIEKLQKEGNRTKTEIKNTYIKSYVLLDRHEKFKKYNRNKKDEIVKLFVKDIHNNTMEEKINQILSKFKIKELTEKLKENPKNKNFDTEIFGIFKVHYQEMFSSEKFEEKSDEEKELYKIIYRYLKGRIEKILINEEKVRLKKMEKILINGEKIRLNKIEKIEIEKILNESILSEKILKRVKQYTLEYIMYLGKLVHNNIDMTTVNTNDFSKLHAKEELDLELITFFASTNMELNKIFSRENINNDENIDFFGGDREKNYVLDKKNLNSKIKIIRDLDFIDNKNNITNDFINKFTKIGTNERNRILHASGKKRDSQGTQDDYNKVINIIQNLKISDEEVSKVLNLDVVFKDKKNIITEINDIKISEKNSNDIKYLPSFSKVLPEILNLYRNNPKNEPFDTVETEKIVLNALIYVNKELYKKLILEDDLQENRSKNIFLQELKKTLGNIDETDENIIENYYKNAQISASKGNNKAIKKYQKKVIECYIGYLRKNYEKLFDFSDFKMNIQEIKKQIKDINDNKTYERITIKTSDKSTVINDDFEYIISIFALLNSNAVINKIRNRFFATSVWLDTSEYQNIINILDEIMQLNTLRNECITENWNLNLEEFIQKMKEIEKDFDDFKIQTKKDIFNGNYESIKNNVLSKFIGFSDVQKILEEKLNNLIDFENDNEIKKSVNLDSLNPDERRNLMPNINPKKDGIDLIKEIDKLIVIKKNNIEKNILLKIIFNSDFLEKYKKEIDNLLGDTETENKNKFEKIYYPEEHKNELYIYKKNLFLNIGNPNFDKIYGLISNDIKMADAKFLFDSDSKDIRNNEISKIDGILKNLNDKLNGYSKEYKEKYVKKLKESNDFFAKNIQNENYSSFEEFEKNYNKISEYKKIRDLVEFNYLNKIESYLIDINWKLAIQMARFERDMHYIVNGLKKLNFINLNGYNTGISRAYPKYNDTDSNKNCKKFYETTAYYKFFDDKSYREFEDICYEFGIDLRKNSNIQAKEERNIRNYISHFYIVRNPFVDYSIAEQIDRVSNLLSYSTRYNNSTYASVFEVFKKDVDLDYDELKKKFKLIGDNDILEKLMKSKKVSVLELESYNSDYVKNLIIKLLTKIENTNDTL

SEQ ID NO: 482 - protein, 1212 aa, Artificial
  Synthetic
MKITKIDGVSHYKKQDKGILKKKWRDLDEGKQREKIEARYNKQIESKIYKEFFRLKSGKDSERITKEKNEGIKSLYYLIKELYEGKENDLWELKNINLEILGDKERIIKGYKFKEDVYFFKEGDKEYYLRTLFNNLIEKVQNENREKVRKNKEFLDLKEIFKKYKDRKIDLLLKSINNNKINLEYKKENVNEEIYGINPTNDREMIFYELLKEIIEKKDEQKSILEEKLDNFDITNFLENIEKIFNEETEINIIKGKVLNELREYIKEKEENNSDNKLKQIYNLELKKYIENNFSYKKQKSKSKNGKNDYLYLNFLKKIMFIEEVDEKKEINKEKFKNKINSNFKNLFVQHILDYGKLLYYKENDEYIKNTGQLETKDLEYIKTKETLIRKMAVLVSFAANSYYNLFGRTENNILTQEISDDLLLGKVENERYIKGERNRKYVFKEKMLNYFFNSEIFGDNKIVEVLNAISSSIYNIRNGVNHFDKMVLGKYNNGLDLKDSDTIKDYFNFKKKEIQQDLKDRFISNNLQYYYTENEIKKYFEKYKFEILKTKASFAPNFKRILIKGENLSISESNNSYEFFKAYSESSDKNTEYNEFMKTRNFLLKELYYNNFYTEFLNDKAKFREAVEKVKKNKKRRGGKSYDVIGNYNFSDSISEYISYIHKSEMERIEINTEKNRKDTSKHIRDFIEEIFLEGFIEYLDNNNFKFLKNRNEVDKEREEIVRNLNIQIEGLDILNEDDSETLNLYLFFNMIDNKRISEFRNDMIKYKQFLAKRQNIDRKFLKIDIEKIEAIIEFVIITKEKLEILEGETKEQKKDNMNALFNKFYSSESEYDESLKKFIEEIVLNDKKNTPFYSTDGKTPIVHSNLEKMRKYGTENFLSKVLKDSKYTLNNMTTKEKFEAEVSDELKEYKILEKVSRFKENEKPKKVIEYYNDCRCYLHKEWIEKKKSKEKFEHKEWIENKKNKEEFEHKEIYKKIIEEIRKYNYLENKEKLQNVYLLHEMLSDLLARNVAFLNKWERDFKFIVIAIKQFLRENDKEKVDEFLNPYKSDGSRDNFSVTNYRSKMRLVINNIHENFMSLLFLNDNLAIREITANNFTWVNLRNYIAHFEYLHEEKDTISFIVQANLLIKLFSYDKKVQNHILKSIKTLLEKYNIQISFKIPKDEDKNETFRYEIKNQLYSKKGKMLGKNNKFEILENEFLENVKAMLEYSK

SEQ ID NO: 483 - protein, 1382 aa, Artificial
  Synthetic
MKLSKEKHTRSAVANEEQNIGGILYRFPGKSIGGVKDQMLRRDKEVKKLYNVFNQIQVGTKPKKWNNDEKLSPEENERRAQQKNIKIENYKWREACSKYVKSSQKTINYVIFYSYGKAENKLRYMRKNEDILKKMQEEEKLPKFSGGKLEDFVAYTLRKSLVVSKYDTQEFDSVAAMVVFLECIGKNNISDHEKEIVCKLLELIRKDFSKLDPNVKGSQGANIVRSVRNQNMIVQPQGDRFLFPQVYAKENETVTNKNVEKEGLNEFLLNYANLDDEKRAESLRKLRRILDVYFSAPNHYEKDMDITLSDNIEKEKFNVWEKHECGKKETGLFVDIPDVLMEAEAENIKLDAVVEKRERKVLNDRVRKQNIICYRYTWAVVEKYNSNEPLFFENNAINQYWIHHIENAVERILKNCKAGKLFKLRKGYLAEKVWKDAINLISIKYIALGKAVYNFALDDIWKDKKNKELGIVDERIRNGITSFDYEMIKANENLQRELAVDIAFSVNNLARAVCDMSNLGNKESDFLLWKRNDIADKLKNKDDMASVSAVLQFFGGKSSWDINIFKEAYKGKKKYNYEVRFIDDLRKAIYCARNENFHFKTALVNDEKWNTEFFGKIFERETEFCLNVEKDRFYSNNLYMFYQVSELRNMLDHLYSRSVSRAAQVPSYNSVIVRTAFPEYITNVLGYQKPGYDADTLGKWYSACYYLLKEIYYNSFLQSDRALQLFEKSVKTLSWDDKKQQRAVDNFKDHFSDIKSACTSLAQVCQIYMTEYNQQNNQIKKVRSSNDSIFDQPVYQHYKVLLKKAIANAFADYLKNNKDLFGFIGKPFKANEIREIDKEQFLPDWTSRKYEALCIEVSGSQELQKWYIVGKFLNARSLNLMVGSMRSYIQYVTDIKRRAASIGNELHVSVQDVEKVEKWVQVIEVCSLLASRTSNQFEDYFNDKDDYARYLKSYVDFSNVDMPSEYSALVDFSNEEQSDLYVDPKNPKVNRNIIHSKLFAADHILRDIVEPVSKDNIEEFYSQKAEIAYCKIKGKEITAEEQKAVLKYQKLKNRVELRDIVEYGEIINELLGQLINWSFMRERDLLYFQLGFHYDCLRNDSKKPEGYKNIKVDENSIKDAILYQIIGMYVNGVTVYAPEKDGDKLKEQCVKGGVGVKVSAFHRYSKYLGLNEKTLYNAGLEIFEIVAEHEDIINLRNGIDHFKYYLGDYRSMLSIYSEVFDRFFTYDIKYQKNVLNLLQNILLRHNVIVEPILESGFKTIGEQTKPGAKLSIRSIKSDTFQYKVKGGTLITDAKDERYLETIRKILYYAENEEDNLKKSVVVTNADRYEKNKESDDQNKQKEKKNKDNKGKKNEETKSDAEKNNNERLSYNPFANLNFKLSN

SEQ ID NO: 484 - protein, 1387 aa, Artificial; identical to SEQ ID NO: 93
  Synthetic

SEQ ID NO: 485 - protein, 1412 aa, Artificial; identical to SEQ ID NO: 151
  Synthetic

SEQ ID NO: 486 - protein, 1186 aa, Artificial; identical to SEQ ID NO: 58
  Synthetic

SEQ ID NO: 487 - protein, 1161 aa, Artificial; identical to SEQ ID NO: 254
  Synthetic

SEQ ID NO: 488 - protein, 1366 aa, Artificial; identical to SEQ ID NO: 376
  Synthetic

SEQ ID NO: 489 - protein, 1382 aa, Artificial
  Synthetic
MKLSKEKHIRSAVANEEQNIGGVLYHVPGTDTIDLKDQMLIRDRDVKQLYKVFNQIQVGNKPKKWKKDEKLSPEENERRAQQKNIKMKNYKWREACSEYVESSQRTINDVLFYSYMEADKKIRNMRKNEDILKKMQEVTKLPKFSGGKLEDFVAYTLRKSLVVSKNSTQEFDSVAAMVVFLECIGKSNISDHEKEIVYKLLELIRKDFSKLDPNVKDSQGANIVRSVRNQNMIVQPQGDRFLFPQVSDKEKKTVTNKNVEKEGLNEFLLNYANLDDEKRAEILRKLCRILDVYFSAPNHYEKDMEITLSDNIDKEKFNVWKKYECGKKVTGLFVNIPDVLMEAEAENIKLDAVVEKRERKILADRVRRQNIICYRYTRAVVEKYNSNESLFFENDAINQYWIHHIENAVERILKNCKAGKLFKLRKGYLAEKVWKDAINLISIKYIALGKAVYNFALDDIWKDKKDKELGIVDERIRNGITSFDYEMIKAYENLQRELAVDIAFSVNNLARAVCDMSNLKDRESDFLLWKKEDIADKLKNKDDMASVSAVLQFFGGKSSWDINIFKEAYKGKNKYNYEVRFIDDLRKAIYCARNENFHFKTALVNNEKWNTELFGKIFERETEFCLNVEKDRFYSNNLYMFYPVSELRNMLDQLYSRSVSRAAQVPSYNSVFIRKNFPEDITNVLRYQKPGYDADTLGKWYSACYYLLKEIYYNSFLQSDKALQLFEKSVKTLSWDDEEQKRAVDNFKNHFSDIKSACTSLAQVCQIYMTEYNQQNNQIKKVRSSNDSIFDKPIYQHYKVLLKKAIANAFAAYLKYNKNLFGFIGKPFKANEIREIDKEQFLPDWTSTKYESLCIEVSGSQELQKWYIVGKFLNARSLNLMAGSMRSYIQYVTDIKRRAASIGNELHVSVQDVEKVEKWVQVIEVCSLLAFRTSNQFEDYFNDKDDYARYLKSYVDFSNADMPSEYSALVDFSNEEQSDLYVDPKNPKVNRNIVHSKLFAADHILRDIVEPVSKDNIEEFYDQKAEIVYCKIKGKDITAEEQKAVLKYQKLKNRVELRDIVEYGEIINELLGQLINWSFMRERDLLYFQLGFHYNCLRNNSEKKEAYQKIEVNGDSIKDAILYQIIGMYVNGVAVYAPDEKGDILKEQCTKGGAGGKISAFNRYSEYLGLDKLTLYNAGLEIFEVVAEHDDIINLRNGIDHFKYYLGDYRSMLSIYSEVFDRFFTYDIKYQKNVLNLLQNILLRHNVIVEPVLESGFKTIGKQTTSGAKLSIRSIKSDTFQYKVKGGSLITDAKDERYLKTIRKILYYVENEEDNLKKSVVVTNADKYEKNKESDDQNKQKEKKNKDNKGKKNEETKSDAGKNNNERLSYNPFANLNFKLPN

SEQ ID NO: 490 - protein, 1276 aa, Artificial
  Synthetic
MKISKVDHVKSGIDQKLSSQRGMLYKQPQKKYEGKQLEEHVRNLSRKAKALYQVFPVSGNSKMEKELQIINSFIKNILLRLDSGKTSEEIVGYINTYSVASQISGDHIQELVDQHLKESLRKYTCVGDKRIYVPDIIVALLKSKFNSETLQYDNSELKILIDFIREDYLKEKQIKQIVHSIENNSTPLRIAEINGQKRLIPANVDNPKKSYIFEFLKEYAQSDPKGQESLLQHMRYLILLYLYGPDKITDDYSEEIEAWNFGSIVMDNEQLFSEEASMLIQDRIYVNQQIEEGRQSKDTAKVKKNKSKYRMLGDKIEHSINESVVKHYQEACKAVEEKDIPWIKYISDHVMSVYSSKNRVDLDKLSLPYLAKNTWNTWISFIAMKYVDMGKGVYHFAMSDVDKVGKQDNLIIGQIDPKFSDGISSFDYERIKAEDDLHRSMSGYIAFAVNNFARAICSDEFRKKNRKEDVLTVGLDEIPLYDNVKRKLLQYFGGASNWDDSIIDIIDDKDLVACIKENLYVARNVNFHFAGSEKVQKKQDDILEEIVRKETRDIGKHYRKVFYSNNVAVFYCDEDIIKLMNHLYQREKPYQAQIPSYNKVISKTYLPDLIFMLLKGKNRTKISDPSIMNMFRGTFYFLLKEIYYNDFLQASNLKEMFCEGLKNNVKNKKSEKPYQNFMRRFEELENMGMDFGEICQQIMTDYEQQNKQKKKTATAVMSEKDKKIRTLDNDTQKYKHFRTLLYIGLREAFIIYLKDEKNKEWYEFLREPVKREQPEEKEFVNKWKLNQYSDCSELILKDSLAAAWYVVAHFINQAQLNHLIGDIKNYIQFISDIDRRAKSTGNPVSESTEIQIERYRKILRVLEFAKFFCGQITNVLTDYYQDENDFSTHVGHYVKFEKKNMEPAHALQAFSNSLYACGKEKKKAGFYYDGMNPIVNRNITLASMYGNKKLLENAMNPVTEQDIRKYYSLMAELDSVLKNGAVCKSEDEQKNLRHFQNLKNRIELVDVLTLSELVNDLVAQLIGWVYIRERDMMYLQLGLHYIKLYFTDSVAEDSYLRTLDLEEGSIADGAVLYQIASLYSFNLPMYVKPNKSSVYCKKHVNSVATKFDIFEKEYCNGDETVIENGLRLFENINLHKDMVKFRDYLAHFKYFAKLDESILELYSKAYDFFFSYNIKLKKSVSYVLTNVLLSYFINAKLSFSTYKSSGNKTVQHRTTKISVVAQTDYFTYKLRSIVKNKNGVESIENDDRRCEVVNIAARDKEFVDEVCNVINYNSDK

SEQ ID NO: 491 - protein, 1412 aa, Artificial; identical to SEQ ID NO: 151
  Synthetic

SEQ ID NO: 492 - protein, 1412 aa, Artificial; identical to SEQ ID NO: 151
  Synthetic

SEQ ID NO: 493 - protein, 1382 aa, Artificial; identical to SEQ ID NO: 154
  Synthetic

SEQ ID NO: 494 - protein, 1432 aa, Artificial
  Synthetic
MKISKIKNSRPGISVTENKNEEQLSRQSLLYYAPVKDGKIRLESKDLEQHVTECNEKAQKLYNVITPEIDLCKEENREWIVEDLTKNFNAVINNALRSIKNPKEKREERVEKEVAFILNLNKNSIKIKKDVFVKSTDLIVKFSANNKYNKKNDKGTGSKEEAYIREMISNLVLRKLKKTLRKEVKLENGCKMQMTEITISLMSAICLYGNVESFDPVILKAFFEKVDSDYTKYKYVEQIVKSIESQSAKLKVVEKDGKHLLIPANADHRKKKYVFEFMRKYAAAEEKEKREITEHIQNLIGLYLCGKAGYENAENRFSNMTESHNCISGEIEEIFNEIEELENSSKQKREEKKKTREELDKIQESRKGNKRNTNSNNQNYKNNKTDSDKKENQADANENKLKENELRDKRRRLSKELENLDSEVRIKKEKLKNTTVKEMALKYRAAVNYLADEVGKTVLGEIKEKKVRSCADLYWIEYIDSTVEKLLLKSRNKDRYRYEIGFLSKHIWKEWTQYISGKYIEMGKGVYHFAIPDLSGALEGESVSICEVKPEYRNGVSGFDYERIRAEESLEREMEKYVLFAVNNFARAVTPEEEREKPGHEDVLLMKTLSEIEESQTEEERQKKHDNNVKNAITLYADADRRILQFFGGQSRFRKKEDSLINLYSGEDLYKEIRKELYAIRNITFHYTTKADKDQTQKHELTEYFFEEEFSDITELFREKYYTNNVWKYYDIEVINNIMGKIYCGRKYRAAQVPAFNNIISRPALPQLMDGFVKGNSLRRLMNCPDRDVIKKYWSSLFFVLKELYYYDFLQEQEKPEDNIKERFFRAMEKESGQAKDGKEQKAWESFENRIDQIGRERSFGAICQGLMVEYMLQNRDISMVQTETGDGKTNKKQIYKHYRTLLYICIRSAFTEYLREKWEELRTPVLTVKEWSKEEFCQTDGLKHLSLFDHLKETFNDAESGSFWYMAAHFINQKYLNHLIGSIRNYLQFTEDIEDRALSLGDCVDNKREEKNLRYRNTLEILEFVAQFCERTTNVMEDYFESNQEYAAYLSGFVDYNVSKKETDIEKALYGFCRQKFKVDGKEYMAGIYYDGENLIPNRNIIRANMYGNVSCLKPYMDRITLKEIRTMYADQNKLDTVLKEGVCRTEEEQKAYREYQNEKNRIELFDLCTYTQILNDIQAKLIGWSYMRERDLMYYQLGYYYTKLFWTDSISEEDARRRLMGELVNVEDGVILYQILAFNSYNLPIIANKNNTVTFLKGEGSIGGKAITAFLKNYENAERIYEEALDLFENTDEHAAIINTRNYIEHFKYFIKSDRSMMDLYSEVYDRFFRHDHNRKKNVPDSLKNVLADNFMIADISMELGSKKVGEKKKGFREHKAARIEFTDRGIRSTDMTYTVKPDPKDSKKDEKVLVPARSEVFLKQFQKILEYRI

SEQ ID NO: 495 - protein, 1299 aa, Artificial
  Synthetic
VKVTKVNSARVAVVSKKLKNSRAVLYATTANKGVSEDSESFIVKRIDAANRLYGVFFRGNNKTVPLPNGIENKFTQLLNYMEYEHRGKILAAYRTGDASQINQCVDDQIAWLKKIQIIKRVKWKSKAEKYYVDDKDSIKRIDFKTQKDISEDVLDDAIKRMRKSLKRGSNRWIVKRLIRALAQGDETVYITVLEDAAFPKFVDAVNKDYYKTNLLRSLARHDVKVQVHSDYILDLASVDNAKANKKALTQILEKYASSEKAATETLLEMKRIFFAYFFSFDDEKYGKFFASENLWKVPSETIQEDVGGYFDEGFIPLDGYADKFDYTIEDLTREKPLNIGKLKARVRFVNFGKYLQMMSQDNYNGDEIAQYWINYAKEYVEENYQAKDYKNRKVDIDSYKRIRMFKACWKDAVRFICGKYIDLGKAVYHFAMPKKLSEKLESGNEYGRIREEYRNGISSFAYEAIKAEETLQRNIANATVAALSAFSRSVLDYSKQSEAGKEDILFMSKDQLKNLRKEDVLKPILRYYGGQSEVKAFDLNGIALMEEIMGHFSLIRNENFHYAPGKLGEIKYENSLKLWQNDVDVYAQVVRQKYYSNNTAVFYGKENITKLFTALHGKKRVSASQIPAFRSIWRRQEISAFVKVIEKKAAKAKHECSFLNNEEERIKYEGALYFLLKEIYYNDFIFLDYKARDYFVKAVNDYTGTDGIAQSTQAANNFKEYVGNLAGLNLTFAQICQKIQQEYNQQNTNAKKSGKTEESYAHFKMLLPMCVKSAFQQYLADNYKFLFKPEFNEALEDEQDYLDEVLVDCGVAIKGIPDNDKEKRRLAWFTFAHFVHPKQLNLLIGDFKSYIQYRNDVFKRAGFADEYGSAEEKDRAEKEKDVSIKRAKSILDVLEFVRPIAGRVSNVFDDYYDNEDEYARYLSNYITFSSKNEEPTFKNLKLFCENTLADGAMVDIYADKANPKVLRNVEIARMYAGGDVILNGIEKVDAKKVRKYYENKAAALELQKKGLCANEEEQRKIIKQQQLKGQLMLNDVTETFSLVNDMLGGLVSLSYLRERDKMYLLLGYYYMALRNVSNWSNEKLDSVVEDDINIKSGFVLYQVVSMFDYGTSFLYFDSEKNKWLEMVNASINLKGRKFGEMHAASRACAIQLFEMDEQAKDKKQKKPDTQDKKDKEMSVRELRNYVDHFKYYVKFDKSIVELYAEFYTKFFVYSTKLRKSVIVNFSNILERYFLENSNSFTVLEDNKTEINLLSTLKSQQFTYKLNAKDNKGKQLTCNLNAKSANFVKSVKEVLKYKKC

SEQ ID NO: 496 - protein, 1382 aa, Artificial
  Synthetic
MKLSKEKHTRSAVANEEQNIGGILYRFPGKSIGGVKDQMLRRDKEVKKLYNVFNQIQVGTKPKKWNNDEKLSPEENERRAQQKNIKIENYKWREACSKYVKSSQKIINYVIFYSYGKAENKLRYMRKNEDILKKMQEEEKLPKFSGGKLEDFVAYTLRKSLVVSKYDTQEFDSVAAMVVFLECIGKNNISDHEKEIVCKLLELIRKDFSKLDPNVKGSQGANIVRSVRNQNMIVQPQGDRFLFPQVYAKENETVTNKNVEKEGLNEFLLNYANLDDEKRAESLRKLRRILDVYFSAPNHYEKDMDITLSDNIEKEKFNVWEKHECGKKETGLFVDIPDVLMEAEAENIKLDAVVEKRERKVLNDRVRKQNIICYRYTWAVVEKYNSNEPLFFENNAINQYWIHHIENAVERILKNCKAGKLFKLRKGYLAEKVWKDAINLISIKYIALGKAVYNFALDDIWKDKKNKELGIVDERIRNGITSFDYEMIKANENLQRELAVDIAFSVNNLARAVCDMSNLGNKESDFLLWKRNDIADKLKNKDDMASVSAVLQFFGGKSSWDINIFKEAYKGKKKYNYEVRFIDDLRKAIYCARNENFHFKTALVNDEKWNTEFFGKIFERETEFCLNVEKDRFYSNNLYMFYQVSELRNMLDHLYSRSVSRAAQVPSYNSVIVRTAFPEYITNVLGYQKPGYDADTLGKWYSACYYLLKEIYYNSFLQSDRALQLFEKSVKTLSWDDKKQQRAVDNFKDHFSDIKSACTSLAQVCQIYMTEYNQQNNQIKKVRSSNDSIFDQPVYQHYKVLLKKAIANAFADYLKNNKDLFGFIGKPFKANEIREIDKEQFLPDWTSRKYEALCIEVSGSQELQKWYIVGKFLNARSLNLMVGSMRSYIQYVTDIKRRAASIGNELHVSVQDVEKVEKWVQVIEVCSLLASRTSNQFEDYFNDKDDYARYLKSYVDFSNVDMPSEYSALVDFSNEEQSDLYVDPKNPKVNRNIIHSKLFAADHILRDIVEPVSKDNIEEFYSQKAEIAYCKIKGKEITAEEQKAVLKYQKLKNRVELRDIVEYGEIINELLGQLINWSFMRERDLLYFQLGFHYDCLRNDSKKPEGYKNIKVDENSIKDAILYQIIGMYVNGVTVYAPEKDGDKLKEQCVKGGVGVKVSAFHRYSKYLGLNEKTLYNAGLEIFEIVAEHEDIINLRNGIDHFKYYLGDYRSMLSIYSEVFDRFFTYDIKYQKNVLNLLQNILLRHNVIVEPILESGFKTIGEQTKPGAKLSIRSIKSDTFQYKVKGGTLITDAKDERYLETIRKILYYAENEEDNLKKSVVVTNADRYEKNKESDDQNKQKEKKNKDNKGKKNEETKSDAEKNNNERLSYNPFANLNFKLSN

SEQ ID NO: 497 - protein, 1382 aa, Artificial
  Synthetic
MKLSKEKHTRSAVANEEQNIGGILYRFPGKSIDGVKDQMLRRDKEVKKLYNVFNQIQVGTKPKKWNNDEKLSPEENKRRAQQKNIKIENYKWREACSKYVKSSQKTINYVIFYSYGKAENKLRYMRKNEDILKKMQEEEKLPKFSGGKLEDFVAYTLRKSLVVSKYDTQEFDSVAAMVVFLECIGKSNISDHEKEIVCKLLELIRKDFSKLDPNVKGSQGANIVRSVRNQNMIVQPQGDRFLFPQVYAKENETVTNKNVEKEGLNEFLLNYANLDDEKRAESLRKLRRILDVYFSAPNHYEKDMDITLSDNIEKEKFNVWEKHECGKKETGLFVDIPDVLMEAEAENIKLDAVVEKRERKVLNDRVRKQNIICYRYTRAVVEKYNSNEPLFFENNAINQYWIHHIENAVERILKNCKAGKLFKLRKGYLAEKVWKDAINLISIKYIALGKAVYNFALDDIWKDKKNKELGIVDERIRNGITSFDYEMIKAHENLQRELAVDIAFSVNNLARAVCDMSNLGNKESDFLLWKRNDIADKLKNKDDMASVSAVLQFFGGKSSWDINIFKEAYKGKKKYNYEVRFIDDLRKAIYCARNENFHFKTALVNDEKWNTELFGKIFERETEFCLNVEKDRFYSNNLYMFYQVSELRNMLDHLYSRSVSRAAQVPSYNSVIVRTAFPEYITNVLGYQKPGYDADTLGKWYSACYYLLKEIYYNSFLQSDRALQLFEKSVKTLSWDDKKQQRAVDNFKDHFSDIKSACTSLAQVCQIYMTEYNQQNNQIKKVRSSNDSIFDQPVYQHYKVLLKKAIANAFADYLKNNKDLFGFIGKPFKANEIREIDKEQFLPDWTSRKYEALCIEVSGSQELQKWYIVGKFLNAMSLNLMVGSMRSYIQYVTDIKRRAASIGNELHVSVQDVEKVEKWVQVIEVCSLLASRTSNQFEDYFNDKDDYARYLKSYVDFSNVDMPSEYSALVDFSNEEQSDLYVDPKNPKVNRNIVHSKLFAADHILRDIVEPVSKDNIEEFYSQKAEIAYCKIKGKEITAEEQKAVLKYQKLKNRVELRDIVEYGEIINELLGQLINWSFMRERDLLYFQLGFHYDCLRNDSKKPEGYKNIKVDENSIKDAILYQIIGMYVNGVTVYAPEKDGDKLKEQCVKGGVGVKVSAFHRYSKYLGLNEKTLYNAGLEIFEVVAEHEDIINLRNGIDHFKYYLGDYRSMLSIYSEVFDRFFTYDIKYQKNVLNLLQNILLRHNVIVEPILESGFKTIGEQTKPGAKLSIRSIKSDTFQYKVKGGTLITDAKDERYLETIRKILYYAENEEDNLKKSVVVTNADKYEKNKESDDQNKQKEKKNKDNKGKKNEETKSDAEKNNNERLSYNPFANLNFKLSN

SEQ ID NO: 498 - protein, 1382 aa, Artificial; identical to SEQ ID NO: 483
  Synthetic

SEQ ID NO: 499 - protein, 949 aa, Artificial; identical to SEQ ID NO: 43
  Synthetic

SEQ ID NO: 500 - protein, 1366 aa, Artificial; identical to SEQ ID NO: 376
  Synthetic

SEQ ID NO: 501 - protein, 1289 aa, Artificial
  Synthetic
VAVVSKKLKNSRAVLYATTANKGVSEDSESFIVKRIDAANRLYGVFFRGNNKTVPLPNGIENKFTQLLNYMEYEHRGKILAAYRTGDASQINQCVDDQIAWLKKIQIIKRVKWKSKAEKYYVDDKDSIKRIDFKTQKDISEDVLDDAIKRMRKSLKRGSNRWIVKRLIRALAQGDETVYITVLEDAAFPKFVDAVNKDYYKTNLLRSLARHDVKVQVHSDYILDLASVDNAKANKKALTQILEKYASSEKAATETLLEMKRIFFAYFFSFDDEKYGKFFASENLWKVPSETIQEDVGGYFDEGFIPLDGYADKFDYTIEDLTREKPLNIGKLKARVRFVNFGKYLQMMSQDNYNGDEIAQYWINYAKEYVEENYQAKDYKNRKVDIDSYKRIRMFKACWKDAVRFICGKYIDLGKAVYHFAMPKKLSEKLESGNEYGRIREEYRNGISSFAYEAIKAEETLQRNIANATVAALSAFSRSVLDYSKQSEAGKEDILFMSKDQLKNLRKEDVLKPILRYYGGQSEVKAFDLNGIALMEEIMGHFSLIRNENFHYAPGKLGEIKYENSLKLWQNDVDVYAQVVRQKYYSNNTAVFYGKENITKLFTALHGKKRVSASQIPAFRSIWRRQEISAFVKVIEKKAAKAKHECSFLNNEEERIKYEGALYFLLKEIYYNDFIFLDYKARDYFVKAVNDYTGTDGIAQSTQAANNFKEYVGNLAGLNLTFAQICQKIQQEYNQQNTNAKKSGKTEESYAHFKMLLPMCVKSAFQQYLADNYKFLFKPEFNEALEDEQDYLDEVLVDCGVAIKGIPDNDKEKRRLAWFTFAHFVHPKQLNLLIGDFKSYIQYRNDVFKRAGFADEYGSAEEKDRAEKEKDVSIKRAKSILDVLEFVRPIAGRVSNVFDDYYDNEDEYARYLSNYITFSSKNEEPTFKNLKLFCENTLADGAMVDIYADKANPKVLRNVEIARMYAGGDVILNGIEKVDAKKVRKYYENKAAALELQKKGLCANEEEQRKIIKQQQLKGQLMLNDVTETFSLVNDMLGGLVSLSYLRERDKMYLLLGYYYMALRNVSNWSNEKLDSVVEDDINIKSGFVLYQVVSMFDYGTSFLYFDSEKNKWLEMVNASINLKGRKFGEMHAASRACAIQLFEMDEQAKDKKQKKPDTQDKKDKEMSVRELRNYVDHFKYYVKFDKSIVELYAEFYTKFFVYSTKLRKSVIVNFSNILERYFLENSNSFTVLEDNKTEINLLSTLKSQQFTYKLNAKDNKGKQLTCNLNAKSANFVKSVKEVLKYKKC

SEQ ID NO: 502 - protein, 1289 aa, Artificial; identical to SEQ ID NO: 501
  Synthetic

SEQ ID NO: 503 - protein, 1382 aa, Artificial
  Synthetic
MKLSKEKHIRSAVANEEQNIGGVLYHVPGTDTIDLKDQMLIRDRDVKQLYNVFNQIQVGDKPKKWKNDEKLSPEENERRAQQKNIKMKNYKWREACSEYVKNSQETINDVLFYSYMEADKKIRNMRKNEDILIKMQEVTKLPKFSGGKLEDFVAYTLRNSLVVSKNSTQEFDSVAAMVVFLECIGKSNISDHEKEIVYKLLELIRKDFSKLDPNVKDSQGTNIVRSVRNQNMIVQPQGDRFLFPQVSDKEKKTVTNKNVEKEGLNEFLLNYANLDDEKRAEILRKLRRILDVYFSAPNHYEKDMDITLSDNIDKEKFNVWKKYECGKKVTGFFVDIPDVLMEAEAENIKLDAVVEKRERKVLADRVRRQNIICYRYTRAVVEKHNSNEPLFFENDAINQYWIHHIENAVERILKNCKAGKLFKLRKGYLAEKVWKDAINLISIKYIALGKAVYNFALDDIWKDKKDKELGIVDERIRNGITSFDYEMIKAHENLQRELSVDIAFSVNNLSRAVCDMSNLGDKESDFLLWKRNDIADKLKNKDDMASVSAVLQFFGGKSSWDINIFKEAYKGKNKYNYEVRFIDDLRKAIYCARNENFHFKTALVNNEKWNTELFGKIFERETEFCLNVEKDRFYSNNLYMFYPVSELRNMLDHLYSRSVSRAAQVPSYNSVFVRKNFPEDITNVFGYQKPGYDADTLGKWYSACYYLLKEIYYNSFLQSDKALQLFEKSVKTLSWDDEEQKRAVDNFKNHFSDIKSACTSLAQVCQIYMTEYNQQNNQIKKVRSSNDSIFDKPIYQHYKVLLKKAIANAFAAYLKYNKNLFGFIGKPFKANEIREIDKEQFLPGWTSTKYESLCIEVSGSQELQKWYIVGKFLNARSLNLLAGSMRSYIQYVTDIKRRAASIGNELHVSVQDVEKVEKWVQVIEVCSLLAFRTSNQFEDYFNDKDDYARYLKSYVDFSNADMPSEYSALVDFSNEEQRDLYVDPKNPKVNRNIVHSKLFAADHILRDIVEPVSKGDIEEFYDQKAEIVYCKIKGKDITAEEQKAVLKYQKLKNRVELRDIVEYGEIINELLGQLINWSFMRERDLLYFQMGFHYNCLRNDSKKPEEYEKIEIDENSIKGAILYQIIGMYVNGVAVYAPEKGGDKLKEQCVKGGIGVKVDAFKRYSEHLGLHKETLYNAGLEIFEIIEEHEDVINLRNSINHFKYYLGKYRSMLSIYSEVFDRFFTYDMKYQKNVLYLLQNILLRHNVIVEPVFESGVKTIGDQTKPCAKLSIKSIKSDTFEYKVKGGTLVTDAKDERYLETIRKILYYADDEDSNAKKPAIVTNADKYEKNKESDDQNKQKEKKNKDNKGKKNEETKSDAGKNNNERLSYNPFANLNFKLPN

SEQ ID NO: 504 - protein, 1382 aa, Artificial; identical to SEQ ID NO: 278
  Synthetic

SEQ ID NO: 505 - protein, 1235 aa, Artificial
  Synthetic
MQMKISKIKNSRPGISVAENKNEESLSRQSLLYYAPVKDGKIRLESKDLEQHVTECNEKAQKLYNVITPEINFYRDENRQKMVENLARNFNAVINNALRSIRNPKEKKEQRVEKEVAFILNLSKKSIKMKKDVFVKSTDLIVKFPENNKYNKKNDKGTGSKEAYIQKMISDLVLRKLKNTLRKEVKLENGYRMQMTEIIISLMSAICLYGNAESFDPAILKAFFEKVDSDYTKYKYVEQIVKSIESQSAKLKVVEKDGRHLLISANADHRKKKYVFEFMRMYAAADEKEKRELTEHIQDLIGLYLCGKAGYENAENRFSDMTESHNCICGKIEEILNELEKPENLSQKKKENLKNTTVKVMALKYRAAVNYLADEVGKTVLGEIREKKVRSCADLYWIEYIDSTVEKLLLKSRNKDGYRYEIGFLSKHIWKEWTQYISGKYIEMGKGVYHFAIPDLSGNLEGEPISICEVKPEYRNGVSGFDYERIRAEESLEREMEKYVLFAVNNFARAVTPEEEREKSGHEDVLLMKTLSEIEESQTKEERQKKHDNNVKNAITLYADADRRILQFFGGQSRFREKEDSLINLYSGEDLYKEIRKELYAIRNITFHYTTKADKDQTQKHDLAEYLFEEEFSDITELFREKYYANNVWKYYDVEVINTIMENIYCGRKYRAAQVPAFKNIISRPELPQVMNGFVKGNSLRRLMNCPDRDVINKYWSALFFVLKELYYYDFLQEQKKPEDNVKERFFRAIEKLSGQENDDKKQKAWESFGNRIDQIGRDRSFGAICQGLMIEYMLQNSDISMVQTETDNGKANNKKQIYKHYRTLLYNCIREAFIEYLREKWEELRTPVLTVKEWSKEEFCRADGLKHLSLFDHLKKTFNDAESGSSWYMAAHFINQKYLNHLLGSIRNYLQFTEDIEDRAISLGDCVDNKREEKNLRYRNTLEILEFVAQFCERTTNVMEDYFESNQEYAEYLSGFVDYNTTKKETDIEKALYSFCKQKFKVDGKEYMAGIYYDGENLIPNRNIIRANMYGNTSCLKPCMDRITLKEIRTMYADQNKLDLVLKEGVCHTEEEQKAYREYQNEKNRIELFDVCTYTQILNDMQARLIGWSYMRERDLMYYQLGYYYTKLFWTDSISEEDARRRLVGNLVNVEDGAILYQILAFNSYNLPIIANKNNTVTLLKDEGSIGGKAITAFFKNYENAEMIYEEALDLFENMDEHAAIINTLSLIHISEPT

SEQ ID NO: 506 - protein, 1387 aa, Artificial; identical to SEQ ID NO: 93
  Synthetic

SEQ ID NO: 507 - protein, 1159 aa, Artificial
  Synthetic
MKVTKVGGISHKKYTSEGRLVKSESEENRTDERLSALLNMRLDMYIKNPSSTETKENQKRIGKLKKFFSNKMVYLKDNTLSLKNGKKENIDREYSETDILESDVRDKKNFAVLKKIYLNENVNSEELEVFRNDIKKKLNKINSLKYSFEKNKANYQKINENNIEKVEGKSKRNIIYDYYRESAKRDAYVSNVKEAFDKLYKEEDIAKLVLEIENLTKLEKYKIREFYHEIIGRKNDKENFAKIIYEEIQNVNNMKELIEKVPDMSELKKSQVFYKYYLDKEELNDKNIKYAFCHFVEIEMSQLLKNYVYKRLSNISNDKIKRIFEYQNLKKLIENKLLNKLDTYVRNCGKYNYYLQDGEIATSDFIARNRQNEAFLRNIIGVSSVSYFSLRNILETENENDITGRMRGKTVKNNKGEEKYVSGEVDKLYDNNRQNEVKKNLKMFYSYDFNMDSKNEIEDFFSNIDEAISSIRHGIVHFNLELEGKDIFAFKNIAPSEISKKMFQNEINEKKLKLKIFRQLNSANVFRYLEKYKILNYLKRTRFEFVNKNIPFVPSFTKLYSRIDDLKNSLGIYWKTPKTNDDNKTKEIIDAQIYLLKNIYYGEFLNYFMSNNGNFFEISREIIELNKNDKRNLKTGFYKLQKFEDIQEKTPKEYLANIQSLYMINAGNQDEEEKDTYIDFIQKIFLKGFMTYLANNGRLSLIYIGSDEETNTSLAEKKQEFDKFLKKYEQNNNIKIPYEINEFLREIKLGNILKYTERLNMFYLILKLLNHKELTNLKGSLEKYQSANKEEAFSDQLELINLLNLDNNRVTEDFELEVNEIGKFLDFNGNKIKDRKELKKFDTNKIYFDGENIIKHRAFYNIKKYGMLNLLEKISDEAKYKISIEELKNYSNKKNEIEKNHTTQENLHRKYARPRKDEKFTDEDYKKYEKAIRNIQQYTHLKNKVEFNELNLLQSLLLRILHRLVGYTSIWERDLRFRLKGEFPENQYIEEIFNFDNSKNVKYKNGQIVEKYINFYKELYKDDTEKISIYSDKKVKELKKEKKDLYIRNYIAHFNYIPNAEISLLEVLENLRKLLSYDRKLKNAIMKSIVDILKEYGFVAKFKIGADKKIGIQTLESEKIVHLKNLKKKKLMTDRNSEELCELVKVMFEYKMKEKKSEN

SEQ ID NO: 508 - protein, 1390 aa, Artificial
  Synthetic
MGNLFGHKRWYEVSDRGDNKIKRKVKVKRNYDGNKYILNINENNNKEKIDNNKFIREFVNYKKNDNVLIEFKRKFHAGNILFKLKGNKRSIEDTNGFLKTEEIILDKEVYGQSEKLRNEKGITKQDILKEIIDKGIDKSNDKILVKTKFGKEITINFTDEDKKNKNEYQITLKILPENELKIKREVYNIFKIINMNLYQIIKGIIENKEIFKNRYYDEILKEKLSKNNQIINTLTNLNKIRKEIRDNRDNIISFVKFYFNVGGDKKKSENKKMFVEKILNINVDLTVEDIVDFIVKELKFWNITKRIEKVKEFNNKSLENRRNRTYIKSYVLLDKHEKFKRDRENKKDKIVKLFVKDIHNDKMEEKINHILSEFKIKELIEKLKENTENKNFDTEIFGIFKKHYKVNFDSKKFSNKSDEEKELYKIIYRYLKGRIEKILINEQKVRLKKMEKIEIEKILDESVLSEKILKRVKQYTLEHIMYLGKLIHNKINMATVNTNDFFRLHAKEELDLELITFFASTNMELNKIFSRENINNDENIDFFGGDREKNYVLDKKNLNSKIKIIRDLDFIDNKNNITNNFISKFTKIGTNERNRILHASSKERDLQGTQDDYNKVINIIQNLKISDEEVSKALNLDVVFKDKKNIITKINDIEISEENNSVIKYLPSFSKVLPEILNLYKNKNKNNPFDTTETERIMLNALIYVNKELYKKLILEKNLEENESKNKFLKELKKNLGGTDEIDENIIESYYKNTQISASKGNNKAIKKYQKKIIECYIKYLEENYRELFDFSDFKMNIQEIKKQIKEINDNKTYKRITIKTSDKSIVINDDFEYIISIFALLNSNTYINKIRNRFFATSVWLNTQKYENIIDILDKILSINLLRENNIADILDLKNTIIEAKIVENNEECIKNYIFENNEEELKKRLFCEELVNKEDVLKIFEDKNFKFKNFIKKTGNENFTIDFDILFNLECNSELNAKKVIGQNSQRLNLFIKNTIDEYKSKIKTSFSSEFLEKYKKEIDNLVESTESENKNKFEKIYYPEEHKNELYIYKKNLFLNIGNPNFDKIYELISKDIKNANTEILFNDDIRKNKIAEIDVILKKLNDKLNGYSKEYKEKYIKKLKENQENNDFFAKNIQNENYNSFEEFKEDYNKVSEYKKIRDLVEFNYLNKIESYLIDINWKLAIQMARFERDMHYIVNGLDYLYIIRLEKDRNQDRSSPYPKYKNGVLDYTKSYYNFKDYQEFMDICSKFGIDLSENSEINKPENESIRNYISHFYIVRNPFVDYSIAEQIDRVSNLLSYSTRYNNSTYASVFEVFKKDVDLDYDKLKTKFKLFDDEKNDDIKILEIKNLIESKKVSVLELESYNSDYIKNLIIELLTKVENKDEISS

SEQ ID NO: 509 - protein, 1327 aa, Artificial
  Synthetic
MKISKVNHMKTAVSVRDGAQEAILYADPSKGNDPIQDMKKVYEDLSANAAKLYSILNPAREKEEKRISSLHTKVNALIKELLKYWVKDDLQATVEKQLRFLTGDGILKYPPQNEAPTDEEIETLVVQCLRKSLRINVTANGERYYLPDIAVKFIIKLKECWEKQEKVVFNDDADPIGVQEAEAFLRAVVSDWEKLYKSPEKKEKIIRSLKNQKALVKVIHKNGRSLLVPSNSTHAKKAHVFAFMRAYAAGSEEDRRGMLIAMRTLLVIYLRGEGDFNSVKVAENSFLCEFSPEDFLDAGVSAALERVSAIKSSQDKADGKQKKINEDKIRRIYTDIIPEIEKILKSHYRSTLEAVSENDFLIDEVCGDYCSNLLDGEEPKISALRFWLDYFDEEARKTLLQRQRLDTYKTGLLWLGKRLWSNWISYIALKFIDYGKAVYHFVLPEEFKFDGEGLCLGDVLPDYEGGISSFEYERLKARDDLDRNTAVAVTFAVNTFSRAVLASTPMKWNDRKNQEEPVEDVLFAGRDVYYPHLYGDAGKRILRYFGGASNWENNDEIALYSSEDKGIEIIVPILEQLKDLRNSSFHYLAAEGSTDTEKIQILFDQEKDTYSDLIRKKYFSNNVYRYYSEDDAKEFLGFVYREPAYVPAQIPAFQHLFNRNSAFMHDRIIKGDAKRKIAGSGTDELRIYKGTLFFLMKEIYYKAFLQDPGCKDRFMALVRGEDPNAAVKNEYALQNFRKRIETLGEDADLGEICQLIMTDYELQNKDKRVRKSRKNGREQYRHFRTLLYYFLREAFLDYFLKSEKAKVFAFIREPDIKENWKNKTLEGYLASWTCDTYKGILQDKSMLKWYALAHFLTPKHLNHLIGSYKQYGVFINSIERRAGNTGNRTDDVETLRKEGRRVKDIVDMLAFSACFCARTTNTAGDYFKDDEEYASVISDFVQLDKKYVDSDMTALKMLCDKELELSTGKKDKNGKKCKIKQRIGIYCDAYNPIVNRNVVLASMYGDLRMLSVICGRITEIDINQYYKRKEDLSEVFKKGACASINEQKKLREFQDIKNRIELHDILTFTEMVSDLNGQLVNWSYFRERDLMYMQLGVQYTKLFFTDAVPKDDFRRKIVGERFAFTDGAILYQITATYDYRLPLYGFGGNGRGKVSVKAGVPISACVIGFVEKYCGEELENKNTVYNEGLYFFENIDEHRELVDTRNYIDHFKYYANHERSLLDLYSEIYERFFDYSRNFKKSVSYILPNILERYFVVLKTEIEKGERRAWNGREYCYHDAAEIRIKEICSADFTYTFKEDGKDVRHQVPAHSKKFLETVKRILEYKA

SEQ ID NO: 510 - protein, 1194 aa, Artificial
  Synthetic
MKVTKIDGLSHKKFEDEGKLVKFKNNKNINEIKERLKKLKELKLDNYIKNPENVKNKDKDAEKETKIRRTNLKKYFSEIILRKEDEKYILKKTKKFKNINQEIDYYDVKSKKNQQEIFDVLKEIKIKETEKEEIITFDSEKLKKVFGEDFVKKEAKIKAIEKSLKINKANYKKDSIKIGDDKYSNVKGENKRSRIYEYYKKSENLKKFEENIREAFEKLYTEENIKELYSKIEEVLKKTHLKSIVREFYQNEIIGESEFSKKNGDGISILYNQIKDSIKKEENFIEFIENIGNLKLKDLTKSQIFYKYFLENEELNDENIKFAFCYFVEIEVNNLLKENVYKIKRFNEGNKKRIKNIFEYGKLKKLIVYKLENKLNNYVRNCGKYNYHMENGDIATSDINMRNRQTEAFLRSIIGVSSFGYFSLRNILGVNDDDFYEIEEGLTEEERKNESNVLKKAKEDITSKSIFEKVVDKSFEKKGIHSIRKNVKMFYGDSFDKANEDELKQFFVNMLNAITSIRHRVVHYNMNTNSENIFNFSDIEVSRLLKSIFEKETDKRELKLKIFRQLNSAGVFDYWENWKIEKYLKNIEFKFVNKNIPFVPSFTKLYNRIDNLKAGNALKLGNHIIIPKRKEARDSQIYLLKNIYYGEFVEKFVNNNDNFEKIFREIIKINKNAGTNTKTKFYKLEKFETLKANTPTEYLEKLQSLHKINYDKEKVEEDKDTYVDFVQKIFLKGFINYLQKSNSLKPLNLLNLKKDEVINSEKSSYDEKLKQWENNGSKLSEMPKEIYEYIKKIQINKINYSNRMSIFYLLLKLIDHRELTNLRGNLEKYESMNKNEIYSEELNIVNLVSLDNNKVRANFNLESEDIGKFLKTETSIKNINQLNNFSGIFADGENVIKHRSFYNIKKYGILDLLEKIVAKADLKIAKEEIKKYENLQNELKRNDFYKIQEKIHRKYNQKPNLILRTENKKDFNDYKKAIENIQNYTQLKNKIEFNDLNLLQGLLFRILHRLAGYTSLWERDLQFKLKGEFPEDKYIDEIFNSDRNNNQKYKSGGIAYKYVDFLIEKEEGKRAGKNKVKKRSEKEGSFIIRNYIAHFNYIPDAEKSILEILEELRELLKYDRKLKNAVMKSVKDIFKEYGFIVEFRISHESNSKKIKVLDVKSEKIKHLKNNGLVTTKNSEDLCELVKVMLEYKKS

SEQ ID NO: 511 - protein, 1150 aa, Artificial
  Synthetic
MKITKIDGISHKKYKEKGKLIKSNEIEKDITEERFNDIEAKTTELFQKTLDFYVKNYENSEDQNKERREKAKNYFSKVKILVDNKKITICNENTEKMEIEDFNEYDVRNRKFFNVLNKILNRENCTEEDLEVFENDLQKRIGRIKSIKNSLEENKAHFKKESINNNINYDKVKGNNKRSIFYEYYKNSLKHQEYINNIFEAFDKLYSNSHEAMNNLFSEITKDSKDRNIRKIREAYHEILNKNKTEFGEELYKKIQDNRNNFDKLLEIEPEIKELTKSQIFYKYYIDKVNLDETSIKHCFCHLVEIEVNQLLKNYVYSKRNINKEKLENIFEYCKLRNLVKNKLVNKLNNYIRNCGKYNAYISNNDVVVNSEKISEIRTKEAFLRSIIGVSSSAYFSLRNILNTDNTQDITNKVDKEVDKLYQENKKIELEEILKLFFGNYFDINNQQEIKVFLMNIDKIISSIRHEIIHFKMETNAQNIFDFNNVNLGNTAKNIFSNEINEEKIKFKIFKQLNSANVFDYLSNKDITEYMDKVVFSFTNRNVSFVPSFTKIYNRVQDLANSLEIKEWKIPDESEGKDAQIYLLKNIYYGKFLDKFLNEENGIFISIKDKIIELNKNQNEDKHCKFKKFESVNEKNPKKYLEIIQSLYMINIEKINSERKNVFLDFIQRIFLKGFFEFIKNDYNYLLELKKVQDKKNIFDSKMSEYIAGEKTLEYMEEINEIIQDIKITEIDKILNQTDKINCFYLLLKLLNYKEITELKGNLEKYQILSKTNVYEKELMLLNIVNLDNNKVKIENFKISAEEIGKFIEKINIEEINKKIKTFEELRNFEKGENTGEYYNIYSDDKNIKNIRNLYNIKKYGMLDLLEKISEKTNYCIKKKDLEEYSKLRKQLEDKKKENEKIEDEKTNFYKIQEYLHSKYQQEPKKILWKNNKNDYEKYKKSIENIEKYVHLKNKIEFNELNLLQSLLLKILHRLVGFTSIWERDLRFRLTGEFPDELDIEDIFDHRKRYKGTGGGICKKYDRFINTYTEYKNNNKMKNVKFADNNPVRNYIAHFNYLPNPKYSILKMMEKLRKLLDYDRKLKNAVMKSIKDILEEYGFKAEFIINSDKEIILNPVKSVEIIHLGKEDLKSRRNSEDLCKLVKAMLEYSE

SEQ ID NO: 512 - protein, 1407 aa, Artificial
  Synthetic
MGNLFGYKKWYKVDKIIKDKKGKKSTIKQEVRIKRDYLTNRYILNTNNKDKNNINNKDFVNQFIEYKTKNDIFEKFTRKFHMGNILFKLKAKESVGEIRSYNNFLEKEKAILEIEIYQQSEELRKKENITKKDIIDKVIEDKITENSNEIKMQIKLEKNNFEEIRIYINKELGQYNIKLKNIDNDELNLKRETYEILKSINANLYIITKNAISNANFEKRNYEIFLKKSMRKYLRENINKKLRNTFLESLSKSLKKIQNNIRENEEIINFIKYYSSINGNKTVSENKKTFLEKILNTEVSISENDIIDFIIGELKFYGIIKRIEELQEKTIDRTEEDIKNTYINTYVSLDKHEKFKIDRENKKDKVVKLFVKDIHNNTMEEKINDILSKFKIKELTKKLEKNTENKNFDTEIFGIFKKHYKVNFDSKKFSNKSDEEKELYKIIYRYLKGRIEKILINEEKVRLKKMEKIEIEKILNESILSEKILKRVKQYTLEHIMYLGKLVHNNIDMTTVNTNDFSKLHAKEELDLELITFFASTNMELNKIFSRENINNDENIDFFGGDREKNYVLDKKNLNSKIKIIRDLDFIDNKNNITNDFINKFTKIGTNERNRILHASGKKRDSQGTQDDYNKVINIIQNLKISDEEVSKVLNLDVVFKDKKNIITEINDIKISEKNSNDIKYLPSFSKVLPEILNLYRNNPKNEPFDTIETEKIVLNALIYVNKELYKKLILEDDLQENRSKNIFLQELKKTLGNIDETDENIIENYYKNAQISASKGNNKAIKKYQKKVIEYYIGYLRKNYEELFDFSDFKMNIQEIKKQIKDINDNKTYERITIKTSDKSIVINDDFEYIISIFALLNSNTVINKIRNRFFATSVWLDTSEYQNIINILDEIMQLNTLRNECITENWNLNLEEFIQKMKEIEKDFDDFKIQTKKDIFNGNYESIKNNVLSKFIGFSDVQKILEEKLNNLIDFENDNEIKKSLNLDSLNPDERRNLMPNINPKKGGIDLIKEIDKLIVIKKNNIEKNILLKIIFNSDFLEKYKKEIDNLLEDTETENKNKFEKIYYPEEHKNELYIYKKNLFLNIGNPNFDKIYGLISNDIKMADAKFLFDSDSKDIRNNEISKIDGILKNLNDKLNGYSKEYKEKYVKKLKESNDFFAKNIQNENYSSFEEFEKNYNKISEYKKIRDLVEFNYLNKIESYLIDINWKLAIQMARFERDMHYIVNGLDYLYIIRLEKDRNQDRSSPYPKYKNGVLDYTKSYYNFKDYQEFMDICSKFGIDLSENSEINKPESESIRNYISHFYIVRNPFVDYSIAEQIDRVSNLLSYSTRYNNSTYASVFEVFKKDVNLDYDELKKKFKLIGNNDILEKLMKSKKVSVLELESYNSDYVKNLIIKLLTKIEKTNDTL

SEQ ID NO: 513 - protein, 1382 aa, Artificial; identical to SEQ ID NO: 503
  Synthetic

SEQ ID NO: 514 - protein, 1387 aa, Artificial; identical to SEQ ID NO: 93
  Synthetic

SEQ ID NO: 515 - protein, 1373 aa, Artificial
  Synthetic
MAKHLRPIGESYTDFLDETEFVRLGRGLHRGHHGVQIPPTELPSYLAEYRKALMRQVVAVLDKVVGKRRRLSGMHPEAYRDRVHLAEALWVRLVARVKEIGTPPDPSELLDLRRMWNAKAHPYAEYDVVPRAPLNDGNGQKILECREVDDPKIERSDFEGRWHGRFWQSEPGPVDYNAIADRIFAHLFDQEAVIGGGPRREGNVTVPDEDINGQPGPATGKGLIIARGQSIVKSASDPRRSSKKVQRTWDKAVERRYFGDDGKGGSDIAKAIYEELGDPATLADPIYASWFGSRLYDHFGSFKNSLPLELKDPFKEQIWALHNSVRQFYQRMAKSDRFRLALQNARSEVPDRSELLALLPKDHDHLLLVLGGKKKNAEMSELIRLGKLFVHASDVLHDFDANDAAALDAFKRRMSFLATSIGQSEIKQTETFARTWRGAVGLTLRTVKGLADPRGIIGTPDNRDLGTAGPMKDAFNKFDQPHFQQHMTIIFGNKELQAEGNPTRSSVFTANGDKDHQAELLWGFLCVVRSVRNRTNHYNVRRALFRLLDEGIVSPMPSDPKKERVENRNLCTVSPTALEAFRRLLNFDLAIQKEAVRTALEQAKASEFVEEGKLRGLVSELAGTEDMPALHIPRFSAVMDKVRRLADNRDVGLDPILSTLQRSLPPTDKQAESDAARCRYRLLLELYKSGFRSWFSGIQSNEENNREICHWAVKQVGRAKDARKSEYDKKTKRHYRSPNSLIDDLGLDKFDDLTDLLEALASQSTREHDQNLKYVPDARVQSQMSNRIEEFRQELFAHIFTKYLDTHDFGWIGAIEVRREACDLADVVSAFEVRDQKFDADWHSQFYAWLYMVPPIEASRLRHQMRKSAVMDDKWSTTLELTSGDRKTRDDHAQDVLADMDRLFSLYTKVQAAGFNGQEHESALGSKSLFYEDGNQFDEVYSPDTETHNKTFPGTRRGLRQLVRYAHLPALEGVFKKHRITKAEVETFVALYDENRRDPGSVAHMLRREKLRTEILRSIHDGPKPKDKDFWPKLEAKCLEYRTVATETAIYNFQANAARLNDHARLHQIVMRVVARLTDYALIWERDRLFAFVGMLYRQTGGTGINPAMRHAEKTNAPPRIGILVSDSALAKKLNSNSAEVFIPYLDTETGFDAPRFDDLCTLLSHEHAKEFRFHFLEVGEENSKDEARRLNEETMGHRKRPAFKRGTRRQGIRNDLAHHNVLDLAGGAGPNLTYVVNAVRSLLSYDRKLKNAVPKSIKRILGEEGLIIEWQMNYDRLKKPTVYPNVETHLTMVPPRHMTAPVSFTLPRASVRLASMVKAVFDFGSSGYGEERMIGGRTAKQAVYPDDFTRRFPQTPMGLKQATRLVFASENS

SEQ ID NO: 516 - protein, 1382 aa, Artificial; identical to SEQ ID NO: 210
  Synthetic

SEQ ID NO: 517 - protein, 1412 aa, Artificial; identical to SEQ ID NO: 344
  Synthetic

SEQ ID NO: 518 - protein, 955 aa, Artificial
  Synthetic
MKVTKVDGISHKKYIEEGKLVKSTSEENRTSERLSELLSIRLDIYIKNPDNASEEENRIRRENLKKFFSNKVLHLKDSVLYLKNRNEKNAVQDKNYSEEDISEYDLKNKNSFSVLKKILLNEDINSEELEIFRKDVEAKLNKINSLKYSFEENKANYQKINENNVEKVGGKSKRNIIYDYYRESAKRNDYINNIQEAFDKLYKKEDIEKLFFLIENSKKHEKYKIRECYHKIIGRKNDKENFAKIIYEEIQNVNNIKELIEKVPDMSELKKSQVFYKYYLDKEELNDKNIKYAFCHFVEIEMSQLLKNYVYKRLSNISNDKIKRIFEYQNLKKLIENKLLNKLDAYVRNCGKYNYYLQVGEIATSDFIARNRQNEAFLRNIIGVSSVAYFSLRNILETENENDITGRMRGKTVKNNKGEEKYVSGEVDKIYNENKQNEVKENLKMFYSYDFNMDNKNEIEDFFANIDEAISSIRHGIVHFNLELEGKDIFAFKNIAPSEISKKMFQNEINEKKLKLKIFRQLNSANVFRYLEKYKILNYLKRTRFEFVNKNIPFVPSFTKLYSRIDDLKNSLGIYWKTPKTNDDNKTKEIIDAQIYLLKNIYYGEFLNYFMSNNGNFFEISKEIIELNKNDKRNLKTGFYKLQKFEDIQEKTPKEYLANIQSLYMINAGNQDEEEKDTYIDFIQKIFLKGFMTYLANNGRLSLIYIGSDEETNTSLAEKKQEFDKFLKKYEQNNNIEIPHEINEFLREIKLGNILKYTERLNMFYLILKLLNHKELTNLKGSLEKYQSANKEEAFSDQLELINLLNLDNNRVTEDFELEADEIGKFLDFNGNKIKDRKELKKFDTNKIYFDGENIIKHRAFYNIKKYGMLNLLEKIADKAKYKISLKELKEYSNKKNEIEKNYTMQQNLHRKYARPKKDEKFNDEDYKEYEKAIGNIQKYTHLKNKVEFNELNLL

SEQ ID NO: 519 - protein, 1402 aa, Artificial
  Synthetic
MGNLFGHKRWYEVSDRENYKIKRKVKVKRNYDGNKYILNINENNNKEKIDNNEFIEELVNYKKNNNVLREFKRKFHAGNILFKLKGNKRSIEDSNDFLKTEEVVLDKEIYGQSEKLRNEKGITKKDILKEINKQKIDNSVKKISMNTNSGKTIVINFSDKLKKDKDDYQITLNIISEDELERKRKIYDIFKMINMDLYQIIKEIIENQVQKVFKNRYYEEHLREKLLKDDKMDVILTNFMKIREKIESNPEIMGFVKFYLNVGGDKKKSENKKMFVEKILNINVDLMVEDIVDFIVNELKFWNITKRIEKLQEKTVNRTDRDIKNTYVNTYVLLDKHEKFKKYNRNKKDIIVKSFIKDIRDNTMKQKINQILSKFKIKELKKNLKENTENKNFDTEIFGIFKTHYQNIFSSEKFENKSDEEKELHKIIYRYLKGRIEKILINREKIRLNKIEIEKILNENVLSKKILKRVKQYSLEYIMYLGKLVHNKPVDNKPVDNKSVDNNNNIDMTTVNTNYFSKLHAEEELDLELITFFASTNMELNKIFEINKGKNDFFGDSFKINDTKVLLKNDVTSSKLYILKNLNFIDNENKVKKEEFISKFITIGVNERNRILHASNKRRVPQGTQDDYKGTQDDYNKVINIIQNLKISDEEVSKALNLDVVFKDKKNIITKINDIKISEENSNDIKYLPSFSKILPEILNLYRNNPRNEPFDTIETEKIVLNALIYVNKELYKKLILEDGSQENRSKNIFLQELKKTLGGTDEINENIIENYYKNAQISASKGNNKAIKKYQKKVIECYIGYLRKNYEELFDFSDFKMNIQEIKKQIKDINDNKTYERITIKTIDRTIVINDDFEYIISIFALLNSNAVINKIRNRFFATSVWLNISKYQNIINILDEIMQINILKSEYITDNWKENLEEFIRKIKNKEIELHQSKKEFFDNNYKEIKNDIVNEFQDNEEIKKIFDNNLKEITEFRNNGAMYFKNLKELSQIEREFILDNKKLFEDKIDEIIIKKQKEVKEEILAKKIFNSEFLEKYKEEIDNLVESTESKNENKFEKIYHPEEHKNELYIYKKNLFLNIGNPNFDKIYEIISKDIKNANTEILFDNDIRKNKISEIDAILKNLNDKLNGYSNDYKAKYVNKLKENDDFFAKNIQNENYSSFGEFEKDYNKVSEYKKIRDLVEFNYLNKIESYLIDINWKLAIQMARFERDMHYIVNGLRELGIIKLSGYNTGISRAYPKRNGSDGFYTTTAYYKFLDEESYKKFEKICYGFGIDLSENSEINKPENESIRNYISHFYIVRNPFVDYSIAEQIDRVSNLLSYSTRYNNSTYASVFEVFKKDVDLNYDELKKKFKLIGNNNILERLMRPKKVSVLELESYNSGYIKNLIIELLTKIENTNDTL

SEQ ID NO: 520 - protein, 1262 aa, Artificial
  Synthetic
MRGGHMKITKIDGISHYKEKEKGVLKAKDVLNEEIKEIVKKRYDATIESKIYKEFIKLRKNRIEQNNEKSVLELIKSNIDKNEKEIKTLLWNKFKIKEKNKKYDKYILDEIKLDNDIKIYESAESLYFFIKEVYLGQNNKKWNISKIDLEKIMEKDNNLIMLGYKLKKNIKEDEYPYLYKNKNKQKSTPLYTLLKKLIEKNKNSNQNIRESEEYEKIQKKFKEYKNIKINLLVKSILNNKVNIKYNTSNNNIEESNSKREKEIIEFFKKMIEEKNKSILKDKLKLFRLEVFFDEEFLEEIKKLLDSGDSDKSDNKKIAELRGKIFSRIREKIKEDKNRYILKNIYFLELKKYIENNLSHKKENNKNNSNIGEEKSKKLYLKFLKKVLFIDDNNRISIEKLKSRIDDNFKNLLIQHVIEYGKIKYYVENDDYIKNIVKNGELKLETENLEYIRIRETLIRKMAVLVSFAANSFYNLFENITSDILTANINLDSGVIKIGNNRLKEKFLNYFFYSEEILDKEDFLKALKDSIYNVRNGVNHFDKMILGKYNNGLDLKDSDTIKDYFNFKKKEIQQDLRDRFISNNLQYYYTENEIKKYFEKYKFEILKTKASFAPNFKRILRKGENLSISEISDIYDFFKRYSENSDKSSEYNEFTKTRNFLLKELYYNNFYREFLSDGTKFEEAVKKVKNNKKSRIISNKKSAGKSYDVIEDYNSSDDVLEYISRIHKSEMERIEINTEKNRKDTSKYIRDFIEEVFLEGFIKYLDNNNLNFLKNRNKVDKERKEIIRNLNIKIEGLDILNQNDSEILNLYLFFNMIDNKRISEFRNEMIKYKQFLTKRQNIKSKFLEIDIEKIEAIIEFVIITRGKLEILEGETKEQKKDNMNALFNKFYSSESEYDESLKKFIEETVLNDKKNTPFYSTDGKTPIVHSNLEKMRKYGTENFLSKVLKDEKYTLENMKIKEKFETEANDKFKEQKILEKVDKIKGNEKHKKLIEYYNDCRCYLHKEWIENKKNKEEFEYKEIYEKIIEEIRKYNYLENKEKLQNVYLLHEITSDLMARNVAFINKWERDFKFLSIAIKENLKDSNDIQKIKEFLAPSLDTTSDEEHFNVKNYASKLKNIQGLHNNIISLIFIKNLDGWSNKIDNFKWLGFRNYISHFNHINGENSKESFINQLNRLILLFSYDKKVQNHITKSIKTILEKYNIDIEFKISDDSKNFFEYQISNINSKKGKMLGKENYFELLDEEFVQNVKKMLEYEDQRTGG

SEQ ID NO: 521 - protein, 1389 aa, Artificial
  Synthetic
MGNLFGHKRWYEVSDRGDNKIKRKVKVKRNYDGNKYILNINENNNKEKIDNNKFIGEFVNYKKNNNVLKEFKRKFHAGNILFKLKGKVKDKKNIKRIKNNDDFLETEKVVLYIEVYGKSEKLKALGITKKKIIDEAIRQGITKDDKKIEIKRQENEEEIEIDIRDEYTNKTLNDYSIILRIIENDELETKKSIYEIFKNINMSLYKIIEKIIENETEKVFENRYYEEHLREKLLKDNKIDVILTNFMEIREKIKSNLEIMGFVKFYLNVSGDKKKSENKKIFVEKILNTNIDLTVEDIVDFIVKELKFWNITKRIEKVKKFNNEFLENRRNRTYIKSYVLLDKHEKFKIERENKKDKIVKFFVENIKNNSIKEKIEKILAEFKINELIKKLEKELKKGNCDTEIFGIFKKHYKVNFDSKKFSNKSDEEKELYKIIYRYLKGRIEKILVNEQKVRLKKMEKIEIEKILNESILSEKILKRVKQYTLEHIMYLGKLRHNDIVKMTVNTNDFSRLHAKEELDLELITFFASTNMELNKIFEINKEKNDFFGDSFKINDTKVLLKNEVTSSKLYILKNLNFIDNENKVKKEEFISKFITIGVNERNRILHANSKEIAPKGKQDNYDKVINIFQNLKISDEEVSKALNLDVVFKNKKDIITKINDIKISEKNSNDIKYLPSFSKVLPEILNLYRNNPKNEPFDTIETEKIVLNALIYVNKELYKKLILEDDLQENDLQENRSKNIFLQELKKTLGNIDEIDENIIENYYKNAQISASKGNNKAIKKYQKKIIECYIEYLRKNYEKLFDFSDFKMNIQEIKKQIKEINDNKTYKRITINTSDKSIAINNDFEYIISIFALLNSNAVINKIRNRFFATSVWLDTSEYQNIIDILDEIMQINILKSEYITGNWKENLEEFIRKIKNKEIELDQSKKEFFDNNYKEIKNDIVNGFQDNEEIKKIFDNDLKEITEFRNNGAMYFKNLKELSQIEREFILDNKKLFEDKIDEIIVKKQKEIKEEILSKKIFNSEFLEKYKEIIDNLTKNENKFEKIYYPKKNKNELYIYKKNLFLNIGNPNFDKIYGLISKDIKNVDTKILFDDDIRKNKISEIDAILKNLNDKLNGYSNDYKAKYVNKLKENYDFFAKNIQNENYSSFGEFEKDYNKVSEYKKIRDLVEFNYLNKIESYLIDINWKLAIQMARFERDMHYIVNGLRELGIIKLSGYNTGISRAYPKRNGSDGFYKTTAYYKFFDEESYKKFEKICYGFGIDLSENSEINKPENESIRNYISHFYIVRNPFVDYSIAQQIDRVSNLLSYSTRYNNSTYASVFEVFKKDVDLDYDELKKKFKLIGNNDILERLMKPKKVSVLELESYNSDYIKNLIIELLTKVENKDEISS

SEQ ID NO: 522 - protein, 1315 aa, Artificial; identical to SEQ ID NO: 366
  Synthetic

SEQ ID NO: 523 - protein, 1330 aa, Artificial
  Synthetic
MKREKNITIMKISKVNHRRTAVALNGDKSELGGILYEAPVQKDKNGNYNDVIAETGKVVNEALDKKSRLYTPFNNQKVIIDKNLQRYANNLKRCYINFVKQYVNNKSFNYKAMQFIPDIQNPKTNDAVNYRTDRDNVYNKNKYYDKQTKSKSKKFIYEKIVIPQNEQNIVISALVNCSLRKSLRKDVSYKTKSGEIKTYNLPELVKKSMRFYCLEGQREPDEKEKYEMYILFSYMKEDKRTKNTDLLVKSISNQNTKVKVEDIDGNKLLKLSIADTKKKPLWEYLIKYADSSRQRELMYDIRKKIILYVAGIEEYENIKEDSGLSKVSWSKYNISDNKMFLDINSCTDKRKQNLEIKIREANIEHYRNASSKLCDDESIFWFQHFEGVIETLFSKKSKISEERLGCAYICDYLWKDFLSYLAAKYIDLGKGVYHFTMKDKLDMLNKNEAVTDLRFGIVSEKYEKGITSFDYERIKAEEELDRNIAAYVTFAADIFAKSVIKSDYRTKKDNNSDVLQYSDKEFRNSEVIRDNAEKNILQYWGGYSRWGTESSKLPENNKVSDFAKLDVSDLCIDIKKHLAGIRNSSVHYTTKIKNESAADGSNVKILFEKDLADINIIYADKYYSNNVWMFYSLEDINKLIAFLYKEKRVIRQVQIPSFSRILKRKAMQDVINEIFKDDFDENIVNPELKEKYRNSLYFMLKEIYYNAFIIQPELKEKFKDKIKTMKSELYNKLKTIDKKEYKALYCMLSNEESALKNFADRIYSVDGDNVSFADICKILMTDYNMQNQEKKNIESMEQKKKNKGKDENYKHFPLLLHKVLKELFIEYLKQTHELEFLRNNICIKSDVTMESFESQIKGVEIYKDLKEKIDKNNSLLDWYVIAHFLMPKQLNHLIGNIKNYIQFATNIDKGAESVKNLTESGMVKRIQYYDDIVRTLEFSAQYIGKISNNINDYFNSEDEYVSFLSKYVGFINDKSEDVLTELKDFCREKINNGSQIIGIYYGGDNVIINRNVIYAQMYSNAEVFSNIYKKVTKNDIINYYEKQNDLKDVFKSGVCQNEDEQRSLCEFQQLKNRIELTELSTYADMVNDFMAQFVEWAYLRERDLMYFQLGIHYIRLFYSDNVLDEKYHKLSDNVIDIEEGALLYQIVAMYDYELRIFETDNSGNAKRIGQGGPGKSIPVFLKKYCNGTDVYECGLELFEDINQHEHIIRFRNDIAHMRYMSNQAMNIMSIVSNIYKSFFVYDTKLKKSISLVFKNILMRYGVIADLVFSYNNKNQSIKDDMDINIINIKNLKSDKYVYKIVNEDIVKQVEIEIRNQVFLEQLHNLLYFSR

SEQ ID NO: 524 - protein, 1244 aa, Artificial
  Synthetic
MKITKVNHVKPAVSTEEKTQEGILYKNPTDGKGLPDIEKHVDDLIARASRNFKENFKYYIDDNASPEEKKKLQQKKNKFRNGVIESLKNQNMVIQPVELEEGDIQIALSLVKGELSEGGVSEKGSRKAREKAAFRRFLSDYANLDEAFRMDLLRRIRRIVLIYFYGTDSMNETIKSDFDVWDDHKSRQSDYSAYIKHEFVSTIVENKKEQEKLREENYNQLKDSIRKANINSYRSTVSYIDSLSDEQKSTLFFADQDMINYWVHHIEDEVERIYKKTKRLNKDNTYKLCKGYISEKVWKGIINYICIKYIAIGKVVYNLAMEDLGGDKDENLGELAAAFKNGISSFDYEIIKAEERLQRETAVYVSFAINNFLSATVDRGEDVKDKECDIADKNLNRLPNTKRNILQFFGGSSRWSGFDYSKYSSDETGEYLWNQVREALYSMRNESFHFNTKNIKSDWDQKLISDMFETDSRECGKSEVVKFYSNNIPMFYSETDIEKLMHKLYDNYSIRASQVPAFNTVFVRKNFASFIGEKLKIHTTFSGEELQQFQSALYYLLKEVYYNAFLTDKNTKKFFLDAVSSLNDSDKEHKYAVIDFKKRINEINRSGSFSLSEICQIIMTEYNQQNDKWMKKRTNKGKEKLPDGYQHYKMLLLESLRDAFVLYLNSDTSYSFINSPRKKDIPSKDEFLPNFSSDRYDSIVKELAQNPELQKWYVMGRFLYPKQTNQLAGSIRNYIQYKWDIKRRAENTGNAVAVSEELSNRLKKILQVIEICTKMAGTISHEITDYFDDEDDYASYIERFLDYGKEFEQYDISPSGKLKEFCTSKNIGDNSSIDIFYDGKNPILNRNIVLSKMYGSGDILADALSDNRVNIADIEAYYKCKDKLTKYRTTGEFSTKDEVVEIKKYQELKNHVEFRDIVEYAELLNELQGQLINWTYLRERDLLYYQLGFHYSCLKNDSNKPSDYKSIVVEGRTINNAILHQFASLYINGVPLFVLDGDEYKRDKEKSAGGNIRGFFDYCKIAFPEYTNKFTVYTSGLELFETVKEHDEIINLRNHIDHSKYFVMNPAVNGGRSMIDIYSEVFDRFFSYDHKYRKNVPNVLFNICMKHFAALSIGFSTGEKVVQRDKERKECKDRATIVINKISAEPFTYKLKNGKVECPAKSERFLRNMVSLLYYRDNIPEGIVYYTGKLKSVSPDNNGQKIDLRNSRNKGNNGYSKKNKTVGKKNEKDLTSNPFDDLFSGLKL

SEQ ID NO: 525 - protein, 1218 aa, Artificial
  Synthetic
MRIVRPYGESVAPGAGSERLLRPKKQLRDQIGDADRRIPTFAAGHDELVIAQWISTIDKIATKPKGNKEPTPRQRALREKLGKAGWDRLVDQKLLPGLPKDQDDYLGKLWWFKIHPYPKGTKAPKVVNGREIPDPRGRWYSRFVCDVAPDDIDAATVAARVHEHLHVAEYRHGTEQKHDKGRIERRARSIAKNTASLAQVTKERPTWTEDDVATYAQTAGDVATAIKQAAEAREADNRRVGADVAAEVLYPAFGKLFPNKGIKELENQSGLPALHLAIRDFYQRRLKRHKKDQPEHKMARRKVSTLLPADMAGLAAMLRHTAANRDVAALVRLGKVIHYEAAFAAGQKAADGDAPAHVLEKWPAEVKASHYWSSEGQAEIKRNEAFVRIWRHSLALAAQTLRDWASPDGSFHTDILSEKQFETLTKNLDLDHHARKLAVLLGNRAEFFLKGRGDAFQKQTLKLALQGLTQLRHNSFHFNGRGGFADALKFTRKPEITADQHMWDALGALWATDLEERGKRLIDTLEAAHLHHFFDWEHNKRLIGAVARAKLAEGAEDLPLPRFRRLLDRAANIRGKDGINLRLPKPVNRQDMEDFPALHAKYVALKLLYENPFRQWVGHRDRRDLVNKLIDRAVRRADKAAKDLHGKADADRRLIITAKAKGLGRLGEGEKLHDFAFRLSRETASEMRVQRGYDSDGERAREQAAFIEELLIDVLAQAFDHYLRKKKFDFLVDLRADEPRPKEPKCALRRPVLDAEGAAAPQWQVLLYFLLHLIPVDDIGRLVHQIRKWDITAGKAAGTTRAADDDVDRVARTLTLYLDMHDAKFTGDQALQALAPLHELYASKETFERFFLRKATDDNEYLPRRGLREILRFGHLPPLRAIFAAHKVDDDTVQKVEAAEKGPLVAAQRERERLHKLWVDQRRKLGAEDLRCYVDTLAEVTRHRHAAAHVRLVDHVELHRLMLAVLGRLLDFAGLFERDLYFAMLALIYRAPSSPQAVLDEADRELLRRGQIVETWRKLQDSTLKDELAQLFDPTSGRVIRVRNDFAHFNMLNPRRSRGATIDLTAQVNAARRLMGYDRKLKNAVAQSVIELVAREGLHLDWGMQVLDGAHVLVDARVRGKQAAHLGNLGLFEKGQGEREKKPAHRLTETLSGPHLAEMAATLFAGRVAHATDAAALPRAAIDWQRSAAPETNTKQAHNHPQRPPKPRIQRPPLQAAK

SEQ ID NO: 526 - protein, 999 aa, Artificial
  Synthetic
MQKAQNLRKILGNAAWKKLGDKKLLQKLAGTEKEKNKLKKIWDWKINATQPKAPKTIEGRWYKVFVDDIKPVEKNATEISDKIYKHLYEKAYRFPVKPDKDKNQKMPTRQSGRMESSQPRCHKEGLIKHRANSIENNVLERTEQKAALYDDSDKETYIKKAGDIADAIRKAVLDEWREPYASPEARNAPNNQQRKNGSSSRNPQQQNRNTTEGYKDRPYEIAVRTLRDTRIKVFDGLKAFCAAKEKNPSLLNLHLQIKETYKYLLKGRKKLNDKLEKILPENNDALFRLMEERQKNRDVNHLIRLGKVIHYEASVKSGKQTTNDGRDDVAASTTDLSEEDIINSRFWSSDGQTEIKQNEAFVRIWRNVLAFAARTLKDWADPGNNIPCDILINRKKALCHFNVDNFDKKYKILFGDRPEEDKKFSATSDKQQQTVAPALKKEEKKALLEFSLQSIYNLRNAAFHFKGMGTFIKELEKETDKNVSGILKDIYKTDCEKRQEIRKKIMEGAHFHKFFGRGEIEKIWRELTSAKPSILPLPKLKRVLERAEDAWKDKDTLQLPPYSTSDEREACEWACCQYTATKLLYDRPFKNWLDEQEHCIINGYIKRALEHTTQAAQRMNGKDKDKDYIELITAKAKNIGELKDKEKFEDFFFELIAATATERPVQNFYQSDGDAAKEQAEYIEKFKCDVIALAFEKYLKEKIKNIKAFCEKERTEKPRTSHPKQQENFDYESLTSTQIAEFELWQAWQEKLYFLLHLIPVEEVGSLRQQLKKWEIVTRKSHGKEGREKDILKVLGVFDLYIAMHDAQFVEAELKSLSAEDKKTAEALFENKDDFEKIFPKKQGGSEVEHLPIRGLREMKRFGRGILHNVYEKHKIKHEDVERWEKLEKTIAEEQKKLKKLHEEWVVSKNKTKWTKESEYKSALKKVEEYRHLKAQVMLQNHVRLHRLLMKVLGRLIDYSGLWERDLYFVLLALFYQKEQSRDKDNKIADDEHVRFLKK

SEQ ID NO: 527 - protein, 1268 aa, Artificial
  Synthetic
MKVSKVNHRRAAVAVNKKSVTVNGILYDAPVKKNVKTGNMSAYVSSKYVIDNVVKNSSRLYSPFSSKRIVIDREKIRIADRLKQCYVNFVKYYLSNGSLNEQQMRFNPNNTYMADSRVHFCVPSGIDIESLINSIVDSSLRKSLKRTYRFETNYGEKNTFNLPDLVKKSIKIYCTDEKRKLNDREEQEMYVLFSYMYEDKYKDRQKVLIANSISNQATKVKVCDDESRLIKLSIADTKKKPLWDFIVDYANSDKNGQYTILRNIRKSIVLFVCGVDVYRNIENNDNLDIWKWEEYGIQESQLFVKIENCYTTKGEDIALNEIRNVNLDHYMKAIGVLDDERSKFWFQHYENTIEALFSKKSKRKIERIKTAYLCEYLWKNFCSYVALKYVDLGKGVYHFTMSDKLSLMNKNTNENGIKFGEVDSRFNKGISSFDYERIKAEETIDRNISTYTTFATNIFAKSVIKDSYRQKKAGNSDALQYDDETYYNRKAMNPYALKRVLRYWGGQSRWKSELEELNVAELCIDIKNRLSKIRNSGVHYTSTSALKGNDDDSIVGMLIKKDFDDIKDVYASKYYSNNVWMFYNTDKISKMMEYLYQDDSNIRDAQIPAFNSVIKRKDMAEVIEKIVKKNSYKTIKELYQREKYRSCLYFMLKEIYYNRFIKQDNLKDQVIQIIDSNTELIGDNSRAVDNLKKRIHDVDSQTMSFGELCQVIMTDYNMQNQENKSIKSKERQDKDRKNGIDNSYKHFPLLLHHLIKVSFLKFIKTDEKLAFIREPRITELDKTLEQFEAQIQTVDIYNSLKMMVAENKSLLDWYTLAHFLMPKQLNHLIGDVKNYIQYLSNIDKRAGSVKNNKSASTEVKIRQYSEIVRILDFSLQYIGRVSNDVTDYFVDEDEYAAFLSKYVEFSGNDIVSMKAFCQSRTANGKHTIGLYCDGANPIMNRNIAYAKMYGNDEILSYIYNKVTKKDIEKYYVSQDNLEKVFADGKCQDVQQQNALCDFQKMKNHIELTEVSIYTDILNDFMAQFISWAYLRERDLMYFQLGLNYIRMFYGTYELEEKYYKLHGENINIEKGALLYQIVAMYSHELPIYKVDESGIAILAEKQGSSGASIKSFVTEYCKEEMKKAHTYENGLELFEDVNQHDDLSKLRNDFAHMRYMSARDKSIMDIVSEIYNGFFIYDTKLKKSVSFIFKNILMRYAVDVNIEFCHKGDNEDTNNLIRIKDEVGLYSDKYTYKVEDNDTVDIEVRNSEFLEQLKKLLEYKKESEGSEL

SEQ ID NO: 528 - protein, 1186 aa, Artificial; identical to SEQ ID NO: 171
  Synthetic

SEQ ID NO: 529 - protein, 1159 aa, Artificial
  Synthetic
MKVTKVGGISHKKYTSEGRLVKSESEENRTDERLSALLNMRLDMYIKNPSSTETKENQKRIGKLKKFFSNKMVYLKDNTLSLKNGKKENIDREYSETDILESDVRDKKNFAVLKKIYLNENVNSEELEVFRNDIKKKLNKINSLKYSFEKNKANYQKINENNIEKVEGKSKRNIIYDYYRESAKRDAYVSNVKEAFDKLYKEEDIAKLVLEIENLTKLEKYKIREFYHEIIGRKNDKENFAKIIYEEIQNVNNMKELIEKVPDMSELKKSQVFYKYYLDKEELNDKNIKYAFCHFVEIEMSQLLKNYVYKRLSNISNDKIKRIFEYQSLKKLIENKLLNKLDTYVRNCGKYNYYLQDGEIATSDFIARNRQNEAFLRNIIGVSSVAYFSLRNILETENENDITGRMRGKTVKNNKGEEKYVSGEVDKIYNENKQNEVKENLKMFYSYDFNVDNKNEIEDFFANIDEAISSIRHGIVHFNLELEGKDIFAFKNIAPSEISKKMFQNEINEKKLKLKIFRQLNSANVFRYLEKYKILNYLKRTRFEFVNKNIPFVPSFTKLYSRIDDLKNSLGIYWKTPKTNDDNKTKEIIDAQIYLLKNIYYGEFLNYFMSNNGNFFEISREIIELNKNDKRNLKTGFYKLQKFEDIQEKTPKEYLANIQSLYMINAGNQDEEEKDTYIDFIQKIFLKGFMTYLANNGRLSLIYIGSDEETNTSLAEKKQEFDKFLKKYEQNNNIEIPHEINEFVREIKLGNILKYTERLNMFYLILKLLNHKELTNLKGSLEKYQSANKEETFSDELELINLLNLDNNRVTEDFELEADEIGKFLDFNGNKIKDRKELKKFDTNKIYFDGENIIKHRAFYNIKKYGMLNLLEKISDEAKYKISIEELKNYSNKKNEIEKNHTTQENLHRKYARPRKDEKFTDEDYKEYEKAIGNIQKYTHLKNKVEFNELNLLQGLLLKILHRLVGYTSIWERDLRFRLKGEFPENQYIEEIFNFDNSKNVKYKSGQIVEKYINFYKELYKDNVEKRSIYSDKKVKKLKQEKKDLYIRNYIAHFNYIPHAEISLLEVLENLRKLLSYDRKLKNAVMKSVVDILKEYGFVATFKIGADKKIGIQTLESEKIVHLKNLKKKKLMTDRNSEELCKLVKVMFEYKMEEKKSEN

SEQ ID NO: 530 - protein, 1360 aa, Artificial; identical to SEQ ID NO: 74
  Synthetic

SEQ ID NO: 531 - protein, 1382 aa, Artificial
  Synthetic
MKLSKEKHIRSAVANEEQNIGGVLYHVPGTDTIGLKDQMLIRDRDVKQLYNVFNQIQVGDKPKKWKNDEKLSPEENERRAQQKNIKMKNYKWREACSKYVESSQRTINDVLFYSYMEADKKIRNMRKNEDILIKMQEVTKLPKFSGGKLEDFVAYTLRKSLVVSKNSTQEFDSVAAMVVFLECIGKSNISDHEKEIVCKLLELIRKDFSKLDPNVEGSQGANIVRSVRNQNMIVQPQGDRFSFPQVSDKEKKTVTNKNVEKEGLNEFLLNYANLDDEKRAEILRKLRRILDVYFSAPNHYEKDMDITLSDNIDKEKFNVWKKYECGKKVTDLFVDIPDVLMEAEAENIKLDAVVEKRERKVLADRVRRQNIICYRYTRAVVEKYNSNESLFFENDAINQYWIHHIENAVERILKNCKAGKLFKLRMGYLAEKVWKDAINLISIKYIALGKAVYNFALDDIWKDKKDKELGIVDERIRNGITSFDYEMIKAYENLQRELSVDIAFSVNNLARAVCDMSNLKDRESDFLLWKKEDIADKLKNKDDMASVSAVLQFFGGKSSWDINIFKEAYKGKNKYNYEVRFIDDLRKAIYCARNENFHFKTALVNNEKWNTELFGKIFERETEFCLNVEKDRFYSNNLYMFYPVSELRNMLDQLYSRSVSRAAQVPSYNSVFIRKNFPEDITNVLRYQKPGYDADTLGKWYSACYYLLKEIYYNSFLQSDKALQLFEKSVKTLSWDDEEQKRAVDNFKNHFSDIKSACTSLAQVCQIYMTEYNQQNNQIKKVRSSNDSIFDQPIYQHYKVLLKKAIANAFAAYLKNNKDLFGFIGKPFKANEIREIDKEQFLPDWTSRKYESLCIEVSGSQELQKWYIVGKFLNARSLNLMAGSMRSYIQYVTDIKRRAASIGNELHVSVQDVEKVEKWVQVIEVCSLLAFRTSNQFEDYFNDKDDYARYLKSYVDFSNADMPSEYSALVDFSNEEQSDLYVDPKNPKVNRNIVHSKLFAADHILRDIVEPVSKDNIEEFYDQKAEIVYCKIKGKDITAEEQKAVLKYQKLKNRVELRDIVEYGEIINELLGQLINWSFMRERDLLYFQLGFHYNCLRNNSEKKEAYQKIEVNGDSIKDAILYQIIGMYVNGVAVYAPDEKGDILKEQCTKGGAGGKISAFNRYSEYLGLDKLTLYNAGLEIFEVVAEHDDIINLRNGIDHFKYYLGDYRSMLSIYSEVFDRFFTYDIKYQKNVLNLLQNILLRHNVIVEPVLESGFKTIGKQTTSGAKLSIRSIKSDTFQYKVKGGSLITDAKDERYLKTIRKILYYVENEEDNLKKSVVVTNADKYEKNKESDDQNKQKEKKNKDNKGKKNEETKSDAGKNNNERLSYNPFANLNFKLPN

SEQ ID NO: 532 - protein, 1330 aa, Artificial; identical to SEQ ID NO: 241
  Synthetic

SEQ ID NO: 533 - protein, 1183 aa, Artificial
  Synthetic
MPIVKKFGRSQTSLSDRKIVLKMETAARNIPDFLLSDPEAVIGQWASAMDKIAKKPKGKDKPSSYQRKFRERLGKAIWADLTGPEGPLRDVPAAELEDLRKRWDRRVHPYPDGTKDGPKPATPKGRLYTRFAGEVGYGKADAVAIARDIRIHLLETEFKTGGGTRDAGRAVRRASSIEKNVLKKARVPQRPKPPQEAAWSKEDEDRYFIPHDVARKIVLAAKAQEKEDHRVAWRTAAAVLFEHFGRIFQQDGRALSFAEAEKQMPGLLALHRAVEGYYRQALKRHRKDRREHEARPGREKGTGRRKVSAILPKDKTALLALIGHQHQNREIAALIRLGRILHYEAGRRGNSDMVANINRNWPADVSESHYWTSAGQIEIKRNEAFVRIWRSALSHANRTLGDWLSPDEVANDITMSWESKHEKSGKRKTGKLEENREEAEAHAPVIFGGSAERLGTGDDFQKTLEAICEVFSQLRHSSFHFRGLDGFKDALTKTVKTCDPGAVARLQDLHAEDQANREARLKEDLRGAHAELFLDEGRLAEIWALLHPKSTEKTLPPLPRYSRVVTRAENTCNGLKLPKSVNRESMKVPAIHCRYILTRLLYQSGFRTWIAEAPAAQLNRWIETATERAQKATVGITKNEADRARMVGQIKVPEGQGIRRFLDDLAGLTATEFRVQAGYESDREAARDQAAFLENLNCDVMALAFDKYLSDHKLGWLAGIDAESRPSETPLSNVDELPSSGSLGTPERWEAALYAVCHLIPVSEVGRLLHQLRRWSNGQKATPDGGRLERLFELYLDMHDAKFDGSTPLRDHDDLAVIFETTGIRDRVLPSSLQHGEHERLPLRGLREMLRFGNLRVLAPIFATAKVDQAMIGELEGLEARIGDAPSQVDRAQALRTEMHAALCKKRKLAHDDKKSVKDYLTSLQTVIRHRRLANHVRLTNHVRTNEILMSVMGRLADFSGIWERDLYFVTNALLYQAGLTPCDVFSKEPPKENRRSPLQEFENGQIVFALRKMQAQCDTHAGLVDQIKGETARLFHIAEGAPGNDPRIQNRNWFAHFNALKPKTGDRLDLTADMNRARDLMAYDRKLKNAVVSAIVTLLERENIVIAWTMKDHQLTDAVLAAKSIEHLKQNKIRENLRDERSLGYVAALFGGRVAEEAPDIMHDRTVFHLVGALTEEMEPAE

SEQ ID NO: 534 - protein, 1388 aa, Artificial; identical to SEQ ID NO: 103
  Synthetic

SEQ ID NO: 535 - protein, 1380 aa, Artificial
  Synthetic
MGNLFGHKRWYEVSDRGDNKIKRKVKVKRNYDGNKYILNINENNNKEKIDNNKFIREFVNYKKNDNILREFKRKFHAGNILFKLKGNKRSIEDSNGFLKTEEIILDKEVYGQSEKLRNEKGITKQDILKEIIDKGIDKSNDKILVKTKFGKEITINFTDEDKKNKNKYQITLKIIPENELKIKREVYNVFKIININLYQIIKGIIENKEIFKNRYYDEILKEKLSKNNQIINTLTNLNKIRKEIRDNRDNIIGFVKFYLNVSGDKKKSENKKMFVEKILNTNVDLTVEDVVDFIVKELKFWNITKRIEKVKEFNNEFLENKRNRTYIKSYVSLDKHEKFKRDRENKKDKIVKLFVKDIHNNTMEEKINQILNKFKIKELIEKLKENTENKNFDTEIFGIFKTHYQNIFSSEKFSNKSDEEKELYKIIYRYLKGRIEKILINEEKVRLKKMEKIEIEKILNESILSEKILKRVKQYTLEHTMYLGKLIHNKINMATVNTNDFSRLHAKEELDLELITFFASTNMELNKIFNGKEKITDFFGFNLNGQKITLKEKVPNFKLNILKKLNFINNENNIDEKLSHFYSFQKEGYLLRNRILHNSYGNIQETKNLEGEYKNVEILIKELKVSNEEISKSLNLDIIFEGKVDIINKINSLEIGECKDKKYLPSFSKIVPEITRKFREINKDKSFDIESEKIILNAVRYVNKILYEKITSNEENEFIKTLPDKLVKKNNNKENNNSLSIEEYYKNAQISSSKGDKKAIKKYQNKVTNAYIEYLENTFAEVIDFSNFNLNFDEIKTKIEERKYSKSKITVDSISTNINITNDIEYIISIFALLNSNTYINKIRNRFFATSVWLDKQNSTKEYDYENIIDILDKILSINLLRENNIADILDLKNTIIEAKIVENNEECIKNYIFENNEEELKKRLFCEELVNKEEVLKIFEDKNFKFKNFIKKNEIGNFKINFDVLSNLECNSEVEVKKVIGQNSKKLESFIQNTIDEYKSNIRTLFSSEFLEKYKEEIDNLVEDTESENENKFEKIYYPKEHKNELYIYKKNLFFNIGNPNFDKIYGIISKDIKNANTEILFDDDIRKNKISKIDVILKNLNNKLNGYSNDYKEKYVNKLKENNDFFTKNIQNENYNSFEEFKEDYNKVSEYKKIRDLVEFNYLNKIESYLIDINWKLAIQMARFERDMHYIVNGLRELGIIKLNGYNTGISRAYPKRDGSDDFYTTTAYYKFFDEESYKKFEKICYKFGIDLSENSEINKPENESIRNYISHFYIVRNPFADYSIVEQIDRVSNLLSYSTRYNNSTYASVFEVFKKDVDLDYDELKKKFKLIGNNDILERLMKPKKVSVLELESYNSNYVKNLIIKLLTKRKNTNDTL

SEQ ID NO: 536 - protein, 1194 aa, Artificial; identical to SEQ ID NO: 18
  Synthetic

SEQ ID NO: 537 - protein, 1354 aa, Artificial
  Synthetic
MQMKISKIKNSRPGISVTENKNEEQLSRQSLLYYAPVKDGKIRLESKDLEQHVTECNEKAQKLYNVITPEINFYRDENRQKMVENLARNFNAVINNALRSIRNPKEKKEQRVEKEVAFILNLSKKSIKMKKDVFVKSTDLIVKFPENNKYNKKNDKGTGSKEAYIQKMISDLVLRKLKNTLRKEVKLENGCRMQMTEIIISLMSAICLYGNAESFDPAILKAFFEKVDSDYTKYKYVEQIVKSIESQSAKLKVVEKDGRHLLISANADHRKKKYVFEFMRMYAAADEKEKRELTEHIQDLIGLYLCGKAGYENAENRFSDMIESHNCICGKIEEILNELEKPENLSQQKKENLKNTTVKVMALKYRAAVNYLADEVGKTVLGEIREKKVRSCADLYWIEYIDSTVEKLLLKSRNKDGYRYEIGFLSKHIWKEWTQYISGKYIEMGKGVYHFAIPDLSGNLEGEPISICEVKPEYRNGVSGFDYERIRAEESLEREMEKYVLFAVNNFARAVTPEEEREKPGHEDVLLMKTLSEIEESQTEEERQKKHDNNVKNAITLYADADRRILQFFGGQSRFREKEDSLINLYSGEDLYKEIRKELYAIRNITFHYTTKADKDQTQKHELTEYFFEEEFSDITELFREKYYTNNVWKYYDIEVINNIMGKIYCGRKYRAAQVPAFNNIISRPALPQLMDGFVKGNSLRRLMNCPDRDVIKKYWSSLFFVLKELYYYDFLQEQEKPEDNIKERFFRAMEKESGQAKDGKEQKAWESFENRIDQIGRERSFGAICQGLMVEYMLQNRDISMVQTETGDGKTNKKQIYKHYRTLLYICIRSAFTEYLREKWEELRTPVLTVKEWSKEEFCRTDGLKHLSLFDHLKETFNDAESGSFWYMAAHFINQKYLNHLIGSIRNYLQFTEDIEDRALSLGDCADNKREEKNLRYRNTLEILEFVAQFCERTTNVMEDYFESNQEYAAYLSGFVDYNVSKKETDIEKALYGFCRQKFKVDGKEYMAGIYYDGENLIPNRNIIRANMYGNVSCLKPYMDRITLKEIRTMYADQNKLDTVLKEGVCRTEEEQKAYREYQNEKNRIELFDLCTYTQILNDMQAKLIRWSYMRERDLMYYQLGYYYTKLFWTDSISEEDARRRLMGELVNVEDGVILYQILAFNSYNLPIIANKNNTVTFLKGEGSIGGKAITAFLKNYENAERIYEEALDLFENTDEHAAIINTRNYIEHFKYFIKSDRSMMDLYSEVYDRFFRHDHNRKKNVPDSLKNVLADNFMIADISMELGSKKVGEKKKGFREHKAARIEFTDRGIRSTDMTYTVKPDPKDSKKDEKVLVPARSEVFLKQFQKILEYRI

SEQ ID NO: 538 - protein, 1383 aa, Artificial
  Synthetic
MKILQSEGVSYTEQKEEGGLGRGVRNPKQPYNTPNNLIRDGRVNYEVLEEYIGAEPALALRQTIAVLDKTIRKPHTLRGFHSGAYVHRVRLAGALRVRLFEKFKEEIRSNFGPSGLTKYRDAWNWKAHPYGIRDVSVVNPKGDKNYERLENYETKATADKGSKKQNRTASDFEGRWLKAFSGDTPISLDDQDIDWKKVADRIYDHLWTQEILINGEPREKRDRETETGRYPSTGKGLIASRGGAIKNAASDPRIARRDEKKANWSDITAAFYFNEDCRLVVDIYDETLDLLNKGGRVKRNLHGSFIYDHFGSLEKRAGAEKIDRKELWNLHNHVRRYYQQLFKSDRLKQAAFEGDVEHMRKILPHENAQLLRILIGKDENTDMSQIIRLGKLIVHAADLPTEAAKGDLNAAFQERLNRFATSDGQSEIKRNEAFTRIWRHAINLSHNSLSTWLDPKNKLGKKNDIFDKSLSIFVVNNLHPQAFRAHAEILFGNDKIGQLGDDNNNLVSRASLFCPDDDDAAKEIAWGMLRLAAQLRHNVNHFATKNRLLAALKNQVVKVPKELNNTDNRGANEISRIAMSAIENLLAFDRSVQKKALADKLNQVKASAYLEPHQVSQLIVQASSLGDASFPIPRLTNVLKQLSNIVDFAPEGSPELLKPLGDLGGMFGTEGTKNPVFLLKTNLLRLVYGSGFSNWLATIDDDMTQSVLRDIVKAQTFRKETMNKERQRFYAVVENITDELQISGEADLTDILQTITARMARVERLNEGYNPKRTKQRAVSNRIEKFRLELFGNLFAKYLQDEELNWLARFDMQAKPLELFEEIKPEHVKTTGADIAPWHSQFYAFLYLIPVEAAARLRNQFRKTAILEAKGDTSIGNELASNDVEALHELVSLYLLVHDTGFSGTEPIVSEEFNETLYQNEDKFETVYSVENEDHDLSLSGTRRGLRQIMRFGHEGVLTKIFEKHKITDNEVTAFCALRDADGEQAAIKLIANRTRAREAVFRRYEDLQNRDLKPDQKPKIERDIIQKASAYKSAAEIMMAHEFKVRSGRLHDHARLYGLLMKVVGRLLDYTLLWERDVYYAYLGLLARQIGVNNLKLVKSDLKESQYKHNNDAVRDVPIRYGLQLPENVASLLSKKYFNYLGDLTDANLTKARQSDFIFKADVKSGFLSLWNMETGFDFPLNKSVEDLLDANTKPIFDRYFSNSGPMNPKDKAANAAHKAKGQLPHKSYKRLKKRDIRNDFAHYNVLRGKNRATLNLSYLVNPVRSLLGYDRKLKNAVAKSIRKILEEEGVTIKWQLVEDRLKNAEIIPIVETHLADLRKMDGKWVDFVLPKSSPRFTSMVQALFEFGRSGYNSGGGQPSYPDNFLEALHIDGYDITVVAEV

SEQ ID NO: 539 - protein, 1388 aa, Artificial; identical to SEQ ID NO: 185
  Synthetic

SEQ ID NO: 540 - protein, 1382 aa, Artificial; identical to SEQ ID NO: 210
  Synthetic

SEQ ID NO: 541 - protein, 1363 aa, Artificial
  Synthetic
MKIIRPKGKSFTTLTQTDALERGIRRAGDKVAHPVAFSASRDVSANQLPEYLSADQELVLRQLVSGLDKVVRKPRRNNLRNFQADAYVDRTKLGLELWNVFEEQCGDSLRSLDGGADVLANLARIWRWKVHPYSEFIVDMLSPRSDKNAEVIAKYGDKELSRSDFYGRWHEAFWKTTSNGRADYSATAEAIWAHLFQEEIKITKEQRNRKNTTDWPAKGLAQAKGRSIALSAHDPAKGGTLRLDDTVDEAVIALYFAHDVVKELRDAVLTAAKASSGRNAQFSQSDFGRVLYEHFGPIIKRPLDEALNRSLWRLHNAVRGFYQELARSEGYSRAMRDPVRELGKLEELLPRDHQHLIQILGAKDRNAQISALTRLGKLIAHASDLPAGTQDVNAAFAERFHFLQTSDGQNEIKRNEAFVRVWRTSIALSLRTLHALTSFAHIDGKSDDLTETTYAAQAIKRYAAPATDKGKPQPCQSYQHGIELIFGSKTIPSLGGGSRATTLLLTYTGGRRDTDPNTEVLWAFLRLASEIRKRAYHFNTKERLLELIKSCPLKITDQLVSFGSRTGLIASQIAADAFAQLLEFDLSLQEQVILDEFRRLDVSAYVKPSDLDELYAEFSRVPDTIQHTQPKFISVLRRAHAICQGDEGKPPVWAAPFATLDLAGLSKVKEGANHFRLGVLRQLYKSGFAAWLSQQSNNAALVRSAIAEVTTFKIQRFEEYHGPKSDHRRVYAMAEPIAQSLALETAASLEDLFRRLQSEAMSEDSIRQTYRASAVKQRERMGGVGEFRLDLFARLFALYLEQTNLNHIWGITGPLPPEERAPAERLATFAAPAKLLDRIEPWHSQFYVWLYLIPIDEVALLRHQLRKTVALEAKSGIGSQDILSQVDLLMGLYLSVYDAGFDGREHVGGLNAGKLFYESPQDFEKVYSDDQSHHEISMPGTRRGLRQILRMDHFRALEGIFEKHQVTTDEVKAFQQLKLTEVQEILESKIRLQKSIISMSKQAKLDTEALRSECQKYQVSATKLAIYNFQVKAARLSEHARLHQLMMRVLGRLADFSMMWERDRQYLFLGLLYRRIGAENFILHRMADEIGIALPADAGLGLVADAGAATRRSGAISDMHVQAGFLPLWDPDFGFVREGDGAELTLLAVQDRELFMRYFGKLPEENPRDVRRREANEAEGFARPSTKNWNGSFRLPKRRIRNDFAHFNVISGKRRPNLTYLMNAIRSLMSHDRKMKNAVSKAVAEIVAEEGLEIRWQVRGDRLVDPTVIPMLESHLTMVRPKDGFDPRFHLPQASVRFTSMVKALFEFDQGGYRETIPWKEGKKASRGQLGYPKEFIARIEQDETIHVPREVLAQRYKGLEQK

SEQ ID NO: 542 - protein, 1363 aa, Artificial; identical to SEQ ID NO: 541
  Synthetic

SEQ ID NO: 543 - protein, 1425 aa, Artificial; identical to SEQ ID NO: 3
  Synthetic

SEQ ID NO: 544 - protein, 1334 aa, Artificial
  Synthetic
MGNLFGYKKWYKVDKIIKDKKGKKSTIKQEVRIKRNYLTNRYILNTNNKDKNNINNEDFVDQFIEYKTKNDIFEKFTRKFHMGNILFKLKGNKRSIEDSNDFLKTEEVVLDKEIYGQSEKLRNEKGITKQGILKEIIDKGINESNDSILIKTKFGKEIKINFTDESKKNKNEYQITLKVIPENELKIKREVYDVFKMINMDLYQIIKEIIENEVQKVFKNRYYEEYLREKLLEDNQINVILTNFMKIREKTKSNSEIMGFVKFYLNVGGDKKKSENKKMFVEKILNINVDLTEEDIVDFIVKELKFYGIIKRIEKLQEKKADRTDKDIKKTYINTYVSLDKHEKFKKYNRNKKDTIVKSFIKDIKDNTMKQKINQILRKFKIEELINKLRIENKNFDTEIFRIFKEHYQEIFNSEKFEEKSDEEKELYKIIYRYLKGRIEKILINEQKVRLKKMEKIEVEKILNESILSEKILKRVKQYTLEHVMYLGKLVHNDIDRSIVNTNDFSRLHAKEELDLELITFFASTNMELNKIFSRENINNDENIDFFGGDREKNYVLDKKNLNSKIEIIRDLDFIDNKNSITNNFISKFTKIGTNERNRILHASSKERDLQGTQDDYNKVINIIQNLKISDEEVSKALNLDVVFKDKKNIITKINDIEISEENNSIIKYLPSFSKVLPEILNLYKNKNKNNPFDTTETERIMLNALIYVNKELYKKLILEKNLEENESKNKFLKELKKNLGGTDEIDENIIESYYKNTQISASKGNNKAIKKYQKKIIECYIKYLEENYRELFDFSDFKMNIQEIKKQIKEINDNKTYKRITIKTSDKSIVINNDFEYIISIFALLNNNIFINKIRNRFFSTSVWLNTSEYQNIIDILDEIMQKKLEKIVIFVDKTKFEIDKKSNILQDEQRKLSNINKKDLKKKVDQYIKDKDQEIKDKDQEIKSKILCRIIFNSDFLKKYKKEIDNLVESTEPKNENKFGKIYYPEEHKNELYIYKKNLFLNIGNPNFDKIYRIISEDIKNVNTEILFDNDIRNNKIAKIDVILKNLNDKLNGYSQGYKEKYIEKLKENSDFFTKNIQNENYNSFKEFEEDYNKVSEYKKTRDLVEFNYLNKIENYLIDINWKLAIQMARFERDMHYIVNGLKELNFINLNGYNAGISRAYPKYNDSDSNKNCKKFYETTAYYKFFDDKSYREFEDICYEFGIDLRKNSNIQAKEERNIRNYISHFYIVRNPFVDYSIAEQIDRVSDLLSYSTRYNNSTYASVFEVFKKDVDLEYDELKKKFKLIGNTDILKRLMKPKKVSVLELESYNSNYIKNLIIELLTKVENKDEIFS

SEQ ID NO: 545 - protein, 1382 aa, Artificial; identical to SEQ ID NO: 455
  Synthetic

SEQ ID NO: 546 - protein, 1432 aa, Artificial
  Synthetic
MQMKISKIKNSRPGISVFENKSEEQFSKQSFLYYAPKKNGKVRLKSNDLRKHVMDCNKNAQNLYNVINPEFDFCKDKNRKKVFEDLAKNFNLVLCSALRSVDTSISDPKERAKEETAFILNMDKEGIKTKKDSMKSENLIVEFPPSDEDNGTEKTKKAESPELKEQRRKEQEAEILKMTEELVLRKLKKTLRRNATLDDESKMQMTEIAISLMKAICVHGNAGSFDPVILKTFFKEIDKDYMKNEQMEEIVRSIESQSVKVKVAEKDGKYLLLPANADHRKKKYAFEFMRKYAAAEAEGKQELTEHIQALIGLYLCGESEYQDAKNCFYDMVENHECMSGEIEEICNTIEELKNLSRQKREERKEIKEKIRKIEKSGKGDKRTPNNNSNKSYKNDKKDNDNKENDINLNENDLKKAIEEIDKELAKIPLEICINNEKLNNAVIKTMSVKYRAAVKYLVSKVKKTVLGEIKEKKDCSCADLYWIDYIDNTVKKLLLDSRNKGMYRYEISFLSNHIWKEWTQYISGKYIELGKGVYHFAIPDLSGALEGKPVSVCEVKPEYRKGISGFDYERIKAEESLDREMEEYVLFAVNNFARAAAPENEREKPGHEDVLIMKTSDELIAENKKNQEPIVLYKDADRRILQFFGGQSRFREKEDSFINLYSGEDLYKEIRNELYTVRNITFHYTTKAEKDQIQKHEMAEYFFKEELADISGVFRKKYYSNNVWKFYDVEVINDLMDKIYSGRKYRAAQIPAFNKIISRPALPQIINGFVKGNSLKKIMNYPDREIIKQYWSALFFVLKELYYYDFLQEQENLEENIRERFLRVLARKLEETSDAKEQKAWESFDKRISEIGRERSFGEICQGLMIEYMLQNNDSPMVRKENIHKRTKSRDTQIYKHYRTLLYICIRDAFIEYLKEKWQGLREPVLIKKEWSEEEFCHSDNVEHLSLYDHLKDLFHSTASGPSWYIAAHFINPKYLNHLIGSIRNYLQFTEDIERRAVSLGKCVDNEREEKNLRYRNTLEILEFVLQFCGKTTKVMEDYFESNEVYAAYLSDFVDYKTPKNITDIETALHIFCEQKVNVDGKENMVGIYYDGGNLIPNRNIIRANMYGNVSCLKASMDKIKYAEIRKMYIDKSKLDSVLKEGVCRTKEDQKALREFQNEKNRIELLDLSTYTEILNDMQAILIGWTYMRERDLMYYQLGYYYTKLFWTDSISEEDERRRLTGDEINIEDGAILYQILALNTYHLPVISNKKNTVSFVKDNGSIGGKALRAFFRNFENAIPIYLEGLSLFENTDEHDDIIDTRNYIEHFKYFIKSDRSMMDLYSEVYDRFFRHDHRLKKSVPEVLINVLARNFMDARIYMKLGSKQVVKEKTGVSREHKASKIAFTDKGIESTALTYTIKPDSKDNKKEAKILVDARSEVFLKQFQKILEYRI

SEQ ID NO: 547 - protein, 1407 aa, Artificial
  Synthetic
MGNLFGYKKWYKVDKIIKDKKGKKSTIKQEVRIKRDYLTNRYILNTNNKDKNNINNKDFVNQFIEYKTKNDIFEKFTRKFHMGNILFKLKAKESVGEIRSYNNFLEKEKAILEIEIYQQSEELRKKENITKKDIIDKVIEDKITENSNEIKMQIKLEKNNFEEIRIYINKELGQYNIKLKNIDNDELNLKRETYEILKSINANLYIITKNAISNANFEKRNYEIFLKKSMRKYLRENINKKLRNTFLESLSKSLKKIQNNIRENEEIINFIKYYSSINGNKTVSENKKTFLEKILNTEVSISENDIIDFIIGELKFYGIIKRIEELQEKTIDRTEEDIKNTYINTYVSLDKHEKFKIDRENKKDKVVKLFVKDIHNNTMEEKINDILSKFKIKELTKKLEKNTENKNFDTEIFGIFKKHYKVNFDSKKFSNKSDEEKELYKIIYRYLKGRIEKILINEEKVRLKKMEKIEIEKILNESILSEKILKRVKQYTLEHIMYLGKLVHNNIDMTTVNTNDFSKFHAKEELDLELITFFASTNMELNKIFSRENINNDENIDFFGGDREKNYVLDKKNLNSKIKIIRDLDFIDNKNNITNDFINKFTKIGTNERNRILHASGKKRDSQGTQDDYNKVINIIQNLKISDEEVSKVLNLDVVFKDKKNIITEINDIKISEKNSNDIKYLPSFSKVLPEILNLYRNNPKNEPFDTIETEKIVLNALIYVNKELYKKLILEDDLQENRSKNIFLQELKKTLGNIDETDENIIENYYKNAQISASKGNNKAIKKYQKKVIEYYIGYLRKNYEELFDFSDFKMNIQEIKKQIKDINDNKTYERITIKTSDKSIVINDDFEYIISIFALLNSNTVINKIRNRFFATSVWLDTSEYQNIINILDEIMQLNTLRNECITENWNLNLEEFIQKMKEIEKDFDDFKIQTKKDIFNGNYESIKNNVLSKFIGFSDVQKILEEKLNNLIDFENDNEIKKSLNLDSLNPDERRNLMPNINPKKGGIDLIKEIDKLIVIKKNNIEKNILLKIIFNSDFLEKYKKEIDNLLEDTETENKNKFEKIYYPEEHKNELYIYKKNLFLNIGNPNFDKIYGLISNDIKMADAKFLFDSDSKDIRNNEISKIDGILKNLNDKLNGYSKEYKEKYVKKLKESNDFFAKNIQNENYSSFEEFEKNYNKISEYKKIRDLVEFNYLNKIESYLIDINWKLAIQMARFERDMHYIVNGLDYLYIIRLEKDRNQDRSSPYPKYKNGVLDYTKSYYNFKDYQEFMDICSKFGIDLSENSEINKPESESIRNYISHFYIVRNPFVDYSIAEQIDRVSNLLSYSTRYNNSTYASVFEVFKKDVNLDYDELKKKFKLIGNNDILEKLMKSKKVSVLELESYNSDYVKNLIIKLLTKIEKTNDTL

SEQ ID NO: 548 - protein, 1373 aa, Artificial; identical to SEQ ID NO: 104
  Synthetic

SEQ ID NO: 549 - protein, 1287 aa, Artificial; identical to SEQ ID NO: 105
  Synthetic

SEQ ID NO: 550 - protein, 1161 aa, Artificial
  Synthetic
MKVTKVDGISHKKYIEEGKLVKSTSEENRTSERLSELLSIRLDIYIKNPDNASEEENRIRRENLKKFFSNKVLHLKDSVLYLKNRKEKNAVQDKNYSEEDISEYDLKNKNSFSVLKKILLNEDINSEELEIFRKDVEAKLNKINSLKYSFEENKANYQKINENNVEKVGGKSKRNIIYDYYRESAKRNDYINNVQEAFDKLYKKEDIEKLFFLIENSKKHEKYKIRECYHKIIGRKNDKENFAKIIYEEIQNVNNIKELIEKVPNMSELKKSQVFYKYYLDKEELNDKNIKYAFCHFVEIEMSQLLKNYVYKRLSNISNDKIKRIFEYQNLKKLIENKLLNKLDTYVRNCGKYNYYLQVGEIATSDFIARNRQNEAFLRNIIGVSSVAYFSLRNILETENENDITGRMRGKTVKNNKGEEKYVSGEVDKIYNENKQNEVKENLKMFYSYDFNMDNKNEIEDFFANIDEAISSIRHGIVHFNLELEGKDIFAFKNIVPSEISKKMFQNEINEKKLKLKIFKQLNSANVFRYLEKYKILNYLKRTRFEFVNKNIPFVPSFTKLYSRIDDLKNSLGIYWKTPKTNDDNKTKEIIDAQVYLLKNIYYGEFLNYFMSNNGNFFEISREIIELNKNDKRNLKTGFYKLQKFEDIQEKTPKKYLANIQSLYMINAGNQDEEEKDTYIDFIQKIFLKGFMTYLANNGRLSLMYIGNDEQINTSLAGKKQEFDKFLKKYEQNNNIEIPHEINEFVREIKLGKILKYTESLNMFYLILKLLNHKELTNLKGSLEKYQSANKEETFSDELELINLLNLDNNRVTEDFELEANEIGKFLDFNGNKIKDRKELKKFDTKKIYFDGENIIKHRAFYNIKKYGMLNLLEKIADKAKYKISLKELKEYSNKKNEIEKNYTMQQNLHRKYARPKKDEKFNDEDYKEYEKAIGNIQKYTHLKNKVEFNELNLLQGLLLKILHRLVGYTSIWERDLRFRLKGEFPENQYIEEIFNFDNSKNVKYKSGQIVEKYINFYKELYKDNVEKRSIYSDKKVKKLKQEKKDLYIRNYIAHFNYIPHAEISLLEVLENLRKLLSYDRKLKNAVMKSVVDILKEYGFVAKFKIGADKKIGIQTLESEKIVHLKNLKKKKLMTDRNSEELCELVKVMFEYKMEEKKSEN

SEQ ID NO: 551 - protein, 1388 aa, Artificial; identical to SEQ ID NO: 234
  Synthetic

SEQ ID NO: 552 - protein, 1179 aa, Artificial
  Synthetic
MGSGKYRITKIARKWDKNENWEKIILKRIVDNKKIKYVNENNNKDVDITDTYYSILSKNNSKFLGSEEQFIFKVNKMKRNIKNDCVIIKDYTEEEFEKFDKKIFFSRKIKVNNEDREKICRNFYEDEREIMKKRLEEAKNFNNIIFKICNEIFNLEYINYTDEKIYKIFQEKIGFEDIKNLKEVFKQQKKGLETDKLLAISFNKNRNNVLLEFIQQIVKQEFENKEELKNWFSHEGEKYCKEIFKIYSNMSQKEKYSKLLGHNDKSTASYSEKRETLQRRLKLGDYSKYDLKKYYQKDYKEKAIKELKDKNKEEFEREIEEIIKKNYKIDKLCDEISNLEFSFVESKKENKDRMSEIIVKIKEHYKKNVNVEEELKNKEKYILSLIHNYVKGRYGKCLELQQKENVDFENLGKRIKEIFDSNEVTEKLKKSIINKVNNYKIFETKFQNPNIESSDDLEILKAEETFLNKLSTAVSKVGYTLNILLDTRTTSKKMNKKKIKNPDILAGYNVTIELLPYCSFEILYNVYPEIKKDIELLKGMVLFIQEFRQKILHPSQLLGSNVKKSISIKEKDTIVKIHEDNKDNEKREMYNKEKIRSYFEDILEKIPDYFIEKYESDNVFNIYRDFGVKIMEVVKNFNFKENNTIDYLFPKFHKIYKRMCKLENIDDRQNGARKYLLQTIYYYYFQYEIENDKNNISKYLNLYRNKIKVKKISYSYITDNKAVNNKNIEILYRNIQREGMLNNKLSQMNKEWIEFIVVQFSEFLTNKKLNWILDNLSEYKKKEKLDENDKNRLLKILKQKMNKKIIYSNDSYAFISLAQFLDLKEISNLIHDIKKFIQFREKNVSKYKPEKNKLYIKELRKVLYILKVMLEHKERVIQKHYLESYDENISIIYGKDIERKDIKDIKIKIKNENQEVINQPLYKSGNDENSSWIVLYGIEQAKRNGTFKFFEGFFNLNDDIKLCKENIEKYEELYNEKEENQRKVDEYISSEENNNIDEIKEINNNKQLFYYYKNMIYGDGLKKGYDFINDIYSHYLSWAYRVERDCKIYKIKEYENKKNFNEYKFKEYKSIKNFRNEIAHFNYFQKTNKSLLELLNDFYDIFDYNLKYQRDVQNVINNIFEKYQIVRKDGGPVVFYCKTDKKLKLSENIIPKKHLKYPEIKLIHEKYVEFFKKLFEYKK

SEQ ID NO: 553 - protein, 1380 aa, Artificial; identical to SEQ ID NO: 153
  Synthetic

SEQ ID NO: 554 - protein, 1389 aa, Artificial; identical to SEQ ID NO: 384
  Synthetic

SEQ ID NO: 555 - protein, 1268 aa, Artificial; identical to SEQ ID NO: 167
  Synthetic

SEQ ID NO: 556 - protein, 1412 aa, Artificial; identical to SEQ ID NO: 53
  Synthetic

SEQ ID NO: 557 - protein, 1353 aa, Artificial; identical to SEQ ID NO: 188
  Synthetic

SEQ ID NO: 558 - protein, 1387 aa, Artificial; identical to SEQ ID NO: 93
  Synthetic

SEQ ID NO: 559 - protein, 1391 aa, Artificial
  Synthetic
MKLSKVTYRVKDKNAKYKKEYNVRAAVANNSENAGGVLYHVPGVDLIDLKEQMLDRDRSVRFLYNIFNQIQTGTKPKEWGNDETLSVDENERKAKEQNIKIMNYKWREACSEYIKKSQSTINSVLFYSYEESGYKTKRMNDNEAIIVKMQYENRLSHFTGGKLEDFVAYTLRNSLVVSRYDNQEFDSVNAMVVFINNIGNGNISDKDKKTICKLADLIRNDFSKLNPNVQSSQGANMVRSVRNQNMVVQPQGDIVSFPLVSDEGKNTVTNKNVEKKGLNEFLLNYANLDDEERMENLRKLRRIIDVYFSSPSHYQKDMDISLSDNIDKTKFVVWKKHETGKKNTELFVDIPDELFTAETEKIKLDAVLEKQARKRLTDSIRKQNMICYRYTRAVVEKYNSTENLFFENDSINQYWIHHIENAVERILKSCKAETLFKLRRGYLTEKVWKDAINLISIKYIALGKVIYNFTVDDIWKDKKVKNLGSIDEKIKHGITSFDYEMIKAQEALQRELAVNVAFAANNLARAVCDMTNLKDKESDFLIWNKKDIANKLKNKDDMASVSVVLQFFGGKSSWDIDAFREAYKGNKYNYEVCFIDDLRKAVYAARNESFHFKTALVNNDIWNTEFFGKLFIKETEICLDIEKDRFYSNNLPVFYSDNDLKKMLDHLYNNKVSRAAQVPSYNSVMVRKYFPENITSTLKYQKPGYDEDTLEKWYSACYYLLKEIYYNSFLQSDEALALFEESVNNLKGENKDQELAVKNFRNNYKNIKSSCTSFSQACQMYMTEYNQKNNQFKKVRSSKDSIVDKSIYQHYKLLLKKVIANAFALYLQNNKELFGFIGKPLKVNCLKEIDKEQFLPEWTSKKYVSLCEEVRKSPELQKWYIVGKFLNSRSLNLMAGSMRSYIQYVNDIKRRADGIGNELHVIAQNLDVVNKWVQVIEVCLLLSSRVSNEFEDYFYDKDDYAAYLKSYVDFDNSDMPSEYSALVEFSDQGKVDLYVDPSNPKVNRNIVQSKLFAADYILRDIIEPVSKDEIEDFYNQKDEITTCKIKGAELTDEEQKKILKYQKLKNRVELRDVVEYGEIINELLGQLINWSFMRERDLLYFQLGFHYNCLRNDSAKPEEYKNLVLDDISIKDAILHQIIGMYVNGVAIYAPGKDKNKLESQCVKGRVGGKIGAFCGYSLYLKLAADTLYNAGLEVFEVLPEHEDIINLRNGIDHFKFYLGGYRSIISLYSEVFDRFFTYDMKYQKNVLNLLQNILLRHNVIIEPIFESGIKKIGKDTKPCAKLCISSIKSDSFEYKIKDGTLITDAKDKGYLETIKKILFYPEVEPEVRILSSKDSFEQNNQYGYMKGKSENNKNNKNKKNKKNNGNRDEKKNSDGLTYSPFLDLPFELPE

SEQ ID NO: 560 - protein, 1388 aa, Artificial; identical to SEQ ID NO: 103
  Synthetic

SEQ ID NO: 561 - protein, 1196 aa, Artificial
  Synthetic
MKVTKIDGLSHKKFEDEGKLVKFKNNKNINEIKERLKKLKELKLDNYIKNPENVKNKDKDAEKETKIRRTNLKKYFSEIILRKEDEKYILKKTKKFKNINQEIDYYDVKSKKNQQEIFDVLKEILGLKIKETEKEEIITFDSEKLKKVFGEDFVKKEAKIKAIEKSLKINKANYKKDSIKIGDDKYSNVKGENKRSRIYEYYKKSENLKKFEENIREAFEKLYTEENIKELYSKIEEVLKKTHLKSIIREFYQNEIIGESKFSKKNGDGISILYNQIKDSIKKEENFIEFIENIGNLELKDLTKSQIFYKYFLENEELNDENIKFAFCYFVEIEVNNLLKENVYKIKRFNEGNKKRIKNIFEYGKLKKLIVYKLENKLNNYVRNCGKYNYHMENGDIATSDINMRNRQTEAFLRSIIGVSSFGYFSLRNILGVNDDDFYEIEEGLTEEERKNESNVLKKAKEDITSKSIFEKVVDKSFEKKGIRSIKENLKMFYGDSFDKANGDELKQFFVNMLNAITSIRHSVVHYDMNTNSENIFNFSDIEVSRLLKSIFEKETDKRELKLKIFRQLNSAGVFDYWENLKIKKYLENIKFEFVNKNVPFVPSFTKLYNRIDNLKGSNALNLGYINIPKRKEARDSQIYLLKNIYYGEFVEEFIKNNDNFEKIFREIIEINKNAGRNKQTNFYKLEKFEKLKANTPTEYLEKLQSLHKINYDREKIEEDKDIYVDFVQKIFLKGFINYLQKSNSLKPLNLLNLKKDEAVANKKSFYDEKLKQWENNGSNLSEMPKEIYKYIKEININKINYSNRMSIFYLLLKLIDHRELTNLRGNLEKYESMNKNKIYSEELNIVNLVSLDNNKVRTNFSVEAEDIGKFLKTETSIKNNKQLNNFSEIFADGENVIKHRSFYNIKKYGILDLLEKIVTKADLKITKEEIKKYKNLQKELEKNDFYKIQEKIHRKYNQKPNLISRTENKKDFNDYKKAIENIQNYTQLKNKIEFNDLNLLQGLLFRILHRLTGYTSLWERDLQFKLKGEFPEDKYIDEIFNSDRNNNQKYKSGGIAYKYVDFLIEKEEGKRAGKNKVKKRSEKEGSFIIRNYIAHFNYIPDAEKSILEILEELRELLKYDRKLKNAVMKSVKDIFKEYGFIVEFGISHESNSKKIKVLDVKSEKIKHLKNNGLVTTRNSEDLCELVKVMLEYKKS

SEQ ID NO: 562 - protein, 1407 aa, Artificial; identical to SEQ ID NO: 512
  Synthetic

SEQ ID NO: 563 - protein, 1387 aa, Artificial; identical to SEQ ID NO: 93
  Synthetic

SEQ ID NO: 564 - protein, 1427 aa, Artificial
  Synthetic
MKLSKENHIRSAVVISGKEGNISGTLYKIPGEGTVDLKKRMLERDKAVKSLYNIFNQIHLGNEPKEWKENRNLSTEENTRRMHQKEVKIQNYKMKKVCSRYVNTISRTINELLFFYKTTKTTQNNKVKYDKLKMMHKNEDIISKMKNENILQQFKVEGKNGKLEKGKLEDFVTLALRSSLVVSRYKGKDFDSVAAVAVFLENIGNNNISHEDERTINILLDLIREDFTKLNPNIDNTMGARLIRSVTNQNMLVQPQNDRFSFPCVHDSGKSKVSNKNVEKSGLDNFLLDYANLDKDIRENYLRKIRRIIDIYFSAPITYQKDMDVALSEVVVKDKFDVWKKHNEWKKDNNTFVKVPEVLIKAETDHEKLDTVIEKQARKELADRVREQNMTCYRYTQAVVKKYNAKEALFFENDDINQYWIHHIENAVERILKNCKIGTLFKLHNGYLTEKVWKDAINLISIKYIALGKVVYNFALDDIWNGNKVKLLGDISEKIRSGITSFDYEMLKAQETLQRELAVNVAFSANNLARAVCNMSDLGDKNSDFLLWQPNDINNKMKKSTGNDEDNEKNKKAVCAVLQFFGGKSLWNDVDFEKAYKNAGKHGYGVYFINDLRKAIFAARNESFHFKTASVNNEKWNVEFLGRMFEKETEFCLDIEKDKFYSNNLPMFYKSSNLEKMLNHFYSKNISRAAQVPSYNTVFVRKTFPEYVNNVLKYKKPGTDDEILDKWYSACYYLLKEIYYNSFLQSKDAFKYFENAVYNLNSKNINHDSSGQKLSRDEMKRKKAAESFQRRFVEIKRVSDSSISCVCQVFMTDYNQQNNQNKKVRSSNDSLLDKPIYQHFKMLLKETIKSAFAAYLKDNNNKDLFGFIGEPLKINKNDDVKVIKKEEFLPDWKSEKYSLLIEKVKKSPKLQMWYIVGKFLNARSLNLMAGSMRSYLQYVSDINRRANVVGNKLHVEVLDKDTVKDWIQVIEVCLLLASRTSNQFDDYFNDGDDYAGYLKSYVDFSDENMPSAYSALVYFSDQGKIDLYVDPKNPKINRNIVQSKLFAADHILGNGRIVQPVSKDDIVEFYNLKAKIADSKIKGENISEKEQRNIIRYQRLKNKVELRDIVEYGEIINELLGQLINWSFMRERDLLYFQLGFHYNCLRNNSEKPEEYKRIEADDISINDAVLYQIIGMYVNGIPVYTSDNNKLKGKCVNGGAGGKIAAVCEYSEYLGFKKATLYESGLEVFEVLAEHDDIINLRNGIDHFKYYLGDYRSMLSIYSEVFDRFFTYDMKYQKNVLNLLQNILLRHNVIVEPVLESGVKTIGEQTKPGAKLSVRSIKSDTFEYKVKGGTLITNAKDKRYLETIRKILYYADAEDADSKKPVIVTNADKYEKNKESEDEDKQKGKENRGKKNTETRSDAEKNNNERLSYNPFANFDFKLPNK

SEQ ID NO: 565 - protein, 1387 aa, Artificial; identical to SEQ ID NO: 93
  Synthetic

SEQ ID NO: 566 - protein, 1387 aa, Artificial; identical to SEQ ID NO: 93
  Synthetic

SEQ ID NO: 567 - protein, 1360 aa, Artificial; identical to SEQ ID NO: 92
  Synthetic

SEQ ID NO: 568 - protein, 1387 aa, Artificial; identical to SEQ ID NO: 93
  Synthetic

SEQ ID NO: 569 - protein, 1287 aa, Artificial; identical to SEQ ID NO: 105
  Synthetic

SEQ ID NO: 570 - protein, 1412 aa, Artificial; identical to SEQ ID NO: 140
  Synthetic

SEQ ID NO: 571 - protein, 1357 aa, Artificial
  Synthetic
MQMKISKIKNSRPGISVAENKNEEPLSRQSLLYYAPVKDGKIRLESKDLEQHVTECNEKAQKLYNVITPEINFYRDENRQKMVENLAKNFNAVINNALRSIRNPKEKKEQRVEKEVAFILNLSKKSIKMKKDVFVKSTDLIVKFPENNKYNKKNDKGTGSKEADIQRIISDLVLRKLKKTLRKEVKLENGYRMQMTEITISLMSAICLYGNAESFDPAILKAFFEKVDSDYTKYKYVEQIVKSIESQSAKLKVIEKDGRHLLISANADHRKKKYVFEFMRMYAAADEKEKRELTEHIQDLIGLYLCGKAGYENAENRFSDMIESHNCICGKIEEILNELEKPENLSQQKKENLKNTTVKVMALKYRAAVNYLADEVGKTVLGEIREKKVRSCADLYWIEYIDSTVEKLLLKSRNKKRYRYEIGFLSKHIWKEWTQYISGKYIEMGKGVYHFAIPDLSGALEGESVSICEVKPEYRNGVSGFDYERIRAEESLEREMEKYVLFAVNNFARAVTPEEEREKSGHEDVLLMKTLSEIEESQTKEERQKKHDNNVKNAITLYADADRRILQFFGGQSRFREKEDSLINLYSGEDLYKEIRKELYAIRNITFHYTTKAEKDQTQKHDLAEYLFEEEFSDITELFREKYYANNVWKYYDAEVINTIMENIYCGRKYRAAQVPAFKNIISRPELPQVMNGFVKGNSLRRLMNCPDRDVINKYWSALFFVLKELYYYDFLQEQKKPEDNVKERFFRAIKKLSGQEKDDEKQKAWESFGNRIDQIGRDRSFGAICQGLMIEYMLQNSDISMVQTETDNGKANNKKQIYKHYRTLLYNCISEAFIEYLREKWKELRTPVLTAKEWSKEEFCRVDGLKHLSLFDHLKETFNDAESGSSWYMAAHFINQKYLNHLLGSIRNYLQFTEDIEDRAISLGDCVDNKREEKNLRYRNTLEILEFVAQFCERTTNVMEDYFESNQEYAEYLSDFVDYNTTKKETDIEKALYSFCKQKFKVDGKEYMAGIYYDGENLIPNRNIIRANMYGNTSCLKPCMDRITLKEIRTMYADQNKLDLVLKEGVCHTEEEQKAYREYQNEKNRIELFDVCTYTQILNDMQARLIGWSYMRERDLMYYQLGYYYTKLFWTDSISEEDARRRLVGNLVNVEDGAILYQILAFNSYNLPIIANKNNTVTLLKDEGSIGGKAITAFFKNYENAEMIYKEALDLFENMDEHAAIINTRNYIEHFKYFIKSDRSMMDLYSEIYDRFFRHDHNRKKNVPDSLKNVLADNFMIVDIDMELGSKKVGEKKKGFREHKAARIEFTDSGIRSTDMTYTIKPDIKDNKKVLVPARSEVFLKQFRKILEYRIQDKTQ

SEQ ID NO: 572 - protein, 1182 aa, Artificial
  Synthetic
MGSGKYRITKIARKWDKNENWEKIILKRIVDNKKIKYVNENNNKDVDITDTYYNILSKNNSKFLGSEEQFLFKVNKMDRNIKNDYVIIKDYNEEEFEKFDKKIFFSRKIKVNNEDREKICRNFYEDEREIMKKRLEEAKNFNNIIFNICNKIFKLEYIDYTDEKVYEIFQKEIKFEDIKNLKEAFKQQENGLETDKLLAISFNKKRNNVLLEFIQQITKQEFKNQKELENWFSHSGEKYCKEIFKIYSNMSQKEKYSKLLGHRNKSIASISEKKETLQRRLKLGNYSNYDLKKYYQKNYKEKAIKELKDKNKEEFEKEIEGLIKKNYKIDKLCEEISNLEFSFAESKKENKDKMAEIIVKIKEHYKNNVNVEKELENKEKYILSMIHNYIKGRYRKCLELQQKENVDFENLGKRIKEIFDSNEVTEKLKKSIINKVNNYKIFETKFQNPNIESSDDLEILKAEETFLNKLSTAVSKVGYTLNILLDTRTTSKKMNKKKIKNPDILAGYNVTIELLPYCSFEILYSVYPEIKKDIELLKGMVLFIQEFRQKILHPSQLLGSNVKKSISIKEKDTIVKIHEDNKDNEKWEMYNKEKIRSYFEDILEKIPDYFIEKYESNNVFNIYRDFGVKIMEVVKNFNFKENNAIDYLFPKFHKIYKRMCKLENIDDRQNGARKYLLQTIYYYYFQYEIENDKNNISKYLNLYRNEIKVKKISYSYITDNKAVNNKNIEILYRNIQREGMLNNRFSQMNKEWIEFIVVQFSEFLTNKKLNWILDNLSEYKKKEKLDENDKNRLLKILKQKMNKKITYSNDSYAFISLAQFLDLKEISNLIHDIKKFIQFREKNVSKYKPEKNKLYIEELRKILYILKVMLEHKERVIQKHYLESYDEDISIMYGKDIEKKDIKDIEIKIKNKNQEVINQPLYKSGNDENSSWIVLYGIEQAKRNGTFKFFEGFFNLNDDIKLCKENIEKYEELYNEKEENQRKVDEYISSEENNNIDEVKEIKEINNNKQLFYYYKNMIYGDGLKKGYDFINDIYSHYLSWAYRVERDCKIYKIKEYENKKNFNEYKFKEYKSIKNFRNEVAHFNYFQKTDKSLLDLLNDFYSIFDYNLKYQRDVQKVINNIFEKYQVIREDGGPVIFYCKIDKKLKLSENIIPKKHLKCSKIKLIHEKYVEFFRKLFEYKK

SEQ ID NO: 573 - protein, 1386 aa, Artificial
  Synthetic
MGNLFGHKRWYEVSDRGDNKIKRKVKVKRNYDGNKYILNINENNNKEKIDDNKFIEEFVNYKKNDNVLIEFKRKFHAGNILFKLKGNKRSIEDSNDFLKTEKIILDKEVYGQSEKLRNEKGITKQDILKEIIDKGIDKSNDKILVKTKFGKEITINFTDEDKKNKNKYQITLKIIPENELKIKREVYNVFKIININLYQIIKGIIENKEIFKNRYYDEILKEKLSKNNQIINTLTNLNKIRKEIRDNRDNIIGFVKFYLNVSGDKKKSENKKMFVEKILNTNVDLTVEDIVDFIVKELKFWNITKRIEKLQEKTVNRADEDIKNTYINTYVLLDKHEKFKKYNRNKKDTIVKSFIKDIKDNTMKQKINQILRKFKIEELIEKLRIENKNFDTEIFRIFKDHYQEMFSLEKFEEKPDEEKELYKIIYRYLKGRIEKILINEQKVRLKKMEKIEIEKILNESILSEKVLKRVKQYTLEHVMYLGKLIHNDVNMTTVNTDDFTKLHAKEELDLELITFFASTNMELNKIFNGKEKITDFFGFNLNGQKITLKEKVPSFKLNILKKLNFINNENNIDEKLSHFYSFQKEGYLLRNKILHNSYGNIQETINLKGEYENVENLIKELKVSNEEISKSLNLDIIFEGKVDIINKINSLEIGEYKDKKYLPSFSKIVPEIMRKFREINKDKSFDIESEKIILNAVQYVNKILYEKITSNEENEFIKTLPDKLVKKNNNKENKNSLSIEEYYKNAQISSSKGDKKAIKKYQNKVTNAYIEYLENTFAEVIDFSNFNLNFDEIKTKIEERKYSKSKITVDSISTNINITNDIEYIISIFALLNSNTYINKIRNRFFATSVWLDKQNSTKEYDYENIIDILDKILSINLLRENNIADILDLKNTIIEAKIVENNEECIKNYIFENNEEELKKRLFCEELVNKEEVLKIFEDKNFKFKNFIKKNEIGNFKINFDVLSNLECNSEVEVKKVIGQNSKKLESFIQNTIDEYKSNIRTLFSSEFLEKYKEEIDNLVECTESKNENKFEKIYYPEEHKNELYIYKKNLFLNIGNPNFDKIYELISKDIKNANTEILFNDDIRNNKIAEIDVILKNLNDKLNGYSQGYKEKYIEKLKENSDFFTKNIQNKNYKSFEEFEKNYNKISEYKKIRDLVEFNYLNKIESYLIDINWKLAIQMARFERDMHYIVNGLRELGIIKLSGYNTGISRAYPKRNGSDGFYTTTAYYKFFDEESYKKFEKICYGFGIDLSENSEINKPENESIRNYISHFYIVRNPFVDYSIAEQIDRVSNLLSYSTRYNNSTYASVFEVFKKDVNLDYDKLKIKFKLFDDEKNDDIKILKIEDLIESKKVSVLELESYNSDYIKNLIIELLTKVENKDEISS

SEQ ID NO: 574 - protein, 1194 aa, Artificial; identical to SEQ ID NO: 510
  Synthetic

SEQ ID NO: 575 - protein, 1387 aa, Artificial; identical to SEQ ID NO: 93
  Synthetic

SEQ ID NO: 576 - protein, 1387 aa, Artificial
  Synthetic
MKLTKVEKARIAVSREKKDSGRIILYTNPEDVKKTSVTTMEQQVSKRIDQANKLYQVFFKSVIPVELNKHFAEISKIAAKCRNTEEFYKKACGYSGYEWTDAKQKKRTSQISRFSYTSSGKNMYVVMDNFVKEYMVQIWQEKDFRNAAVKILCCICDGKKFASKLEKVKKESPDTLKKFIEISGKCEGNPFVDYDTSFLEKVFTLVISQMVKNCDRKSYEQDDKEKIKKSIQKEIQWLSHVQSVTERSFGREGKTYLLFKIRNPYATEERLQTVLIRMRKTLKRGRNRDIAIVLLQGLAQMNQVTFTDTVKHLYQEEEKAFCDFIDAVNRDYYRVNIVKSVRNMDVKVQPDLNDNSILKLSGLGNIKKEALSDTLLRYAASADESDQVLLDIKKLLFEYFLPGNSKETSKYTTVQNLWNIPYLPKIFFDYGFENEDSDDDNECAEDIETLCDVEPQYKINQHSLKRRIRYVNYGKYLQMTKNESDRERRYWIHYIKEFVEKNYVDSGRTLSEKNCYASSMMLNCWKEIIRYLCGKYIDIGKAVFHFTNLTAMPKPKDKIIYGQLEEQYKKGISSFDYEAIKAEETLQRDIVQSVVAAAFAFSKSVIDETKMEECQETNKEDILFLSENVLGSLLKENTIKLILRFYGGESSVAQKEYFDQQEIVQEMISHLKSIRNENFHYLDGAKKDNPHKYASILWKNDEMAYQKLTKQRYYANNVGLFYRAEEIQELVQELYSQKNITEAQIPAFRTVLKRKDLPGYMEELGILFPDNTQEKSKGDFEGTLYFLMKEIYYRDFIVKDKAAAYFFKAVDQNKEQSKKEDKHTERAAENFHRYVKSLEKKYNKKEISFGTVCQYIMMEYNQQNTTKQETEIYKHFKMLISLCIRKAFGNYIKETYRFLFHPIYSKQQGEPEYLDTLELESGVKEKNYEWFTLAHFLHPVQLNHLVGDLKSYIQYREDILRRIVFAEQRVYADQQKEVQQKVKTAKEILEVLEFVREVSGRVSNEYTDYYENEEEYAEFLYQYIDFRKREGKSAFESLKYFCQNILDSGTVVDLYADTENPKVLRNIELTRMYAGSNVKIPEYEKITEDEIKMYYQEKNSVALILSRGLCRNEKEQKKVIEFNWKKKRLTLNEITDVFSLVNDLLGKMISFSYLRERDQMYLLLGFYYMALCAENKSENHLGWKGETLDKLESSDSKFDIGGGLVLYQIVSAFNFGSKLLYISEDGRWKMAGGAFPGKYGRFENDYNHRTSLSKVIRLFENESYEREIIYWRDYVDHMKYYVNQNQSIMEIYSAFYSKVLGYSAKLRKSVVFNLQAALEKHHINPECIWMTSDGKCADIKLMKNLESQKFTYKLAKREGEKTERKICMNALNENFLKTIRTSLEYKK

SEQ ID NO: 577 - protein, 1101 aa, Artificial
  Synthetic
MKLSKEKHTRSAVANNGDIKSAEVNNGNTKSEEVNNGDTRSAVANEEQNIGGILYRFPGKSIDGVKDQMLRRDKEVKKLYNVFNQIQVGTKPKKWNNDEKLSPEENERRAQQKNIKMKNYKWREACSKYVESSQRIINDVIFYSYRKAKNKLRYMRKNEDILKKMQEAEKLSKFSGGKLEDFVAYTLRKSLVVSKYDTQEFDSVAAMVVFLECIGKNNISDHEREIVCKLLELIRKDFSKLDPNVKGSQGANIVRSVRNQNMIVQPQGDRFLFPQVYAKENETVTNKNVEKEGLNEFLLNYANLDDEKRAESLRKLRRILDVYFSAPNHYEKDMDITLSDNIEKEKFNVWEKHECGKKETGLFVDIPDVLMEAEAENIKLDAVVEKRERKVLNDRVRKQNIICYRYTRAVVEKYNSNEPLFFENNAINQYWIHHIENAVERILKNCKAGKLFKLRKGYLAEKVWKDAINLISIKSACTSLAQVCQIYMTEYNQQNNQIKKVRSSNDSIFDQPVYQHYKVLLKKAIANAFADYLKNNKDLFGFIGKPFKANEIREIDKEQFLPDWTSRKYEALCIEVSGSQELQKWYIVGKFLNARSLNLMVGSMRSYIQYVTDIKRRAASIGNELHVSVHDVEKVEKWVQVIEVCSLLASRTSNQFEDYFNDKDDYARYLKSYVDFSNVDMPSEYSALVDFSNEEQSDLYVDPKNPKVNRNIVHSKLFAADHILRDIVEPVSKDNIEEFYSQKAEIAYCKIKGKEITAEEQKAVLKYQKLKNRVELRDIVEYGEIINELLGQLINWSFMRERDLLYFQLGFHYDCLRNDSKKPEGYKNIKVDENSIKDAILYQIIGMYVNGVTVYAPEKDGDKLKEQCVKGGVGVKVSAFHRYSKYLGLNEKTLYNAGLEIFEVVAEHEDIINLRNGIDHFKYYLGDYRSMLSIYSEVFDRFFTYDIKYQKNVLNLLQNILLRHNVIVEPILESGFKTIGEQTKPGAKLSIRSIKSDTFQYKVKGGTLITDAKDERYLETIRKILYYAENEEDNLKKSVVVTNADKYEKNKESDDQNKQKEKKNKDNKGKKNEETKSDAEKNNNERLSYNPFANLNFKLLN

SEQ ID NO: 578 - protein, 1244 aa, Artificial
  Synthetic
MKITKIDGVSHYKEKEKGVLKGKDILNGKIEKIVKKRYDATIESKIYKEFIKLRKNRIEQNNEKSILELIKSNIDKNEKEIKTLLWKNFKIKEKNKNYDEYITDEIKLDNDIKIYESVESLYFLIKEIYLGQNNKKWNISKIDLEKIMEEDSDLIMLGYKLKKNIKEDDYPYLYRDKNGQESTSVYKLLKKLIEENKDRNQDIRKSQEYEKIRKNFEEYKNRKINLLVKSIKNNKINIQYINNEIKSHDNPREENIIKFFRKMIEEKNKPILKDKLKLFRLEVFFNEEFLEEIKKLLDSDDSDKSQNKKISELRGKIFNRIREEIKNNKNRDELENIYFLELKKYIENNLSHKKEKNKNSNNTGEEKSKKLYLKFLKKVLFIDDNNRISIEKLKSRIDDNFKNLLIQHVIEYGKIKYYVENDDYIRNIVKNGELKLETKDLEYIKTKETLIRKMAVLVSFAANSYYNLFGSASEDILGTEVVKNRRTNVIKVKSYIFKEKMLNYFFDSEDFDVNKTIEVLESISYSIYNIRNGVGHFNKLVLGKYKKKDISTNKRVEEDLNNNEEIKGYFIKKRGEIEKKIKERFLSNNLQYYYAKERIENYFEVYEFEILKEKIPFAPNFKRIIKKGENLLNNKKYEYFKNFDKNSVEEKKEFLKTRNFLLKELYYNNFYKEFLSKKEEFKKIVIEVKEEKKNRGNNKKSGVSFQSIDDYDTKINISDYIASIHKKEMERVEKYNEEKQKDTAKYIRDFVEEIFLTGFINYLEKDKRLHFLKEEFSILCNNNNVVDFNININEEKIKEFLKENDSKTLNLYLFFNMIDSKRISEFRNELIKYKQFTKKRLDEEKEFLGIKIELYETLIEFVILTREKLDTKKSEETDAWLVDKLYVKEKNECNEYEYKEYEEILKLFVDEKILNSKEAPYYATNNKTPILLSNFEKTRKYGTQSFLSEIQSNYKYSKVEKENIEDYNKKEEIEKKKKSNIEKLQDLKVELHKKWEQNKITEKEIKKYNDTIKEIREYNYLKNKEELQNVYLLHEILSDLLARNVAFFNKWERDFKFIVIAIKQFLRENDKEKVENFLNPLDNSKGKKVYFSVSKYKNTVENIDGIHKNFMNLIFLNNKFMNRKIDKMNCTIWVYFRNYIAHFLHLHTKNEKISLINQMNLLIKLFSYDKKVQNHILKSTKTLLEKYNIQINFEISNDKNEVFKYKIKNRLYSKKGKMLGKNNKFEILENEFLENVKAMLEYSE

SEQ ID NO: 579 - protein, 949 aa, Artificial; identical to SEQ ID NO: 43
  Synthetic

SEQ ID NO: 580 - protein, 1073 aa, Artificial
  Synthetic
MRIVRPYGESVAPGAGSERLLRPKKQLRDQIGDADRRIPTFAAGHDELVIAQWISTIDKIATKPKGNKEPTPRQRALREKLGKAGWDRLVDQKLLPGLPKDQDDYLGKLWWFKIHPYPKGTKAPKVVNGREIPDPRGRWYSRFVCDVAPDDIDAATVAARVHEHLHVAEYRHGTEQKHDKGRIERRARSIAKNTASLAQVTKERPTWTEDDVATYAQTAGDVATAIKQAAEAREADNRRVGADVAAEVLYPAFGKLFPNKGIKELENQSGLPALHLAIRDFYQRRLKRHKKDQPEHKMARRKVSTLLPADMAGLAAMLRHTAANRDVAALVRLGKVIHYEAAFAAGQKAADGDAPAHVLEKWPAEVKASHYWSSEGQAEIKRNEAFVRIWRHSLALAAQTLRDWASPDGSFHTDILSEKQFETLTKNLDLDHHARKLAVLLGNRAEFFLKGRGDAFQKQTLKLALQGLTQLRHNSFHFNGRGGFADALKFTRKPEITADQHMWDALGALWATDLEERGKRLIDTLEAAHLHHFFDWEHNKRLIGAVARAKLAEGAEDLPLPRFRRLLDRAANIRGKDGINLRLPKPVNRQDMEDFPALHAKYVALKLLYENPFRQWVGHRDRRDLVNKLIDRAVRRADKAAKDLHGKADADRRLIITAKAKGLGRLGEGEKLHDFAFRLSRETASEMRVQRGYDSDGERAREQAAFIEELLIDVLAQAFDHYLRKKKFDFLVDLRADEPRPKEPKCALRRPVLDAEGAAAPQWQVLLYFLLHLIPVDDIGRLVHQIRKWDITAGKAAGTTRAADDDVDRVARTLTLYLDMHDAKFTGDQALQALAPLHELYASKETFERFFLRKATDDNEYLPRRGLREILRFGHLPPLRAIFAAHKVDDDTVQKVEAAEKGPLVAAQRERERLHKLWVDQRRKLGAEDLRCYVDTLAEVTRHRHAAAHVRLVDHVELHRLMLAVLGRLLDFAGLFERDLYFAMLALIYRAPSSPQAVLDEADRELLRRGQIVETWRKLQDSTFKDELAQLFDPTSGRVIRVRNDFAHFNMLNPRRSRGATIDLTARSTPPAD

SEQ ID NO: 581 - protein, 1315 aa, Artificial; identical to SEQ ID NO: 366
  Synthetic

SEQ ID NO: 582 - protein, 1412 aa, Artificial; identical to SEQ ID NO: 453
  Synthetic

SEQ ID NO: 583 - protein, 1287 aa, Artificial; identical to SEQ ID NO: 105
  Synthetic

SEQ ID NO: 584 - protein, 1373 aa, Artificial; identical to SEQ ID NO: 104
  Synthetic

SEQ ID NO: 585 - protein, 1197 aa, Artificial
  Synthetic
MKVTKIDGISHKKFEDEGKLVRYTGNFNIKNEMKERLEKLKELKLSNYVKNPENVKNKDKNKEKETKSRRENLKKYFSEIILRKKEEKYLLKKTRKFKNITEEINYDDIKKRENQQKIFDVLKELLEQRINENDKEEILNFDSVKLKEVFGEDFIKKESKIKAIEESLEKNRADYRKDYVELENEKYEDVKGQNKRSLVFEYYKNPENREKFKENIKYAFENLYTEENIKNLYSEIEEIFGKVHLKSKVRDFYQNRIIGESEFSEKDEEGISILYKQIINSVEKKEKFVEFLQKVKIKDLTRSQIFYKYFLENEELNDENIKYVFSYFVEIEVNKLLKENVYKTKKFNEGNKYRVKNIFNYDKLKNLVVYKLENKLNNYIRNCGKYNYHMENGCVATSDTNMKNRQTEAFLRSILGVSSFGYFSLRNILGVNDNDFYEIEEELTEDERKNENFILKKAKEDITSKNIFEKVVDKSFEKKGIYQIKENLKMFYGNSFDKVDKDELKKFFVNMLEAITSVRHRIVHYNINTNSENIFDFSNIEVSKLLKNIFEKEIDTRELKLKIFRQLNSAGVFDYWESWKIKKYLENIEFKFVNKNIPFVPSFTKLYNRIDNLKGNNALNLGYINIPKRKEAKDSQIYLLKNIYYGEFVEKFVNDNKNFEKIVKEIIEINRGAGTNKKTGFYKLEKFETLKANTPIEYLEKLQSLHKISYDKEKIEEDKDIYVDFVQKIFLKGFVNYLKKLDSLKSLNLLNLRKDETITDKKSFHDEKLKLWENSGSNLSKMPEEIYEYVKKIKISNINYNDRMSIFYLLLKLIDYRELTNLRGNLEKYESMNKNKIYSGELTIINLVNLDNNKVRTNFSLEAEDIGKFLKSSITIKNIAQLNNFSKIFADGENVIKHRSFYNIKKYGILDLLEKMIARADLKISKEEIKKYENLQNELKRNDFYKIQEQIHRNYNQKPFSIKKIENKKDFEKYKKVIEKIQDYTQLKNKIEFNDLNLLQSLIFRILHRLAGYTSLWERDLQFKLKGEFPEDKYIDEIFNSDGNNNQKYKHGGITDKYANFLIEKEEEKSGEILKKKQRKKKIKEDLEIRNYIAHFNYLPNAEKSILEILEELRELLKHDRKLKNAVMKSIKDIFKEYGFIVEFTISHTKNGKKIKVCSVKSEKIKHLKNNELITTRNSEDLCDLVKIMLEYKKLQK

SEQ ID NO: 586 - protein, 1163 aa, Artificial
  Synthetic
MGSGKYRITKIARKWDKNENWEKIILKRIVGNKKIKYVNENNNKDVDITDTYYNILSKNNSKFLGSEEQFLFKVNKMDRNIKNDYVIIKDYNDEEFEKFDKKIFFSRKIKVNNEDREKICRNFYEDEREIMKKRLEEAKNFNNIIFNICNKIFKLEYLDYTDEKVYKIFQNEIKVKDVKNLKEAFKQQEKGLETDKLLAISFNKNRNNILLEFVQQITKQEFKNQKELENWFSHSGEKYCKKIFKIYSNMSQKEKYSKLLGHKNKSIASISEKKETLQRRLKLGNYSNYDLRKYYQKDYKEEAIRELKDKNKEELEREIEKLIKENYKIDELCDEISNLEFSFVDSKKENKDKMSEIIVKIKEHYKNNVNIEERLENKEKYILSMIHNYVKGRYRKCLELQQKENVDFENLEKRIKEIFDSNEVTKKLKKSIINKVNSYKIFEMKFQNPNIESSDDLEILKAEETFLNKLSTAVSKVGYTLNTLLEVNPEKDILEKYEEVEKLCTNNSIKNLCTVYSEINNNEKLLKGMIYFIQGLRQQVLHPKILWEKNVHKAEKVKEKEKIVIRFQNEGKAYNKKRIEEYFENILEKIPNYFIEKYESNNVFNIYRNFIDEIFEIIDKFDFKESNSISYLFPKFHKIYKRICKSENINDRQNGARKYLLQTIYYYYFQYEIENNKNDIFKYLNLYKSKIKAKKISYSHIIDNKDVNNKNIEILYRNIQREGMLNNRLLQMNNEWIEFMVVQFSEFLTNKKLNWILDDLSEYKKKEKLDENDKNKLLKTLKQKMNKKITYSNDSYVFISLAQFLDLKEISNLIHDIKKFIQFREKNVSKYKPEKNKLYIKELRKVLYILKVMLEHKERVIQKHYLESYDENISIIYGKDIERKDIKDIKIKIKNENQEVINQPLYKSGNDENSSWIVLYGIEQAKRNGTFKFFEGFFNLNDDIKLCKENIEKYEELYNEKEENQRKVDEYISSEENNNIDEIEEINNNKQLFYYYKNMIYGDGLKKGYDFINDIYSHYLSWAYRVERDCKIYKIKEYENKKNFNEYKFKEYKSIKNFRNEIAHFNYFQKTNKSLLELLNDFYDIFDYNLKYQRDVQKVINNIFEKYQIVRKDRGPVVFYCKTDKKLKLSENIIPKKHLKYPEIKLIHEKYVEFFKKLFEYKK

SEQ ID NO: 587 - protein, 1247 aa, Artificial
  Synthetic
MKITKRKWGEHHPPLYFYRDEDSGRLLAQNDRKQDYTDTLFNDIAQDTFERSLRNRLLKTPEKGDKRFYSNEIVKLVEKLCQGADVAEIMKSMERSEKLRPKNEKEIKNLKKQLDGTLSEYGKRYTAPEGAMTLNDALFYLVEGNPLKQAMAKAELGKIREALIKEKENRINRVRYSIKNNKIPLRIQGDGGITPNNDRAAWLLGLMKPADPAKGITDCYPLLGELEEVFDFDKLSKTLHEKISRCQGRPRSIAMAVDEALKQYLRELWEKSPSRQQDLKYYFQAVQEYFKDNFPIRTKRMGARLRQELLKDKTSLSRLLEPKHMANAVRRRLINQSTQMHILYGKLYAYCCGEDGRLLVNSETLQRIQVHEAVKKQAMTAVLWSISRLRYFYQFEDGDILSNKNPIKDFRDKFLRDTNKYTHEDVEACKEKLQDFFPLKELQEKIKEDAKGLQETDNKQADTTDFKAIGHIVRDDRKLCNQLLAECVSCIGELRHHIFHYKNVTLIQALKRIADKVKPEDLSVLRAIYLLDRRNLKKAFAKRISSMNLPLYYREDLLSRIFKKEGTAFFLYSAKIQMTPSFQRVYERGKNLRREFECERMKAEASNGQNGQDGDRLKWFRQLAAGDSADTHFNWAVEAYAESAADVENNVEFDTDVDAQRALRNLLLLIYRHHFLPEVQKDETLVTGKIHKVLERNRQLSEGQGPNQGKAHGYSVIEELYHEGMPLSDLMKQLQRRISETERESRELAQEKTDYAQRFILDIFAEAFNDFLEAHYGEEYLEIMSPRKDAEAAKKWVKESKTVDLKTSIDEKEPEGHLLVLYPVLRLLDERELGELQQQMIRYRTSLASWQGESNFSEEIRIAGQIEELTELVKLTEPEPQFAEEVWGKRAKEAFEDFIEGNMKNYEAFYLQSDNNKPVYRRNMSRLLRSGLMGVYQKVLASHKQALKRDYLLWSEKHWNVKDENGADISSAEQAQCLLQRLHRKYAESPSRFTEEDCKLYEKVLRRLEDYNQAVKNLSFSSLYEICVLNLEILSRWVGFVQDWERDMYFLLLAWVRQGKLDGIKEKDVSGIFYKGSIICKLFNTLEGGNWAAFASIYCPGSKRTKFLKVNNDVHATAPLSHEKCQYEFLVARNMIAHLDLMRKNGWRLEAGKTCSVMEDYINRLRFLLSYDQKRMNAVTKTLQQIFDRHKVKIRFTVEKGGMLKIEDVTADKIVHLKGSRLSGIEIPSHGERFIDTLKALMVYPRG

SEQ ID NO: 588 - protein, 1218 aa, Artificial; identical to SEQ ID NO: 525
  Synthetic

SEQ ID NO: 589 - protein, 1342 aa, Artificial
  Synthetic
MKVKEGHVHTAVGKNECKKSVARMIYKSPVPEENLEVRSHLAKQNGNNQRMYSLFGGSFFYLEREFEGDLKSKELEFQKDLAKKIHDKVTYLERLLLKEEWNMPEDIAQLNGCSDKEKWEETVEKIVEAKIEQQLQMLRNYNAHGRIYFQNKERTQGVDEVDFIHKFVTFQLRKKLRKTVKEQEAGKEYTIYLPDVIEKLVIALCAGGNYNKKLEKIKSYECRVFLKALNNDYLCLKQIRKIANSIEKKNVKVQIGEGRLLQLSNAKHPKKKVIFGFMKKYANSERAEQKKMLCHMQMLIVLFLEGQHAEERLNQAQDKGIWQKNRYQWSENDVFGFLEQEGGRRNEEKIENLLQRKFRKGISAVEKKRLRKQIQETVWEIISEHFWKAIDELKKIEYEGEDKEIEDKKAEDIFWLEFIERTVERALGEKRLGYFKLRLSWLYQFVWRDWVSYLALKYIDMGKAVYHFAMPDLSDRKGKMCIKEAILPQNVDEITSFDYELIKADETLERDLSLYISFAVNRMGRAVAPESSYEKIEYKKDKHGRVREIDYTDLLFLNCGFSTRAEEVPEGESRFIVYTDYQRRLLQYFGGQSWYKDIEEGKKYELINSMRDLLSYVRNYAFHYTGAVDLKEEYGNTLLENIYRQELAQVNRHYREKYYSNNVPVYYGEKDIKNLMEHLYQSPKNTPAQIPAFKRVLSRKKLDVFLSALSIEKRGQEYEGCMYFLLKEIYYYDFIKRGDLKKMFINALNNKKVSYKTKEYWAKKNFQERIESFTDVSMGELAQIIMTDYNMQNQGKEVLPNADKHKEEIYKHFPILLAEVLQDAFRSFLWRQMQEKGSVYAFLKEPFQENEKIDEENFCDVPWNCKAFEQVLDGKNKLCYAWYVAAHFVNPRYLNLLIGSIKNYIAYVHSIERRARDSGNELAGVIQRVFRGKIEVLEQTLSVLGFVMALSGRVSHCFSDYFEGTDKLSAEEQYTRYLAGFVDFQRLDGGVKDLQKFCSKRTANSPNPEGRIGLYYDEKNPILNRNIILARIYGDEKLMAASMFKVELQEIENYYKLMAELAGVFEREERCGEKEQKKLIEFQHLKNRVELHDVMKLSEIANDLVAQIVSWAYLRERDLMYFQLGYHYIKLFYGYDKEGWKHKIELKKGEEDFSIEEGALLYQIAAIYTFLLPVYFKEDGKWKAGGTGTAAGNALEQFKKYCGGSYNVYTDGLHLFEEVDKQHDEMVAFRNHSDHFKYYAFHDMSILDMYYKTYNGFFSYDRKLQKSVSFILPNILQRYSVIARIGWKKGDSSGRFTITLVSDDFTYKVEENGQERKVKIPVREEKFLQQLQRILEYKIALE

SEQ ID NO: 590 - protein, 1093 aa, Artificial
  Synthetic
MRGEADEIFGRYIVYYDTETEKEKRNDGLKEELFEQLEITKNDNSLHRQFDKKMHDVLLSQFKMASRKINEEFPEEKIDSGKVMSKEEAVFWISFFERSVEKFAKKRKKRKKSYYECNRICSMLWEKWFSYIAVKYIELGKAVYYFGTPNLYSKLKFNEEIVVGSVLEEYTDGLTSFDYEKIKADESLVRNIATSVTFAANAFAAAACNQQFREEKDSNSDVFAKTLMKPGAMRDGAMKRILCYFGGSSFFEEELRSVKLKTDAEEKFCLEIAEHIENLRNTSYHFSTDRSAAEAERGEWVLKIFANEYKRVNYVIGERYMSNNVAMFYSEKQLYRMMKKLYALRIVYEAQIPAFNSIVKKKDIREMIDSKWRNGNKKNFNIIYADVDILKKYESSLFFVLKEIYYYGFLREDNLLERFTEAVLKFSKSNIIDTVERQARSSFLKRCGELGIISYSSDYDHNKRCFVEKAEKREEKCRLTFGQVCQQIMTDYNMQNQGQKEIVSVEKRKWQEKSGLAPIYEHYVILLKKCVRDAFEAYLADTSEFTFLMWPELKKDTMKKKYVSRVSVDEFINGMPEIGIFSELNDLLLKGNEECQEEKDPKHNMQLMYDWYISAHFMNAKQLNLLMGDLKSYKAFVNDICNRAKNTGNEKVAERIQKAYDEQRYSDILMVLEFVIRFVGKVGKNIDDYFGLGKNADAKEEYAEYLRQFVDFDSYVSTNISNKPNKNGLLEFCGDISSGAGAVNTGMGIYFDEENPIVNKNVIYSLLYGDGNMLKACFKDDRISLNEIIGKQEDSYYSLAKSLTNAFRNGKCETVKEQNDMRQFQNLKNRIELLDLQVYTEIVNDFIAQMISWAYLRERDLLHFQLGFHYVRLFFTDYLQNSRVKEYNELSRLNITKGAILYQILAIYDHELPILKIDSKKGSIEKVEHQTPGPCVIAFCKTYGENTYNAGQQFFGEEKRRDYFVRLRDYIDHMRYYTKHDRSIFELLGEMYNGFMIYDTKLKKSVSFITKNILERYHVVANTHMKHADEENPDFMYTAELYSDKYTYKGSFKYTYYDKKAKKTVGRTKKIMEVNSRSGLFIELLGKILSYKR

SEQ ID NO: 591 - protein, 1425 aa, Artificial; identical to SEQ ID NO: 3
  Synthetic

SEQ ID NO: 592 - protein, 1425 aa, Artificial
  Synthetic
MKLSKVDRIRVAVGKTGKTENGNSQGRGVLYRSPKGNKTVAVDAVVEERIRNANRLYSAFFRCAYPEEPERHFEEIIKRMATGKKSGAQILKEYIGYEGQKNRKPYTFYVNKCAYRPAGKELGQVLRLFVKERLGQNWQNPEAAEAAVALLTCLCEGKTNRYTENTADGPVLTELSEQTVTQLEQVSRLGGSILVPKTERLETIVTVILRLTAEQCNTSLYVNGGTKEAQDADLEKQIALLKSLQTKPLLLKERFDKVTKQTIRDEQKLSEFSYKDATKERMEAVVVRMRKTLKKGASREVAVELLQALAQYDGKTWDGWLTQMLETEASKKKLKDFILAVNKDFHHFHVIKSVKNTAVAVSHSEDNTLQLSGAKKKTKGAMQDALFAYAQSEESSDETLHRIKRILFTYVLGGRQDNTLRLTEKTHLAKELLWKFRGTGAGLFDADFVPEEERAGESGRKAGSYTDLGCLFAEDDGIRNQRRIADRINYVNYGNYLRMRKAAEDEFTLFWCAYIKDYIEENYVTKIREAKRTGGKRRLKETDCEAERMMEKCWHDIIRYICGKYIHIGKAVYHFAIPEDLLANPGEVRSFGDVHAKYADGITSFDYEDIKAEENLQKSIFNVLVSAVANYSRSVVDLSSERAEELRRLPGNERLNEDVLMMKETHLKELLLPDAKKRLLRYFGGYSACEGLSGVTSEELAWEMRTVLSTLRNESFHYTFGKKKKLDYKVAKQLWMQAIRANRQLILDKYYSNNTCRYYSPNSIKALIEQGYRSYEEREAQIPAFKTVWKKAELAKYLADKKVMPAEISGEEKERVIFQGAFYFLLKEIYYREFTVGNTAAKYFFDAVERYCKENETGPYKNPAKSFNDYVNGAFNNKGVKVQKGLSDLYREGKITFGVVCQTIMAEYTQQNEKSEGEAIYQHFKMLFPLCMRKGFQKYVEEKHKELLQPVIREMGSREDFLTNIHIGCFDDFCREDGMYEYDWFVVAHLIHPKRLNELVGNLKDYMQFKQDILRRADYAEQFTNEELAAMKARTEEKLQKISGILRVAEFVRGIAGRVSNTFSDYYESEEAYASYLEQYIEFPRIKGSTVFESFRDFCVNTLPGGAVMDVYMDEKNPRILRNVEVARMYAGGDIGLRTRKKVTAEELKRYYQNEAEVAALLKAGLCATAEDQKRVKAQQELRNRITLTDVTEIQEVINDLLSQLVTFSYFRERDEMYLLLGFYYMALQSDGDWGEELRVFDGKKLQVENGFVLYQLLSAFTYGLNMYSEAAPDGKGGSQAGKIGEFIKAHPNSWDRALRLFVDDGACEEVSRKARNYVDHFRYYVKPDRSIMDLYAVYHEYFFDYSTKMRKSVLQNFASILERYFVLTKFKLGGERGAQTLEAELSGDKFTYKLSDTKAKPVVLPARNKEFLENLKNELNYRQE

SEQ ID NO: 593 - protein, 1330 aa, Artificial; identical to SEQ ID NO: 191
  Synthetic

SEQ ID NO: 594 - protein, 1358 aa, Artificial
  Synthetic
MKISKEGHKRMSVTLKKENMQKNDADKTKGQILPLPEGEGLEKYIQKRVANTQKLYKVLGPSAVSVPNEKEKETIDCFNDFIKNIILKNVNTQPAEKRNRNAVEYMKTKGNVNTVFIDVDRKCIHKLVPLHLRGTLKKYVKIEKDGQRIEVYIPDVIEKLVFAVAHGTQFDHLIAEIEEEELIVCLHMIFKDYTKEDIIANTAKSIEKQDVKVQVLGTGEDARLQLASADNEKKKYIFLFLKKFACAVSEKERNDLLREFRELLVLFYCGTAAYEEVKEWKNGIPIWDFDFLSKMVSDISWFFSQECSEKLMEREQLRREKDKDKKRQNKSKIKDIDVEVKGILANLITERYRESIKLLQSLLGEEEYKEKCFWLEYIENDAEKILCSKKALTENKLDTVWLCNNTWRNFLSFLCSKAVDMGKAVYHFAMPDLEQLESGEPIKAGMIKPQFQQGITSFDYERIKAEENLERSFMTAISFALNNFSAAVCPPETYEKKNKEDVLFMGDKDLREEMYPNASWHIMQYFGGISQWKDSCFEDIVMLEDADLNEEFVLEVKGAMSLIRNSAFHYAASAAQGTLDKGSYLVELFERERDNLGSKYRKKYVSNNVPMFYKVEDIDRLMHCLYGEQKVLESQIPSFRNVITRKSLPDIIVKFVKGKPYGKIQKNVETASKFHSALYFVLKEIYYNGFLQEENLMERFMVSFNNEWNKVKESSGNKKKEAAMKDFSRRISELQQNGKRLTFGELCQAIMTDYNMQNNQKKVRLNKKDNLPDEKYKHFKMLLLVCLRETFIDYLKKDVAGEKFDCAFLREPGLKENVYENLTEEQFCKGWKIDRYKNLINENGQYDSWLISWFILAHFMTPKHLNHLCGEIKSYLSYVHNIERRRFDAMRVQVEENKEKRQKYEQVLEILNLAAEYCGQVSNERTDYYESEEEYARHISMYVAFEEKNSERPLEEQLYGFCNQKADGGPASRIGIFYDGENPILNRNVVLTKLYGAERLLSECLQKERVTKAEIEKHYKHTKKLEAVFKYGTCKNQEQEQERRTYQQQKNRIELVDILKYSDLLNDFMSQLISWCYLRERDRMYFQIGLHYIRLYYGENLVEKNSKFRVLQSKEAKAGEKKGINLVDGAVLYQIAAIYTYEYPVYALDEAGNAIVSKAAKIGSTTANGINAFWKEYCNEDASTYEVGLSLFENPLEEKELIEFRNYIDHFKYYSRRDRSILNLYSQVFANYFRHDRKLKKSVTFILKNILARHFIIARTVLAEVEVEKKDGRKDKKNPIIRKYSQTEIRIPTENGLQSDDTLHKYTKEDVDNEYKKKMNNSKGEKGKIPPKEGGKYSIPMYDEKFIQRLYCILNYAK

SEQ ID NO: 595 - protein, 1352 aa, Artificial
  Synthetic
MKIIRPKGKSFTTLTQTDALERGIRRAGDKVAHPVAFSASRDVSANQLPEYLSADQELVLRQLVSGLDKVVRKPRRNNLRNFQADAYVDRTKLGLELWNIFEEQCGDSLRSLDGGADVLANLARIWRWKVHPYSEFIVDMLSPRSDKNAEVIAKYGDKELSRSDFYGRWHEAFWKTTSNGRADYSATAEAIWAHLFQEEIKITKEQRNRKNITDWPAKGLAQAKGRSIALSAHDPAKGGTLRLDDTVDEAVVALYFAHDVVKELRDAVLTAAKASSGRNAQFSQSDFGRMLYEHFGPIIKRPLDESLNRSLWRLHNAVRGFYQELARSEGYSRAMRDPVRELGKLEELLPRDHQHLLQFLGAKDRNAQISALTRLGKLIAHASDLPAGTQDVNAAFAERFHFFQTSDGQSEIKRNEAFVRVWRTSVGLSLRTLHALTPFALIDGRTDDLTLPEYATRATAKYDTRSYQRGIELIFGAKTTIALDGQSRSNMLLVPHTGGRRDTDPNTEILWAIIRLAAEIRNRAYHFNTKERLLSLIETCPVKITNQPAHFGGRKPNIIDRVAGEAFTRLLEFDLALQEQVILDEFRRLDVSAYVKPSDLDELYAEFSRVPDTIQHTQPKFISVLRRAHAICQEDDGKPPAWAAPFKTLDLTGLSKVKEGANHFRLGVLRQLYKSGFAAWLSQQSDNAALVRSAIAEVTAFKTQRFEDYYGPKSDHRRVYAMAEPIAQSLALETATSLEELFRRLQSEAMSEDSIRQTYRASAVKQRERMGGVGEFRLDLFARLFALYLEQTNLNHIWGITGPLPPEERAPAERLATFAAPAKLLDRIEPWHSQFYVWLYLIPIDEVALLRHQLRKTVALEAKSGIGSQDILSQVDLLMGLYLSVYDAGFDGREHVGGLNAGKLFYESPQDFEKVYSDDQSHHEISMPGTRRGLRQILRMDHFRALEGIFEKHQVTTDEVKAFQQLKLTEVQEILESKIRLQKSIISMSKQAKLDTEALRSECQKYQVSATKLAIYNFQVKAARLSEHARLHQLMIRVLGRLADFSMMWERDRQYLFLGLLYRRIGAENFILHRMADEIGIALPADAGLGLVADAGAATRRSGAISDMHVQAGFLPLWDPDFGFVREGDGAELTLLAVQDRELFMRYFGKLPEENPRDVRRREANEAEGFARPSTKNWNGSFRLPKRRIRNDFAHFNVISGKRRPNLTYLMNAIRSLMSHDRKMKNAVSKAVAEIVAEEGLEIRWQVRGDRLVDPTVIPMLESHLTMVRPKDGFDPRFHLPQASVRFTSMVKALFEFDQGGYRKTIPWKEGKKASRGQLGYPKEFIARIEQDETIHVPREVLAQCYKGLEQK

SEQ ID NO: 596 - protein, 1051 aa, Artificial
  Synthetic
MKITKMRVDGRTIVMERTSKEGQLVYEGIDGNKTTEIIFDKKKESFYKSILNKTVRKPDEKEKNRRKQAINKAINKEITELMLALLHQEVPSQKLHNLKSLNTESLTKLFKPKFQNMISYPPSKGAEHVQFCLTDIAVPAIRDLDEIKPDWGIFFEKLKPYTDWAESYIHYKQTTIQKSIEQNKIQSPDSPRKLVLQKYVTAFLNGEPLGLDLVAKKYKLADLAESFKVVDLNEDKSANYKIKACLQQHQRNILDELKEDPELNQYGIEVKKYIQRYFPIKRAPNRSKHARADFLKKELIESTVEQQFKNAVYHYVLEQGKMEAYELTDPKTKDLQDIRSGEAFSFKFINACAFASNNLKMILNPECEKDILGKGDFKKNLPNSTTQSDVVKKMIPFFSDEIQNVNFDEAIWAIRGSIQQIRNEVYHCKKHSWKSILKIKGFEFEPNNMKYTDSDMQKLMDKDIAKIPDFIEEKLKSSGIIRFYSHDKLQSIWEMKQGFSLLTTNAPFVPSFKRVYAKGHDYQTSKNRYYDLGLTTFDILEYGEEDFRARYFLTKLVYYQQFMPWFTADNNAFRDAANFVLRLNKNRQQDAKAFINIREVEEGEMPRDYMGYVQGQIAIHEDSTEDTPNHFEKFISQVFIKGFDSHMRSADLKFIKNPRNQGLEQSEIEEMSFDIKVEPSFLKNKDDYIAFWTFCKMLDARHLSELRNEMIKYDGHLTGEQEIIGLALLGVDSRENDWKQFFSSEREYEKIMKGYVGEELYQREPYRQSDGKTPILFRGVEQARKYGTETVIQRLFDASPEFKVSKCNITEWERQKETIEETIERRKELHNEWEKNPKKPQNNAFFKEYKECCDAIDAYNWHKNKTTLVYVNELHHLLIEILGRYVGYVAIADRDFQCMANQYFKHSGITERVEYWGDNRLKSIKKLDTFLKKEGLFVSEKNARNHIAHLNYLSLKSECTLLYLSERLREIFKYDRKLKNAVSKSLIDILDRHGMSVVFANLKENKHRLVIKSLEPKKLRHLGEKKIDNGYIETNQVSEEYCGIVKRLLEI

SEQ ID NO: 597 - protein, 1246 aa, Artificial
  Synthetic
MYMKITKIDGVSHYKEKEKGVLKGKDILNGKIEKIVKKRYDATIESKIYKEFIKLRKNRIEQNNEKSILELIKSNIDKNEKEIKTLLWKNFKIKEKNKNYDEYITDEIKLDNDIKIYESVESLYFLIKEIYLGQNNKKWNISKIDLEKIMEEDSDLIMLGYKLKKNIKEDDYPYLYRDKNGQESTSVYKLLKKLIEENKDRNQDIRKSQEYEKIRKNFEEYKNRKINLLVKSIKNNKINIQYINNEIKSHDNPREENIIKFFRKMIEEKNKPILKDKLKLFRLEVFFNEEFLEEIKKLLDSDDSDKSQNKKISELRGKIFNRIREEIKNNKNRDELENIYFLELKKYIENNLSHKKEKNKNSNNTGEEKSKKLYLKFLKKVLFIDDNNRISIEKLKSRIDDNFKNLLIQHVIEYGKIKYYVENDDYIRNIVKNGELKLETKDLEYIKTKETLIRKMAVLVSFAANSYYNLFGSASEDILGTEVVKNRRTNVIKVKSYIFKEKMLNYFFDSEDFDVNKTIEVLESISYSIYNIRNGVGHFNKLVLGKYKKKDISTNKRVEEDLNNNEEIKGYFIKKRGEIEKKIKERFLSNNLQYYYAKERIENYFEVYEFEILKEKIPFAPNFKRIIKKGENLLNNKKYEYFKNFDKNSVEEKKEFLKTRNFLLKELYYNNFYKEFLSKKEEFKKIVIEVKEEKKNRGNNKKSGVSFQSIDDYDTKINISDYIASIHKKEMERVEKYNEEKQKDTAKYIRDFVEEIFLTGFINYLEKDKRLHFLKEEFSILCNNNNVVDFNININEEKIKEFLKENDSKTLNLYLFFNMIDSKRISEFRNELIKYKQFTKKRLDEEKEFLGIKIELYETLIEFVILTREKLDTKKSEETDAWLVDKLYVKEKNECNEYEYKEYEEILKLFVDEKILNSKEAPYYATNNKTPILLSNFEKTRKYGTQSFLSEIQSNYKYSKVEKENIEDYNKKEEIEKKKKSNIEKLQDLKVELHKKWEQNKITEKEIKKYNDTIKEIREYNYLKNKEELQNVYLLHEILSDLLARNVAFFNKWERDFKFIVIAIKQFLRENDKEKVENFLNPLDNSKGKKVYFSVSKYKNTVENIDGIHKNFMNLIFLNNKFMNRKIDKMNCTIWVYFRNYIAHFLHLHTKNEKISLINQMNLLIKLFSYDKKVQNHILKSTKTLLEKYNIQINFEISNDKNEVFKYKIKNRLYSKKGKMLGKNNKFEILENEFLENVKAMLEYSE

SEQ ID NO: 598 - protein, 1373 aa, Artificial; identical to SEQ ID NO: 104
  Synthetic

SEQ ID NO: 599 - protein, 1287 aa, Artificial; identical to SEQ ID NO: 105
  Synthetic

SEQ ID NO: 600 - protein, 1412 aa, Artificial; identical to SEQ ID NO: 344
  Synthetic

SEQ ID NO: 601 - protein, 1358 aa, Artificial
  Synthetic
MKISKIKNSRPGISVAENKNEESLSRQSLLYYAPVKDGKIRLESKDLEQHVTECNEKAQKLYNVITPEINFYRDENRQKMVENLARNFNAVINNALRSIRNPKEKKEQRVEKEVAFILNLSKKSIKMKKDVFVKSTDLIVKFPENNKYNKKNDKGTGSKEAYIQKMISDLVLRKLKNTLRKEVKLENGYRMQMTEIIISLMSAICLYGNAESFDPAILKAFFEKVDSDYTKYKYVEQIVKSIESQSAKLKVVEKDGRHLLISANADHRKKKYVFEFMRMYAAADEKEKRELTEHIQDLIGLYLCGKAGYENAENRFSDMTESHNCICGKIEEILNELEKPENLSQKKKENLKNTTVKVMALKYRAAVNYLADEVGKTVLGEIREKKVRSCADLYWIEYIDSTVEKLLLKSRNKDGYRYEIGFLSKHIWKEWTQYISGKYIEMGKGVYHFAIPDLSGNLEGEPISICEVKPEYRNGVSGFDYERIRAEESLEREMEKYVLFAVNNFARAVTPEEEREKSGHEDVLLMKTLSEIEESQTKEERQKKHDNNVKNAITLYADADRRILQFFGGQSRFREKEDSLINLYSGEDLYKEIRKELYAIRNITFHYTTKADKDQTQKHDLAEYLFEEEFSDITELFREKYYANNVWKYYDVEVINTIMENIYCGRKYRAAQVPAFKNIISRPELPQVMNGFVKGNSLRRLMNCPDRDVINKYWSALFFVLKELYYYDFLQEQKKPEDNVKERFFRAIEKLSGQENDDKKQKAWESFGNRIDQIGRDRSFGAICQGLMIEYMLQNSDISMVQTETDNGKANNKKQIYKHYRTLLYNCIREAFIEYLREKWEELRTPVLTVKEWSKEEFCRADGLKHLSLFDHLKKTFNDAESGSSWYMAAHFINQKYLNHLLGSIRNYLQFTEDIEDRAISLGDCVDNKREEKNLRYRNTLEILEFVAQFCERTTNVMEDYFESNQEYAEYLSGFVDYNTTKKETDIEKALYSFCKQKFKVDGKEYMAGIYYDGENLIPNRNIIRANMYGNTSCLKPCMDRITLKEIRTMYADQNKLDLVLKEGVCHTEEEQKAYREYQNEKNRIELFDVCTYTQILNDMQARLIGWSYMRERDLMYYQLGYYYTKLFWTDSISEEDARRRLVGNLVNVEDGAILYQILAFNSYNLPIIANKNNTVTLLKDEGSIGGKAITAFFKNYENAEMIYEEALDLFENMDEHAAIINTRNYIEHFKYFIKSDRSMMDLYSEIYDRFFRHDHNRKKNVPDSLKNVLADNFMIVDIDMELGSKKVGEKKKGFREHKAARIEFTDSGIRSTDMTYTIKPDIKDNKKDKKVLVPARSEVFLKQFRKILEYRIQDKIQ

SEQ ID NO: 602 - protein, 1412 aa, Artificial; identical to SEQ ID NO: 453
  Synthetic

SEQ ID NO: 603 - protein, 1246 aa, Artificial; identical to SEQ ID NO: 597
  Synthetic

SEQ ID NO: 604 - protein, 1161 aa, Artificial
  Synthetic
MKVTKVDGISHKKYIEEGKLVKSTSEENRTSERLSELLSIRLDIYIKNPDNASEEENRIRRENLKKFFSNKVLHLKDSVLYLKNRKEKNAVQDKNYSEEDISEYDLKNKNSFSVLKKILLNEDINSEELEIFRKDVEAKLNKINSLKYSFEENKANYQKINENNVEKVGGKSKRNIIYDYYRESAKRNDYINNVQEAFDKLYKKEDIETLFFLIENSKKHEKYKIREYYHKIIGRKNDKENFAKIIYEEIQNVNNIKELIEKVPNMSELKKSQVFYKYYLDKEELNDKNIKYAFCHFVEIEMSQLLKNYVYKRLSNISNDKIKRIFEYQNLKKLIENKLLNKLDTYVRNCGKYNYYLQVGEIATSDFIARNRQNEAFLRNIIGVSSVAYFSLRNILETENENDITGRMRGKTVKNNKGEEKYVSGEVDKIYNENKQNEVKENLKMFYSYDFNMDNKNEIEDFFANIDEAISSIRHGIVHFNLELEGKDIFAFKNIVPSEISKKMFQNEINEKKLKLKIFRQLNSANVFRYLEKYKILNYLKRTRFEFVNKNIPFVPSFTKLYSRIDDLKNSLGIYWKTPKTNDDNKTKEIIDAQIYLLKNIYYGEFLNYFMSNNGNFFEISREIIELNKNDKRNLKTGFYKLQKFEDIQEKTPKKYLANIQSLYMINAGNQDEEEKDTYIDFIQKIFLKGFMTYLANNGRLSLMYIGNDEQINTSLAGKKQEFDKFLKKYEQNNNIEIPHEINEFLREIKLGKILKYTESLNMFYLILKLLNHKELTNLKGSLEKYQSANKEETFSDELELINLLNLDNNRVTEDFELEANEIGKFLDFNGNKIKDRKELKKFDTKKIYFDGENIIKHRAFYNIKKYGMLNLLEKIADKAKYKISLKELKEYSNKKNEIEKNYTMQQNLHRKYARPKKDEKFNDEDYKEYEKAIGNIQKYTHLKNKVEFNELNLLQGLLLKILHRLVGYTSIWERDLRFRLKGEFPENQYIEEIFNFDNSKNVKYKSGQIVEKYINFYKELYKDNVEKRSIYSDKKVKKLKQEKKDLYIRNYIAHFNYIPHAEISLLEVLENLRKLLSYDRKLKNAIMKSVVNILKEYGFVAKFKIGADKKIGIQTLESEKIVHLKNLKKKKLMTDRNSEELCKLVKVMFEYKMEEKKSEN

SEQ ID NO: 605 - protein, 1366 aa, Artificial; identical to SEQ ID NO: 284
  Synthetic

SEQ ID NO: 606 - protein, 1315 aa, Artificial; identical to SEQ ID NO: 366
  Synthetic

SEQ ID NO: 607 - protein, 1287 aa, Artificial; identical to SEQ ID NO: 105
  Synthetic

SEQ ID NO: 608 - protein, 1373 aa, Artificial; identical to SEQ ID NO: 104
  Synthetic

SEQ ID NO: 609 - protein, 1245 aa, Artificial
  Synthetic
MRIVRPYGRSFVDHDPGGALQRKVELRAPVSAEGGPRQLDLGHFALTHDELVIAQWVSCIDKIATKPREGREPSGDQREFRHHLGNAAWGHLETHGLLSGLRDPQKRARLAKLWQMKIAPYDFSARTRRSRGPQGVDAPAKGRWFGVFAGDVSVQEADCGAIVARIHEHLYESQYRLGEETPLRSAGLIARRAGAITTSVAPDAAKPSVATWSEADLARYRSAGDVACKIRRAAREREQGRDGAGTRRVTNSVAGKVLFDHWRALFSDEGGTVRSFRDVEGHDPGLAALHNAVRECYARILKRHKKKPPGRDAGPESSAILRALPRDMDALLTRIDSGRRNRDLAAKVRLGKLIHYTASDPAHDRAGAVAERWPGDVADSRYRTSAGQAEIKRNEAFVRVWRHVLVLAARTLENWADPENRINRDILSSGGAKAACEQFESSRFMHKCNVLFGERAGHFIGQDDAALQKAVLELALERLGQLRNRSFHFTGRGGFLEVLQQLGQPAEKAPCQSAHDRTMASLRALWRDDDEGRGGRLKATMTGAHFETFLDEAQIRRFFDQVSTGQEAEPPLPRFGRVLQRAKNTRDAQSDLRPHLPDPGNMRTLEDPARLCQYTALKLLYAKPFRTWLAEADSAVINPFIEAAVTRARREAQKIWAARTGHHGVDEEAKALIQPRMAMIGRLAPGENIQTLFFRMSAETATEMRVQAGYESDPDAAREQAEFIENLKCDVIAQAFMRFLDEAGFDFLLTLDARAARPESARFDLAMLDAAARAEEPQDWMLVLYFLLHLVPVDEAGRLLHQLRKWEILAGPEEAGARTGADAANSTLSGLYQVLDLYLDMHDAKFSGGAALYGARHFRNLFEDEADFDRLFPVADAGEEDKRIPLRGLREILRFGDRATLEAIYAQNRIRPAEVAEVLDLEAPDADGMSRIAGHHARREKLHAQWVEAKQSFDDDAVRDYFVALGQVVRHRHLAARARLVDHVRLHRLMMNVLGRLADFAGLWERDVYFVMLATLYEQGTSPAAVLNCEARRKLSQGRIVEVIRALKPVDGGALYAAITGHFPGFDTRRNDDPVQLRNNFAHFNMLRQGHMPDLTACVNRARRLMAYDRKLKNAVSKAVIELLAREGLTLSWRMDARGPQHDLTEARITARTATHLGGIRLTQRGGSTGSRPFPLTEALHGTGFARMVAQLFAGQDRPSRCVSQDDPTTIERAPARNTNRKESAKKRMKPGRDGGRRHEKSRRG

SEQ ID NO: 610 - protein, 1144 aa, Artificial
  Synthetic
MKLSIGGFMKVCKIGGTKFAAVPHGVLYGRNFGDNENPKSILNQKEDINNFVIKRLEEVKINGTVFTKLQNDESKHFSQEMERMYDDKKVFSLKDFLSLKAYTEKNKAFLNRQIEKTILPFFAVLQDKIGEVDLNKIDYKSAYSDEKTKNFQKELEFFRKKSKFIKEPKPYNAENITNSIIKQRTFVCYKNNQFCFNGNKNNFGLEAFLTKFAKNPKEIKDLFNMVKVELFGFLDDSSKDMPFIDLNKVNKSELDNIRNEKDKKEYLNKELSTLITNKLGELSGKIKKLKDQTNDLENKNFKLFWFYKSYEFTKALIKSVSKKYTYVFKRDYNKEEERKEKEKIKVERFTNQFVLNHVLGKLKNYICSKIIALGKALNLKYDTANKKLIENDLTSIDFETQKAYDSVKQSQYVAISFSKNTMINILKPQPQKEFFLESQSFAKNINDKYILFKGNINNGIECNFQEKDIEKYFFPNVFSGVNEVDFINESIEAIDSLRNDNFHFFESNANPTIYTIKEVVKKEIKKLNEVVIEKLNSVEAKRYFFVKDINNLINKAYENASSVLSYIPKFTSIFNQIKKEESFTSIISRIPSSEGAIEFLLEKLYYHNFLSIKNGTIIANEFFWEAIKKAKEKDFEHKKEIDIFCEVFGIDIESKTGFDSFNNLSCLISQEVSRLINDSNKDGEFIKIFFVKIISEAFLLFVNKNYSFVFNPQVIESQENFNISIIKTIDESAYSMYLLAKLIPNSTLNFLINDYRKYLQFFQDINLRSNSLNQNEIENTNETISKCLNIINALSLASEFKSYELSNFKDIDEKNKKTYELISPYIGCQEKSLKEFLSNPNYDGVYHDGTNIILQNHFSKLEFFGIEKLLTQIVKSSNYIVSIDEIKTYKNFQADKDVKLQSKKIENQDDINKYQNFIQNKNKVELHDIFSLNSLIIEAVSSLIECSYKWERDSFYFLFGLQYLLKNDLCDIFTIFDYNSTVNPATGEGKAVTKKLESFFSNSLIKNIYENFFGAFDSIRPIQKSIKSIKPIRNSIDHFDYIKKTNESIIEMFSDARKLNSYDIKIKNGIMPKLYHSLEKMQLKFHSDFVNKDVISIVIKPISSIFQKITENNSTKQQKEKAIYYTGKSESFSDLIGCFLKYKK

SEQ ID NO: 611 - protein, 1103 aa, Artificial
  Synthetic
MKISKIYGYSFLRNDEKGYIIQNKKDEDRTAVYLESSNPSKKYEDSNKETLERIKVSYINKIFKNSKGYDFKNDKIQTDKDKIYHALVELIYKENIDDTIKILQGVKVDNLGKNLSNDSKRIYTKYIVNDKERKLTLQDAFESVINNNPNAKDNLTKILEVLKNKIEKRKADIKKSIENNKTPFIVDSGNRIVYQSKKGNLINQLKKDMIKNGYSNFVKEIEEVEKKVNLEKFIEKFYQNDFDKIKYLSEFRNNFYCYKKELMKDSSISKDEINDKVYLLDLYLLTVEEYFKRILKTYNQKRNINTDIIKKNVVGKIKNALTQQMINEGKIIKYFNGIDVTKYHDGDTTNCQIGWIKKEFNSSDLIEINNNETTNRKIIEACVFATNNLANIMNLPNFVDILLKSNLKEQITSSNFEIENRRLAKLFFDIDFLKMTDDEYKDFLWAVRGSIQSIRNQAYHNTKNASNIIFNVQDYEIEDKTTKKFYEDNTYLKNLFKQEIKTFKLAIIEKFKGMKLFDYFTIEFLNSIFKNMTINPFDLQKNLPSFNKMIERGQNIIPQSFLKMTDYDVFSKNDDKDLAITNLHKVLYEYDFKHYFLSNATLFKTAVSKAIERKKKDIQNISKINLEVLKEFSGENAEDIQNYLADLQSAIMLKSLDIKDNKTNAYYLFLLDITSFGFDNYIKNNFKNFDLTNATQQTTVQTESTFEIKVADLKIDITNENIAFFTFAKLLNNDILNELQQKLIKFQQNNEFQNQIKILEVCKLKNDNLNQEDFNPTDYGYEEILKTFVSNDVLENKCLPYYDDKNPIIFKEIYLLIKYGTLRKISTIFKETDKVTSKDLQDLESAEKSIVQDIKNRDKLHNYIIENSNNLEINTLDSYIYFIEKVNDFVNLKNKVYLTQIYKMHTILCKVLAKPINFVGLWDKNFVNIVYSYCYEWIMTESEKGLFYEFVDAMNRGTQNFKNSADKLPTNIDVREFFEHIYLHKKDDNDNWRNIRNKYAHLDILKNGQVIDLKEIVTDLRKLFTYDRNSKNKITRSFKHLLERNNLDLDFEFNNDNTFKLSLSSKKILYFKNCKIPKLDDKKTTDFYSKDYVKKIKTLLNID

SEQ ID NO: 612 - protein, 1357 aa, Artificial; identical to SEQ ID NO: 289
  Synthetic

SEQ ID NO: 613 - protein, 1140 aa, Artificial
  Synthetic
MRGDYMKITKIDGISHKKYKEKGKLIKSNEIEKDVTEERFNDIEVKTTELFQKTLDFYVKNYEKCEEQNKERREKAKNYFSKVKLIVDNKKITIFNENTEKIEIEGFNEYDVRDEKYFNVLNKILKEENCTEEDLEVFENDLQKKLNQIQSIKNSLEENKAHFKKESVNNTADRVKGNNKKSLFYEYYRNSSKHQEYVNNIFEAFDKLYSNSHEDMNNLFSAITKDSNDRNIKKIREAYHEILNKNKIEFGEELYKKIQDNINNFDKLLEIEPEIKELTKSQIFYKYYIDKVSLDGTNIKHCFSHLVEIEVNQLLKNYVYSKRSTNKEKLENIFEYCKLKNLVKNKLVNKLNSYIRNCGKYNSYINNNDVVNSEKISEIRTKEAFLRSIIGVSSSAYFSLRNILNTDNTQDITNKVKGEVEKLYQENKKVKLEERLKLFFGNNFDINNQQEIEDFLMNIDKIISNIRHEIIHFKIEANAHSIFDFNNVTLGNKAKNIFNNEINEERIKFKIFKQLNSANVFDYLSDENITEYMGKVIFSFTNRNIPFVPSFRKIYNRVQDLANSLKIKEWKISDESEGKDAQIYLLKNIYYEEFLDEFLNEENGIFISIKDKIIELNRNQNKRTGFYKLEKFEKIEEKNPKKYLEIIQSLYMINIEEIDNEEKNIFLDFIQKIFLKGFFEFIKNNYNYLLELKKIQDKKNIFDSEMSEYIAGEKTLEDVGEINEIIQKIEIMKIDKILNLTDKINCFYLLLKLLNYKEITELKGNLEKYQILSKTDIYEKELILLNIVNLDNNKVKIEKFKISAEEIGKFIEKISRNKKIKTFEELRNFEKRENTGEYYNVYSDDKNIKNIRNLYNIKKYGMLDLLERISEKSNYCIKKEDLEEYSELRKQLEDEKTNFYKIQKDLHYEYQKKYKNFSKKNNPEDYEKYKESIKNIEKYVHLKNKIEFNELNLLQSLLLKILHRLVGFTSIWERDLRFRLIGEFPDELDVEDIFDHRERYRGTRGQICKKYDQFISVHIEYQNNNKMKNIKFDDNNPIRNYIAHFNYLPTPKYSILKMLGKLRELLDYDRKLKNAVMKSIKDILEEYGFKAEFVINPDKEIILNSVKSVEIIHLKKNDLNSHRNSEDLCKLVKAMLEYSE

SEQ ID NO: 614 - protein, 1360 aa, Artificial; identical to SEQ ID NO: 92
  Synthetic

SEQ ID NO: 615 - protein, 1168 aa, Artificial
  Synthetic
MKITKIDGISHKKYIKEGKLVKSTSEENKTDERLSELLTIRLDTYIKNPDNASEEENRIRRENLKEFFSNKVLYLKDGILYLKDRREKNQLQNKNYSEEDISEYDLKNKNSFLVLKKILLNEDINSEELEIFRNDFEKKLDKINSLKYSLEENKANYQKINENNIKKVEGKSKRNIFYNYYKDSAKRNDYINNIQEAFDKLYKKEDIENLFFLIENSKKYEKYKIRECYHKIIGRKNDKENFATIIYEEIQNVNNMKELIEKVPNVSELKKSQVFYKYYLNKEKLNDENIKYVFCHFVEIEMSKLLKNYVYKKPSNISNDKVKRIFEYQSLKKLIENKLLNKLDTYVRNCGKYSFYLQDGEIATSDFIVGNRQNEAFLRNIIGVSSTAYFSLRNILETENENDITGRIKGKTVKNNKGEEKYISGEIDKLYDNNKQNEVKKNLKMFYSYDFNMNSKKEIEDFFSNIDEAISSIRHGIVHFNLELEGKDIFTFKNIVPSQISKKMFHDEINEKKLKLKIFKQLNSANVFRYLEKYKILNYLNRTRFEFVNKNIPFVPSFTKLYSRIDDLKNSLCIYWKIPKANDNNKTKEITDAQIYLLKNIYYGEFLNYFMSNNGNFFEIIKEIIELNKNDKRNLKTGFYKLQKFENLQEKTPKEYLANMQSFYMIDAGNKDEEEKDAYIDFIQKIFLKGFMTYLANNGRLSLMYIGNDEQINTSLAGKKQEFDKFLKKYEQNNNIEIPHEINEFVREIKLGKILKYTESLNMFYLILKLLNHKEFTNLKGSLEKYQSANKEETFSDELELINLLNLDNNRVTEDFELEVNEIGKFLDFNGNKIKDNKELKKFDTNKIYFDGENIIKHRAFYNIKKYGMLNLLEKISDEAKYKISIEELKNYSNKKNEIEKNHTTQENLHRKYARPRKDEKFTDEDYKKYEKAIRNIQQYTHLKNKVEFNELNLLQSLLLRILHRLVGYTSIWERDLRFRLKGEFPENQYIEEIFNFDNSKNVKYKNGQIVEKYINFYKELYKDDTEKISIYSDKKVKELKKEKKDLYIRNYIAHFNYIPNAEISLLEMLENLRKLLSYDRKLKNAIMKSIVDILKEYGFVVTFKIEKDKKIRIESLKSEEVVHLKKLKLKDNDKKKEPIKTYRNSKELCKLVKVMFEYKMKEKKSEN

SEQ ID NO: 616 - protein, 1172 aa, Artificial
  Synthetic
MKVTKIDGLSHKKFERLEKLKEIKLGNYIKNPDKTKDKDNKKRRKELKEYFSEITLRKENGKYVLLKSKKLKKINNNIKDTDIKVKHKKEEVFDVLKEILQLNLLANDVEEKIQFDSIKLKNVFGKDFVKKELQIKSIEESLEKNKADYRKEFIETENNKYGNVKGENKKNCIYEYYKKSKTHEKFRKNITEAFEKLYTEENIKELYSKIEEVLKKTHLKSIVREFYQNEIIGESEFSEKGEDGISILYNQIIRSNEKKEKFVKFLENIENLQLKELTKSQIFYKYFLENEELDDENIKNVFCYFVEIEVNDLLKGNVYRVSKIYENKIKNIFEYNKLKKLVVNKLKNKLNNYVRNCGKYNYHMENGDIATSDINMRNRQTEAFLRSMIGVSSFGYFSLRNILGVNDDDFYEIEEDLTEDERKNESNVLKKAKEDITSKSIFEKVVDKSFEKKGIHSIRENVKMFYGVSFDKANEDELKQFFVNMLNAITSIRHRVVHYNMNTNSENIFNFSDIEVSRLLKNIFEKETDKRELKLKIFRQLNSAGVFDYWEDWKIEKYLKNIEFKFVNKNIPFVPSFTKLYNRIDNLKGSNALNLGFINIPKRKEARDSQIYLLKNIYYGEFVEKFVNNNDNFEKIFREIIEINKNAGTNTKTKFYKLEKFETLKANTPTEYLEKLQSLHQINYDKEKIEEDKDVYVDFVQKIFLKGFINYLQKSNSLKLLNLLNLKKDEVINSEKSSYDEKLKQWENNGSKLSEMPKEIYRYIKEININKTNYSDRMSIFYLLLKLIDHKELTNLRGNLEKYESMNKNKIYSEELNIVNLVSLDNNKVRTNFSVEAEDIGKFLKTETSIKNINQLNNFSGIFADGENVIKHRSFYNIKKYGILDLLEKIVAKADLKITKEEIKKYENLQNELKRNDFYKIQEKIHRKYNQKPNLISRTENKKDFNDYKKAIENIQNYTQLKNKIEFNDLNLLQSLLFRILHRLAGYTSLWERDLQFKLKGEFPEDKYIDEIFNSDGNNNQKYKNGGIADKYADFLIEKEEEKSGEILKKNQRNKRKKKIKEDLEIRNYIAHFNYFPDATKSILELLEELRELLKYDRKLKNAVMKSVKDIFKEYGFIVEFGISHESNSKKIKVCDVKSEEIKHLKNNGLVTTRNSEDLCELVKVMLEYKKS

SEQ ID NO: 617 - protein, 1150 aa, Artificial
  Synthetic
MGNLFGHKRWYKVDKTIEKDGKTNTIKKEVRIKRNYLTDRYILNTNNKDKNNINNEDFVNQFIEYKTNNDIFKKFTRKFHMGNILFKLKAKESKNKAVLEIRNYSHFLETEKAVLEIEIYQQSEKLIEEENITKKDIIDKAIKEKITEDSNEIKMQVKLKENKSKEIKISINKETEEYHIKLKSINNDELNLKREIYEILKSINANLYIITKNAISNADFKKRNYETFLKKSMGEYLRKNINKKPENTFLKSLSNSLKKIQNNIRENEEIINFIKYYSNINGNKTVSESKKTFLEKILNIEVSISENDIIDFIIGELKFYGIIKRIEKLQKEGNRTKTEIENTYIKSYVLLDKHEKFKKYNRNKKDEIVKLFVKDIHNNTMEEKINHILSKFKIKELTEKLKENTKNKNFDTEIFGIFKVHYQEMFSSEKFEEKSDEEKELYKIIYRYLKGRIEKILINEEKVRLKKMEKILINGEKIRLNKIEKIEIEKILNESILSEKILKRVKQYTLEYIMYLGKLVHNNIDMTTVNTNDFSKLHAKEELDLELITFFASTNMELNKIFSRENINNDENIDFFGGDREKNYVLDKKNLNSKIKIIRDLDFIDNKNNITNDFINKFTKIGTNERNRILHASGKKRDSQGTQDDYNKVINIIQNLKISDEEVSKVLNLDVVFKDKKNIITEINDIKISEKNSNDIKYLPSFSKVLPEILNLYRNNPKNEPFDTVETEKIVLNALIYVNKELYKKLILEDDLQENRSKNIFLQELKKTLGGTDEIDENIIENYYKNAQISASKGNNKAIKKYQKKIIECYIEYLRKNYEKLFDFSDFEMNIQEIKKQIKEINDNKTYKRITIKTSDKSIVINNDFEYIISIFALLNNNIVINKIRNRFFATSVWLNTSEYQNIIDILDEIMQINILKSEYITSNWKENLEEFIRKTKNKEIELHQSKKEFFDNNYKEIKKDMIVKINDNKIQKILNKYLKEITGFSSNNEYMFKNLGKLTLEERDFILSNKNNKKLIEKNIDEIIGEKLDAIKEKILLRKVFSSKFLEKYKKEIDNLVESTESKNENKFEKIYYPKEHKNELYIYKKNLFLNIGNPNFDKIYGLISKDIKNVDTKILFDDDIRKNKISEIDAILKNLNDKLNGYSNDYKA

SEQ ID NO: 618 - protein, 1432 aa, Artificial; identical to SEQ ID NO: 494
  Synthetic

SEQ ID NO: 619 - protein, 949 aa, Artificial; identical to SEQ ID NO: 43
  Synthetic

SEQ ID NO: 620 - protein, 1315 aa, Artificial; identical to SEQ ID NO: 366
  Synthetic

SEQ ID NO: 621 - protein, 1194 aa, Artificial
  Synthetic
MKVTKIDGLSHKKFEDEGKLVKFKNNKNINEIKERLKKLKELKLDNYIKNPENVKNKDKDAEKETKIRRTNLKKYFSEIILRKEDEKYILKKTKKFKNINQEIDYYDVKSKKNQQEIFDVLKEIKIKETEKEEIITFDSEKLKKVFGEDFVKKEAKIKAIEKSLKINKANYKKDSIKIGDDKYSNVKGENKRSRIYEYYKKSENLKKFEENIREAFEKLYTEENIKELYSKIEEVLKKTHLKSIVREFYQNEIIGESEFSKKNGDGISILYNQIKDSIKKEENFIEFIENIGNLELKDLTKSQIFYKYFLENEELNDENIKFAFCYSVEIEVNNLLKENVYKIKRFNEGNKKRIKNIFEYGKLKKLIVYKLENKLNNYVRNCGKYNYHMENGDIATSDINMRNRQTEAFLRSIIGVSSFGYFSLRNILGVNDDDFYEIEEGLTEEERKNESNVLKKAKEDITSKSIFEKVVDKSFEKKGIHSIRKNVKMFYGDSFDKANEDELKQFFVNMLNAITSIRHRVVHYNMNTNSENIFNFSDIEVSRLLKSIFEKETDKRELKLKIFRQLNSAGVFDYWENWKIEKYLKNIEFKFVNKNIPFVPSFTKLYNRIDNLKAGNALKLGNHIIIPKRKEARDSQIYLLKNIYYGEFVEKFVNNNDNFEKIFREIIKINKNAGTNTKTKFYKLEKFETLKANTPTEYLEKLQSLHKINYDKEKVEEDKDTYVDFVQKIFLKGFINYLQKSNSLKPLNLLNLKKDEVINSEKSSYDEKLKQWENNGSNLSEMPKEIYEYIKKIQINKINYSDRMSIFYLLLKLIDHKELTNLRGNLEKYESMNKNKIYSEELNIVNLVSLDNNKVRTNFSVEAEDIGKFLKTETSIKNNKQLNNFSEIFADGENVIKHRSFYNIKKYGILDLLEKIVAKADLKIAKEEIKKYENLQKELEKNDFYKIQEKIHRKYNQKPNLILRTENKKDFNDYKKAIENIQNYTQLKNKIEFNDLNLLQGLLFRILHRLTGYTSLWERDLQFKLKGEFPEDKYIDEIFNSDRNNNQKYKSGGIAYKYVDFLIEKEEGKRAGKNKVKKRSEKEGSFIIRNYIAHFNYIPDAEKSILEILEELRELLKYDRKLKNAVMKSIKDIFKEYGFIIEFGISHESNSKKIKVLNVESEKIKHLKNNGLVTTRNSKDLCKLVKVMLEYKKS

SEQ ID NO: 622 - protein, 1399 aa, Artificial
  Synthetic
MGNLFGHKRWYEVSDRGDNKIKRKVKVKRNYDGNKYILNINENNNKEKIDNNKFIREFVNYKKNDNVLIEFKRKFHAGNILFKLKGNKRSIEDSNDFLKTEEIILDKEVYGQSEKLRNEKGITKQDILKEIIDKGIDKSNDKILVKTKFGKEITINFTDEDKKNKKEYQITLKIIPENELKIKREVYNVFKIINMNLYQIIKRIIENKEIFKNRYYDEILKEKLSKNNQIINTLTNLNKIRKEIRDNRDNIIGFVKFYLNVSGDKKKSENKKMFVEKILNTNVDLTVEDIVDFIVKELKFWNITKRIEKVKKFNNEFLENRRNRTYIKSYVLLDKHEKFKIERENKKDKIVKFFVENIKNNSIKEKIEKILAEFKIDELTKKLEKELKKGNCDTEIFGIFKKHYKVNFDSKKFSNKSDEEKELYKIIYRYLKGRIEKILINEQKVRLKKMEKIEIEKILDESVLSEKILKRVKQYTLEHIMYLGKLIHNKINMATVNTNDFFRLHAKEELDLELITFFASTNMELNKIFSRENINNDENIDFFGGDREKNYVLDKKNLNSKIKIIRDLDFIDNKNNITNNFISKFTKIGTNERNRILHASSKERDLQGTQDDYNKVINIIQNLKISDEEVSKALNLDVVFKDKKNIITKINDIEISEENNSVIKYLPSFSKVLPEILNLYKNKNKNNPFDTTETERIILNALIYVNKELYKKLILEKNLEENESKNKFLKELKKNLGGTDEIDENIIESYYKNTQISASKGNNKAIKKYQKKIIECYIKYLEENYRELFDFSDFKMNIQEIKKQIKEINDNKTYKRITIKTSDKSIVINDDFEYIISIFALLNSNAVINKIRNRFFATSVWLDTSEYQNIINILDEIMQLNTLRNECITENWNLNLEEFIQKMKEIEKDFDDFKIQTKKDIFNGNYESIKNNVLSKFIGFSDVQKILEEKLNNLIDFENDNEIKKSVNLDSLNPDERRNLMPNINPKKGGIDLIKEIDKLIVIEKNNIEKNILLKIIFNSDFLEKYKKEIDNLIEDTESENKNKFEKIYYPEEHKNELYIYKKNLFLNIGNPNFDKIYELISKDIKNANTEILFNDDIRKNKIAEIDVILKNLNDKLNGYSKEYKEKYIKKLKENQENSDFFTKNIQNENYNSFEEFKEDYNKVSEYKKIRDLVEFNYLNKIESYLIDINWKLAIQMARFERDMHYIVNGLDYLYIIRLEKDRNQDRSSPYPKYKNGVLDYTKSYYNFKDYQEFMDICSKFGIDLSENSEINKPENESIRNYISHFYIVRNPFVDYSIAEQIDRVSNLLSYSTRYNNSTYASVFEVFKKDVDLDYDKLKTKFKLFDDEKNDDIKILEIKNLIESKKVSVLELESYNSDYIKNLIIELLTKVENKDEISS

SEQ ID NO: 623 - protein, 1161 aa, Artificial
  Synthetic
MKVTKVDGISHKKYIEEGKLVKSTSEENRTSERLSELLSIRLDIYIKNPDNASEEENRIRRENLKKFFSNKVLHLKDSVLYLKNRNEKNAVQDKNYSEEDISEYDLKNKNSFSVLKKILLNEDINSEELEIFRKDVEAKLNKINSLKYSFEENKANYQKINENNVEKVGGKSKRNIIYDYYRESAKYNDYINNVQEAFDKLYKKEDIENLFFLIENSKKHEKYKIRECYHKIIGRKNDKENFAKIIYEEIQNVNNMKELIEKVPDMSELKKSQVFYKYYLDKEELNDENIKYAFCHFVEIEMSKLLKNYVYKKPSNISNDKVKRIFEYQSLKKLIENKLLNKLDTYVRNCGKYNYYLQDGEIATSDFIARNRQNEAFLRNIIGVSSVAYFSLRNILETENENDITGRIKGKTVKNNKGEEKYISGEIDKLYDNNKQNEVKKNLKMFYSYDFNMDSKNEIEDFFSNIDEAISSIRHGIVHFNLELEGKDIFAFKNIVPSEISKKMFQNEINEKKLKLKIFRQLNSANVFRYLEKYKILNYLKRTRFEFVNKNIPFVPSFTKLYSRIDDLKNSLGIYWKTPKTNDDNKTKEIIDAQIYLLKNIYYGEFLNYFMSNNGNFFEISKEIIELNKNDKRNLKTGFYKLQKFEDIQEKTPKEYLANIQSLYMINAGNQDEEEKDTYIDFIQKIFLKGFMTYLANNGRLSLIYIGSDEETSTSLAEKKQEFDKFLKKYEQNNNIKIPYEINEFLREIKLGNILKYTERLNMFYLILKLLNHKELTNLKGSLEKYQSANKEETFSDELELINLLNLDNNRVTEDFKLEVNEIGKFLDFNGNKIKDRKELKKFDINKIYFDGENIIKHRAFYNIKKYGMLNLLEKIADKAGYKISIEELKKYSNKKNEIEKNHKMQENLHRKYARPRKDEKFTDEDYESYKQAIKNIEEYTHLKNKVEFNELNLLQGLLLRILHRLVGYTSIWERDLRFRLKGEFPENQYIEEIFNFENKKNVKYKSGQIVEKYIKFYKELHQNDEVKINKYSSANIKVLKQEKKDLYIRNYIAHFNYIPHAEVSLLEVLENLRKLLSYDRKLKNAIMKSVVDILKEYGFVATFKIGADKKIGIQTLESEKIVHLKNLKKKKLMTDRNSEELCKLVKVMFEYKMEEKKSEN

SEQ ID NO: 624 - protein, 1168 aa, Artificial
  Synthetic
LKVYYKYIELPLGGYAVKITNRKNVFNAKFYRNKDIGKLINTESFRDITDRTLDSLDFIRSYKGKIIKENAKPWFNKLAEYLVNEQCKDFDYPKFSEYLRRQDNLDKVLKDNLKPYGRKLRSLKYETRSLSEILLDNNSSNAEKELNHIKDTLQKIIEYKKKRLKTSINSNKFPFKLKENGTLWPNTKKGEWLYSFIEKEPDDVYKKLEEYARQFNYESFVSKLGESLVSASAEDPRQLAKTAEAVFQEYYKEEKNKHPNVSNYDFYLREVRAYIKHFFPIKVGKNVGASKRQKALANPKRLDGRCSAKNMEEHVRHGILNQLTALLIQHGKIVHYYKGKEDLTSNDLQKIQVEEAFKKQILSSVAFATSRLNYITDYYGESYEHQKSRSLNFFKPDIRTNGNSNPSGGDILSSKNTYYNDYLKNLKLQPDKSVNFLEKISSFLPIEFDANKPLRLPFEYPTTDLLPEQILLEEIKESINAVRNNIFHFKSGNFTQLIKKETQGDLKLKDSFGLSKAYLKYTVSQINISFSKRIESMNLPLYYSNEVIGKILNKLTFQLYPRQYSMTPSFKKIFQRGILIQIHYKNSKPFSWFVSFNKIEENQAFKNLLQLIYQHGFLSEVFKNDKIVLNCIDKVIDINKKETSTNSKNKHQYGYKFIDDFRKKNSIQNLDVFLQSLQAAISKIEDDILETGSEDVNYVQQFIQDLYAYAFHNYLEKNLKLHFEDIMHPLKQNLQEVEATLDKLKQIDIHTAFSCHNTLEELAPLYLFFALLDSSEINRLQQQFSRYRIAMKNEVHFNDIEDYAYNIEELLELVDFTGPDPKFTALWRNKSAENFSPFIEGNMPCYDNFYLSSDQNTPIYHRSMGMLNRSGVMGLYRIIFADSKRYRITKADYQIYTTQQNEEDGYKKIESLHIKANELHETIIKKANTAQYIEGEFEQYKKYIKEIYTYNFAKQTLTFETLYKVFQIHMEVLSRLIGFAEDWERDTFAYLTAIEDLKGNIVEPGNTLNKLFDRGNVIGKLKGKLNQAGKAYLKLFYRDKDLLNDIDIRNYIAHLNHLTQFSKDNTPAHSLIETINETRKLVSYDDKRQNAVTKAIIDIFKKNNLTLVFNRSNNSLQSFCIRSIQPVKIQHLKKVDGANKHQLFFPVRSELLASSLKTLMEYKHIKKK

SEQ ID NO: 625 - protein, 1143 aa, Artificial; identical to SEQ ID NO: 11
  Synthetic

SEQ ID NO: 626 - protein, 1268 aa, Artificial; identical to SEQ ID NO: 76
  Synthetic

SEQ ID NO: 627 - protein, 1388 aa, Artificial
  Synthetic
MKLSKVTYRVKDKNAKYKKEYNVRAAVANNSENAGGVLYHVPGVDLIDLREQMLDRDRSVRLLYNIFNHIQTGTKPKKWGNDETLSVDENERKAKEQNIKIMNYKWREACSEYIEKSQSTINSVLFYSYEESGYKTKRMNDNEAIIVKMQYENRLSHFTGGKLEDFVAYTLRNSLVVSRYDNQEFDSVNAMVVFINNIGNGNISDKDKKTICKLADLIRNDFSKLNPNVQSSQGANMVRSVRNQNMVVQPQGDKVSFPLVSDEGKNTVTNKNVEKKGLNEFLLNYANLDDEERMEKLRKLRRIIDVYFSSPSHYQKDMDISLSDNIDKTKFDVWKKHETGKKNTELFVDIPDELLTAETEKIKLDAVLEKKARKRLTDSIRKQNMICYRYTRAVVEKYNSTENLFFENDSINQYWIHHIENAVERILKSCKAETLFKLRRGYLTEKVWKDAINLISIKYIALGKVIYNFTVDDIWKDKKVKNLGSIDEKIKHGITSFDYEMIKAQEALQRELAVNVAFAANNLARAVCDMTNLKDKESDFLIWNKKDIANKLKNKDDMASVSVVLQFFGGKSSWDIDAFREAYKGNKYNYEVCFIDDLRKAVYAARNESFHFKTALVNNDIWNTEFFGKLFIKETEICLDIEKDRFYSNNLPVFYSDNDLKKMLDHLYNNKVSRAAQVPSYNSVMVRKYFPENITSTLKYQKPGYDEDTLEKWYSACYYLLKEIYYNSFLQSDEALALFEESVNNLKGDNKDQELAVKNFRNNYKNIKSSCTSFSQVCQMYMTEYNQQNNQFKKVRSSKDSIVDKPIYQHYKLLLKKVIANAFASYLQHNEELFGFIGKPLKVNCLKEIDKEQFLPEWTSKKYVSLCEEVRKSPELQKWYIVGKFLNSRSLNLMAGSMRSYIQYVNDIKRRADGIGNELHVIAQNLDVVNKWVQVIEVCLLLSSRVSNEFEDYFYDKDDYAAYLKSYVDFDNSDMPSEYSALVEFSDQGKVDLYVDPSNPKVNRNIVQSKLFAADYILRDIIEPVSKDEIEDFYNQKDEITTCKIKGAELTDEEQKKILKYQKLKNRVELRDVVEYGEIINELLGQLINWSFMRERDLLYFQLGFHYNCLRNDSAKPEEYKNLVLDDISIKDAILHQIIGVYVNGVAIYAPGKDKNKLESQCVKGRVGGKIGAFCGYSLYLKLAADTLYNAGLEVFEVLPEHEDIINLRNGIDHFKFYLGGYRSIISLYSEVFDRFFTYDMKYQKNVLNLLQNILLRHNVIIEPIFESGIKKIGKDTKPCAKLSIRSIISDSFEYKIKDGNLIADAKDKRYLETIKKILFYPEVEPEVRILSSKDSFEQNNQYGYMKEKSENNKNKKNKKNNGNIDEKKNSDGLTYNPFLNLPFELPE

SEQ ID NO: 628 - protein, 1155 aa, Artificial; identical to SEQ ID NO: 306
  Synthetic

SEQ ID NO: 629 - protein, 1382 aa, Artificial; identical to SEQ ID NO: 166
  Synthetic

SEQ ID NO: 630 - protein, 1140 aa, Artificial; identical to SEQ ID NO: 613
  Synthetic

SEQ ID NO: 631 - protein, 1382 aa, Artificial
  Synthetic
MKLSKEKHIRSAVANEEQNIGGVLYHVPGTDTIGLKDQMLIRDRDVKQLYNVFNQIQVGDKPKKWKNDEKLSPEENERRAQQKNIKMKNYKWREACSKYVESSQRTINDVLFYSYMEADKKIRNMRKNEDILIKMQEVTKLPKFSGGKLEDFVAYTLRKSLVVSKNSTQEFDSVAAMVVFLECIGKSNISDHEKEIVCKLLELIRKDFSKLDPNVEGSQGANIVRSVRNQNMIVQPQGDRFSFPQVSDKEKKTVTNKNVEKEGLNEFLLNYANLDDEKRAEILRKLRRILDVYFSAPNHYEKDMDITLSDNIDKEKFNVWKKYECGKKVTDLFVDIPDVLMEAEAENIKLDAVVEKRERKVLADRVRRQNIICYRYTRAVVEKYNSNESLFFENDAINQYWIHHIENAVERILKNCKAGKLFKLRMGYLAEKVWKDAINLISIKYIALGKAVYNFALDDIWKDKKDKELGIVDERIRNGITSFDYEMIKAYENLQRELSVDIAFSVNNLARAVCDMSNLGDKESDFLLWKRNDIADKLKNKDDMASVSAVLQFFGGKSSWDINIFKEAYKGKNKYNYEVRFIDDLRKAIYCARNENFHFKTALVNNEKWNTELFGKIFERETEFCLNVEKDRFYSNNLYMFYPVSELRNMLDQLYSRSVSRAAQVPLYNSVFIRKNFPEDISNVLRYQKPGYDADTLGKWYSACYYLLKEIYYNSFLQSDKALQLFEKSVKTLSWDDEEQKRAVDNFKNHFSDIKSACTSLAQVCQIYMTEYNQQNNQIKKVRSSNDSIFDQPIYQHYKVLLKKAIANAFAAYLKNNKDLFGFIGKPFKANEIREIDKEQFLPDWTSRKYESLCIEVSGSQELQKWYIVGKFLNARSLNLMAGSMRSYIQYVTDIKRRAASIGNELHVSVQDVEKVEKWVQVIEVCSLLAFRTSNQFEDYFNDKDDYARYLKSYVDFSNADMPSEYSALVDFSNEEQSDLYVDPKNPKVNRNIVYSKLFAADHILRDIVEPVSKDNIEEFYDQKAEIVYCKIKGKDITAEEQKAVLKYQKLKNRVELRDIVEYGEIINELLGQLINWSFMRERDLLYFQLGFHYNCLRNNSEKKEAYQKIEVNGDSIKDAILYQIIGMYVNGVAVYAPDEKGDILKEQCTKGGAGGKISAFNRYSEYLGLDKLTLYNAGLEIFEVVAEHDDIINLRNGIDHFKYYLGDYRSMLSIYSEVFDRFFTYDIKYQKNVLNLLQNILLRHNVIVEPVLESGFKTIGKQTTSGAKLSIRSIKSDTFQYKVKGGSLITDAKDERYLKTIRKILYYVENEEDNLKKSVVVTNADKYEKNKESDDQNKQKEKKNKDNKGKKNEETKSDAGKNNNERLSYNPFANLNFKLPN

SEQ ID NO: 632 - protein, 1188 aa, Artificial; identical to SEQ ID NO: 258
  Synthetic

SEQ ID NO: 633 - protein, 1107 aa, Artificial; identical to SEQ ID NO: 52
  Synthetic

SEQ ID NO: 634 - protein, 1388 aa, Artificial
  Synthetic
MKLSKVTYRVKDKNAKYKKEYNVRAAVANNSENAGGVLYHVPGVDLIDLREQMLDRDRSVRLLYNIFNHIQTGTKPKKWGNDETLSVDENERKAKEQNIKIMNYKWREACSEYIEKSQSTINSVLFYSYEESGYKTKRMNDNEAIIVKMQYENRLSHFTGGKLEDFVAYTLRNSLVVSRYDNQEFDSVNAMVVFINNIGNGNISDKDKKTICKLADLIRNDFSKLNPNVQSSQGANMVRSVRNQNMVVQPQGDKVSFPLVSDEGKNTVTNKNVEKKGLDEFLLNYANLDDEERMEKLRKLRRIIDVYFSSPSHYQKDMDISLSDNIDKTKFDVWKKHETGKKNTELFVDIPDELLTAETEKIKLDAVLEKKARKRLTDSIRKQNMICYRYTRAVVEKYNSTENLFFENDSINQYWIHHIENAVERILKSCKAETLFKLRRGYLTEKVWKDAINLISIKYIALGKVIYNFTVDDIWKDKKVKNLGSIDEKIKHGITSFDYEMIKAQEALQRELAVNVAFAANNLARAVCDMTNLKDKESDFLIWNKKDIANKLKNKDDMASVSVVLQFFGGKSSWDIDAFREAYKGNKYNYEVCFIDDLRKAVYAARNESFHFKTALVNNDIWNTEFFGKLFIKETEICLDIEKDRFYSNNLPVFYSDNDLKKMLDHLYNNKVSRAAQVPSYNSVMVRKYFPENITSTLKYQKPGYDEDTLEKWYSACYYLLKEIYYNSFLQSDEALALFEESVNNLKGDNKDQELAVKNFRNNYKNIKSSCTSFSQVCQMYMTEYNQQNNQFKKVRSSKDSIVDKPIYQHYKLLLKKVIANAFASYLQHNEELFGFIGKPLKVNCLKEIDKEQFLPEWTSKKYVSLCEEVRKSPELQKWYIVGKFLNSRSLNLMAGSMRSYIQYVNDIKRRADGIGNELHVIAQNLDVVNKWVQVIEVCLLLSSRVSNEFEDYFYDKDDYAAYLKSYVDFDNSDMPSEYSALVEFSDQGKVDLYVDPSNPKVNRNIVQSKLFAADYILRDIIEPVSKDEIEDFYNQKDEITTCKIKGAELTDEEQKKILKYQKLKNRVELRDVVEYGEIINELLGQLINWSFMRERDLLYFQLGFHYNCLRNDSAKPEEYKNLVLDDISIKDAILHQIIGVYVNGVAIYAPGKDKNKLESQCVKGRVGGKIGAFCGYSLYLKLAADTLYNAGLEVFEVLPEHEDIINLRNGIDHFKFYLGGYRSIISLYSEVFDRFFTYDMKYQKNVLNLLQNILLRHNVIIEPIFESGIKKIGKDTKPCAKLSIRSIISDSFEYKIKDGNLIADAKDKRYLETIKKILFYPEVEPEVRILSSKDSFEQNNQYGYMKEKSENNKNKKNKKNNGNRDEKKNSDGLTYNPFLNLPFELPE

SEQ ID NO: 635 - protein, 1167 aa, Artificial; identical to SEQ ID NO: 361
  Synthetic

SEQ ID NO: 636 - protein, 967 aa, Artificial
  Synthetic
LLRMKREKNITIMKISKVNHRRTAVALNGDKSELGGILYEAPVQKDKNGNYNDVIAETGKVVNEALDKKSRLYTPFNNQKVIIDKNLQRYANNLKRCYINFVKQYVNNKSFNYKAMQFIPDIQNPKTNDAVNYRTDRDNVYNKNKYYDKQTKSKSKKFIYEKIVIPQNEQNIVISALVNCSLRKSLRKDVSYKTKSGEIKTYNLPELVKKSMRFYCLEGQREPDEKEKYEMYILFSYMKEDKRTKNTDLLVKSISNQNTKVKVEDIDGNKLLKLSIADTKKKPLWEYLIKYADSSRQRELMYDIRKKIILYVAGIEEYENIKEDSGLSKVSWSKYNISDNKMFFDINSCTDKRKQNLEIKIREANIEHYRNASSKLCDDESIFWFQHFEGVIETLFSKKSKISEERLGCAYICDYLWKDFLSYLAAKYIDLGKGVYHFTMKDKLDMLNKNEAVTDLRFGIVSEKYEKGITSFDYERIKAEEELDRNIAAYVTFAADIFAKSVIKSDYRTKKDNNSDVLQYSDKEFRNSEVIRDNAEKNILQYWGGYSRWCTENSKLPENNKVSDFGKLDVSDLCIDIKKHLAGIRNSSVHYTTNIKNESAADGSNVKILFEKDLADINIIYADKYYSNNVWMFYSLEDINKLIAFLYKEKRVIRQVQIPSFSRILKRKAMQDVINEIFKDDFDENIVNPELKEKYRNSLYFMLKEIYYNAFIIQPELKEKFKDKIKTMKSELYNKLKTIDKKEYKALYCMLSNEESALKNFADRIYSVDGDNVSFADICKILMTDYNMQNQEKKNIESMEQKKKNKGKDENYKHFPLLLHKVLKELFIEYLKQTHELEFLRNNICIKSDVTMESFESQIKGVEIYKDLKEKIDKNNSLLDWYVIAHFLMPKQLNHLIGNIKNYIQFATNIDKRAESVKNLTESGMVKRIQYYDDIVRTLEFSAQYIGKISNNINDYFNSEDEYVSFL

SEQ ID NO: 637 - protein, 1425 aa, Artificial; identical to SEQ ID NO: 3
  Synthetic

SEQ ID NO: 638 - protein, 1382 aa, Artificial; identical to SEQ ID NO: 497
  Synthetic

SEQ ID NO: 639 - protein, 1363 aa, Artificial; identical to SEQ ID NO: 541
  Synthetic

SEQ ID NO: 640 - protein, 1384 aa, Artificial; identical to SEQ ID NO: 117
  Synthetic

SEQ ID NO: 641 - protein, 1197 aa, Artificial
  Synthetic
MKVTKIDGISHKKFEDEGKLVRYTGNFNIKNEMKERLEKLKELKLSNYVKNPENVKNKDKNKEKETKSRRENLKKYFSEIILRKKEEKYLLKKTRKFKNITEEINYDDIKKRENQQKIFDVLKELLEQRINENDKEEILNFDSVKLKEVFGEDFIKKESKIKAIEESLEKNRADYRKDYVELENEKYEDVKGQNKRSLVFEYYKNPENREKFKENIKYAFENLYTEENIKNLYSEIEEIFGKVHLKSKVRDFYQNRIIGESEFSEKDEEGISILYKQIINSVEKKEKFVEFLQKVKIKDLTRSQIFYKYFLENEELNDENIKYVFSYFVEIEVNKLLKENVYKTKKFNEGNKYRVKNIFNYDKLKNLVVYKLENKLNNYIRNCGKYNYHMENGCVATSDTNMKNRQTEAFLRSILGVSSFGYFSLRNILGVNDNDFYEIEEELTEDERKNENFILKKAKEDITSKNIFEKVVDKSFEKKGIYQIKENLKMFYGNSFDKVDKDELKKFFVNMLEAITSVRHRIVHYNINTNSENIFDFSNIEVSKLLKNIFEKEIDTRELKLKIFRQLNSAGVFDYWESWKIKKYLENIEFKFVNKNIPFVPSFTKLYNRIDNLKGNNALNLGYINIPKRKEAKDSQIYLLKNIYYGEFVEKFVNDNKNFEKIVKEIIEINRGAGTNKKTGFYKLEKFETLKANTPIEYLEKLQSLHKISYDKEKIEEDKDIYVDFVQKIFLKGFVNYLKKLDSLKSLNLLNLRKDETITDKKSFHDEKLKLWENSGSNLSKMPEEIYEYVKKIKISNINYNDRMSIFYLLLKLIDYRELTNLRGNLEKYESMNKNKIYSEELTIINLVNLDNNKVRTNFSLEAEDIGKFLKSSITIKNIAQLNNFSKIFADGENVIKHRSFYNIKKYGILDLLEKMIARADLKISKEEIKKYENLQNELKRNDFYKIQEQIHRNYNQKPFSIKKIENKKDFEKYKKVIEKIQDYTQLKNKIEFNDLNLLQSLIFRILHRLAGYTSLWERDLQFKLKGEFPEDKYIDEIFNSDGNNNQKYKHGGITDKYANFLIEKEEEKSGEILKKKQRKKKIKEDLEIRNYIAHFNYLPNAEKSILEILEELRELLKHDRKLKNAVMKSIKDIFKEYGFIVEFTISHTKNGKKIKVCSVKSEKIKHLKNNELITTRNSEDLCDLVKIMLEYKKLQK

SEQ ID NO: 642 - protein, 927 aa, Artificial
  Synthetic
MKVTKVDGISHKKYIEEGKLVKSTSEENRTSERLSELLSIRLDIYIKNPDNASEEENRIRRENLKKFFSNKVLHLKDSVLYLKNRKEKNAVQDKNYSEEDISEYDLKNKNSFSVLKKILLNEDINSEELEIFRKDVEAKLNKINSLKYSFEENKANYQKINENNVEKVGGKSKRNIIYDYYRESAKRNDYINNVQEAFDKLYKKEDIETLFFLIENSKKHEKYKIRECYHKIIGRKNDKENFAKIIYEEIQNVNNIKELIEKVPDMSELKKSQVFYKYYLDKEELNDKNIKYAFCHFVEIEMSQLLKNYVYKRLSNISNDKIKRIFEYQNLKKLIENKLLNKLDTYVRNCGKYNYYLQVGEIATSDFIARNRQNEAFLRNIIGVSSVAYFSLRNILETENENDITGRMRGKTVKNNKGEEKYVSGEVDKIYNENKQNEVKENLKMFYSYDFNMDNKNEIEDFFANIDEAISSIRHGIVHFNLELEGKDIFAFKNIAPSEISKKMFQNEINEKKLKLKIFRQLNSANVFRYLEKYKILNYLKRTRFEFVNKNIPFVPSFTKLYSRIDDLKNSLGIYWKTPKTNDDNKTKEIIDAQIYLLKNIYYGEFLNYFMSNNGNFFEISREIIELNKNDKRNLKTGFYKLQKFEDIQEKTPKEYLANIQSLYMINAGNQDEEEKDTYIDFIQKIFLKGFMTYLANNGRLSLIYIGSDEETNTSLAEKKQEFDKFLKKYEQNNNIKIPYEINEFLREIKLGNILKYTERLNMFYLILKLLNHKELTNLKGSLEKYQSANKEETFSDELELINLLNLDNNRVTEDFELEANEIGKFLDFNGNKIKDRKELKKFDTNKIYFDGENIIKHRAFYNIKKYGMLNLLEKISDEAKYKISIEELKNYSNKKNEIEKNHTTQENLHRKYARPRKDEKFTDEDY

SEQ ID NO: 643 - protein, 1182 aa, Artificial; identical to SEQ ID NO: 201
  Synthetic

SEQ ID NO: 644 - protein, 1167 aa, Artificial; identical to SEQ ID NO: 361
  Synthetic

SEQ ID NO: 645 - protein, 1286 aa, Artificial
  Synthetic
MKISKVDHVKSGIDQKLSSQRGMLYKQPQKKYEGKQLEEHVRNLSRKAKALYQVFPVSGNSKMEKELQIINSFIKNILFRLDSGKTSEEIVGYINTYSVASQISGDHIQELVDQHLKESLRKYTCVGDKRIYVPDIIVALLKSKFNSETLQYDNSELKILIDFIREDYLKEKQIKQIVHSIENNSTPLRIAEINGQKRLIPANADNPKKSYIFEFLKEYAQSDPKGQESLLQHMRYLILLYLYGPDKITDDYCEEIGAWNFGSIVMDNEQLFSEEASMLIQDRIYVNQQIQEGRQSKDTAKVKKNKSKYRMLGDKIEHSINESIVKHYQEACKAVEEKDIPWIKYISDHVMSVYSSKNRVDLDKLSLPYLAKNTWNTWISFIAMKYVDMGKGVYHFAMSDVDKVGKQDNLIIGQIDPKFSDGISSFDYERIKAEDDLHRSMSGYIAFAVNNFARAICSDEFRKKDKKEDVLTVGLDKMPLDDNVKRKLLQYFGGASNWDDSIMDIIDDKDLAACIKENLYVARNVNFHFAGSEKVQKKQDDILEEIVRKETGDIGKHYRKVFYSNNVAVFYRDEDIIKLMNHLYQKEKPYQAQIPSYNKVISKTYLPDLIFMLLKGKNRTKISDPSIMNMFRGTFYFLLKEIYYNDFLQASNLKEMFCEGLKNNVKDKKSEKPYQNFMQRFEELENMGMDFGEICQQIMTDYEQQNKQKKKTATAVMSEKDKKIRILDNDIQKYKHFRTLLYVGLREAFIIYLKDEKNKEWYEFLREPVKREQPEEEEFVNKWKLNQYSDCSELILKDPLAAAWYVAAHFINQAQLNHLIGDIKNYIQFISDIDRRAKSTGNPVSESTEIQIERYRQILRVLEFAKFFCGQITNVLTDYYEDENDFSTHVGHYVKFEKKNMEPAHALQAFSNSLYACGKEKKKAGFYYDGMNPIVNRNITLASMYGNKKLLENAMNPVTEQDIRKYYSLMAELDSILKNGAVCKSEDEQKNLRHFQNLKNRIELVDVLTLSELVNDLVAQLIGWAYIRERDMMYLQLGLHYIKLYFTDSVSDDSYLRTLDLEEGSIADGAVLYQIASLYSFNLPMYVKPNESSVYCKKHANSVAAKFRIFEKEYCNTNGKTDGTVIENGLCLFENIKLHGDLAEFRDYLAHFKYFAKLDKSILELYSKVYDSFFSYNIKLKKSVSYVFTNILLSYFINAKLSFSLCGISDYKPSRNKIVQRRSANISIESVQTDYFTYKLRSIVKNKNGVESIENDERKCEVVNIAARDKEFVNEVCKVINYNSDR

SEQ ID NO: 646 - protein, 1364 aa, Artificial
  Synthetic
MPRGMQMKISKIKNSRPGISVAENKNEESLSRQSLLYYAPVKDGKIRLESKDLEQHVTECNEKAQKLYNVITPEINFYRDENRQKMVENLARNFNAVINNALRSIRNPKEKKEQRVEKEVAFILNLSKKSIKMKKDVFVKSTDLIVKFPENNKYNKKNDKGTGSKEAYIQKMISDLVLRKLKNTLRKEVKLENGYRMQMTEIIISLMSAICLYGNAESFDPAILKAFFEKVDSDYTKYKYVEQIVKSIESQSAKLKVVEKDGRHLLISANADHRKKKYVFEFMRMYAAADEKEKRELTEHIQDLIGLYLCGKAGYENAENRFSDMTESHNCICGKIEEILNELEKPENLSQKKKENLKNTTVKVMALKYRAAVNYLADEVRKTVLGEIREKKVCSCADLYWIEYIDSTVEKLLLKSRNKKRYRYEIGFLSKHIWKEWTQYISGKYIEMGKGVYHFAIPDLSGNLEGEPISICEVKPEYRNGVSGFDYERIRAEESLEREMEKYVLFAVNNFARAVTPEEEREKSGHEDVLLMKTLSEIEESQTKEERQKKHDNNVKNAITLYADADRRILQFFGGQSRFREKEDSLINLYSGEDLYKEIRKELYAIRNITFHYTTKAEKDQTQKHDLAEYLFEEEFSDITELFREKYYANNVWKYYDAEVINTIMENIYCGRKYRAAQVPALKNIISRPELPQVMNGFVKGNSLRRLMNCPDRDVINKYWSALFFVLKELYYYDFLQEQKRPEDNVKERFFRAIKKLSGQEKGDKEQKAWESFENRIDQIGRDRSFGAICQGLMIEYMLQNSDISMVQTETDNGKANNKKQIYKHYRTLLYNCIREAFIEYLREKWEELRTPVLTVKEWSKEEFCRVDGLKHLSLFDHLKETFNDAESGSSWYMAAHFINQKYLNHLLGSIRNYLQFTEDIEDRAISLGDCVDNKREEKNLRYRNTLEILEFVAQFCERTTNVMEDYFESNQEYAEYLSGFVDYNTTKKETDIEKALYSFCKQKFKVDGKEYMAGIYYDGENLIPNRNIIRANMYGNTSCLKPCMDRITLKEIRTMYADQNKLDLVLKEGVCHTEEEQKAYREYQNEKNRIELFDVCTYTQILNDMQARLIGWSYMRERDLMYYQLGYYYTKLFWTDSISEEDARRRLVGNLVNVEDGAILYQILAFNSYNLPIIANKNNTVTLLKDEGSIGGKAITAFFKNYENAEMIYEEALDLFENMDEHAAIINTRNYIEHFKYFIKSDRSMMDLYSEIYDRFFRHDHNRKKNVPDSLKNVLADNFMIVDIDMELGSKKVGEKKKGFREHKAARIEFTDSGIRSTDMTYTIKPDIKDNKKDKKVLVPARSEVFLKQFRKILEYRIQDKIQ

SEQ ID NO: 647 - protein, 1358 aa, Artificial; identical to SEQ ID NO: 594
  Synthetic

SEQ ID NO: 648 - protein, 1102 aa, Artificial
  Synthetic
MRVSKVKVDNKNMVLMRRTTGNGALVYEGETSNRTIEILPKQKIQSFSLSIENKTLIKRDSLKGTVQKNKYDVIRAIIKYNRFPDRISAEEVLPFLNHKFQNEIKYYNDNKLHSFLLTSLIVEAVKEKNPQKLQPYFDWEEWYISNKSNALIKSIENNKIDSEKKDSKRKKTLQTWAAEYTDNGSIDLSEYHNIYDIDTLVRALIKADKGELKEDGTPKNANAFHRNLKRTLQDHQKTVFGTREASNMTNRENDQLAVYHLEVVKYLEHYFSVKSTQRRNTRADIDYYLKAETIKNIITKQLLNAVRNYLLQQGKAQHHKFAEIKPDSNSLTEIKRNEAFVLNMIDACGFAANNIRNIVDAEQINDILSKKEYVQSLDSNRVNNQLFKFFFGTDLPETATDKVKTLWAMRGAVQQIRNKVVHYKQKALDAIFNVTDFEYPSFNNSIYTDTIYKDCLETELQKLPEAFAQQLKTGGALTYYPFDDLKTLLNKVAFSLCRSVVPFAPGFKKVQKQGQNYQNAHKENFYNLDLKSYLPKEKFDEEAYNARYFLLKLIYNNLFLSDFTGNREQFSATVNYILKRNKKQAENSRRPKAYAFEAVRQMKKEESITSYMAYAQNQLMVEKNKKEDDKPEDIRINFEKFVLQVFIKGFDDFLLNEKFKFIATPCFQLSKENTKQQQADVLNQFEQRIIKECRFQSHTIKAEEAKHVAFFTFCKLLDATHLSNLRNELIKFKQSSKQFELCHVLEIIELSLLNADVVPADYRELYANKVTCLNRVRPFIADGVDITKWSGLFIQTDNETPVIHANVELTVKYGTTKLLEQLIAKGASFKLSESDFNLWNSAKDTIKEVINKRLSLHKQWEDAIRKDKEEKNKRVKTRSNFAQQFINKERDSYFDLCDYIDAYNWYDSKLHFVNLIRLHHLTIDILGRMVGFVAIWERDFQYMTESISPMNSSKELDFTKGFPLLKGIQLDYYKRIFLSGNYRDIRNYIAHFNYLTDSKFSMIDLINELRELLSYDRKLKNAVNKAFIDLFDKQGMVLKLKLNDAHRFEIESVEPKLLYHLGTTPARDPISTYQVKPQYCDMCKALLEIKNSSRLNNVIISL

SEQ ID NO: 649 - protein, 1388 aa, Artificial
  Synthetic
MKLSKVTYRVKDKNAKYKKEYNVRAAVANNSENAGGVLYHVPGVDLIDLREQMLDRDRSVRLLYNIFNHIQTGTKPKKWGNDETLSVDENERKAKEQNIKIMNYKWREACSEYIEKSQSTINSVLFYSYEESGYKTKRMNDNEAIIVKMQYENRLSHFTGGKLEDFVAYTLRNSLVVSRYDNQEFDSVNAMVVFINNIGNGNISDKDKKTICKLADLIRNDFSKLNPNVQSSQGANMVRSVRNQNMVVQPQGDKVSFPLVSDEGKNTVTNKNVEKKGLNEFLLNYANLDDEERMEKLRKLRRIIDVYFSSPSHYQKDMDISLSDNIDKTKFDVWKKHETGKKNTELFVDIPDELLTAETEKIKLDAVLEKKARKRLTDSIRKQNMICYRYTRAVVEKYNSTENLFFENDSINQYWIHHIENAVERILKSCKAETLFKLRRGYLTEKVWKDAINLISIKYIALGKVIYNFTVDDIWKDKKVKNLGSIDEKIKHGITSFDYEMIKAQEALQRELAVNVAFAANNLARAVCDMTNLNDKESDFLIWNKKDIANKLKNKDDMASVSVVLQFFGGKSSWDIDAFREAYKGNKYNYEVCFIDDLRKAVYAARNESFHFKTALVNNDIWNTEFFGKLFIKETEICLDIEKDRFYSNNLPVFYSDNDLKKMLDHLYNNKVSRAAQVPSYNSVMVRKYFPENITSTLKYQKPGYDEDTLEKWYSACYYLLKEIYYNSFLQSDEALALFEESVNNLKGDNKDQELAVKNFRNNYKNIKSSCTSFSQVCQMYMTEYNQQNNQFKKVRSSKDSIVDKPIYQHYKLLLKKVIANAFASYLQHNEELFGFIGKPLKVNCLKEIDKEQFLPEWTSKKYVSLCEEVRKSPELQKWYIVGKFLNSRSLNLMAGSMRSYIQYVNDIKRRADGIGNELHVIAQNLDVVNKWVQVIEVCLLLSSRVSNEFEDYFYDKDDYAAYLKSYVDFDNSDMPSEYSALVEFSDQGKVDLYVDPSNPKVNRNIVQSKLFAADYILRDIIEPVSKDEIEDFYNQKDEITTCKIKGAELTDEEQKKILKYQKLKNRVELRDVVEYGEIINELLGQLINWSFMRERDLLYFQLGFHYNCLRNDSAKPEEYKNLVLDDISIKDAILHQIIGVYVNGVAIYAPGKDKNKLESQCVKGRVGGKIGAFCGYSLYLKLAADTLYNAGLEVFEVLPEHEDIINLRNGIDHFKFYLGGYRSIISLYSEVFDRFFTYDMKYQKNVLNLLQNILLRHNVIIEPIFESGIKKIGKDTKPCAKLSIRSIISDSFEYKIKDGNLIADAKDKRYLETIKKILFYPEVEPEVRILSSKDSFEQNNQYGYMKEKSENNKNKKNKKNNGNRDEKKNSDGLTYNPFLNLPFELPE

SEQ ID NO: 650 - protein, 1418 aa, Artificial
  Synthetic
MKLTKVEKARIAVSREKKDSGRIILYTNPEDVKKTSVTTMEQQVSKRIDQANKLYQVFFKSVIPVELNKHFAEISKIAAKCRNTEEFYKKACGYSGYEWTDAKQKKRTSQISRFSYTSSGKNMYVVMDNFVKEYMVQIWQEKDFRNAAVKILCCICDGKKFASKLEKVKKESPDTLKKFIEISGKCEGNPFVDYDTSFLEKVFTLVISQMVKNCDRKSYEQDDKEKIKKSIQKEIQWLSHVQSVTERSFGREGKTYLLFKIRNPYATEERLQTVLIRMRKTLKRGRNRDIAIVLLQGLAQMNQVTFTDTVKHLYQEEEKAFCDFIDAVNRDYYRVNIVKSVRNMDVKVQPDLNDNSILKLSGLGNIKKEALSDTLLRYAASADESDQVLLDIKKLLFEYFLPENSKETSKYTTVQNLWNIPYLPKIFFDYGFENEDSDDDNECAEDIETLCDVEPQYKINQHSLKRRIRYVNYGKYLQMTKNESDRERRYWIHYIKEFVEKNYVDSGRTLSEKNCYASSMMLNCWKEIIRYLCGKYIDIGKAVFHFTNLTAMPKPKDKIIYGQLEEQYKKGISSFDYEAIKAEETLQRDIVQSVVAAAFAFSKSVIDETKMEECQETNKEDILFLSENVLGSLLKENTIKLILRFYGGESSVAQKEYFDQQEIVQEMISHLKSIRNENFHYLDGAKKDNPHKYASILWKNDEMAYQKLTKQRYYANNVGLFYRAEEIQELVQELYSQKNITEAQIPAFRTVLKRKDLPGYMEELGILFPDNTQEKSKGDFEGTLYFLMKEIYYRDFIVKDKAAAYFFKAVDQNKEQSKKEDKHTERAAENFHRYVKSLEKKYNKKEISFGTVCQYIMMEYNQQNTTKQETEIYKHFKMLISLCIRKAFGNYIKETYRFLFHPIYSKQQGEPEYLDTLELESGVKEKNYEWFTLAHFLHPVQLNHLVGDLKSYIQYREDILRRIVFAEQRVYADQQKEVQQKVKTAKEILEVLEFVREVSGRVSNEYTDYYENEEEYAEFLYQYIDFRKREGKSAFESLKYFCQNILDSGTVVDLYADTENPKVLRNIELTRMYAGSNVKIPEYEKITEDEIKMYYQEKNSVALILSRGLCRNEKEQKKVIEFNWKKKRLTLNEITDVFSLVNDLLGKMISFSYLRERDQMYLLLGFYYMALCAENKSENHLGWKGETLDKLESSDSKFDIGGGLVLYQIVSAFNFGSKLLYISEDGRWKMAGGAFPGKYGRFENDYNHRTSLSKVIRLFENESYEREIIYWRDYVDHMKYYVNQNQSIMEIYSAFYSKVLGYSAKLRKSVVFNLQAALEKHHINPECIWMTSDGKCADIKLMKNLESQKFTYKLAKREGEKTERKICMNALNENFLKTIKDGTHENSFIIAEIKIFFEPVLDAIVNKKDGGKINVIIY

SEQ ID NO: 651 - protein, 1167 aa, Artificial; identical to SEQ ID NO: 361
  Synthetic

SEQ ID NO: 652 - protein, 1102 aa, Artificial; identical to SEQ ID NO: 648
  Synthetic

SEQ ID NO: 653 - protein, 1225 aa, Artificial; identical to SEQ ID NO: 394
  Synthetic

SEQ ID NO: 654 - protein, 1225 aa, Artificial; identical to SEQ ID NO: 394
  Synthetic

SEQ ID NO: 655 - protein, 1387 aa, Artificial; identical to SEQ ID NO: 93
  Synthetic

SEQ ID NO: 656 - protein, 1102 aa, Artificial; identical to SEQ ID NO: 648
  Synthetic

SEQ ID NO: 657 - protein, 1382 aa, Artificial; identical to SEQ ID NO: 531
  Synthetic

SEQ ID NO: 658 - protein, 1143 aa, Artificial; identical to SEQ ID NO: 11
  Synthetic

SEQ ID NO: 659 - protein, 1403 aa, Artificial
  Synthetic
MGNLFGYKRWYEVSDRGDNKIKRKVKIKRNYDGNKYILNINENNNKEKIENNEFIREFVNYKKNDNVLREFKRKFHAGNILFKLKGNKRSIGDSNDFLKTEEIILDKEVYGQSEKLRNEKGITKQDILKEIIDKGIDKSNDKILVKTKLGKEITINFTDEDKKNKKEYQITLKIIPENELKIKREVYNVFKIINMNLYQIIKGIIENKEIFKNRYYDEILKEKLSKNNQIINTLTNLNKIRKEIRDNRDNIIGFVKFYLNVSGDKKKSENKKMFVEKILNINVDLTVEDIVDFIVKELKFWNITKRIEKVKEFNNKFLENKRNRTYIKSYVLLDKHEKFKIERENKKDKIVKFFVENIKNNSIKEKIEKILAEFKIDELTKKLEKGNCDTEIFGIFKKHYKVNFDSKKFSNKSDEEKELYKIIYRYLKGRIEKILINEEKVRLKKMEKIEIEKILNESILSEKILKRIKQYTLEHIMYLGKLVHNKINMATVNTNDFFRLHAKEELDLELITFFASTNMELNKIFSRENINNDENIDFFGGDREKNYVIDKKNLNSKIKIIRDLDFIDNKNNITNDFINKFTKIGTNERNRILHASGKKRDSQGTQDDYNKVINIIQNLKISDEEVSKALNLDVVFKDKKNIITEINDIKISEENSNDIKYLPSFSKVLPEILNLYRNNPKNKPFDTIETEKIVLNALIYVNKELYKKLILEDDLKKNRSENIFLQELKKTLGNIDETDENIIENYYKNAQISASKGNNKVIKKYQKKVIECYIGYLRKNYEKLFDFSDFKMNIQEIKKQIKDINDNKTYERITIKTSDKSIVINDDFEYIISIFALLNSNTIINKIRNRFFATSVWLEKQNSTKEYDYENIISILDEIMQLNTLRNECITENWNLNLEEFIQKMKDIEKEFEDFKIQTKKDIFNSNYEGIKNNVLNKFIGFSDVQKILEEKLNKLIEFENDNEIKKSVNLDSLDSDERRKLMPNINPKKGGIDLIKEIDKLIMIEKNNIEKNILLKIIFNSDFLEKYKEEIDNLVECTESKNENKFEKIYYPEEHKNELYIYKKNLFLNIGNPNFDKIYELISKDIKNANTEILFNDDIRNNKIAEIDVILKKLNDKLSGYSKEYKEKYIKKLKENQENNDFFSKNIQNENYSSFREFKKDYNKVSEYKKIRDLVEFNYLNKIESYLIDINWKLAIQMARFERDMHYIVNGLRELGIIKLNGYNTGISRAYPKRNGTGDFYITTAYYKFFDEESYKKFEKICYGFGIDLSENSEINKPENESIRNYISHFYIVRNPFVDYSIAEQIDRVSNLLSYSTRYNNSTYASVFEVFKKDVDLDYDKLKTKFKLFDDEKNDDIKILKIEDLIESKKVSVLELESYNSNYVKNLIIKLLTKVENTNNTL

SEQ ID NO: 660 - protein, 911 aa, Artificial
  Synthetic
LKWRKNMKLSKVTYRVKDKNAKYKKEYNVRAAVANNSENAGGVLYHVPGVDLIDLREQMLDRDRSVRLLYNIFNHIQTGTKPKKWGNDETLSVDENERKAKEQNIKIMNYKWREACSEYIEKSQSTINSVLFYSYEESGYKTKRMNDNEAIIVKMQYENRLSHFTGGKLEDFVAYTLRNSLVVSRYDNQEFDSVNAMVVFINNIGNGNISDKDKKTICKLADLIRNDFSKLNPNVQSSQGANMVRSVRNQNMVVQPQGDKVSFPLVSDEGKNTVTNKNVEKKGLNEFLLNYANLDDEERMEKLRKLRRIIDVYFSSPSHYQKDMDISLSDNIDKTKFDVWKKHETGKKNTELFVDIPDELLTAETEKIKLDAVLEKKARKRLTDSIRKQNMICYRYTRAVVEKYNSTENLFFENDSINQYWIHHIENAVERILKSCKAETLFKLRRGYLTEKVWKDAINLISIKYIALGKVIYNFTVDDIWKDKKVKNLGSIDEKIKHGITSFDYEMIKAQEALQRELAVNVAFAANNLARAVCDMTNLKDKESDFLIWNKKDIANKLKNKDDMASVSVVLQFFGGKSSWDIDAFREAYKGNKYNYEVCFIDDLRKAVYAARNESFHFKTALVNNDIWNTEFFGKLFIKETEICLDIEKDRFYSNNLPVFYSDNDLKKMLDHLYNNKVSRAAQVPSYNSVMVRKYFPENITSTLKYQKPGYDEDTLEKWYSACYYLLKEIYYNSFLQSDEALALFEESVNNLKGDNKDQELAVKNFRNNYKNIKSSCTSFSQVCQMYMTEYNQQNNQFKKVRSSKDSIVDKPIYQHYKLLLKKVIANAFASYLQHNEELFGFIGKPLKVNCLKEIDKEQFLPEWTSKKYVSLCEEVRKSPELQKWYIVGKFLNSRSLNLMAGSMRSYIQYV

SEQ ID NO: 661 - protein, 1432 aa, Artificial; identical to SEQ ID NO: 494
  Synthetic

SEQ ID NO: 662 - protein, 1167 aa, Artificial; identical to SEQ ID NO: 361
  Synthetic

SEQ ID NO: 663 - protein, 1388 aa, Artificial; identical to SEQ ID NO: 103
  Synthetic

SEQ ID NO: 664 - protein, 1167 aa, Artificial; identical to SEQ ID NO: 361
  Synthetic

SEQ ID NO: 665 - protein, 1161 aa, Artificial; identical to SEQ ID NO: 604
  Synthetic

SEQ ID NO: 666 - protein, 1135 aa, Artificial
  Synthetic
MKITKIDGISHKKYKEKGKLIKSNEIEKDVTEERFNDIEVKTTELFQKTLDFYVKNYEKCEEQNKERREKAKNYFSKVKLIVDNKKITIFNENTEKIEIEGFNEYDVRDEKYFNVLNKILKEENCTEEDLEVFENDLQKKLNQIQSIKNSLEENKAHFKKESVNNTADRVKGNNKKSLFYEYYRNSSKHQEYVNNIFEAFDKLYSNSHEDMNNLFSAITKDSNDRNIKKIREAYHEILNKNKIEFGEELYKKIQDNINNFDKLLEIEPEIKELTKSQIFYKYYIDKVSLDGTNIKHCFSHLVEIEVNQLLKNYVYSKRSTNKEKLENIFEYCKLKNLVKNKLVNKLNSYIRNCGKYNSYINNNDVVNSEKISEIRTKEAFLRSIIGVSSSAYFSLRNILNTDNTQDITNKVKGEVEKLYQENKKVKLEERLKLFFGNNFDINNQQEIEDFLMNIDKIISNIRHEIIHFKIEANAHSIFDFNNVTLGNKAKNIFNNEINEERIKFKIFKQLNSANVFDYLSDENITEYMGKVIFSFTNRNIPFVPSFRKIYNRVQDLANSLKIKEWKISDESEGKDAQIYLLKNIYYEEFLDEFLNEENGIFISIKDKIIELNRNQNKRTGFYKLEKFEKIEEKNPKKYLEIIQSLYMINIEEIDNEEKNIFLDFIQKIFLKGFFEFIKNNYNYLLELKKIQDKKNIFDSEMSEYIAGEKTLEDVGEINEIIQKIEIMKIDKILNLTDKINCFYLLLKLLNYKEITELKGNLEKYQILSKTDIYEKELILLNIVNLDNNKVKIEKFKISAEEIGKFIEKISRNKKIKTFEELRNFEKRENTGEYYNVYSDDKNIKNIRNLYNIKKYGMLDLLERISEKSNYCIKKEDLEEYSELRKQLEDEKTNFYKIQKDLHYEYQKKYKNFSKKNNPEDYEKYKESIKNIEKYVHLKNKIEFNELNLLQSLLLKILHRLVGFTSIWERDLRFRLIGEFPDELDVEDIFDHRERYRGTRGQICKKYDQFISVHIEYQNNNKMKNIKFDDNNPIRNYIAHFNYLPTPKYSILKMLGKLRELLDYDRKLKNAVMKSIKDILEEYGFKAEFVINPDKEIILNSVKSVEIIHLKKNDLNSHRNSEDLCKLVKAMLEYSE

SEQ ID NO: 667 - protein, 1101 aa, Artificial; identical to SEQ ID NO: 73
  Synthetic

SEQ ID NO: 668 - protein, 1360 aa, Artificial; identical to SEQ ID NO: 92
  Synthetic

SEQ ID NO: 669 - protein, 1167 aa, Artificial; identical to SEQ ID NO: 361
  Synthetic

SEQ ID NO: 670 - protein, 1385 aa, Artificial
  Synthetic
MKLSKEKHIRSAVANEEQNIGGVLYHVPGTDTIDLNDQMLIRDRDVKQLYNVFNQTQVGTKPKKWNNDEKLSPEENERRAQQKNIKMKNYKWREACSKYVESSQRTINDVLFYSYMEADKKIRNMRKNEDILKKMQEVTKLPKFSGGKLEDFVAYTLRKSLVVSKNSTQEFDSVAAMVVFLECIGKSNISDHEKEIVYKLLELIRKDFSKLDPNVKDSQGANIVRSVRNQNMIVQPQGDRFLFPQVSDKEKKTVTNKNVEKEGLNEFLLNYANLDDEKRAEILRKLRRILDVYFSAPNHYEKDMEITLSDNIDKEKFNVWKKYECGKKVTGLFVNIPDVLMKAEAENIKLDAVVEKRERKILADRVRRQNIICYRYTRAVVEKYNSNESLFFENDAINQYWIHHIENAVERILKNCKAGKLFKLRKGYLAEKVWKDAINLISIKYIALGKAVYNFALDDIWKDKKDKKDKELGIVDERIRNGITSFDYEMIKAYENLQRELAVDIAFSVNNLARAVCDMSNLKDRESDFLLWKKEDIADKLKNKDDMASVSAVLQFFGGKSSWDINIFKEAYKGKNKYNYEVRFIDDLRKAIYCARNENFHFKTALVNNEKWNTELFGKIFERETEFCLNVEKDRFYSNNLYMFYPVSELRNMLDQLYSRSVSRAAQVPSYNSVFIRKNFPEDITNVLRYQKPGYDADTLGKWYSACYYLLKEIYYNSFLQSDKALQLFEKSVKTLSWDDEEQKRAVDNFKNHFSDIKSACTSLAQVCQIYMTEYNQQNNQIKKVRSSNDSIFDKPIYHHYKVLLKKAIANAFAAYLKYNKNLFGFIGKPFKANEIRKIDKERFLPDWTSTKYESLCIEVSGSQELQKWYIVGKFLNARSLNLMAGSMRSYIQYVTDIKRRAASIGNELHVSVQDVEKVEKWVQVIEVCSLLAFRTSNQFEDYFNDKDDYARYLKSYVDFSNADMPSEYSALVDFSNEEQSDLYVDPKNPKVNRNIVHSKLFAADHILRDIVEPVSKDNIEEFYDQKAEIVYCKIKGKDITAEEQKAVLKYQKLKNRVELRDIVEYGEIINELLGQLINWSFMRERDLLYFQLGFHYNCLRNNSEKKEAYQKIEVNGDSIKDAILYQIIGMYVNGVAVYAPDEKGDILKEQCTKGGAGGKISAFNRYSEYLGLDKLTLYNAGLEIFEVVAEHDDIINLRNGIDHFKYYLGDYRSMLSIYSEVFDRFFTYDIKYQKNVLNLLQNILLRHNVIVEPVLESGFKTIGKQTTSGAKLSIRSIKSDTFQYKVKGGSLITDAKDERYLKTIRKILYYVENEEDNLKKSVVVTNADKYEKNKESDDQNKQKEKKNKDNKGKKNEETKSDAGKNNNERLSYNPFANLNFKLPN

SEQ ID NO: 671 - protein, 1262 aa, Artificial; identical to SEQ ID NO: 520
  Synthetic

SEQ ID NO: 672 - protein, 1245 aa, Artificial; identical to SEQ ID NO: 609
  Synthetic

SEQ ID NO: 673 - protein, 1412 aa, Artificial; identical to SEQ ID NO: 53
  Synthetic

SEQ ID NO: 674 - protein, 1358 aa, Artificial; identical to SEQ ID NO: 273
  Synthetic

SEQ ID NO: 675 - protein, 1344 aa, Artificial
  Synthetic
MKISKESHRKTGVLINNSGAEGILYKDPLKSNEKIEDVVNARANSTKRLFNLFGTGEESKDISKNAKEVAKTVNRAIGNLKANKKFNKKERINSELKVDVLIEELKKCRNSFSADEVNEALDRLLKKSFRVAPYKDAVRLLLMSTLVNKKALSNEEKDKVQNYFIKKLVAEYDKTLIKKQIPKALVNQNMVIQPSSNDGTLVIAETNKSKETKLTEKDAFRLFLRDYATLDDKLRHEMRLKLRRLVDLYFYGEEAVIKEDFDEWEIHEKRKADTALFVDKATKIKALKNGVKREILDVDTTLDAIRGKNISCYRKSVSIVKNNNTGYFDSEALNKFWIHHIENEVERIYGHLKNDTGNYKFQLGYLSEKVWKGIINYLSIKYIAEGKAVYHYAMKALSSDDTTKTFGKVDEKYLKGISSFEYERIKAEETLQRECAVNVAFAANHLANATVQLDENNTDFLLLKNKEPQEDSKKKGTKSLAECASAKPNTLRNILQFFGGKSTWEDFDFSGYDEIELLNDMKEMIYSLRNMSFHFKTENVNEGKWNTELIGRMFAHDCDRASIVQKNKLYSNNAAMFYNSSDLAKLLDKLYNHYNERASQVPSFNTVFVRKNFPEYLKQQQITPALSAEDTLKWQSTVYYLYKEIYYNAFLQDKESFNLLKQYVRNLDEHCQDKNQAGANRDFKAAFEIYSESGSMSATCQMIMTEYNNQNKGNRVGISGRTNSDDKLIFQHYKMILFDGLKAAFFEYLKKNGEVYDFIKTPKLVTILVDADVFLGDYKSHQYDSLVENVKTNPELQKWYITGRLLNPKQVNQLIGTFRSYVQYVNDVMRRAKQVKNPLTDETISIDVDNIIKVLDICTKLNGATSNKIDDYFDNGDEYAKYLGKFVDFGLRDDVNLANAKLAGFCDQEVDGQKIGIYHDGTNPILNRNVVLCKLYGASDVVAQAGILPVDFEIIKKYMQLSGNIKEYQLTGTCKTKADQLKLKKYQELKNMVELRNIVDYSELVDELQGQLINWGYLRERDLMYFQLGFNYLALNNDTQKPEGYEKAGDINGAILYQIVAMYTNGLSLIDATGKSKGNAKASAGAKIGSFCSYSKSLRNVPGDTKEEIDPIYHAGLELFENINEHDQCVALRNYIEHFHYYAKMDRSLLDIYSEVFDRFFTYDMKYAKNVPNMLYNILLQHLVVPSFEFNSGEKKLGDHNSLSKKRATISLKSENGLASEKFTYKIGDKKNPIKLSARSNDYLSDVAAILYYPDKAPTGVVRDTVKEDNSAKEQGKKSKDFAGPRNNKNNNYHGHNNGYNNQKRDYSKQNENEYSGSLSTGLFDAANYKKDRHNNNQNYKKRK

SEQ ID NO: 676 - protein, 1425 aa, Artificial
  Synthetic
MKFTKVKNSRVAVGFEHEKNRGHRGMMYKEPAVNNECVLNVDKHIEERYKDAGKLYTVLNQNVVIFDGKDKIMVKKQKICKEAVKIFCSNCSKFKNNRNEFIEKIKLCGVAKIINDLNINENVNFDEGLESLSRLIIEKTLRKSLNKKISWPMDGDKVETYNLADIAAKLLYYMVLNNRYYKNKKDDWKNGNGPVTDDELMAFFGYIDSDKKGKVKKAGSNITRAKMIAESIKRKDVKVQLTKKDETYRLMLSNAEHPKKRFVVDFIKRYANLERTAQVEELLHIKKLMVMFVYGEKEPEFYNKENPYKRLDETDERIFCEDAKNILEQIEQNSNNGKWKDNKKLHIQLGESFRKELFKRYKQMEDWLSEQYKVEKDGLIANKGYDLTNKNLMRAKEDLYWIIIFEENIESYFKRWNKRSLKNCRCSWIVNRLWNEWNSLICMKYIDLGKAVFNFAMPDLHDLSDGEIKLGTVLPEYQEGITSFDYEMVKAKENITRDIATSIVFAANTFSNAVIKREYREQPDKNIRNDVLVYDEEVFQNREAVQENAFKHIFQYFGGASTWHGLDFLFAQTSGVDTEKNTYVIEGKDPVTQEKFKKNFAFAIKQCIAALRNNSFHYTTDRKFVADDNILIEKQIADYLFKEEYSRLPKMFAEKYFSNNVPLFFDNEDIFKLANYLYCGESVREAQVPAFASVIKRKYIDEFLFTSDAEEKPFISMEQEEIKKIYTNEDIRNIFFSAMYFILKEIYYYGFLKSKDLMERFSKAFEQYYQNMMNNKRNKEYFAVDNFKKHLDELKNKNKNITFGEFCQQIMTDYNMQNQDLKDVMTINKENELKRKGEKEKYKHYVLILYKIMGNAFKKYLETFSNGKENVYAFLKRPKYILSDNKIISLKDFDDRSINEFINKMSQKVKIKIYQSLQNSVTKYNLYAWYMTAHFLAGKQLNLLIGDFKAFKQYIRKIKQRAENTGNAHKEMNKDIIEDIVEYCDKVIKILEFVLQFKGRITANKEDYFADEEEYAEYMLNFIDYSEFITNNKINGKVDYATALKEYCKQNMENTNSTDEIMGIYYDQKNLILNRNVVYSKLYGESHMLHHCLCGADYDYRVKGEDIQNYYDLRKDLNNVFKNGKCTSKDDQIKLKQFQNLKNKIELYDIKTYTDLVNDIIAQFVSWAYLRERDLLYFQLGYHYIKLFWKNETDTEKCKLKEQYNKLSFKDKNKNVINITEGALLHQIVAVYDYTLPIINGSREKTEHNKIALASGTSGTSLINFITNYCNEEAKTGKAETYNDGLDFFGKEINRDGFILDRKDIAHMKYYIFHEKSIMEMFADMYNGFLMYDTKLKKSVSFVSHNILARYFIIMKTEMHHASEENEKFGFDVTLYSDKFTYKYEETCEDEQKEGEEKQKKVNVDARSEEFLEIVKRILEYKECK

SEQ ID NO: 677 - protein, 1287 aa, Artificial; identical to SEQ ID NO: 105
  Synthetic

SEQ ID NO: 678 - protein, 1373 aa, Artificial; identical to SEQ ID NO: 104
  Synthetic

SEQ ID NO: 679 - protein, 1382 aa, Artificial; identical to SEQ ID NO: 108
  Synthetic

SEQ ID NO: 680 - protein, 1387 aa, Artificial
  Synthetic
MKLTKVEKARIAVSREKKDSGRIILYTNPEDVKKTSVTTMEQQVSKRIDQANKLYQVFFKSVIPVELNKHFAEISKIAAKCRNTEEFYKKACGYSGYEWTDAKQKKRTSQISRFSYTSSGKNMYVVMDNFVKEYMVQIWQEKDFRNAAVKILCCICDGKKFASKLEKVKKESPDTLKKFIEISGKCEGNPFVDYDTSFLEKVFTLVISQMVKNCDRKSYEQDDKEKIKKSIQKEIQWLSHVQSVTERSFGREGKTYLLFKIRNPYATEERLQTVLIRMRKTLKRGRNRDIAIVLLQGLAQMNQVTFTDTVKHLYQEEEKAFCDFIDAVNRDYYRVNIVKSVRNMDVKVQPDLNDNSILKLSGLGNIKKEALSDTLLRYAASADESDQVLLDIKKLLFEYFLPENSKETSKYTTVQNLWNIPYLPKIFFDYGFENEDSDDDNECAEDIETLCDVEPQYKINQHSLKRRIRYVNYGKYLQMTKNESDRERRYWIHYIKEFVEKNYVDSGRTLSEKNCYASSMMLNCWKEIIRYLCGKYIDIGKAVFHFTNLTAMPKPKDKIIYGQLEEQYKKGISSFDYEAIKAEETLQRDIVQSVVAAAFAFSKSVIDETKMEECQETNKEDILFLSENVLGSLLKENTIKLILRFYGGESSVAQKEYFDQQEIVQEMISHLKSIRNENFHYLDGAKKDNPHKYASILWKNDEMAYQKLTKQRYYANNVGLFYRAEEIQELVQELYSQKNITEAQIPAFRTVLKRKDLPGYMEELGILFPDNTQEKSKGDFEGTLYFLMKEIYYRDFIVKDKAAAYFFKAVDQNKEQSKKEDKHTERAAENFHRYVKSLEKKYNKKEISFGTVCQYIMMEYNQQNTTKQETEIYKHFKMLISLCIRKAFGNYIKETYRFLFHPIYSKQQGEPEYLDTLELESGVKEKNYEWFTLAHFLHPVQLNHLVGDLKSYIQYREDILRRIVFAEQRVYADQQKEVQQKVKTAKEILEVLEFVRKVSGRVSNEYTDYYENEEEYAEFLYQYIDFRKREGKSAFESLKYFCQNILDSGTVVDLYADTENPKVLRNIELTRMYAGSNVKIPEYEKITEDEIKMYYQEKNSVALILSRGLCRNEKEQKKVIEFNWKKKRLTLNEITDVFSLVNDLLGKMISFSYLRERDQMYLLLGFYYMALCAENKSENHLGWKGETLDKLESSDSKFDIGGGLVLYQIVSAFNFGSKLLYISEDGRWKMAGGAFPGKYGRFENDYNHRTSLSKVIRLFENESYEREIIYWRDYVDHMKYYVNQNQSIMEIYSAFYSKVLGYSAKLRKSVVFNLQAALEKHHINPECIWMTSDGKCADIKLMKNLESQKFTYKLAKREGEKTERKICMNALNENFLKTIRTSLEYKK

SEQ ID NO: 681 - protein, 1330 aa, Artificial; identical to SEQ ID NO: 189
  Synthetic

SEQ ID NO: 682 - protein, 1358 aa, Artificial; identical to SEQ ID NO: 601
  Synthetic

SEQ ID NO: 683 - protein, 1184 aa, Artificial
  Synthetic
MRVSKVKVLGNEETKGRIVLMHRSPVKGQLIYSEDAGKRDRTEDIIPEQKLESFHLSILNKTFLRKEFFKKELKHEAKKNGLKGDAEDKYISEKLKEYHSLLQFIDDVLSVKYNENRKAIKFPEYLTREMIEIFLNHKFRKEVTYTNKNGASVSFLLSTLILNAIEKHSVIEMQPFVDWRNWFVETKSKFLKKSIINNCIPTNGGPISRRRETLMKWRDDYFTNAEIDLARLHKKFGTDTLMASLREVPQTEKSGNEYHRLLKSCLQSHQKKLFGKRAEGYDINRADNQLYVYNTEVVKYMEHYFPVKSSKRRNSTAEIKYYLQTDTIKCCLHHQIINAVRGLALREGKFNLHGFDDKLIPNERNVSSSILNELKTSEGFVLNMLGGCAFAANCLRNIVDATQRSDLLGFRCFEVSLKKGKSNSDLFALFFGFGREDMDDDSEWEKHLYAARYSVSEIRNRVAHYHKSAIENIYNITDFEYRENSMCSYTDTKFTTALQNEIYNTPKAFSLQLMTGKVLEYYPKEKLVSFFQKYKFSLYRSVVPFAPGFKNIMRTGVNYQNATQNRLFYDMGLTAFQDKDRYIDDVEAWNARYFFMKLIYNNLFLPRFTNDKNDLFRKTVEQVLEVNRSHMEKVGKDDRQAFGEVRQMRENETANDYMAYLQSSLRMEKNKKELEGNGAKRINFEKFILQMFVKGFDSFLKDGAFEFVHSPENCLTGSTEKERAKERNSLCEEIGNYVRLVSTVIDPGKGSHVAFYVFCKMLNSVYLSNIRNEMIKYHKVVRTDELAHLIEIIELCLLSADAVSQKTVNADKLSHFFAEGVNVDDDENVIHASMETFRKYGTRDLFHKLMLQDDRFLVSSDDYREWEEMKEKIEGKVKQRELLHAEWCEAKEKDKKSRKVKSNSRTCFEKKFMGAKAEEYYSLCKVIDKYNWLDNKLHLVHLNKLHNLVIEILGRMVGFTALFERDFQYICKSDSEYEQLYNLDFNMGLPKFKNSIKGSGKAKNSTQNIDHNATGIGNSSNLLKENSNGTHYCKNLSGDGVEDKLKRLFLYDDYRNVRNFVAHFNYLTRVEDDLGGNDAVKLSGTRYSLIELINELRNLLKYDRKLKNAVSKSFIDMFERHGMHVKMKLNHNHKLFVDSISPRKIKHLGGGYKKRGKDDKMYVQTTNHVDPLYCDMCRALLEMK

SEQ ID NO: 684 - protein, 1344 aa, Artificial; identical to SEQ ID NO: 675
  Synthetic

SEQ ID NO: 685 - protein, 1357 aa, Artificial
  Synthetic
MQMKISKIKNSRPGISVAENKNEEPLSRQSLLYYAPVKDGKIRLESKDLEQHVTECNEKAQKLYNVITPEINFYRDENRQKMVENLAKNFNAVINNALRSIRNPKEKKEQRVEKEVAFILNLSKKSIKMKKDVFVKSTDLIVKFPENNKYNKKNDKGTGSKEADIQRIISDLVLRKLKKTLRKEVKLENGYRMQMTEITISLMSAICLYGNAESFDPAILKAFFEKVDSDYTKYKYVEQIVKSIESQSAKLKVIEKDGRHLLISANADHRKKKYVFEFMRMYAAADEKEKRELTEHIQDLIGLYLCGKAGYENAENRFSDMIESHNCICGKIEEILNELEKPENLSQQKKENLKNTTVKVMALKYRAAVNYLADEVGKTVLGEIREKKVRSCADLYWIEYIDSTVEKLLLKSRNKKRYRYEIGFLSKHIWKEWTQYISGKYIEIGKGVYHFAIPDLSGALEGESVSICEVKPEYRNGVSGFDYERIRAEESLEREMEKYVLFAVNNFARAVTPEEEREKSGHEDVLLMKTLSEIEESQTKEERQKKHDNNVKNAITLYADADRRILQFFGGQSRFREKEDSLINLYSGEDLYKEIRKELYAIRNITFHYTTKAEKDQTQKHDLAEYLFEEEFSDITELFREKYYANNVWKYYDAEVINTIMENIYCGRKYRAAQVPAFKNIISRPELPQVMNGFVKGNSLRRLMNCPDRDVINKYWSALFFVLKELYYYDFLQEQKKPEDNVKERFFRAIKKLSGQEKDDEKQKAWESFGNRIDQIGRDRSFGAICQGLMIEYMLQNSDISMVQTETDNGKANNKKQIYKHYRTLLYNCISEAFIEYLREKWKELRTPVLTAKEWSKEEFCRVDGLKHLSLFDHLKETFNDAESGSSWYMAAHFINQKYLNHLLGSIRNYLQFTEDIEDRAISLGDCVDNKREEKNLRYRNTLEILEFVAQFCERTTNVMEDYFESNQEYAEYLSDFVDYNTTKKETDIEKALYSFCKQKFKVDGKEYMAGIYYDGENLIPNRNIIRANMYGNTSCLKPCMDRITLKEIRTMYADQNKLDLVLKEGVCHTEEEQKAYREYQNEKNRIELFDVCTYTQILNDMQARLIGWSYMRERDLMYYQLGYYYTKLFWTDSISEEDARRRLVGNLVNVEDGAILYQILAFNSYNLPIIANKNNTVTLLKDEGSIGGKAITAFLKNYENAEMIYKEALDLFENMDEHAAIINTRNYIEHFKYFIKSDRSMMDLYSEIYDRFFRHDHNRKKNVPDSLKNVLADNFMIVDIDMELGSKKVGEKKKGFREHKAARIEFTDSGIRSTDMTYTIKPDIKDNKKVLVPARSEVFLKQFRKILEYRIQDKTQ

SEQ ID NO: 686 - protein, 913 aa, Artificial
  Synthetic
MKELIEKVPNVSELKKSQVFYKYYLNKEKLNDENIKYVFCHFVEIEMSKLLKNYVYKKPSNISNDKVKRIFEYQSLKKLIENKLLNKLDTYIRNCGKYSFYLQDGEIATSDFIVGNRQNEAFLRNIIGVSSAAYFSLRNILETENENDITGKMRGKTVKNKKGEEKYISGEIDKLYDNNKQNEVKKNLKMFYSYDFNMNSKKEIEDFFSNIDEAISSIRHGIVHFNLELEGKDIFTFKNIVPSQISKKMFHDEINEKKLKLKIFKQLNSANVFRYLEKYKILNYLNRTRFEFVNKNIPFVPSFTKLYSRIDDLKNSLCIYWKIPKANDNNKTKEITDAQIYLLKNIYYSEFLNYFMSNNGNFFEIIKEIIELNKNDKRNLKTGFYKLQKFENLQEKTPKEYLANIQSFYMIDAGNKDEEEKDAYIDFIQKIFLKGFMTYLANNGRLSLMYIGNDEQINTSLAEKKQEFDKFLKKYEQNNNIKIPYEINEFLREIKLGNILKYTERLNMFYLILKLLNHKELTNLKGSLEKYQSANKEEAFSDQLELINLLNLDNNRVTEDFELEADEIGKFLDFNGNKVKDNKELKKFDTNKIYFDGENIIKHRAFYNIKKYGMLNLLEKISDEAKYKISIEELKNYSNKKNEIEKNHTNQENLHRKYARPRKDEKFNDEDYKKYEKAIRNIQQYTHLKNKVEFNELNLLQSLLLRILHRLVGYTSIWERDLRFRLKGEFPENQYIEEIFNFNNSKNVKYKNGQIVEKYISFYKELYKDDTEKISIYSDKKVKELKKEKKDLYIRNYIAHFNYIPNAEISLLEVLENLRKLLSYDRKLKNAIMKSIVDILKEYGFVVTFKIEKDKKIRIESLKSEEVVHLKKLKLKDNDKKKEPIKTYRNSKELCELVKVMFEYKMKEKKSEN

SEQ ID NO: 687 - protein, 1360 aa, Artificial; identical to SEQ ID NO: 92
  Synthetic

SEQ ID NO: 688 - protein, 1391 aa, Artificial; identical to SEQ ID NO: 559
  Synthetic

SEQ ID NO: 689 - protein, 1204 aa, Artificial; identical to SEQ ID NO: 327
  Synthetic

SEQ ID NO: 690 - protein, 1287 aa, Artificial; identical to SEQ ID NO: 105
  Synthetic

SEQ ID NO: 691 - protein, 1373 aa, Artificial; identical to SEQ ID NO: 104
  Synthetic

SEQ ID NO: 692 - protein, 1432 aa, Artificial; identical to SEQ ID NO: 494
  Synthetic

SEQ ID NO: 693 - protein, 1165 aa, Artificial
  Synthetic
MGSGKYRITKIARKWDKNENWEKIILKRIVDNKKIKYVNENNNKDVDITDTYYSILSKNNSKFLGSEEQFIFKVNKMKRNIKNDCVIIKDYTEEEFEKFDKKIFFSRKIKVNNEDREKICRNFYEDEREIMKKRLEEAKNFNNIIFNICNKIFKLEYIDYTDEKVYEIFQKEIKFEDIKNLKEAFKQQENGLETDKLLTISFNKKRSNVLLEFIQQIVKQNFENEKELENWFSHDGEKYCKEIFKIYSNMSQKEKYSKLLGHNDKSIASNSEKRETLQRRLKLGDYSKYDLKKYYQKDYKEEAIKELEDKSKEELEKEVEEIIKKNYKIDKLCDEISNLEFSFVDSKKENKDKMSEIIVKIKEHYKNNVNVEEELENKEKYILSVIHNYIKGRYRKCLELQQKENVDFENLGKRIKEIFDSNKVTEKLKKSILNKVNNYKIFETKFQNPNIESSDDLEILKAEETFLNKLSTAVSKVGYILNILLEIHFRNDILQDYNQVEKLWKSDSFQKICAIYPEINNDEKLLKGMIYFIQGLRQQVLHPKILWEKQNIYNAENIKEKEKIVSVRLQNEGEAYNKKGIQNYFENVLKKIPDYFIEKYESSNVFNIYRNFVDKIMEVVKNFNFKENNTIDYLFPKFHKIYKRMCKLENIDDRQNGARKYLLQIIYYYYFQYEIENDKNNISKYLNLYRNKIKVKKISYSYITDNKAVNNKNIEILYRNIQREGMLNNKLSQMNKEWIEFIVVQFSEFLTNKKLNWILDNLSEYKKKEKLDENDKNRLLKILKQKMNKKIIYSNDSYAFISLAQFLDLKEISNLIHDIKKFIQFREKNVSKYKPEKNKLYIKELRKVLYILKVMLEHKERVIQKHYLESYDENISIIYGKDIERKDIKDIKIKIKNENQEIINQPLYKSGNDENSSWIVLYGIEQAKRNGTFKFFEGFFNLNDDIKLCKENIEKYEELYNEKEENQRKVDEYISSEENNNIDEIKEINNNKQLFYYYKNMIYGDGLKKGYDFINDIYSHYLSWAYRVERDCKIYKIKEYENKKNFNEYKFKEYKSIKNFRNEIAHFNYFQKTNKSLLELLNDFYDIFDYNLKYQRDVQNVINNIFEKYQIVRKDGGPVVFYCKTDKKLKLSENLVPKKHSKYPEIKLIHEKYVMFFRKLFEYKK

SEQ ID NO: 694 - protein, 1161 aa, Artificial; identical to SEQ ID NO: 458
  Synthetic

SEQ ID NO: 695 - protein, 1385 aa, Artificial
  Synthetic
MGNLFGHKRWYEVSDRGDNKIKRKVKVKRNYDGNKYILNINENNNKEKIDNNKFIRKYINYKKNDNILKEFKRKFHAGNILFKLKGKEKIKRIENNDDFLETEEVVLDKEVYGQSEKLKNEEGITKQYILKDIINKGIDKSNDKILVKTKFGKEITINFTDEAKKNKNEYQITLKIIPENELKIKREVYDVFKIINMDLYQIIKEIIENEVEKVFKNRYYEEYLKEKLLEDNQINVILTNFMKIREKIKSNPEIMGFIKFYLNVDGDKKKSENKKMLVEKILNINVDLTVEDIVDFVIKELEFWNITKRIEKVKEFNNKSLENKRNITYIKSYVLLDKHEKFKIERENKKDKIVKFFVENIKNNSIKEKIEKILTEFKINELIKKLEKELKRGNCDTEIFGIFKKHYKVNFDSKKFSKKSDEEKELYKIIYRYLKGRIEKILVNEQKARLKKMEKIEIEKILNESILSEKILKRVKQYTLEHIMYLGKLRHNDIVKMTVNTNDFSSLHAKEELDLELITFFASTNVELNKIFEINKEKNDFFGDSFKINDTKVLLKNEVTSSKLYILKNLNFIDNENKVKKEEFISKFITIGVNERNRILHANSKEIAPKGKQDNYDKVINIIKNLKISNEEVSKALNLDVVFKNKKDIITKINDIKISEENSNDIKYLPSFSKILPEILNLYRNNPKNEPFDTIETEKIALNALIYVNKELYKKLILEDDLEENGSKNIFLQELKKTLGNIDEIDENIIENYYKNAQISASKGNNKAIKKYQKKIIECYIEYLRKNYEKLFDFSDFKMNIQEIKKQIKEINDNKTYKRITINTSDKSIVINNDFEYIISIFALLNNNIVINKIRNRFFATSVWLNTSEYQNIINILDEIMQINILKSEYITSNWKENLEEFIRKTKNKEIELHQSKKEFFDNNYKEIKNDIVNGFQDNEEIKKIFDNNLKEIIDFRNNGTMYFKNLKELSQIERKFILDNKKIFGDKIDEIIIKKQKEIKEEILSKKIFNSEFLEKYKEIIDNLTKNENKFEKIYYPKEHKNELYIYKKNLFLNIGNPNFDKIYGLISKDIKNVDTKILFDDDIRKNKISEIDAILKNLNDKLNGYSNDYKAKYVNKLKENDDFFAKNIQNENYSSFGEFEKDYNKVSEYKKIRDLVEFNYLNKIESYLIDINWKLAIQMARFERDMHYIVNGLRELGIIKLSGYNTGISRAYPKRNGSDGFYTTTAYYKFFDEESYKKFEKICYGFGIDLSENSEINKPENESIRNYISHFYIVRNPFIDYSIAEQIDRVSNLLSYSTRYNNSTYASVFEVFKKDVNLDYDKLKTKFKLFDDEKNDDIKILKIEDLIESKKVSVLELESYNSDYVKNLIIELLTKIENTNDTL

SEQ ID NO: 696 - protein, 1162 aa, Artificial
  Synthetic
MKVTKVGGISHKKYTSEGRLVKSESEENRTDERLSALLNMRLDMYIKNPSNTETKETEKRIRKLKKLFSNKMVYLKDNTLKLKNGKKENSNREYFETDILESDVRDKKNFAVLKKIYLNENVNSEELEVFRNDIKKKLNKINSLKYSFEKNKANYQKINENNIEKVEGKSKRNIIYDYYRESAKRNDYINNVQEAFDKLYKKEDIEKLFFLIENSKKHEKYKIRECYHKIIGRKNDKENFAKIIYEEIQNVNNIKELIEKVPDMSELKKSQVFYKYYLDKEELNDENVKYVFCHFVEIEMSKLLKNYVYKKPSNISNDKVKRIFEYQSLKKLIENKLLNKLDTYVRNCGKYSFYLQDGEIATSDFIVGNRQNEAFLRNIIGVSSTAYFSLRNILETENENDITGRIKGKTVKNNKGEEKYISGEIDKLYDNNKQNEVKKNLKMFYSYDFNMNSKKEIEDFFSNIDEAISSIRHGIVHFNLELEGKDIFTFKNIVPSQISKKMFQDEINEKKLKLKIFKQLNSANVFNYYEKDVIIKYLKNTKLNFVNKNIPFVPSFTKLYNKIEDLRNTLKFFWSVPKDKEEKDAQIYLLKNIYYGEFLNKFVKNSKVFFKITNEVIKINKQRNQKTGHYKYQKFENIEKTVPVEYLAIIQSRDMINNQDKEEKNTYIDFIQQIFLKGFIDYLNKNNLKYIENNNNNDNNDIFSKIKIKKDNKEKYDKILKNYEKHNRNKEIPHEINEFVREIKLGKILKYTESLNMFYLILKLLNHKELTNLKGSLEKYQSANKEEAFSDQLELINLLNLDNNRVTEDFELEADEIGKFLDFNGNKVKDNKELKKFDTNKIYFDGENIIKHRAFYNIKKYGMLNLLEKISDEAKYKISIEELKNYSKKKNEIEENHTTQENLHRKYARPRKDEKFTDEDYKKYEKAIRNIKQYTHLKNKVEFNELNLLQSLLLRILHRLVGYTSIWERDLRFRLKGEFPENQYIDEIFNFDNSKNVKYKNGQIVEKYINFYKELYKDDTEKISIYSDKKVKELKKEKKDLYIRNYIAHFNYIPNAEISLLEVLENLRKLLSYDRKLKNAIMKSIVDILKEYGFVVTFKIEKDKKIRIESLKSEEVVHLKKLKLKDNDKKKEPIKTYRNSKELCKLVKVMFEYKMKEKKSEN

SEQ ID NO: 697 - protein, 1104 aa, Artificial
  Synthetic
MRIVKPHGTSETHFDKEGRIRRYVHSDSFPCEPLEPKEFATRHPKLVIAQWVSCIDKVITRPHGDGLPSETQWSLRNGLGKAAWDLIVERGLLDAPEKRLKRFERQWWARIHPYGNETDANTPRNPYGHWYRSLAGGVDIAEFDPATVANMIYAHLYENASRTHPEHGPRRSGLIPERSESIAKSVPARTAPGGGRLSPPWDASDGAIYLEAGDVAATMLERLEKHFGERHAKLRRICAATLAEHLTRLRREVLHISDGDRLPESLYQLHEQVRRSYSDILKGDQRYLSKKLPSSGDQLVSLVESKRLNREVAALIRLGRVIHYESTAENGPSHTSNVLDHWPSQTDSSRFWLSAGQTEIKRNEAFVRIWRGILARAARTATDWADPERAIPRDVLGAKQLSEAVTNITDTAFDRKAKLLFGNRSDLLTSLPLERKRQVLDLALRGLGQLRNNAFHFVGLEAFLASLRGLDGIADADTRTVLDHIWRDDTKDRNTRLVQTIRASNAPAYFSRQEMEGFVSSIARTPAVFLELPAFGRILRRASVAWTIDRYRLTLPAPKAVGEPVAAECQRVCLGLIYDRAFGDWLQVLETERLRDCVDRAVTRASVEARRVTRDDTVNARTIGKFKITQGDTLESFFSRLTAAVTRELRQTDARKQTKRAASKHLDDLRCDVVAQLFEIYLKEADLGWLLSGFQTRKPTGASKTDAAFCPPPSSAQTFQAWEPILYFILHLVPVDTTTRLAHQVGRFRDGGQIDTGLIEGLQRTLDLYRVMHDAKFAGAASGLRPDEMRSILLKTGLYSGATEGTELAFETRGLREFFRFGDHHLFTTDFAQNPVTRDQFHEIKSLRADLALAQDRRSALHAEWVSNGKALSGAKHDEYRALLNRIERGRHLSDHAELRDHLRLHGILIDVLARLLDFAGQWERDLYFTTLALIHLAGTTPQDAFDDRRGWHAVRTGQILAALRSTRDTPEMQDILAKLAMVFNIDMPGVRGANVRTRNDLAHFNCLHTPAASIDLTALINRTRALMHYDRKQENAVSKSVIELLDRHKLVLSWTFSGGQLGKSTVRPKVIRHLEQPEVKECLVSTAFSAAVGRLFGATEKDG

SEQ ID NO: 698 - protein, 1161 aa, Artificial
  Synthetic
MKVTKVDGISHKKYIEEGKLVKSTSEENRTSERLSELLSIRLDIYIKNPDNASEEENRIRRENLKKFFSNKVLHLKDSVLYLKNRKEKNAVQDKNYSEEDISEYDLKNKNSFSVLKKILLNEDINSEELEIFRKDVEAKLNKINSLKYSFEENKANYQKINENNVEKVGGKSKRNIIYDYYRESAKRNDYINNVQEAFDKLYKKEDIEKLFFLIENSKKHEKYKIRECYHKIIGRKNDKENFAKIIYEEIQNVNNIKELIEKVPNMSELKKSQVFYKYYLDKEELNDKNIKYAFCHFVEIEMSKLLKNYVYKKPSNISNDKVKRIFEYQSLKKLIENKLLNKLDTYVRNCGKYNYYLQDGEIATSDFIARNRQNEAFLRNIIGVSSVAYFSLRNILETENENDITGRMRGKTVKNNKGEEKYVSGEVDKIYNENKQNEVKENLKMFYSYDFNMDNKNEIEDFFANIDEAISSIRHGIVHFNLELEGKDIFTFKNIVPSQISKKMFQNEINEKKLKLKIFRQLNSANVFRYLEKYKILNYLKRTRFEFVNKNIPFVPSFTKLYSRIDDLKNSLGIYWKTPKTNDDNKTKEIIDAQIYLLKNIYYGEFLNYFMSNNGNFFEISKEIIELNKNDKRNLKTGFYKLQKFEDIQEKIPKEYLANIQSLYMINAGNQDEEEKDTYIDFIQKIFLKGFMTYLANNGRLSLIYIGSDEETSTSLAEKKQEFDKFLKKYEQNNNIKIPYEINEFLREIKLGNILKYTERLNMFYLILKLLNHKELTNLKGSLEKYQSANKEETFSDELELINLLNLDNNRVTEDFELEANEIGKFLDFNGNKIKDRKELKKFDTNKIYFDGENIIKHRAFYNIKKYGMLNLLEKIADKAKYKISLKELKEYSNKKNEIEKNYRMQQNLHRKYARPKKDEKFNDKDYKEYEKAIGNIQKYTHLKNKVEFNELNLLQGLLLKILHRLVGYTSIWERDLRFRLKGEFPENQYIEEIFNFDNSKNVKYKSGQIVEKYINFYKELYKDNVEKRSIYSDKKVKKLKQEKKDLYIRNYIAHFNYIPHAEISLLEVLENLRKLLSYDRKLKNAVMKSVVDILKEYGFVATFKIGADKKIGIQTLESEKIVHLKNLKKKKLMTDRNSEELCKLVKVMFEYKMEEKKSEN

SEQ ID NO: 699 - protein, 1157 aa, Artificial
  Synthetic
MLRRMCMKITKIDGISHKKYKEKGKLIKSNEIEKDITEERFNDIEAKTTELFQKTLDFYVKNYENSEDQNKERREKAKNYFSKVKILVDNKKITICNENTEKMEIEDFNEYDVRSGKYFNVLNKILNGENYTEEDLEVFENDLQKRIGRIKSIKNSLEENKAHFKKESINNNIIYDRVKGNNKKSLFYEYYRISSKHQEYVNNIFEAFDKLYSNSHEAMNNLFSEITKDSKERNIRKTREAYHEILNKNKTEFGEELYKKIQDNISNFDKLLEIEPEIKELTKSQIFYKYYIDKVNLDETTIKHCFCHLVEIEVNQLLKNYVYSKRNINKEKLENIFEYCKLKNLVKNKLVNKLNNYIRNCGKYNAYISNNDVVVNSEKISEIRTKEAFLRSIIGVSSSAYFSLRNILNTDNTQDITNKVDKEVDKLYQENKKIELEERLKLFFGNYFDINNQQEIKVFLMNIDKIISSIRHEIIHFKMETNAQNIFDFNNVNLGNTAKNIFSNEINEEKIKFKIFKQLNSANIFDYLSNKDITEYMDKVVFSFTNRNVSFVPSFTKIYNRVQDLANSLEIKEWKIPDESEGKDAQIYLLKNIYYGKFLDKFLNEENGIFISIKDKIIELNRNQNKRTGFYKLEKFEKIEETNPKKYLEIIQSLYMINIEEIDSEGKNIFLDFIQKIFLKGFFEFIKNDYNYLLELKKVQDKKNIFDSKMSEYIAGEKTLEDIGEINEIIQKIEITKIDKILNQTDRINSFYLLLKLLNYKEITELKGNLEKYQILSKTNVYEKELMLLNIVNLDNNKVKIENFKISAEEIGKFIEKINIEEINKKIKTFEELRNFEKGENTGEYYNIYSDDKNIKNIRNLYNIKKYGMLDLLEKISEKTNYCIKKKDLEEYSKLRKQLEDKKKENEKIEDEKTNFYKIQEYLHSKYQQEPKKILWKNNKNDYEKYKKSIENIEKYVHLKNKIEFNELNLLQSLLLKILHRLVGFTSIWERDLRFRLTGEFPDELDIEDIFDHRKRYKGTGGGICKKYDRFINTYTEYKNNNKMKNVKFADNNPVRNYIAHFNYLPNPKYSILKMMEKLRKLLDYDRKLKNAVMKSIKDILEEYGFKAEFIINSDKEIILNPVKSVEIIHLGKEDLKSRRNSEDLCKLVKAMLEYSE

SEQ ID NO: 700 - protein, 1192 aa, Artificial
  Synthetic
MKVTKIDGLSHKKFEDEGKLVKFRDNKNINEMKERLEKLKELKLDNYIKNPENVKNEDKEAEKETKIRRTNLKKYFSEIILREKDKKYLLVKTKKFKNINQEMDYYDIKKKENQQEIFDVLKEILELEIKENQEENIDFDSEKLKEAFEKDFIKKVSKIEAVKKSLEINRANYKKDFVEIGNDKYENVKGENKRSRVYEYYKKSETHEKFRKNITEAFEKLYTEENIKELYSKIEEVKKKTHLKSIVREFYQNEIIGESEFSEKGEDGISILYNQIIRSNEKKEKFVKFLENIENLQLKELTKSQIFYKYFLENEELDDENIKNVFCYFVEIEVNDLLKGNVYRVSKIYENKIKNTFEYNKLKKLVINKLENKLNNYVRNCGKYNYHMENGDIATSDINMRNRQTEAFLRSMIGVSSFGYFSLRNILGVNDDDFYEIEEDLTEDERKKEISTLKKVKEDIASKSIFEKVVDKSFQKKGIYNIKENLKMFYGDSFDDADEDELKQFFVNMLNAITSIRHKVVHYNMNTNSENIFNFSDIEVSRLLKNIFEKETDKRELKLKIFRQLNSAGVFDYWESWKIKKYLENIEFKFVNKNIPFVPSFTKLYNRIDNLKGSNALNLGYINIPKRKEARDSQIYLLKNIYYGEFVEKFVNNNDNFEKIFREIIEINKNAGTNTKTKFYKLEKFETLKANTPTEYLEKLQSLHQINYDREKIEEDKDIYVDFVQKIFLKGFINYLQESGSLKYLLNSEKREVIANKKSSYDEKLKLWQNNGSNLSKMPEEIYDYIKKIKITKINYSDRMSIFYLLLKLIDHRELTNLRGNLEKYESINKNEIYSEELNIVNLVSLDNNKVRANFNLEPEDIGKFLKTETSIKNINQLNNFSKIFADGENVIKHRSFYNIKKYGILDLLEKIVAKADLKITKEEIKKYENLQNELKRNDFYKIQERIHRNYNQKPFLIKNNEKDFNDYKKAIENIQNYTQLKNKIEFNDLNLLQSLLFRILHRLAGYTSLWERDLQFKLKGEFPEDKYIDEIFNSDGNNNQKYKNGGIADKYADFLIEKEEEKSGEILKKNQRIKRKKKIKEDLEIRNYIAHFNYFPDATKSILELLEELRELLKYDRKLKNAVMESVKDIFKEYGFIVEFEISHESNSKKIKVCDIKSEEIKHLKNNGLVTTRNSEDLCELIKVMLEYKKS

SEQ ID NO: 701 - protein, 1400 aa, Artificial
  Synthetic
LFLWIIEEVIYEIIKLYKNLKEEIIMGNLFGYKRWYEVRDKEDYKIKRKVKVKRNYDGNKYILNINENNNKEKINDNKFIREFVNYKKNDNVLIEFKRKFHAGNILFKLKGKERIKRIENDDDFLKTEEVVLYIEVYGKSEKLKALGITKKKIIDEAIKQGITKDDKKIEIKRQKIEINIRDKCTNKTVDDCSVILRIIENDELETKKSIYEIFKNINMNLYKIIEKIIVNKTEKVFENRYYKEYLKEKLLEDNQINIILTNFMKIREKIESNPEIMGFVKFYFNVGGDKKKSENKKMFVEKILNINVDLTVEDIVDFIVKELKFWDITKRIEKLQEKTVNRTDEDIKKTYINTYVSLDKHEKFKKYNRNKKDTIVKSFIKDIKDNTMKQKINQILRKFKIEELIEKLRIENKNFDTEIFRIFKDHYQEMFSSEKFEEKSDEEKELYKIIYRYLKGRIEKILINGEKVRLKKMEKIEIEKILNESILSEKILKRIKQYTLEHIMYLGKLRHNDIVKMTVNTNDFSRLHAKEELDLELITFFASTNMELNKIFNGKEKITDFFGFNLNGQKITLKEKVPSFKLNILKKLNFINNENNIDEKLSHFYSFQKEGYLLRNKILHNSYGNIQETINLKGEYENIENLIKELKVNNEEISKSLNLDIIFEGKVDIINKINSLEIGEYKDKKYLPSFSKIVPEITRKFREINKDKSFDIESEKIILNAVQYVNKILYEKITSNEENEFIKTLPDKLVKKNNNKENKNSLSIEEYYKNAQVSSSKGDKKAIKKYQNKVTNAYIEYLENTFAEVINFSNFNLNFDEIKTKIEERKDSKSKITIDSISTNINITNDIEYIISIFALLNSNTYINKIRNRFFATSVWLNTQKYENIIDILDEILSINLLRENNIADILDLKNTIIETKIVENNEESIRNYIFGNNEEELKKRLFFEELVNKEDVLKIFEDKNFKFKNFIKKNEIGNFKINFGVLSNLECNSEVEAKKIIGQNSKKLESFIQNIIDEYKSKIKTSFSSEFLEKYKKEIDNLVEDTEAENKNKFEKIYYPEEHKNELYIYKKNLFLNIGNPNFDKIYELISKDIKNANTEILFNDDIRKNKIAEIDVILKNLNDKLNGYSKEYKEKYIKKLKENQENNDFFAKNIQNENYSSFREFKEDYNKVSEYKKIRDLVEFNYLNKIESYLIDINWKLAIQMARFERDMHYIVNGLRELGIIKLNGYNTGISRAYPKRNGSDDFYATTAYYKFFDEESYKKFEKICYKFGIDLSENSEINKPENESIRNYISHFYIVRNPFIDYSIAEQIDRVSNLLSYSTRYNNSTYASVFEVFKKDVDLDYDELKKKFKLIGDNDILEKLMKSKKVSVLELESYNSDYVKNLIIKLLTKIENTNDTL

SEQ ID NO: 702 - protein, 1154 aa, Artificial
  Synthetic
MGSGKYRITKIARNWDKNKERITLKRIVSDGQVKYVNENDNVDMDITETYYKILSNNEAKFLGSMEQFIFKVNKMKRNIKNNCVIIKDYTEEEYDKFEEKNYKIFKKLIIAEEQGKNVKKKKICRNFYEDEREIMEKRLEEAKNFNNIIFNICNKIFKLEYLDYTDEKVYKIFHEEIKFEDIKNLKEAFKQQEKGLETDKLLAISFNKKRNNILLEFIQQIVKQKFKNEKELENWFSHEGEKYCKEIFKIYSNMSQKEKYSKLLGHRNQGIASIYDEKKETLQRRLKLGNYSDYDLRKYYQKDYKEEAIKELKDKNKEELEREIEELIKKNYKIDKLCDEISNLEFSFVESKKENKDKMSEIIVKIKEHYKKNVNVEEELKNKEKYILSLIHNYVKGRYRKCLELQQKENVDFENLGKRIKDIFDSNEVTKKLKKSIINKVNSYKIFEMKFQNPNIESSDDLEILKAEETFLNKLSTAVSKVGYTLNILLGVSLEKDILENYNMVGELCNNNSTTEIYKVYPELEKNEKLLQGMIHFIQGLRQQSLHPKILWNFETKNLKSEKLERLKEKKNIKMRDCVVHEDNLDKKEKNEVEIKKYFEKIEEKLPDYFIEKYESNNVFNIYRNFVDKIMEVVKNFNFKENNTIDYLFPKFHKIYKKMCKLENIMCKSENIDDRQNGARKYLLQTIYYYYFQYEIENNKNNIFKYYRNIQREGMLNNRLSQMNNEWIEFIVVQFSEFLTNKKLNWILDDLSEYKKKEKLDNSDKDKLREMLKLKMNKKLIYSNDSYVFISLAQFLDLKEISNLIHDIKKFIQFREKNVSKYKPEKNKLYIEELKKILYILKVMLEHKERVIQKHYLESYDENISIMYGKDIEKKDIKDIEIKIKNKNWEVINQPLYKSGNDEKSSWIVLYGIEQAKRNGTFKFFEGFFNLNDDIKLCKENIEKYEKLYNEREENQRKVDEYISSEENNNIDEIKEINNNKQLFYYYKNMIYGDGLKKGYDFINDIYSHYLSWAYRIERDCKIYKIKKYENKKNSNEYKFKEYKSIQNFRNKIAHFNYFQKTDKSLLDLLNDFYSIFDYNLKYQRDVQKVINNIFEKYQVVREDGGPVIFYCKVDKKLKLSENLVPKKHSKYQEIKLIHERYVVFFKKLFEYKK

SEQ ID NO: 703 - protein, 1360 aa, Artificial; identical to SEQ ID NO: 92
  Synthetic

SEQ ID NO: 704 - protein, 1382 aa, Artificial; identical to SEQ ID NO: 131
  Synthetic

SEQ ID NO: 705 - protein, 1177 aa, Artificial; identical to SEQ ID NO: 457
  Synthetic

SEQ ID NO: 706 - protein, 1161 aa, Artificial; identical to SEQ ID NO: 458
  Synthetic

SEQ ID NO: 707 - protein, 1389 aa, Artificial; identical to SEQ ID NO: 384
  Synthetic

SEQ ID NO: 708 - protein, 1382 aa, Artificial; identical to SEQ ID NO: 168
  Synthetic

SEQ ID NO: 709 - protein, 1373 aa, Artificial; identical to SEQ ID NO: 104
  Synthetic

SEQ ID NO: 710 - protein, 1287 aa, Artificial; identical to SEQ ID NO: 105
  Synthetic

SEQ ID NO: 711 - protein, 1382 aa, Artificial; identical to SEQ ID NO: 210
  Synthetic

SEQ ID NO: 712 - protein, 1382 aa, Artificial
  Synthetic
MKLSKEKHTRSAVANEEQNIGGILYRFPGKSIDGVKDQMLRRDKEVKKLYNVFNQIQVGTKPKKWNNDEKLSPEENERRAQQKNIKMKNYKWREACSKYVESSQRIINDVIFYSYRKAKNKLRYMRKNEDILKKMQEAEKLSKFSGGKLEDFVAYTLRKSLVVSKYDTQEFDSVAAMVVFLECIGKNNISDHEREIVCKLLELIRKDFSKLDPNVKGSQGANIVRSVRNQNMIVQPQGDRFLFPQVYAKENETVTNKNVEKEGLNEFLLNYANLDDEKRAESLRKLRRILDVYFSAPNHYEKDMDITLSDNIEKEKFNVWEKHECGKKETGLFVDIPDVLMEAEAENIKLDAVVEKRERKVLNDRVRKQNIICYRYTRAVVEKYNSNEPLFFENNAINQYWIHHIENAVERILKNCKAGKLFKLRKGYLAEKVWKDAINLISIKYIALGKAVYNFALDDIWKDKKNKELGIVDERIRNGITSFDYEMIKAHENLQRELAVDIAFSVNNLARAVCDMSNLGNKESDFLLWKRNDIADKLKNKDDMASVSAVLQFFGGKSSWDINIFKDAYKGKKKYNYEVRFIDDLRKAIYCARNENFHFKTALVNDEKWNTELFGKIFERETEFCLNVEKDRFYSNNLYMFYQVSELRNMLDHLYSRSVSRAAQVPSYNSVIVRTAFPEYITNVLGYQKPSYDADTLGKWYSACYYLLKEIYYNSFLQSDRALQLFEKSVKTLSWDDKKQQRAVDNFKDHFSDIKSACTSLAQVCQIYMTEYNQQNNQIKKVRSSNDSIFDQPVYQHYKVLLKKAIANAFADYLKNNKDLFGFIGKPFKANEIREIDKEQFLPDWTSRKYEALCIEVSGSQELQKWYIVGKFLNARSLNLMVGSMRSYIQYVTDIKRRAASIGNELHVSVHDVEKVEKWVQVIEVCSLLASRTSNQFEDYFNDKDDYARYLKSYVDFSNVDMPSEYSALVDFSNEEQSDLYVDPKNPKVNRNIVHSKLFAADHILRDIVEPVSKDNIEEFYSQKAEIAYCKIKGKEITAEEQKAVLKYQKLKNRVELRDIVEYGEIINELLGQLINWSFMRERDLLYFQLGFHYDCLRNDSKKPEGYKNIKVDENSIKDAILYQIIGMYVNGVTVYAPEKDGDKLKEQCVKGGVGVKVSAFHRYSKYLGLNEKTLYNAGLEIFEVVAEHEDIINLRNGIDHFKYYLGDYRSMLSIYSEVFDRFFTYDIKYQKNVLNLLQNILLRHNVIVEPILESGFKTIGEQTKPGAKLSIRSIKSDTFQYKVKGGTLITDAKDERYLETIRKILYYAENEEDNLKKSVVVTNADKYEKNKESDDQNKQKEKKNKDNKGKKNEETKSDAEKNNNERLSYNPFANLNFKLSN

SEQ ID NO: 713 - protein, 1165 aa, Artificial
  Synthetic
MQMKISKIKNSRPGISVAENKNEESLSRQSLLYYAPVKDGKIRLESKDLEQHVTECNEKAQKLYNVITPEINFYRDENRQKMVENLARNFNAVINNALRSIRNPKEKKEQRVEKEVAFILNLSKKSIKMKKDVFVKSTDLIVKFPENNKYNKKNDKGTGSKEAYIQKMISDLVLRKLKNTLRKEVKLENGYRMQMTEIIISLMSAICLYGNAESFDPAILKAFFEKVDSDYTKYKYVEQIVKSIESQSAKLKVVEKDGRHLLISANADHRKKKYVFEFMRMYAAADEKEKRELTEHIQDLIGLYLCGKAGYENAENRFSDMTESHNCICGKIEEILNELEKPENLSQKKKENLKNTTVKVMALKYRAAVNYLADEVGKTVLGEIREKKVRSCADLYWIEYIDSTVEKLLLKSRNKDGYRYEIGFLSKHIWKEWTQYISGKYIEMGKGVYHFAIPDLSGNLEGEPISICEVKPEYRNGVSGFDYERIRAEESLEREMEKYVLFAVNNFARAVTPEEEREKSGHEDVLLMKTLSEIEESQTKEERQKKHDNNVKNAITLYADADRRILQFFGGQSRFREKEDSLINLYSGEDLYKEIRKELYAIRNITFHYTTKADKDQTQKHDLAEYLFEEEFSDITELFREKYYANNVWKYYDVEVINTIMENIYCGRKYRAAQVPAFKNIISRPELPQVMNGFVKGNSLRRLMNCPDRDVINKYWSALFFVLKELYYYDFLQEQKKPEDNVKERFFRAIEKLSGQENDDKKQKAWESFGNRIDQIGRDRSFGAICQGLMIEYMLQNSDISMVQTETDNGKANNKKQIYKHYRTLLYNCIREAFIEYLREKWEELRTPVLTVKEWSKEEFCRADGLKHLSLFDHLKKTFNDAESGSSWYMAAHFINQKYLNHLLGSIRNYLQFTEDIEDRAISLGDCVDNKREEKNLRYRNTLEILEFVAQFCERTTNVMEDYFESNQEYAEYLSGFVDYNTTKKETDIEKALYSFCKQKFKVDGKEYMAGIYYDGENLIPNRNIIRANMYGNTSCLKPCMDRITLKEIRTMYADQNKLDLVLKEGVCHTEEEQKAYREYQNEKNRIELFDVCTYTQILNDMQARLIGWSYMRERDLMYYQLGYYYTKLFWTDSISEEDARRRLVGNLVNVEDGAILYQILAFNS

SEQ ID NO: 714 - protein, 1382 aa, Artificial; identical to SEQ ID NO: 430
  Synthetic

SEQ ID NO: 715 - protein, 1119 aa, Artificial
  Synthetic
LNEFLLNYANLDDEKRAEILRKLRRILDVYFSAPNHYEKDMDITLSDNIDKEKFNVWKKYECGKKVTDLFVDIPDVLMEAEAENIKLDAVVEKRERKVLADRVRRQNIICYRYTRAVVEKYNSNESLFFENDAINQYWIHHIENAVERILKNCKAGKLFKLRMGYLAEKVWKDAINLISIKYIALGKAVYNFALDDIWKDKKDKELGIVDERIRNGITSFDYEMIKAYENLQRELSVDIAFSVNNLARAVCDMSNLKDRESDFLLWKKEDIADKLKNKDDMASVSAVLQFFGGKSSWDINIFKEAYKGKNKYNYEVRFIDDLRKAIYCARNENFHFKTALVNNEKWNTELFGKIFERETEFCLNVEKDRFYSNNLYMFYPVSELRNMLDQLYSRSVSRAAQVPSYNSVFIRKNFPEDITNVLRYQKPGYDADTLGKWYSACYYLLKEIYYNSFLQSDKALQLFEKSVKTLSWDDEEQKRAVDNFKNHFSDIKSACTSLAQVCQIYMTEYNQQNNQIKKVRSSNDSIFDQPIYQHYKVLLKKAIANAFAAYLKNNKDLFGFIGKPFKANEIREIDKEQFLPDWTSRKYESLCIEVSGSQELQKWYIVGKFLNARSLNLMAGSMRSYIQYVTDIKRRAASIGNELHVSVQDVEKVEKWVQVIEVCSLLAFRTSNQFEDYFNDKDDYARYLKSYVDFSNADMPSEYSALVDFSNEEQSDLYVDPKNPKVNRNIVHSKLFAADHILRDIVEPVSKDNIEEFYDQKAEIVYCKIKGKDITAEEQKAVLKYQKLKNRVELRDIVEYGEIINELLGQLINWSFMRERDLLYFQLGFHYNCLRNNSEKKEAYQKIEVNGDSIKDAILYQIIGMYVNGVAVYAPDEKGDILKEQCTKGGAGGKISAFNRYSEYLGLDKLTLYNAGLEIFEVVAEHDDIINLRNGIDHFKYYLGDYRSMLSIYSEVFDRFFTYDIKYQKNVLNLLQNILLRHNVIVEPVLESGFKTIGKQTTSGAKLSIRSIKSDTFQYKVKGGSLITDAKDERYLKTIRKILYYVENEEDNLKKSVVVTNADKYEKNKESDDQNKQKEKKNKDNKGKKNEETKSDAGKNNNERLSYNPFANLNFKLPN

SEQ ID NO: 716 - protein, 1388 aa, Artificial; identical to SEQ ID NO: 102
  Synthetic

SEQ ID NO: 717 - protein, 1360 aa, Artificial; identical to SEQ ID NO: 101
  Synthetic

SEQ ID NO: 718 - protein, 1154 aa, Artificial
  Synthetic
MGSGKYRITKIARNWDKNKERITLKRIVSDGQVKYVNENDNVDMDITETYYKILSNNEAKFLGSMEQFIFKVNKMKRNIKNNCVIIKDYTEEEYDKFEEKNYKIFKKLIIAEEQGKNVKKKKICRNFYEDEREIMEKRLEEAKNFNNIIFNICNKIFKLEYLDYTDEKVYKIFHEEIKFEDIKNLKEAFKQQEKGLETDKLLAISFNKKRNNILLEFIQQIVKQKFKNEKELENWFSHEGEKYCKEIFKIYSNMSQKEKYSKLLGHRNQGIASIYDEKKETLQRRLKLGNYSDYDLRKYYQKDYKEEAIKELKDKNKEELEREIEELIKKNYKIDKLCDEISNLEFSFVESKKENKDKMSEIIVKIKEHYKKNVNVEEELKNKEKYILSLIHNYVKGRYRKCLELQQKENVDFENLGKRIKDIFDSNEVTKKLKKSIINKVNSYKIFEMKFQNPNIESSDDLEILKAEETFLNKLSTAVSKVGYTLNILLGVSLEKDILENYNMVGELCNNNSTTEIYKVYPELEKNEKLLQGMIHFIQGLRQQSLHPKILWNFETKNLKSEKLERLKEKKNIKMRDCVVHEDNLDKKEKNEVEIKKYFEKIEEKLPDYFIEKYESNNVFNIYRNFVDKIMEVVKNFNFKENNTIDYLFPKFHKIYKKMSKLENIMCKSENIDDRQNGARKYLLQTIYYYYFQYEIENNKNNIFKYYRNIQREGMLNNRLSQMNNEWIEFIVVQFSEFLTNKKLNWILDDLSEYKKKEKLDNSDKDKLREMLKLKMNKKLIYSNDSYVFISLAQFLDLKEISNLIHDIKKFIQFREKNVSKYKPEKNKLYIEELKKILYILKVMLEHKERVIQKHYLESYDENISIMYGKDIEKKDIKDIEIKIKNKNWEVINQPLYKSGNDEKSSWIVLYGIEQAKRNGTFKFFEGFFNLNDDIKLCKENIEKYEKLYNEREENQRKVDEYISSEENNNIDEIKEINNNKQLFYYYKNMIYGDGLKKGYDFINDIYSHYLSWAYRIERDCKIYKIKKYENKKNSNEYKFKEYKSIQNFRNKIAHFNYFQKTDKSLLDLLNDFYSIFDYNLKYQRDVQKVINNIFEKYQVVREDGGPVIFYCKVDKKLKLSENLVPKKHSKYQEIKLIHERYVVFFKKLFEYKK

SEQ ID NO: 719 - protein, 1387 aa, Artificial
  Synthetic
MGNLFGYKRWYEVRDKEDYKIKRKVKVKRNYDGNKYILNINENNNKEKIDDNKFIREFVNYKKNDNVLKEFKKKFHGGNILFKLKGNKRSIEDSNDFLKTEEVVLDKEIYGQSEKLRNEKGITKKDILKEINKQKIDNSVKKISMNTNSGKTIVINFSDKLKKDKDDYQITLNIISEDELERKRKIYDIFKMINMDLYQIIKEIIENEVQKVFKNRYYEEHLREKLLKDDKIDVILTNFMKIREKIESNPEIMGFVKFYLNVGGDKKKSENKKIFVEKILNINVDLTVEDIVDFIVKELKFYGIIKRIEKLQEKKADRTDEDIKKTYINTYVSLDKHEKFKKYNRNKKDTIVKSFIKDIKDNTMKQKINQILRKFKIKELIEKLRIENKNFDTEIFRIFKDHYQEMFSSEKFEEKSDEEKELYKIIYRYLKGRIEKILINEQKVRLKKMEKIEVEKILNESTLSEKILKRVKQYTLEHIMYLGKLVHNNIDMTTVNTNDFSMLHAKEELDLELITFFASTNMELNKIFNGKEKVTDFFGFNLTEQKITLKEKVPSFKLNILKKLNFINNENNIDEKLSHFYSFQKEGYLLRNKILHNSYRNIQETKNLEEDYKNVTNLIDELKVSDEEISKSLNLDVIFEGKKNIIIEINKLKTGKYKDKKYLPSFSKIVPEITRKFREINKDKSFDIESEKIILNAVKYVNKILYEKITSNEENQFIKTLPDKLVKKNNNKENKNSLSIEEYYKNAQISSSKGDKKAIKKYQNKVINAYLEYLENTFVEVIDFSNFNLNFDEIKTKIEERKDSKNKIVIDSISTNINITNDTEYIISIFALLNNNTYINKIRNRFFATSVWLEKQNSTKEYDYENIISILDEIIQLNTLRNECIIENWNSNLKEFIQKMLDVEKEIGNFEIKTKKEIFEIHYEEIKKDMIVKINDNKIQKILNKYLKEITGFSSNNEYMFKNLGKLTLEERDFILPNKKLIEKNIDEIIGEKLDAIKEKILLRKVFSSKFLEKYKKEIDNLIEDTESENKNKFEKIYYPEEHKNELYIYKKNLFLNIGNPNFDKIYELISKDIKNANTEILFNDDIRKNKIAEIDVILKNLNDKLNGYSNDYKEKYVNKLKENDDFFAKNIQNKNYKSFEKFEKDYNKVSEYKKIRDLVEFNYLNKIESYLIDINWKLAIQMARFERDMHYIVNGLKELNFINLNSYNAGISRAYPKYNDSDSNKNCKKFYETTAYYKFFDDKSYREFEDICYEFGIDLRKNSNIQAKGERNIRNYISHFYIVRNPFVDYSIAEQIDRVSNLLSYSTRYNNSTYASVFEVFKKDVNLDYDKLKKKFKLIGNNDILERLMKPKKVSVLEVESYNSDYIKNLIIELLTKVENKDEISS

SEQ ID NO: 720 - protein, 1161 aa, Artificial
  Synthetic
MKVTKVDGISHKKYIEEGKLVKSTSEENRTSERLSELLSIRLDIYIKNPDNASEEENRIRRENLKKFFSNKVLHLKDSVLYLKNRKEKNAVQDKNYSEEDISEYDLKNKNSFSVLKKILLNEDVNSEELEIFRKDVEAKLNKINSLKYSFEENKANYQKINENNVEKVGGKSKRNIIYDYYRESAKRNDYINNVQEAFDKLYKKEDIEKLFFFIENSKKHEKYKIREYYHKIIGRKNDKENFAKIIYEEIQNVNNIKELIEKVPDMSELKKSQVFYKYYLDKEELNDKNIKYAFCHFVEIEMSQLLKNYVYKRLSNISNDKIKRIFEYQNLKKLIENKLLNKLDTYVRNCGKYNYYLQDGEIATSDFIARNRQNEAFLRNIIGVSSVAYFSLRNILETENENDITGRMRGKTVKNNKGEEKYVSGEVDKIYNENKQNEVKENLKMFYSYDFNMDNKNEIEDFFANIDEAISSIRHGIVHFNLELEGKDIFAFKNIAPSEISKKMFQNEINEKKLKLKIFRQLNSANVFRYLEKYKILNYLKRTRFEFVNKNIPFVPSFTKLYSRIDDLKNSLGIYWKTPKTNDDNKTKEIIDAQIYLLKNIYYGEFLNYFMSNNGNFFEISREIIELNKNDKRNLKTGFYKLQKFEDIQEKTPKEYLANIQSLYMINAGNQDEEEKDTYIDFIQKIFLKGFMTYLANNGRLSLIYIGSDEETNTSLAEKKQEFDKFLKKYEQNNNIEIPHEINEFVREIKLGKILKYTESLNMFYLILKLLNHKELTNLKGSLEKYQSANKEEAFSDQLELINLLNLYNNRVTEDFELEADKIGKFLNFNGNKVKDNKELKKFDTNKIYFDGENIIKHRAFYNIKKYGMLNLLEKISDEAKYKISIEELKNYSKKKNEIEENHTTQENLHRKYARPRKDEKFTDEDYKKYEKAIRNIQQYTHLKNKVEFNELNLLQSLLLRILHRLIGYTSIWERDLRFRLKGEFPENQYIEEIFNFDNSKNVKYKNGQIVEKYISFYKELYKDDTEKISIYSDKKVKELKKEKKDLYIRNYIAHFNYIPNAKVSLLEVLENLRKLLSYDRKLKNAVMKSVVDILKEYGFVATFKIGADKKIGIQTLESEKIVHLKNLKKKKLMTDRNSEELCELVKVMFEYKMKEKKSEN

SEQ ID NO: 721 - protein, 1360 aa, Artificial; identical to SEQ ID NO: 92
  Synthetic

SEQ ID NO: 722 - protein, 1257 aa, Artificial; identical to SEQ ID NO: 135
  Synthetic

SEQ ID NO: 723 - protein, 1194 aa, Artificial; identical to SEQ ID NO: 18
  Synthetic

SEQ ID NO: 724 - protein, 1388 aa, Artificial
  Synthetic
MKLSKVTYRVKDKNAKYKKEYNVRAAVANNSENAGGVLYHVPGVDLIDLREQMLDRDRSVRLLYNIFNHIQTGTKPKKWGNDETLSVDENERKAKEQNIKIMNYKWREACSEYIEKSQSTINSVLFYSYEESGYKTKRMNDNEAIIVKMQYENRLSHFTGGKLEDFVAYTLRNSLVVSRYDNQEFDSVNAMVVFINNIGNGNISDKDKKTICKLADLIRNDFSKLNPNVQSSQGANMVRSVRNQNMVVQPQGDKVSFPLVSDEGKNTVTNKNVEKKGLNEFLLNYANLDDEERMEKLRKLRRIIDVYFSSPSHYQKDMDISLSDNIDKTKFDVWKKHETGKKNTELFVDIPDELLTAETEKIKLDAVLEKKARKRLTDSIRKQNMICYRYTRAVVEKYNSTENLFFENDSINQYWIHHIENAVERILKSCKAETLFKLRRGYLTEKVWKDAINLISIKYIALGKVIYNFTVDDIWKDKKVKNLGSIDEKIKHGITSFDYEMIKAQEALQRELAVNVAFAANNLARAVCDMTNLKDKESDFLIWNKKDIANKLKNKDDMASVSVVLQFFGGKSSWDIDAFREAYKGNKYNYEVCFIDDLRKAVYAARNESFHFKTALVNNDIWNTEFFGKLFIKETEICLDIEKDRFYSNNLPVFYSDNDLKKMLDHLYNNKVSRAAQVPSYNSVMVRKYFPENITSTLKYQKPGYDEDTLEKWYSACYYLLKEIYYNSFLQSDEALALFEESVNNLKGDNKDQELAVKNFRNNYKNIKSSCTSFSQVCQMYMTEYNQQNNQFKKVRSSKDSIVDKPIYQHYKLLLKKVIANAFASYLQHNEELFGFIGKPLKVNCLKEIDKEQFLPEWTSKKYVSLCEEVRKSPELQKWYIVGKFLNSRSLNLMAGSMRSYIQYVNDIKRRADGIGNELHVIAQNLDVVNKWVQVIEVCLLLSSRVSNEFEDYFYDKDDYAAYLKSYVDFDNSDMPSEYSALVEFSDQGKVDLYVDPSNPKVNRNIVQSKLFAADYILRDIIEPVSKDEIEDFYNQKDEITTCKIKGAELTDEEQKKILKYQKLKNRVELRDVVEYGEIINELLGQLINWSFMRERDLLYFQLGFHYNCLRNDSAKPEEYKNLVLDDISIKDAILHQIIGVYVNGVAIYAPGKDKNKLESQCVKGRVGGKIGAFCGYSLYLKLAADTLYNAGLEVFEVLPEHEDIINLRNGIDHFKFYLGGYRSIISLYSEVFDRFFTYDMKYQKNVLNLLQNILLRHNVIIEPIFESGIKKIGKDTKPCAKLSIRSIISDSFEYKIKDGNLIADAKDKRYLETIKKILFYPEVEPEVRILSSKDSFEQNNQYGYMKEKSENNKNKKNKKNNGNRDKKKNSDELTYNPFLNLPFELPE

SEQ ID NO: 725 - protein, 1216 aa, Artificial; identical to SEQ ID NO: 62
  Synthetic

SEQ ID NO: 726 - protein, 1210 aa, Artificial
  Synthetic
MKITKRKWEDVPPLFFHRDKDSGRLIRQDDREHDYTDELFRKTTVDSIFIRSLQNRLLRSQDKEGNKIGRNEITELVENLCKGAEIQKSIDEIKDSKSNVKALCDKTLTDYGKSFAAEEGRTTLYEAILNLAKGNAIQKAMAEAELKQIHEALKKEKEDRINRVQNSIKNNKIPLKVNEDGTISANNDRASWLLELLKPVASEHDKGDRYPVLTEMEGIVSFDKLCEEVRNKIHGRKGRTRSIAMSVDEAVKEYLKELWKKHADRHRDMRYYFQAVKEYFKENFPIRTKQKGAGIRQSLLKEDTVVARLLDPKHMAKAVRRKLINQSIQMHILYGKLYEYCCREDRNLPVNSETLQLIQVLEAFKKQLMTAVLWSVSRLCYFYEFYSGDILLAEEYRRDFLNQKNDHKDIQACKEKLQDFFPLAELQEKIRECADKDINNIKDKITNDVLACNNLLEECVFCISKLRNNIFHYKNLSFTQALKHIANEIKEEDIPIILRLYKQDCENVNKAFANRISSMNLPLYYSTEFLLRIFKKQGAELSLYSTKNQMTPSFKRVYERGKNLRLEYEREPMRSNIANEYDKDPQSDYWMRWFSQFATGTVDTNAGIKGEMEDYPHASVNLGIEIEAGTNIDAQRAMRNLLQLIYKHHFLPEVQKDETVVTDVIPKVLERNRKLSEVRNRSDKTYGYKEIEELCKKNKGKKDSLSELMKDLQRKVSETEKEKRELAREKTDYAQRFILDIFAEAFCNFMDERYEDEYQEIMSPIKNEEEAKKWTEMFTDKADKDNKDKLLVLKTSFDKDNVEKYLLALYPLMRLLDDKELSELQQQMLRFRASVSGWQGGTDFSEDIAMAEKIEELAELVKLTEPESQYAEEAWKNRAIGVFEQFVEGKMAEYGTFYIQNDSLTQVPRGNMRKLLRSGVIGVYNKVLASCKQATKADYGAYSGDHWSIEDPDGNPIKSAEQAQALLQRLHKKYTESPSQFSDDDHKLYDKTLRQLDAYNRAMKNLSFGSLYEICRIHMETLSRWVGFVQDWERDMYFLLLAWTKQGKLLNVTETDVIEIFEKGSVIYKMNKKLKNGDRYAFTSIYRNNNDEKLEFLQIRNFIAHLHLLRKSEWKGDKKAGYSVIEDYINKLRFLLSYDQKRMNAVTKAMQQIFEKHKVIVKFMVEKGGMLKVKDVKPGIIEHLKQTKRIEIPCHGERFTDSLLVLMKYQ

SEQ ID NO: 727 - protein, 1100 aa, Artificial
  Synthetic
MKVTKVDGISHKKYIEEGKLVKSTSEENRTSERLSELLSIRLDIYIKNPDNASEEENRIRRENLKKFFSNKVLHLKDSVLYLKNRKEKNAVQDKNYSEEDISEYDLKNKNSFSVLKKILLNEDINSEELEIFRKDVEAKLNKINSLKYSFEENKANYQKINENNVEKVGGKSKRNIIYDYYRESAKRNDYINNVQEAFDKLYKKEDIEKLFFLIENSKKHEKYKIREYYHKIIGRKNDKENFAKIIYEEIQNVNNIKELIEKVPDMSELKKSQVFYKYYLDKEELNDKNIKYAFCHFVEIEMSKLLKNYVYKKPSNISNDKVKRIFEYQNLKKLIENKLLNKLDTYVRNCGKYNYYLQDGEIATSDFIARNRQNEAFLRNIIGVSSVAYFSLRNILETENENDITGRMRGKTVKNNKGEEKYVSGEVDKIYNENKQNEVKENLKMFYSYDFNLDNKNEIEDFFVNIDEAISSIRHGIVHFNLELEGKDIFAFKNIAPSEISKKMFQNEINEKKLKLKIFRQLNSANVFNFYEKDVIIKYLKNTKFNFVNKNIPFVPSFTKLYNKIDDLRNTLKFSWKIPKDKEEKDAQIYLLKNIYYGEFLNKFVKNSKDFFKITDEVIKINKQRNQKTGYYKYQKFENIEKTVPVEYLAIIQSRDTINNQDKEEKNTYIDFVQQIFLKGFIDYLNKNNLKYIENNNNNDIFSRIKIKKDSKERYDKILKNYEKNNRNKEIPYEINEFVREIKLGKILKYTERLNMFYLILKLLNHKELTNLKGSLEKYQSANKEETFSDELELINLLNLDNNRVTEDFELEADEIGKFLDFNGDKVKDRKELKKFDTKKIYFDGENIIKHRAFYNIKKYGMLNLLEKIADKAKYKISIEELRNYSNKKNEIEKNHTTQENLHRKYARPRKDEKFTDEDYKKYEKAIRNIQQYTHLKNKVEFNELNLLQGLLLRILHRLVGYTSIWERDLRFRLKGEFPENQYIEEIFNFNNKQNVKYKSGQIVEKYIKFYKELHQNDEVKINKYSSVNIKVLKQEKKDLYIRNYIAHFNYIPHAEISLLEVLENLRKLLSYDRKLKNAVMKSVVDILKEYGFVATFKIG

SEQ ID NO: 728 - protein, 1393 aa, Artificial
  Synthetic
MGNLFGHKKWYKVDKIIKDKKGKESTIKQEVRIKRNYSVDRYTLNTNNKEKNNINNEDFVNQFIEYKTNNDILKKFTKKFHMGNILFKLKAEESVREIRNYNDFLEKEKAILEIEIYQQSEELRKKENITKKDIIDKVIEDKITENSNEIKMQIKLEKNNFEEIRIYINKELGQYNIKLKNIDNDELNLKRETYETLKSINANLYIITKNTINNADFKKRNYETYLKKSMGKYLRKNINKKPENTFLKSLSENFKKIQNNIKKNEEIINFIKYYSSINGNKTVSENKKTFLEKILNTEVSISENDIIDFIIGELKFYGIIKRIEELQEKTADRTEEDIKNTYINTYVSLDKHEKFKKYNRNKKDTIVKSFIKDIKDNTMKQKINHILNKFKIEELIEKLKENTENKNFDTEIFGIFKTHYQNIFSSEKFSNKSDEEKELYKIIYRYLKGRIEKILINEQKVRLKKMEKIEVEKILNESILSEKILKRVKQYTLEHIMYLGKLRHNDIVKMTVNTNDFSRLHAKEELDLELITFFASTNMELNKIFNGKEKITDFFGFNLNGQKITLKEKVPNFKLNILKKLNFINNENNIDEKLSHFYSFQKEGYLLRNKILHNSYGNIQETKNSEEKYKNVKNLIDELKVSDEEISKSLNLDVIFEGKNNIIIEINKLQTGKYKDKKYLPSFSKIVPEITRKFREINKDKSFDIESEKIILNAVQYVNKILYEKITSNEENEFIKTLPDKLVKKNNNQENKNSLSIEEYYKNAQISSSKGDKKAIKKYQNKVTNAYIEYLENTFAEVIDFSNFNLNFDEIKTKIEERKYSKSKITVDSISTNINITNDIEYIISIFALLNSNTYINKIRNRFFATSVWLNTQKYENIIDILDKILSINLLRENNIADILDLKNTIIEAKIVENNEECIKNYIFENNEEELKKRLFCEELVNKEDVLKIFEDKNFKFKNFIKKTVNENFTIDFDILFNLECNSELNAKKVIGQNSQRLNLFIKNTIDEYKSKIKTSFSSEFLEKYKKEIDNLVEDTETENKNKFEKIYYPEEHKNELYIYKKNLFLNIGNPNFDKIYELISKDIKNANMEILFNDDIRKNKIAEIDVILKKLNDKLSGYSKEYKEKYIKKLKENQENSDFFTKNIQNENYNSFEEFKEDYNKVSEYKKIRDLVEFNYLNKIESYLIDINWKLAIQMARFERDMHYIVNGLRELGIIKLNGYNTGISRAYPKRDGSDDFYTTTAYYKFFDEESYKKFEKICYKFGIDLSENSEINKPENESIRNYISHFYIVRNPFADYSIVEQIDRVSNLLSYSTRYNNSTYASVFEVFKKDVDLDYDELKKKFKLIGDNDILEKLMKSKKVSVLELESYNYDYVKNLIIKLLTKKENTNDTL

SEQ ID NO: 729 - protein, 1346 aa, Artificial
  Synthetic
MKITKVRVKENNEQYSTQHYRNVYNGMLHKVSNKHYIDTMEHLKNINNSNNKALDKSFIDRLVVPKENKKNYDPAVHAFLTEIYNGQNINECAKKLQNDIKNKDCTALSSKGKVFCKGKIKKIIEDIIDNKAITYDDLTQISKAMQSKADNHKKQICKSIVNNNINVDPSSRLRQYFINSLVVSKDDVNYNDRVHDFIHKLYISNIDISKLKKYPLKNVATEQDVQQTLSAEGRAFCDGKLSKVITAFATNDIKGITQNDLDCIKQKINEATLSSISGDNANLYERYSDYNNVNPNCSRNIFEKNINENYNQKRLSHGEWLVQFIANNSINDERFKTFESLFQYDELSCKLTECLKKYETELNKLNSIEEGDKEGQKQIRQYKQECLTEIHGIYKQHEVEHYKDKEGESTKKHEMYFAYYIREVREYFNHYFPLQNNTRKQSINKRDIKNFITYIDKYANIEKIKTIVKYQILNKLTSQLILEGKLTYFSDSFNKEMNQFTSDDLELIHVQEAFKKQLLTSIAWSTSQLRFIMLGEQDTTQLGDILLQGNFDKALKTAENNKYETTKRLKWFLNNILNDNGETIITEDNISNLLTSIHKYIYNNRNKIYHFSKEYFLDDKNFYIDDNDELTKKLYANDKDSVNAAFKEKIRSMNLYTCYNSQTQQDILGKVNFSLSHPSISIVPSFKNVYNKGKNLQEGNADAKKSQEEGIQGLEWFVLPAEDEKTLLNSSEEVRVYRNFLQLIYEYAFLPSIDKSGIANLKKLHHCVITLNKEFSKNRQTEANIERDEQNQKEIKDNEFKYEIIETFGKDFFKDKIQNSITKEDCKDYFKELQSFVVKKENENQENKAQGRSKTGSDKDKNIYVDFVRDLYVFAFNQFLEGKYKLVPGIKKQLRSPQYNEEATFDDKLKITVNTSYLPSTAPQLYLMARLLDADQLNNLRHQFMRYKESVTQIYKEDAVGIGEKVKYIIDMLTMVNLTGVNYTESLKNFLNDNSGEIIKQYKNFMDNDVNPDDIKYKDLYVQTDGETLILHKGIGSAYRSGCLSLYEKLYGTNRISSKDCNDYLDWIKTDATGSSKIEVLQKVREMLHDEITKRDKTDRIGKYKKAVEKCDEYNKLKNKVTFNDLYSLGQLHRDILSRFIGFAVDWERDMHFLLISLTKYGLMKDAKENPKYINKTIVEFISDKFFNHENGGAVENICKEFGGNPDLLKVFKSLYQSNNIDSFYKMFDIRNWVAHLNHIQPGSTTERSLVDAINNLRKLLSYDRKRKNAVTKAIIEMMEKEKIGLTFESDGGHDFKLHKVESEQITHLKKVSKKFDIPAHSKEFCELVGQLFNWKTKEQQQEQNK

SEQ ID NO: 730 - protein, 1412 aa, Artificial; identical to SEQ ID NO: 453
  Synthetic

SEQ ID NO: 731 - protein, 1360 aa, Artificial; identical to SEQ ID NO: 92
  Synthetic

SEQ ID NO: 732 - protein, 1202 aa, Artificial
  Synthetic
MKVTKIDGISHKKFEDEGKLVRFTGNFNIKNEMKERLEKLKELKLSNYIKNPENVKNKDKNKEKETKSRRENLKKYFSEIILRKKEEKYLLKKTRKFKNITEEINYDDIKKRENQQKIFDVLKELLEQRINENDKEEILNFDSVKLKEAFGEDFIKKESKIKAIEESLEKNRADYRKGFVELENGKYEDVKGQNKRSLVFEYYKNPENREKFKENIKYAFENLYTEENIKNLYSEIEEIFEKVHLKSKVRNFYQNGIIGESEFSEKDEEGISILYKQIINSVEKKEKFVEFLQKVKIKDLTRSQIFYKYFLENEELNDENIKYVFSYFVEIEVNKLLKENVYKTKKFNEGNKYRIKNIFNYDKLKNLVVYKLENKLNNYIRNCGKYNYHMENGCVATSDTNMKNRQTEAFLRSILGVSSFGYFSLRNILGVNDNDFYEMEEELTEDERKNENFILKKAKEDITSKNIFEKVVDKSFEKKGIYQIKENLKMFYGNSFDKVDKDELKKFFVNMLEAITSVRHRIVHYNINTNSENIFDFSNIEVSKLLKNIFEKEIDTRELKLKIFRQLNSAGVFDYWESWVIKKYLENVKFEFVNKNVPFVPSFKKLYDRIDNLKGWNALKLGNNINIPKRKEAKDSQIYLLKNIYYGEFVEKFVNDNKNFEKIVKEIIEINRGAGTNKRTGFYKLEKFETLKANTPTEYLEKLQSLHKISYDKEKIEEDKDIYVDFVQKIFLKGFVNYLKKLDSLKSLNLLNLRKDETITDKKSFYDEKLKLWENSGSNLSKMPEEIYEYVKKIKISNINYNDRMSIFYLLLKLIDYRELTNLRGNLEKYESMNKNKIYSEELTIINLVNLDNNKVRTNFSLEAEDIGKFLKSSIKIKNIAQLNNFSKIFADGENVIKHRSFYNIKKYGILDLLEKIVAKADLKITKEEIKKYENLQNELKRNDFYKIQEHIHRNYNQKPFLIKNNEKDFNDYKKAIENIQNYTQLKNKIEFNDLNLLQSLIFRILHRLAGYTSLWERDLQFKLKGEYPEDKYIDEIFNFDNSKNKIYNEKNKRGGSIVSKYGYFLAEKDGEIQESRARDKKKKKIIKKEGLEIRNYIAHFNYIPDAEKSILEMLEELRELLKYDRKLKNAVMKSIKDIFKEYGFIVEFAISHTKNGKKIKVCSVKSEKIKHLKNNELITTRNSEDLCELVKIMLEYKELQK

SEQ ID NO: 733 - protein, 1161 aa, Artificial
  Synthetic
MKVTKVDGISHKKYIEEGKLVKSTSEENRTSERLSELLSIRLDIYIKNPDNASEEENRIRRENLKKFFSNKVLHLKDSVLYLKNRKEKNAVQDKNYSEEDISEYDLKNKNSFSVLKKILLNEDINSEELEIFRKDVEAKLNKINSLKYSFEENKANYQKINENNVEKVGGKSKRNIIYDYYRESAKRNDYINNVQEAFDKLYKKEDIEKLFFLIENSKKHEKYKIRECYHKIIGRKNDKENFAKIIYEEIQNVNNIKELIEKVPDMSELKKSQVFYKYYLDKEELNDKNIKYAFCHFVEIEMSQLLKNYVYKRLSNISNDKIKRIFEYQNLKKLIENKLLNKLDTYVRNCGKYNYYLQDGEIATSDFIARNRQNEAFLRNIIGVSSVAYFSLRNILETENENDITGRMRGKTVKNNKGEEKYVSGEVDKIYNENKQNEVKENLKMFYSYDFNMDNKNEIEDFFANIDEAISSIRHGIVHFNLELEGKDIFAFKNIAPSEISKKMFQNEINEKKLKLKIFRQLNSANVFRYLEKYKILNYLKRTRFEFVNKNIPFVPSFTKLYSRIDDLKNSLGIYWKTPKTNDDNKTKEIIDAQIYLLKNIYYGEFLNYFMSNNGNFFEISREIIELNKNDKRNLKTGFYKLQKFEDIQEKTPKEYLANIQSLYMINAGNQDEEEKDTYIDFIQKIFLKGFMTYLANNGRLSLIYIGSDEETNTSLAEKKQEFDKFLKKYEQNNNIKIPYEINEFLREIKLGNILKYTERLNMFYLILKLLNHKELTNLKGSLEKYQSANKEETFSDELELINLLNLDNNRVTEDFELEANEIGKFLDFNGNKIKDRKELKKFDTNKIYFDGENIIKHRAFYNIKKYGMLNLLEKISDEAKYKISIEELKNYSNKKNEIEKNHTTQENLHRKYARPRKDEKFTDEDYKEYEKAIGNIQKYTHLKNKVEFNELNLLQGLLLKILHRLVGYTSIWERDLRFRLKGEFPENQYIEEIFNFDNSKNVKYKSGQIVEKYINFYKELYKDNVEKRSIYSDKKVKKLKQEKKDLYIRNYIAHFNYIPHAEISLLEVLENLRKLLSYDRKLKNAVMKSVVDILKEYGFVATFKIGADKKIGIQTLESEKIVHLKNLKKKKLMTDRNSEELCKLVKVMFEYKMEEKKSEN

SEQ ID NO: 734 - protein, 1287 aa, Artificial; identical to SEQ ID NO: 105
  Synthetic

SEQ ID NO: 735 - protein, 1373 aa, Artificial; identical to SEQ ID NO: 104
  Synthetic

SEQ ID NO: 736 - protein, 1161 aa, Artificial
  Synthetic
MKVTKVDGISHKKYIEEGKLVKSTSEENRTGERLSELLSIRLDIYIKNPDNASEEENRIRRENLKKFFSNKVLHLKDSVLYLKNRKEKNAVQDKNYSEEDISEYDLKNKNSFSVLKKILLNEDINSEELEIFRKDVEAKLNKINSLKYSFEENKANYQKINENNVEKVGGKSKRNIIYDYYRESAKRNDYINNVQEAFDKLYKKEDIEKLFFLIENSKKHEKYKIRECYHKIIGRKNDKENFAKIIYEEIQNVNNIKELIEKVPDMSELKKSQVFYKYYLDKEELNDENIKYAFCHFVEIEMSKLLKNYVYKKPSNISNDKVKRIFEYQSLKKLIENKLLNKLDTYVRNCGKYNYYLQDGEIATSDFIARNRQNEAFLRNIIGVSSVAYFSLRNILETENENDITGRMRGKTVKNNKGEEKYVSGEVDKIYNENKQNEVKENLKMFYSYDFNVDNKNEIEDFFVNIDEAISSIRHGIVHFNLELEGKDIFAFKNIAPSEISKKMFQNEINEKKLKLKIFRQLNSANVFRYLEKYKILNYLKRTRFEFVNKNIPFVPSFTKLYSRIDDLKNSLGIYWKTPKTNDDNKTKEIIDAQIYLLKNIYYGEFLNYFMSNNGNFFEISREIIELNKNDKRNLKTGFYKLQKFEDIQEKTPKEYLANIQSLYMINAGNQDEEEKDTYIDFIQKIFLKGFMTYLANNGRLSLMYIGNDEQINTSLAGKKQEFDKFLKKYEQNNNIEIPHEINEFVREIKLGKILKYTESLNMFYLILKLLNHKELTNLKGSLEKYQSANKEETFSDELELINLLNLDNNRVTEDFELEVNEIGKFLDFNGNKIKYRKELKKFDTNKIYFDGENIIKHRAFYNIKKYGMLNLLEKIADKAKYKISLKELKEYSNKKNEIEKNYRMQQNLHRKYARPKKDEKFNDEDYKEYEKAIGNIQKYTHLKNKVEFNELNLLQGLLLKILHRLVGYTSIWERDLRFRLKGEFPENQYIEEIFNFDNSKNVKYKSGQIVEKYINFYKELYKDNVEKRSIYSDKKVKKLKQEKKDLYIRNYIAHFNYIPHAEISLLEVLENLRKLLSYDRKLKNAVMKSVVDILKEYGFVVKFKIGADKKIGIQTLESEKIVHLKNLKKKKLMTDRNSEELCKLVKVMFEYKMEEKKSEN

SEQ ID NO: 737 - protein, 1210 aa, Artificial; identical to SEQ ID NO: 726
  Synthetic

SEQ ID NO: 738 - protein, 1208 aa, Artificial; identical to SEQ ID NO: 342
  Synthetic

SEQ ID NO: 739 - protein, 1268 aa, Artificial
  Synthetic
MKVSKVNHRRAAVAVNKKSVTVNGILYDAPVKKNVKTGNMSAYVSSKYVIDNVVKNSSRLYSPFSSKRIVIDREKIRIADRLKQCYVNFVKYYLSNGSLNEQQMRFNPNNTYMADSRVHFCVPSGIDIESLINSIVDSSLRKSLKRTYRFETNYGEKNTFNLPDLVKKSIKIYCTDEKRKLNDREEQEMYVLFSYMYEDKYKDRQKVLIANSISNQATKVKVCDDESRLIKLSIADTKKKPLWDFIVDYANSDKNGQYTILRNIRKSIVLFVCGVDVYRNIENNDNLDIWKWEEYGIQESQLFVKIENCYTTKGEDIALNEIRNVNLDHYMKAIGVLDDERSKFWFQHYENTIEALFSKKSKRKIERIKTAYLCEYLWKNFCSYVALKYVDLGKGVYHFTMSDKLSLMNKNTNENGIKFGEVDSRFNKGISSFDYERIKAEETIDRNISTYTTFATNIFAKSVIKDSYRQKKAGNSDALQYDDETYYNRKAMNPYALKRVLRYWGGQSRWKSELEELNVAELCIDIKNRLSKIRNSGVHYTSTSALKGNDDDSIVGMLIKKDFDDIKDVYASKYYSNNVWMFYNTDKISKMMEYLYQDDSNIRDAQIPAFNSVIKRKDMAEVIEKIVKKNSYKTIKELYQREKYRSCLYFMLKEIYYNRFIKQDNLKDQVIQIIDSNTELIGDNSRAVDNLKKRIHDVDSQTMSFGELCQVIMTDYNMQNQENKSIKSKERQDKDRKNGIDNSYKHFPLLLHHLIKVSFLKFIKTDEKLAFIREPRITELDKTLEQFEAQIQTVDIYNSLKMMVAENKSLLDWYTLAHFLMPKQLNHLIGDVKNYIQYLSNIDKRAGSVKNNKSASTEVKIRQYSEIVRILDFSLQYIGRVSNDVTDYFVDEDEYAAFLSKYVEFSGNDIVSMKAFCQSRTANGKHTIGLYCDGANPIMNRNIAYAKMYGNDEILSYIYNKVTKKDIEKYYVSQDNLEKVFADGKCQDVQQQNALCDFQKMKNHIELTEGSIYTDILNDFMAQFISWAYLRERDLMYFQLGLNYIRMFYGTYELEEKYYKLHGENINIEKGALLYQIVAMYSHELPIYKVDESGIAILAEKQGSSGASIKSFVTEYCKEEMKKAHTYENGLELFEDVNQHDDLSKLRNDFAHMRYMSARDKSIMDIVSEIYNGFFIYDTKLKKSVSFIFKNILMRYAVDVNIEFCHKGDNEDTNNLIRIKDEVGLYSDKYTYKVEDNDTVDIEVRNSEFLEQLKKLLEYKKESEGSEL

SEQ ID NO: 740 - protein, 1143 aa, Artificial; identical to SEQ ID NO: 11
  Synthetic

SEQ ID NO: 741 - protein, 1360 aa, Artificial; identical to SEQ ID NO: 92
  Synthetic

SEQ ID NO: 742 - protein, 1388 aa, Artificial; identical to SEQ ID NO: 102
  Synthetic

SEQ ID NO: 743 - protein, 1382 aa, Artificial; identical to SEQ ID NO: 631
  Synthetic

SEQ ID NO: 744 - protein, 1161 aa, Artificial
  Synthetic
MKITKIDGISHKKYIKEGKLVKSTSEENKTDERLSELLTIRLDTYIKNPDNASEEENRIRRETLKEFFSNKVLHLKDGILYLKDRREKNQLQNKNYSEEDISEYDLKNKNSFLVLKKILLNEDINSEELEIFRNDFEKKLDKINSLKYSLEENKANYQKINENNIKKVEGKSKRNIFYNYYKDSVKRNDYINNIQEAFDKLYKKEDIENLFFLIENSKKYEKYKIRECYHKIIGRKNDKENFATIIYEEIQNVNNMKELIEKVPNVSELKKSQVFYKYYLSKEKLNDENIKYVFCHFVEIEMSKLLKNYVYKKPSNISNDKVKRIFEYQSLKKLIENKLLNKLDTYVRNCGKYSFYLQDGEIATSDFIVGNRQNEAFLRNIIGVSSTAYFSLRNILETENENDITGRIKGKTVKNKKGEEKYISGEIDKLYDNNKQNEVKKNLKMFYSYDFNMNSKKEIEDFFSNIDETISSIRHGIVHFNLELEGKDIFTFKNIVPSQISKKMFHDEINEKKLKLKIFKQLNSANVFRYLEKYKILNYLNRTRFEFVNKNIPFVPSFTKLYSRIDDLKNSLCIYWKIPKANDNNKTKEITDAQIYLLKNIYYGEFLNYFMSNNGNFFEITKEIIELNKNDKRNLKTGFYKLQKFENLQEKTPKEYLANIQSLYMINAGNQDEEEKDTYIDFIQKIFLKGFMTYLANNGRLSLIYIGSDEETNTSLAEKKQEFDKFLKKYEQNNNIEIPHEINEFVREIKLGKILKYTESLNIFYLILKLLNHKEFTNLKGSLEKYQSANKEEAFSDQLELINLLNLDNNRVTEDFELEADEIGKFLDFNGNKVKDNKELKKFDTNKIYFDGENIIKHRAFYNIKKYGMLNLLEKIADKAKYKISLKELKEYSNKKNEIEKNYTMQQNLHRKYARPKKDEKFNDEDYKKYEKVIRNIQQYTHLKNKVEFNELNLLQSLLLRILHRLVGYTSIWERDLRFRLKGEFPENQYIDEIFNFDNSKNVKYKNGQIVEKYISFYKELYKDDMEKISIYSDKKLKELKKEKKDLYIRNYIAHFNYIPNAEVSLLEVLENLRKLLSYDRKLKNAIMKSIVDILKEYGFVATFKIGADKKIGIQTLESEKIVHLKNLKKEKLTTNRNSKELCKLVKVMFEYKMEEKKSEK

SEQ ID NO: 745 - protein, 1107 aa, Artificial
  Synthetic
MGSGKYRITKIARDWDENKKRIILKRIVSDGEVKYVNENNNVDIDITETYYRILSNNKAKFLGSNEQFIFKVNKMKRNIKNDCVIIKDYTEEEFEKLDKKIFFSRKIKVNNKDREKICRNFYEDEREIMKKRLEEAKKFNNIIFILLEFIQQIAKQEFENQKELENWFSYGGEKYCKEIFKIYSNMSQKEKYFKLLGHRNQGIASIYDEKKETLQRRLKLGDYSKYDLKRYYQKDYKEEAIKELKDKNKEGLEREIEELIKKNYKIDKLCDEISNLEFSFVESKKENKDKMSEIIVKIKEHYKKNVNVEEELENKEKYILSIIHNYVKGRYRKCLELQQKENVDFENLEKRIKEIFDSNEVTKKLKKSIINKVNSYKIFEMKFQNPNVESSDDLEILKAEETFLNKLSTAVSKVGYILNILLEIHFRNDILQDYNQVEKLWKSDSFQKICAIYPEINNDEKLLKGMIYFIQGLRQQVLHPKILWEKQNIYNAENIKEKEKIVSVKLQNEGEAYNKKGIQNYFENVLKKIPDYFIEKYESNNVFNIYRNSVDKIMEVVKNFNFKENNTIDYLFPKFHKIYKRMCKSENIDDRQNGARKYLLQTIYYYYFQYEIENDKNNMSKYLNLYRNKIKVKKISYSYIIDNKAVNNKNIEILYRNIQREGMLNNRLLQMNNEWIEFIVVQFSEFLTKKKLNWILDDLSEYKKKEKLDENDKNELLKIFKQKMNKNITYSNDSYAFISLAQFLDLKEISNLIHDIKKFVQFREKNILKYNPEKNKIYIEELRKILYILKVMLEHKERVIQKHYLGSYDEDISIMYGKDIEKKDIKDIEIKIKNKNQEVINQPLYKSGNDENSSWIILYGIEQAKRNGTFKFFEGFFNLNDDIKLCKEDIEKYEKLYNEKEENQKKVDEYISKLNNDIEKINNDINIEKTNDNKQLFYYYKNMIYGDGLKKGYDFINDIYSHYLSWAYRIERDCKIYKIKEYENKKNFNEYKFKEYKSIKYFRNEIAHFNYFQKTNKSLLELLNNFYDIFDYNLKYQRDVQKVINNIFEKYQVIREDGGPVIFYCKIDKKLKLSENIIPKKHLKCSKIKLIHEKYVEFFRKLFEYKK

SEQ ID NO: 746 - protein, 1382 aa, Artificial; identical to SEQ ID NO: 430
  Synthetic

SEQ ID NO: 747 - protein, 1382 aa, Artificial; identical to SEQ ID NO: 430
  Synthetic

SEQ ID NO: 748 - protein, 1412 aa, Artificial; identical to SEQ ID NO: 427
  Synthetic

SEQ ID NO: 749 - protein, 1388 aa, Artificial; identical to SEQ ID NO: 103
  Synthetic

SEQ ID NO: 750 - protein, 1287 aa, Artificial; identical to SEQ ID NO: 105
  Synthetic

SEQ ID NO: 751 - protein, 1315 aa, Artificial
  Synthetic
MIIIKKFGRSVITQDKNTDNKRERELDTSARAKAKSQNSQVFPFLNKKEDFINLWISEFDKLIYKPKGDDKPTKEMYTLREAAGKGFLNYWNQMPMVSKKDGAFSDMWMSKVHPYGRGITEFSPPLQLEKLIDQGLLSAMGGSEPLKNCHWNRVTSNVFKGLKVQLDILEAQAKNTFVIKNKTNSKRNRPASQNIKEFLLTDETAFINLWISEFDKLILKPQGHNKPTEKMYNLRQQAGVAFLNYWKKKPLIPWANSESFPDKWMLKVHPYGDKTSNNRSETLIKSKWGSVMRAKECLSDDQWEQVAFNVYSHLYGNQKTLNGKNKEIGLIAARANSIKQNVPSYTLDKDNNFLSDKKDKLRYIAALRGEGIKWEEVKDRYKWKELTQLINIEEIDSTDIAKRKQHLAECFYTHHGRIFGDIQNSKIEDKDCFLYHSLVKEILFECIEKKQDFLNDTEVHQRLIYKENNRIMATAVSIGKLIHYQGGIEAIGNKEDLVNSKFLTDAGLTEIKQNESFVRQWLELIAIANTTLSQLVDPDGKHEDIFAATSFDDALKGLNNISDFDSKFKLLFGENHRLYDDDTERQKLLRIIYDTISALRNASFHFKNIQGFNKALEDNLSTKGRRQKGVVDKIIEYTKVHQQKQHELLIADLKAANVEDYLSQLQLDYLFEVVCKGERELLDMPKFSKLLLRAGEIGEKIISPVNATAMEHPAYQCCFISLKMLYDQDFVNWLKKQSNKNIASWMDSAKTRATNAAKKIFRNGTNISSKMARLRNIVEDETLVEYFSFITAETANEFQVQQQKNRYQSNSASAKEQSNFVEQFKQDFLIYAFKGYIGDIKFGKLDQGEKLLKCNAKGSLLPENNRSDTGAEDIERPWLYLVLHLVPIEVVNRITLQIKKHSVLTNSTLDDTRAAYTDIHQAFSLYLGVHGAILGLQSLSNEPELQVFFEKESDFNNLFTDNGEGLVPVKGLRDILRFGNLEQLKKMFSDKKVASDDITNLKEYLEATGGKSKIARAQEKRIELHKTLTELPKRLTKPRVKQTGIDTYEKNNNISISGSISEYRKDLKCIVSYRELKNKIYLYNVKQAHQLIMATQARLLGYSQIRERDLYFVLLTQLMLRGVTLEKEKKKKDKDKLNALDTDTVLDEEEKKKLEKQIKPERSLKDLVEKGLIFLALDQLSSSDKDLKAIHSEIEDMFVGVSPDSDNRNLRNRLAHFKDLGNKNLINITSQINEVRKMMSYDRKLKNAVSKSMIDLFERYNLILSFKVQSHKLQLKNLKSKQITHLNNKGITENLLSDDYVSVIKRLLLTEQNPE

SEQ ID NO: 752 - protein, 1229 aa, Artificial
  Synthetic
MKISKVDHIKSAISVDKDSQKGILYKNPNDGKNVADIGRHIDKLVDKAERGFGSKFKYSVSDSLSKEDKEKAQQKKDRFKENVKKSIENQNMLIQPVQIDDEFVLALSMVQGGEGANVLSRKAREKSAFSRFLFDYANLDEEYRMDKLRRIRRIVLVYFYGPDALDDEIKGAFSVWDDHKKRQGDTAKFIEHTFLEQKQKPDKKEETQNYKLLADTIRNTNIKSYRATDDFVKAAMSEEGNDLFFDDADLNAFWIYHIESEVERIYAKIKRLNRNNTYKLGRGYICEKVWKGIINYICIKYIAIGKAVFNVAMEDVTSEGDENLGVVAEPYMKGISSFDYEVIKAEERLQRETAVYTTFAINSFLTATVEIDNKHYDISDKELKILPYAKRNILQYYGGQSRWNDFDFDSMSEGDSDKYLWSQIKSILESMRNESFHFKTENYRCDWDKNLISEMFKADSKACGKTEVTRFYSNNIPMFYAVKDIEKLMYKLYDEYTVRVSQVPAFNTVFVRKNFPDFIKNEMHINTSFSLDDTVKYQSALYYLLKEIYYNLFLTDKASKSEFLSAVRNMKGADKKQVFATRDFQARIKEINESRDYTLSEICQLIMTEYNQQNDKWMKKKTNTAQKKRPDGYQHYKALLLEGLRKAFLSYIDKDEQLFGFIKKPLLREKLAENDFLPNFSTKRYNELIEELETEAELQKWYVTGRLLTPKQVNHLSGCFKNYIQYKWDIERRSESTGNRLTVSCEEVILYKKILQVLEICTKLSGCISNMVSDYFEDEDDYARYLAGFLDYESSLGDYSVSPSGKLKDFCRTSVDSSDDTVSIYYDGENPILQRNIVLAKLYGNGQIISDVLKDNKVSLEDIKEFYRSKDKLTAYNTTGTYNSIDELKEIKKYQELKNHVEFIDIVEYTEILNELQGQLVNYTFLRERDLLYFQLGFHFSCLNNDSYKPSEYVRIEACDKVISNAILHQIASLYINGISLYIKDEAGTYVKDKDKSAGGNISDFFKYCKNTFTEYSDSQTVYNAGLELFENLDEHKQIIDLRNYIDHFKYYISDKSVNSGRSLIDIYSEVFDRFFTYDLKYHKNIPNTLYNILMGHFIETNFDFSTGTKDIEKDKKLVKKNRASLKIIKASSEPFTYKVQGKKVECPAKSEKFLRNVISLLYYRESNTPDIIYREGTIKNAEPDNKGKNGIKNKLDKSKNHKQERNNNHKTEKLSSNPFDSLLDDFLL

SEQ ID NO: 753 - protein, 1210 aa, Artificial
  Synthetic
MKITKRKWEDVPPLFFHRDKDSGRLIRQDDREHDYTDELFRKTTVDSIFIRSLQNRLLRSQDKEGNKIGRNEITELVENLCKGAEIQKSIDEIKDSKSNVKALCDKTLTDYGKSFAAEEGRTTLYEAILNLAKGNAIQKAMAEAELKQIHEALKKEKEDRINRVQNSIKNNKIPLKVNEDGTISANNDRASWLLELLKPVASEHDKGDRYPVLTEMEGIVSFDKLCEEVRNKIHGRKGRTRSIAMSVDEAVKEYLKELWKKHADRHRDMRYYFQAVKEYFKENFPIRTKQKGAGIRQSLLKEDTVVARLLDPKHMAKAVRRKLINQSIQMHILYGKLYEYCCREDRNLPVNSETLQLIQVLEAFKKQLMTAVLWSVSRLCYFYEFYSGDILLAEEYRRDFLNQKNDHKDIQACKEKLQDFFPLAELQEKIRECADKDINNIKDKITNDVLACNNLLEECVFCISKLRNNIFHYKNLSFTQALKHIANENKEEDIPIILRLYKQDCENVNKAFANRISSMNLPLYYSTEFLLRIFKKQGAELSLYSTKNQMTPSFKRVYERGKNLRLEYEREPMRSNIANEYDKDPQSDYWMRWFSQFATGTVDTNAGIKGEMEDYPHASVNLGIEIEAGTNIDAQRAMRNLLQLIYKHHFLPEVQKDETVVTDVIPKVLERNRKLSEVRNRSDKTYGYKEIEELCKKNKGKKDSLSELMKDLQRKVSETEKEKRELAREKTDYAQRFILDIFAEAFCNFMDERYEDEYQEIMSPIKNEEEAKKWTEMFTDKADKDNKDKLLVLKTSFDKDNVEKYLLALYPLMRLLDDKELSELQQQMLRFRASVSGWQGGTDFSEDIAMAEKIEELAELVKLTEPESQYAEEAWKNRAIGVFEQFVEGKMAEYGTFYIQNDSLTQVPRGNMRKLLRSGVIGVYNKVLASCKQATKADYGAYSGDHWSIEDPDGNPIKSAEQAQALLQRLHKKYTESPSQFSDDDHKLYDKTLRQLDAYNRAMKNLSFGSLYEICRIHMETLSRWVGFVQDWERDMYFLLLAWTKQGKLLNVTETDVIEIFEKGSVIYKMNKKLKNGDRYAFTSIYRNNNDEKLEFLQIRNFIAHLHLLRKSEWKGDKKAGYSVIEDYINKLRFLLSYDQKRMNAVTKAMQQIFEKHKVIVKFMVEKGGMLKVKDVKPGIIEHLKQTKRIEIPCHGERFTDSLLVLMKYQ

SEQ ID NO: 754 - protein, 1210 aa, Artificial; identical to SEQ ID NO: 753
  Synthetic

SEQ ID NO: 755 - protein, 1388 aa, Artificial
  Synthetic
MKLSKVTYRVKDKNAKYKKEYNVRAAVANNSENAGGVLYHVPGVDLIDLREQMLDRDRSVRLLYNIFNHIQTGTKPKKWGNDETLSVDENERKAKEQNIKIMNYKWREACSEYIEKSQSTINSVLFYSYEESGYKTKRMNDNEAIIVKMQYENRLSHFTGGKLEDFVAYTLRNSLVVSRYDNQEFDSVNAMVVFINNIGNGNISDKDKKTICKLADLIRNDFSKLNPNVQSSQGANMVRSVRNQNMVVQPQGDKVSFPLVSDEGKNTVTNKNVEKKGLNEFLLNYANLDDEERMEKLRKLRRIIDVYFSSPSHYQKDMDISLSDNIDKTKFDVWKKHETGKKNTELFVDIPDELLTAETEKIKLDAVLEKKARKRLTDSIRKQNMICYRYTRAVVEKYNSTENLFFENDSINQYWIHHIENAVERILKSCKAETLFKLRRGYLTEKVWKDAINLISIKYIALGKVIYNFTVDDIWKDKKVKNLGSIDEKIKHGITSFDYEMIKAQEALQRELAVNVAFAANNLARAVCDMTNLKDKESDFLIWNKKDIANKLKNKDDMASVSVVLQFFGGKYSWDIDAFREAYKGNKYNYEVCFIDDLRKAVYAARNESFHFKTALVNNDIWNTEFFGKLFIKETEICLDIEKDRFYSNNLPVFYSDNDLKKMLDHLYNNKVSRAAQVPSYNSVMVRKYFPENITSTLKYQKPGYDEDTLEKWYSACYYLLKEIYYNSFLQSDEALALFEESVNNLKGDNKDQELAVKNFRNNYKNIKSSCTSFSQVCQMYMTEYNQQNNQFKKVRSSKDSIVDKPIYQHYKLLLKKVIANAFASYLQHNEELFGFIGKPLKVNCLKEIDKEQFLPEWTSKKYVSLCEEVRKSPELQKWYIVGKFLNSRSLNLMAGSMRSYIQYVNDIKRRADGIGNELHVIAQNLDVVNKWVQVIEVCLLLSSRVSNEFEDYFYDKDDYAAYLKSYVDFDNSDMPSEYSALVEFSDQGKVDLYVDPSNPKVNRNIVQSKLFAADYILRDIIEPVSKDEIEDFYNQKDEITTCKIKGAELTDEEQKKILKYQKLKNRVELRDVVEYGEIINELLGQLINWSFMRERDLLYFQLGFHYNCLRNDSAKPEEYKNLVLDDISIKDAILHQIIGVYVNGVAIYAPGKDKNKLESQCVKGRVGGKIGAFCGYSLYLKLAADTLYNAGLEVFEVLPEHEDIINLRNGIDHFKFYLGGYRSIISLYSEVFDRFFTYDMKYQKNVLNLLQNILLRHNVIIEPIFESGIKKIGKDTKPCAKLSIRSIISDSFEYKIKDGNLIADAKDKRYLETIKKILFYPEVEPEVRILSSKDSFEQNNQYGYMKEKSENNKNKKNKKNNGNRDEKKNSDGLTYNPFLNLPFELPE

SEQ ID NO: 756 - protein, 1388 aa, Artificial; identical to SEQ ID NO: 755
  Synthetic

SEQ ID NO: 757 - protein, 1330 aa, Artificial
  Synthetic
MKREKNITIMKISKVNHRRTAVALNGDKSELGGILYEAPVQKDKNGNYNDVIAETGKVVNEALDKKSRLYTPFNNQKVIIDKNLQRYANNLKRCYINFVKQYVNNKSFNYKAMQFIPDIQNPKTNDAVNYRTDRDNVYNKNKYYDKQTKSKSKKFIYEKIVIPQNEKNIVISALVNCSLRKSLRKDVSYKTKSGEIKTYNLPELVKKSMRFYCLEGQREPDEKEKYEMYILFSYMKEDKRTKNTDLLVKSISNQNTKVKVEDIDGNKLLKLSIADTKKKPLWEYLIKYADSSRQRELMYDIRKKIILYVAGIEEYENIKEDSGLSKVSWSKYNISDNKMFFDINSCTDKRKQNLEIKIREANIEHYRNASSKLCDDESIFWFQHFEGVIETLFSKKSKISEERLGCAYICDYLWKDFLSYLAAKYIDLGKGVYHFTMKDKLDMLNKNEAVTDLRFGIVSEKYEKGITSFDYERIKAEEELDRNIAAYVTFAADIFAKSVIKSDYRTKKDNNSDVLQYSDKEFRNSEVIRDNAEKNILQYWGGYSRWGTENSKLPENNKVSDFGKLDVSDLCIDIKKHLAGIRNSSVHYTTKIKNESAADGSNVKILFEKDLADINIIYADKYYSNNVWMFYSLEDINKLIAFLYKEKRVIRQVQIPSFSRILKRKAMQDVINEIFKDDFDENIVNPELKEKYRNSLYFMLKEIYYNAFIIQPELKEKFKDKIKTMKSELYNKLKTIDKKEYKALYCMLSNEESALKNFADRIYSVDGDNVSFADICKILMTDYNMQNQEKKNIESMEQKKKNKGKDENYKHFPLLLHKVLKELFIEYLKQTHELEFLRNNICIKSDVTMESFESQIKGVEIYKDLKEKIDKNNSLLDWYVIAHFLMPKQLNHLIGNIKNYIQFATNIDKRAESVKNLTESGMVKRIQYYDDIVRTLEFSAQYIGKISNNINDYFNSEDEYVSFLSKYVGFINDKSEDVLTELKDFCREKINNGSQIIGIYYGGDNVIINRNVIYAQMYSNAEVFSNIYKKVTKNDIINYYEKQNDLKDVFKSGVCQNEGEQRSLCEFQQLKNRIELTELSTYADMVNDFMAQFVEWAYLRERDLMYFQLGIHYIRLFYSDNVLDEKYHKLSDNVIDIEEGALLYQIVAMYDYELRIFETDNSGNAKRIGQGGPGKSIPVFLKKYCNGTDVYECGLELFEDINQHENIIGFRNDIAHMRYMSNQAMNIMSIVSNIYKSFFVYDTKLKKSISLVFKNILMRYGVIADLVFSYNNKNQSIKDDMDINIINIKNLKSDKYVYKIVNEDIVKQVEIEIRNQVFLEQLHNLLYFSR

SEQ ID NO: 758 - protein, 1391 aa, Artificial; identical to SEQ ID NO: 274
  Synthetic

SEQ ID NO: 759 - protein, 1104 aa, Artificial; identical to SEQ ID NO: 697
  Synthetic

SEQ ID NO: 760 - protein, 1299 aa, Artificial; identical to SEQ ID NO: 495
  Synthetic

SEQ ID NO: 761 - protein, 1382 aa, Artificial; identical to SEQ ID NO: 464
  Synthetic

SEQ ID NO: 762 - protein, 1204 aa, Artificial; identical to SEQ ID NO: 327
  Synthetic

SEQ ID NO: 763 - protein, 927 aa, Artificial
  Synthetic
LGKVIYNFTVDDIWKDKKVKNLGSIDEKIKHGITSFDYEMIKAQEALQRELAVNVAFAANNLARAVCDMTNLKDKESDFLIWNKKDIANKLKNKDDMASVSVVLQFFGGKSSWDIDAFREAYKGNKYNYEVCFIDDLRKAVYAARNESFHFKTALVNNDIWNTEFFGKLFIKETEICLDIEKDRFYSNNLPVFYSDNDLKKMLDHLYNNKVSRAAQVPSYNSVMVRKYFPENITSTLKYQKPGYDEDTLEKWYSACYYLLKEIYYNSFLQSDEALALFEESVNNLKGDNKDQELAVKNFRNNYKNIKSSCTSFSQVCQMYMTEYNQQNNQFKKVRSSKDSIVDKPIYQHYKLLLKKVIANAFASYLQHNEELFGFIGKPLKVNCLKEIDKEQFLPEWTSKKYVSLCEEVRKSPELQKWYIVGKFLNSRSLNLMAGSMRSYIQYVNDIKRRADGIGNELHVIAQNLDVVNKWVQVIEVCLLLSSRVSNEFEDYFYDKDDYAAYLKSYVDFDNSDMPSEYSALVEFSDQGKVDLYVDPSNPKVNRNIVQSKLFAADYILRDIIEPVSKDEIEDFYNQKDEITTCKIKGAELTDEEQKKILKYQKLKNRVELRDVVEYGEIINELLGQLINWSFMRERDLLYFQLGFHYNCLRNDSAKPEEYKNLVLDDISIKDAILHQIIGVYVNGAAIYAPGKDKNKLESQCVKGRVGGKIGAFCGYSLYLKLAADTLYNAGLEVFEVLPEHEDIINLRNGIDHFKFYLGGYRSIISLYSEVFDRFFTYDMKYQKNVLNLLQNILLRHNVIIEPIFESGIKKIGKDTKPCAKLSIRSIISDSFEYKIKDGNLIADAKDKRYLETIKKILFYPEVEPEVRILSSKDSFEQNNQYGYMKEKSENNKNKKNKKNNGNRDEKKNSDGLTYNPFLNLPFELPE

SEQ ID NO: 764 - protein, 1208 aa, Artificial; identical to SEQ ID NO: 342
  Synthetic

SEQ ID NO: 765 - protein, 1373 aa, Artificial; identical to SEQ ID NO: 104
  Synthetic

SEQ ID NO: 766 - protein, 1287 aa, Artificial; identical to SEQ ID NO: 105
  Synthetic

SEQ ID NO: 767 - protein, 1175 aa, Artificial
  Synthetic
MKITKRKWEDVPPLFFHRDKDSGRLIRQDDREHDYTDELFRKTTVDSIFIRSLQNRLLRSQDKEGNKIGRNEITELVENLCKGAEIQKSIDEIKDSKSNVKALCDKTLTDYGKSFAAEEGRTTLYEAILNLAKGNAIQKAMAEAELKQIHEALKKEKEDRINRVQNSIKNNKIPLKVNEDGTISANNDRASWLLELLKPVASEHDKGDRYPVLTEMEGIVSFDKLCEEVRNKIHGRKGRTRSIAMSVDEAVKEYLKELWKKHADRHRDMRYYFQAVKEYFKENFPIRTKQKGAGIRQSLLKEDTVVARLLDPKHMAKAVRRKLINQSIQMHILYGKLYEYCCREDRNLPVNSETLQLIQVLEAFKKQLMTAVLWSVSRLCYFYEFYSGDILLAEEYRRDFLNQKNDHKDIQACKEKLQDFFPLAELQEKIRECADKDINNIKDKITNDVLACNNLLEECVFCISKLRNNIFHYKNLSFTQALKHIANEIKEEDIPIILRLYKQDCENVNKAFANRISSMNLPLYYSTEFLLRIFKKQGAELSLYSTKNQMTPSFKRVYERGKNLRLEYEREPMRSNIANEYDKDPQSDYWMRWFSQFATGTVDTNAGIKGEMEDYPHASVNLGIEIEAGTNIDAQRAMRNLLQLIYKHHFLPEVQKDETVVTDVIPKVLERNRKLSEVRNRSDKTYGYKEIEELCKKNKGKKDSLSELMKDLQRKVSETEKEKRELAREKTDYAQRFILDIFAEAFCNFMDERYEDEYQEIMSPIKNEEEAKKWTEMFTDKADKDNKDKLLVLKTSFDKDNVEKYLLALYPLMRLLDDKELSELQQQMLRFRASVSGWQGGTDFSEDIAMAEKIEELAELVKLTEPESQYAEEAWKNRAIGVFEQFVEGKMAEYGTFYIQNDSLTQVPRGNMRKLLRSGVIGVYNKVLASCKQATKADYGAYSGDHWSIEDPDGNPIKSAEQAQALLQRLHKKYTESPSQFSDDDHKLYDKTLRQLDAYNRAMKNLSFGSLYEICRIHMETLSRWVGFVQDWERDMYFLLLAWTKQGKLLNVTETDVIEIFEKGSVIYKMNKKLKNGDRYAFTSIYRNNNDEKLEFLQIRNFIAHLHLLRKSEWKGDKKAGYSVIEDYINKLRFLLSYDQKRMNAVTKAMQQIFEKHKVIVKFMVEKGGCLRLRM

SEQ ID NO: 768 - protein, 1175 aa, Artificial; identical to SEQ ID NO: 767
  Synthetic

SEQ ID NO: 769 - protein, 1382 aa, Artificial; identical to SEQ ID NO: 503
  Synthetic

SEQ ID NO: 770 - protein, 1360 aa, Artificial; identical to SEQ ID NO: 92
  Synthetic

SEQ ID NO: 771 - protein, 1388 aa, Artificial; identical to SEQ ID NO: 102
  Synthetic

SEQ ID NO: 772 - protein, 1412 aa, Artificial
  Synthetic
MKLSKEKHTRSAVANNGDIKSAEVNNGNTKSEEVNNGDIRSAVANEEQNIGGILYRFPGKSIDGVKDQMLRRDKEVKKLYNVFNQIQVGTKPKKWNNDEKLSPEENERRAQQKNIKMKNYKWREACSKYVESSQRIINDVIFYSYRKAENKLRYMRKNEDILKKMQEAEKLSKFSGGKLEDFVAYTLRKSLVVSKYDTQEFDSVAAMVVFLECIGKNNISDHEREIVCKLLELIRKDFSKLDPNVKGSQGANIVRSVRNQNMIVQPQGDRFLFPQVYAKENETVTNKNVEKEGLNEFLLNYANLDDEKRAESLRKLRRILDVYFSAPNHYEKDMDITLSDNIEKEKFNVWEKHECGKKETGLFVDIPDVLMEAEAENIKLDAVVEKRERKVLNDRVRKQNIICYRYTRAVVEKYNSNEPLFFENNAINQYWIHHIENAVERILKNCKAGKLFKLRKGYLAEKVWKDAINLISIKYIALGKAVYNFALDDIWKDKKNKELGIVDERIRNGITSFDYEMIKAHENLQRELAVDIAFSVNNLARAVCDMSNLGNKESDFLLWKRNDIADKLKNKDDMASVSAVLQFFGGKSSWDINIFKDAYKGKKKYNYEVRFIDDLRKAIYCARNENFHFKTALVNDEKWNTELFGKIFERETEFCLNVEKDRFYSNNLYMFYQVSELRNMLDHLYSRSVSRAAQVPSYNSVIVRTAFPEYITNVLGYQKPGYDADTLGKWYSACYYLLKEIYYNSFLQSDRALQLFEKSVKTLSWDDKKQQRAVDNFKDHFSDIKSACTSLAQVCQIYMTEYNQQNNQIKKVRSSNDSIFDQPVYQHYKVLLKKAIANAFADYLKNNKDLFGFIGKPFKANEIREIDKEQFLPDWTSRKYEALCIEVSGSQELQKWYIVGKFLNARSLNLMVGSMRSYIQYVTDIKRRAASIGNELHVSVQDVEKVEKWVQVIEVCSLLASRTSNQFEDYFNDKDDYARYLKSYVDFSNIDMPSEYSALVDFSNEEQSDLYVDPKNPKVNRNIVHSKLFAADHILRDIVEPVSKDNIEEFYSQKAEIAYCKIKGKEITAEEQRAVLKYQKLKNRVELRDIVEYGEIINELLGQLINWSFMRERDLLYFQLGFHYDCLRNDSKKPEGYKNIKVDENSIKDAILYQIIGMYINGVTVYAPEKDGDKLKEQCVKGGVGVKVSAFHRYSKYLGLNEKTLYNAGLEIFEVVAEHEDIINLRNGIDHFKYYLGDYRSMLSIYSEVFDRFFTYDIKYQKNVLNLLQNILLRHNVIVEPILESGFKTIGEQTKPGAKLSIRSIKSDTFQYKVKGGTLITDAKDERYLETIRKILYYAENEEDNLKKSVVVTNADKYEKNKESDDQNKQKEKKNKDNKGKKNEETKSDAEKNNNERLSYNPFANLNFKLSN

SEQ ID NO: 773 - protein, 1382 aa, Artificial; identical to SEQ ID NO: 430
  Synthetic

SEQ ID NO: 774 - protein, 1388 aa, Artificial; identical to SEQ ID NO: 185
  Synthetic

SEQ ID NO: 775 - protein, 1287 aa, Artificial; identical to SEQ ID NO: 105
  Synthetic

SEQ ID NO: 776 - protein, 1101 aa, Artificial; identical to SEQ ID NO: 73
  Synthetic

SEQ ID NO: 777 - protein, 1396 aa, Artificial
  Synthetic
MGNLFGHKKWYKADKIIKDKKGKESTIKQEVRIKRNYSVDRYTLNTNNKVKNNINNEDFVNQFIEYKTNNDIFKKFTKKFHMGNILFKLKAEESVKEIRNYNDFLEKEKAILEIEIYQQSEELRKKENITKKDIINKVINDGITEDSNEINMKIKTKKNNFEEIRIIINNESEEYYIKLRSLNNNELNLKREIYEVLKSINANLYTFTKNAIDDTDFKKRNYENFLRENMMKHLKKNIKEKYEITFFKSLSNSLKKIQGNIKKNDEIINFIKYYSNINGSKTVSENKKKFLEKILNTEVSISENDIIDFIIGELKFFGIIKRIEKLQEKTVNRTDGDIKNTYVNTYVLLDKHEKFKKYNRNKKDTIIKSFIKNIKDNTMKQKINQILRKFKIEELIEKLRIKNKNFDTEIFKIFKDHYQEMFSSEKFEEKSDEEKELYKIIYRYLKERIEKILINEQKVRLKKMEKIEIEKILNESILSEKVLKRVKQYTLEYVMYLGKLIHNDVNMTTVNTDDFTKLHAKEELDLELITFFASTNMELNKIFNGKEKITDFFGFNLNGQKITLKEKVPDFKLNILKKLNFINNENNIDEKLSHFYSFQKEGYLLRNRILHNSYGNIQETKNLEGEYENVENLIKELKVSDEEISKSLNLDIIFEGKVDIINKINSLEIGEYKDKKYLPSFSKIIPEIIRKFREINKDKLFDEESEKIILNVVKYVNKILYEKITSNEENKFIKTLPDKLVKKNNIKKENKNLLSIEEYYKNAQVSSSKGDKKAIKKYQNKVINAYLEYLENTFEKVIDFSNFNLNYNEIKTKIEERKNSKNKIVIKSIPININITNDTEYIISIFALLNNNTYLNKIRNRFFATSVWLNTQEYENLIDILDKVLSINLLRENNIIDILDLKNTIIEAKITENNEEYIRNYIFENNKEELKKRLFCEELDNKEDVLKIFEDKNFKFKNFIKKNESGNFKINFAILSNLECHFELDTKKVIGKNSKKLESFIQNTIDEYKSNIRTLFSSEFLEKYKKEIDNLMGDIESENESKFEKIYYPEEHKNELYIYKKNLFLNIGNPNFDKIYGLISKDIKNVDTKILFDDDIRKNKISEIDAILKNLNDKLNGYSNDYKAKYVNKLKENDDFFAKNIQNENYSSFGEFEKDYNKVSEYKKIRDLVEFNYLNKIESYLIDINWKLAIQMARFERDMHYIVNGLRELGIIKLSGYNTGISRAYPKRNGSDDFYATTAHYKFFDEESYKKFEKICYGFRIDLSENSEINKPENESIRNYISHFYIVRNPFVDYSIAQQIDRVSNLLSYSTRYNNSTYAGVFEVFKKDVNLDYDKLKTKFKLFDDEKNDNIKILKIKNLIESKKVSVLELESYNSDYVKNLIIELLTKIENTNDTL

SEQ ID NO: 778 - protein, 1159 aa, Artificial
  Synthetic
MKVTKVGGISHKKYTSEGRLVKSESEENRTDERLSALLNMRLDMYIKNPSNTETKENKKRIGKLKKFFSNKMVYLKDNTLSLKNGKKENIDREYSETDISEYDVRDSKNFAVLKKIYLNENVNSEELEVFRKDIKKKLNKINSLKYSFEKNKANYQKINENNIEKVEGKSKRNIIYDYYRESAKRDAYVSNVKEAFDKLYKEEDIAKLVLKIENLTKLEKSKIREFYHEIIGRKNDKENFAKIIYEEIQNVNNMKELIEKVPNMSELKKSQVFYKYYLNKEELNDKNIKYAFCHFVEIEMSQLLKNYVYKGLSNISNDKIKRIFEYQNLKKLIENKLLNKLDTYVRNCGKYNYYLQDGEIATSDFIARNRQNEAFLRNIIGVSSVAYFSLRNILETENENDITGRMRGKTVKNNKGEEKYVSGEVDKIYNENKQNEVKENLKMFYSYDFNMDNKNEIEDFFANIDEAISSIRHGIVHFNLELEGKDIFAFKNIAPSEISKKMFQNEINEKKLKLKIFRQLNSANVFRYLEKYKILNYLKRTRFEFVNKNIPFVPSFTKLYSRIDDLKNSLGIYWKTPKTNDDNKTKEIIDAQIYLLKNIYYGEFLNYFMSNNGNFFEISKEIIELNKNDKRNLKTGFYKLQKFEDIQEKTPKEYLANIQSLYMINAGNQDEEEKDTYIDFIQKIFLKGFMTYLANNGRLSLIYIGSDEETNTSLAEKKQEFDKFLKKYEQNNNIEIPHEINEFLREIKLGNILKYTERLNMFYLILKLLNHKELTNLKGSLEKYQSANKEETFSDELELINLLNLDNNRVTEDFELEADEIGKFLDFNGNKIKDKKELKKFDTKKIYFDGENIIKHRAFYNIKKYGMLNLLEKIADKAKYKISLKELKEYSNKKNEIEKNYRMQQNLHRKYARPKKDEKFNDKDYKEYEKAIGNIQKYTHLKNKVEFNELNLLQGLLLKILHRIVGYTSIWERDLRFRLKGEFPENQYIEEIFNFDNSKNVKYKSGQIVEKYINFYKELYKDNVEKRSIYSDKKVKKLKQEKKDLYIRNYIAHFNYIPHAEISLLEVLENLRKLLSYDRKLKNAVMKSVVDILKEYGFVATFKIGADKKIGIQTLESEKIVHLKNLKKKKLMTDRNSEELCELVKVMFEYKMKEKKSEN

SEQ ID NO: 779 - protein, 1145 aa, Artificial
  Synthetic
MCMKITKIDGISHKKYKEKGKLIKNNDTAKDIIEERFNDIEKKTKELFQKTLDFYVKNYEKCKEQNKERREKAKNYFSKVKILVDNKKITICNENTEKMEIEDFNEYDVRSGKYFNVLNKILNGENYTEEDLEVFENDLQKRTGRIKSIKNSLEENKAHFKKESINNNIIYDRVKGNNKKSLFYEYYRISSKHQEYVNNIFEAFDKLYSNSHEAMNNLFSEITKDSKDRNIRKIREAYHEILNKNKTEFGEELYKKIQDNRNNFDKLLEIEPEIKELTKSQIFYKYYIDKVNLDETSIKHCFCHLVEIEVNQLLKNYVYSKRNINKEKLENIFEYCKLKNLIKNKLVNKLNNYIRNCGKYNAYISNNDVVVNSEKISEIRTKEAFLRSIIGVSSSAYFSLRNILNTDNTQDITNKVDKEVDKLYQENKKIELEERLKLFFGNYFDINNQQEIKVFLMNIDKIISSIRHEIIHFKMETNAQNIFDFNNVNLGNTAKNIFSNEINEEKIKFKIFKQLNSANVFDYLSNKDITEYMDKVVFSFTNRNVSFVPSFTKIYNRVQDLANSLEIKKWKIPDKSEGKDAQIYLLKNIYYGKFLDEFLNEENGIFISIKDKIIELNRNQNKRTGFYKLEKFEKIEETNPKKYLEIIQSLYMINIEEIDSEGKNIFLDFIQKIFLKGFFEFIKNNYNYLLELKKIQDKKNIFDSEMSEYIAGEKTLEDIGEINEIIQDIKITEIDKILNQTDKINCFYLLLKLLNYKEITELKGNLEKYQILSKTNVYEKELMLLNIVNLDNNKVKIENFKILAEEIGKFIEKINIEEINKNKKIKTFEELRNFEKGENTGEYYNIYSDDKNIKNIRNLYNIKKYGMLDLLEKISEKTNYCIKKKDLEEYSELRKQLEDEKTNFYKIQEYLHSKYQQKPKKILLKNNKNDYEKYKKSIENIEKYVHLKNKIEFNELNLLQSLLLKILHRLVGFTSIWERDLRFRLIGEFPDELDVEDIFDHRKRYKGTGKGICKKYDRFINTHTEYKNNNKMENVKFADNNPVRNYIAHFNYLPNPKYSILKMMEKLRKLLDYDRKLKNAVMKSIKDILEEYGFKAEFIINSDKEIILNLVKSVEIIHLGKEDLKSRRNSEDLCKLVKAMLEYSK

SEQ ID NO: 780 - protein, 1218 aa, Artificial; identical to SEQ ID NO: 525
  Synthetic

SEQ ID NO: 781 - protein, 1388 aa, Artificial; identical to SEQ ID NO: 103
  Synthetic

SEQ ID NO: 782 - protein, 1161 aa, Artificial
  Synthetic
MKITKIDGISHKKYIKEGKLVKSTSEENKTDERLSELLTIRLDTYIKNPDNASEEENRIRRENLKEFFSNKVLYLKDGILYLKDRREKNQLQNKNYSEQDISEYDLKNKNSFSVLKKILLNEDINSEELEIFRNDFEKKLDKINSLKYSLEENKANYQKINENNIKKVEGKSKRNIFYNYYKDSAKRNDYINNIQEAFDKLYKKEDIENLFFLIENSKKHEKYKIRECYHKIIGRKNDKENFATIIYEEIQNVNNMKELIEKVPNVSELKKSQVFYKYYLSKEKLNDENIKYVFCHFVEIEMSKLLKNYVYKKPSNISNDKVKRIFEYQSLKKLIENKLLNKLDTYVRNCGKYSFYLQDGEIATSNFIVGNRQNEAFLRNIIGVSSVAYFSLRNILETENENDITGRIKGKTVKNNKGEEKYISGEIDKLYDNNKQNEVKKNLKMFYSYDFNMDSKNEIEDFFSNIDEAISSIRHGIVHFNLELEGKDIFAFKNIAPSEISKKMFQNEINEKKLKLKIFRQLNSANVFRYLEKYKILNYLKRTRFEFVNKNIPFVPSFTKLYSRIDDLKNSLGIYWKTPKTNDDNKTKEITDAQIYLLKNIYYGEFLNYFMSNNGNFFEISREIIELNKNDKRNLKTGFYKLQKFEDIQEKTPKEYLANIQSLYMINAGNQDEEEKDTYIDFIQKIFLKGFMTYLANNGRLSLIYIGSDEETNTSLAEKKQEFDKFLKKYEQNNNIEIPHEINEFVREIKLGNILKYTERLNMFYLILKLLNHKELTNLKGSLEKYQSANKEEAFSDQLELINLLNLDNNRVTEDFELEADEIGKFLDFNGNKIKDRKELKKFDTNKIYFDGENIIKHRAFYNIKKYGMLNLLEKISDEAKYKISIEELKNYSNKKNEIEKNHTTQENLHRKYARPRKDEKFTDEDYKNYKRAIKNIEEYTHLKNKVEFNELNLLQGLLLRILHRLVGYTSIWERDLRFRLKGEFPENQYIEEIFNFNNKQNVKYKSGQIVEKYIKFYKELYQNDETKINKYSSANIKVLKQEKKDLYIRNYIAHFNYIPHAEISLLEVLENLRKLLSYDRKLKNAVMKSVVDILKEYGFVAKFKIGADKKIGIQTLESEKIVHLKNLKKKKLMTDRNSEELCKLVKVMFEYKMKEKKSEN

SEQ ID NO: 783 - protein, 1330 aa, Artificial; identical to SEQ ID NO: 189
  Synthetic

SEQ ID NO: 784 - protein, 1382 aa, Artificial; identical to SEQ ID NO: 430
  Synthetic

SEQ ID NO: 785 - protein, 1360 aa, Artificial; identical to SEQ ID NO: 92
  Synthetic

SEQ ID NO: 786 - protein, 1044 aa, Artificial
  Synthetic
LDLKEIFKKYKDRKIDLLLKSINNNKINLEYKKENVNEEIYEINPTNDREMTFYGLLKEIIEKKDEQKSILEEKLDNFDITNFLENIEKIFNEKIEVNIIKGKVLNELREYIKEKEENNSDNKLKQIYNLELKKYIENNFSYKKQKSKSKNGKNDDLYLNFLKKIMFIEEADEKKEINKEKFKNKINSNFKNLFVQHILDYGKLLYYKENDEYIKNTGQLETKDLEYIKAKETLIRKMAVLVSFAANSYYNLFGRTENNILTQEISDDLLLGKIENEIYIKGEKNRRYVFKEKMLNYFFNPEIFGDNKIVELLSAISSSIYNIRNGVNHFDKMILGKYNNGLDLKDSNTIKDYFNFKKKEIQQDLKDRFISNNLQYYYTENEIKKYFEKYKFEILKTKASFAPNFKRILTKGENLSISESNNSYEFFKAYSENSDKNTEYNEFMKTRNFLLKELYYNNFYTEFLNNKAKFREAVEKVKKNKKRRGGKSYDVIGNYNFSDSISEYISYIHKSEMERIEINTEKNRKDTSKHIRDFIEEIFLEGFIEYLNNNNFKFLKNRNEVDKEREEIVRNLNIRIEGLDILNEDDSEILNLYLFFNMIDNKRISEFRNDMIKYKQFLAKRQNIDSKFLKIDIEKIEAIIEFVIITKEKLEILEGETKEQKKDNMNALFNKFYSSESEYDESLKKFIEETVLNDKKNTPFYSTDGKTPIVHSNLEKMPKYGTENFLSKVLKDSKYTLNNMTIKEKFEAEVSDELKEYKILEKVSRFKENEKPKKVIEYYNDCRCYLHKEWIKNKKNKEEFEHKEIYKKIIEEIRKYNYLENKEKLQNVYLLHEMLSDLLARNVAFFNKWERDFKFIVIAIKQFLRENDKEKVNEFLNPHKSDGSKDNFSVTNYRSKMKSIINNIHENFMSLLFLNNNLATGGIQMGRNNNFTWGNLRNYIAHFEYLHKEKDTISFLNQANLLIKLFSYDKKVQNHIIKSMKTLLEKYNIEIGFEISNDSEEIFEYKIKYINSKKGKMLGKNNEFEILENEFVRNVKALLEYSKL

SEQ ID NO: 787 - protein, 1382 aa, Artificial; identical to SEQ ID NO: 214
  Synthetic

SEQ ID NO: 788 - protein, 1382 aa, Artificial; identical to SEQ ID NO: 166
  Synthetic

SEQ ID NO: 789 - protein, 1101 aa, Artificial; identical to SEQ ID NO: 73
  Synthetic

SEQ ID NO: 790 - protein, 1200 aa, Artificial
  Synthetic
MDADGLSIGPFAESHDSLVIGQWISTIDKIATKPKGKGKATQEQRNVRSALGAACWARLVHPDGTFGALDSERMNWARNTWERRLHPYSDKNFVTNGREKTPDSKAHWFNRFCKGLSVQEVTDPSVAGDVAQSIEEHLTKDAFRRGGGTRRSPKASASRAGLIAVRADSITKNALRFPGADIAEQREHGWTEEDIARYVAKSDPVAQIYKAVLDAEPDGQRVRWSIAAERLYAHYARVFTAPDIVLDRKDADKILRGVLALHEALRQLYRHRLKRHRRKPVHVTVLLPRDIRDALTMISRQQDNSDLNALVRLGKVIHHEAADQAGVESVAKIIGNWPEDVSRSYYWTSDGQTEIKRTEAFVRAWRGPIAHAQRTLADWVDPDRLSVKSDSAEAKPPDMLGAKFDDALAQLDDDAAITKARLLFGTRSDALGGPDPKAVLRLTKRALSKLRNAAFHFKGMGGFVQDMTLKILPSGSEDCEVLERVHALWHADQKDRMIRVKDALVGAHAEVYLNQPQMNQLWELLGAQESKIALPRFNRVIARAAHAWTSKEDRLALPDSASSKDLEAQPARRCQYVLIKMVYERGFRTWLTSRSADDLNIWIKQATDHTTEAAKEFHKHQVSKEELAQISARSAGLVKLEPGEGFAKFLFKMTALTTTEFRVQKGYTHDAGRAREQASFLDDLHCDLVALAFDTYLKDKKLGWLYRLRQDESPGNPQSSAADLPLGSVASAQDWQAVLYLVLHLIPVDDVGRLLHRWRWWSNKYDDEHLPAEGLQLAEAFTLYLDMHDAKFDGAEAITGSAAFHDLFDSDTTRKQVFPDALAAEAEGPRQIMQRGLREMLRFGDMASFAPVFAGRKVTAEQVKEWQNLDAQVAAAHETRKKVHEDYKRGLRPSTENERLLEQKYDLAAYVKAVKTITRHKRLSHHVKLTNHVRLHQIVMRVLGRLVDYAGLWERDVYFVLLALICLRGQTPRDVFQNAYGRKALRGGQIRKAVQNLEPEYKTALERHFGTGAFEEGGVVTIRNDLAHLNMMGRAARSDDARVPLDLTCQIDRTRRLMSYDRKLQNSVSKSVTDLMEREKIRLSFRLDKGKLTQATVKADLIKHFKRKELTENLHDPLFLGMVADVYGGTVGQLQNDLTDAQDIAAVVNQTFAAVKAEQDARRRPRNNRAQSQNPGGGTRRNGGKEKYGKHPKGKRTDRH

SEQ ID NO: 791 - protein, 1394 aa, Artificial
  Synthetic
MRILQSKGRSFTTFSAESIGMTRGLEPDDTQSAAKWLDEGEKRIAPVRIPVFLKEDPDLIIRQVVSVLDKVIRKTKILRDLPLQTYVDRTLLAEELWQRITDRIRQSHDGEITPADLDAYKSRWSWKVHPYAKNPPDPSNPKGDQNAVLILKNGDRLPSPTDSRGRWHGALWKTTSDGDPDYASTANAIINHIFSNEVLIGGHYLSDWSGKGSKSSVGLAERRGDSIRSSTPDLKLPIGPGASARLLLDLDDQNAKPIIKLFFHQDIAAKIYAFVLERARVDGPRKPNVAFSVRSSDFGRLLSKHFGDVPNHRDFDDETKIKIVAFYDRVKRYYAALSKSESFRRAIAKAEISKLEAILPRDKSHLLAVLAGKERNTEISSLIRFGKLVGHACDISPVVEVQTAFDNNVRHLATSDGQSEIKRNENFTRVWRTSVAFSLRTLDSWLKPDWPKLTEDEARRRNDRNPGGQQINKSALERDIAQMRYIKTIAGEEPVEGFLNGAGIIFGSKHVEFEGEAARRCEIFAQGDKAKNRELVWAWLRLAAEMRHRTNHFSTKPRLVSLMQKGVLSPTRDNPGNFENRKGNEVQQAALDAFGQLLSFDINYQAILLVNDFNRLQVTRYTSDGQFKDVLRRALSTDDDPVITTPKFMSVLRKAKGIFDHDLESAPEWSKFLGSLDLTALSAAPDGPNQFKIGLLRHLFATDFQSWLARKANTKDQIQAAVVAVSEDKNRRTLDVLKNEESRVYAVAETAAKMLIFAKADSFSELAALVMSMAFAEDNTRKSYKPKPEEQSKRSTWVDDFQRDLFVYLFNHYLNTQSLHWIFDVTDLVGDGEARTVTLFDLGAGRWSLESKPWHSQFYAWLYLTPVDEVALLRNQMRRMLILEKKGGSNETPALRDLDRLMTLYIAVSSAGFDGTEHIQTTAEDDKRFRLYGGLLYEDAVQFEKVYSAAADTNDQSLPGTRRGLRQIARLGHISVLKGIFEKHLITPDEVSTLIETKKAKSFKDATKRAKLHNEIVTLSKGFKPDIHQLDKKCKEYKDLSAEITVHNFKAAGARLTEHARLHQLLMRVISRLADFTLIWERDRNYVLLALIYPKLLHPDENAPRLHRRDGKVGFLLPPETTKTMRAAHAPLSDNDKRKLSREIALTSENVEEGFLPLWDDDMGYRLTGYPIHLALLEMDKRDAFARFFDRSETENPLDVAERARIKRGTGNSSPLQRRQLTFKDGKRRIRNDFAHFNVIVSDRKRVSLTYLMNAVRSLVAYDRKLKNAVSKAVADILVDEGLDISWEMTGDRLRNPVVVPRLETNLKKVRKHRGLADPQFVLPLASVRYTSMVKALFDFQAGGYRKEIIVGQETKQRGELGYPVELRVLLGSLGADMPDDVLGMKLYVIQPQK

SEQ ID NO: 792 - protein, 1382 aa, Artificial; identical to SEQ ID NO: 278
  Synthetic

SEQ ID NO: 793 - protein, 1385 aa, Artificial; identical to SEQ ID NO: 670
  Synthetic

SEQ ID NO: 794 - protein, 1373 aa, Artificial; identical to SEQ ID NO: 104
  Synthetic

SEQ ID NO: 795 - protein, 1287 aa, Artificial; identical to SEQ ID NO: 105
  Synthetic

SEQ ID NO: 796 - protein, 1287 aa, Artificial; identical to SEQ ID NO: 105
  Synthetic

SEQ ID NO: 797 - protein, 1373 aa, Artificial; identical to SEQ ID NO: 104
  Synthetic

SEQ ID NO: 798 - protein, 1385 aa, Artificial
  Synthetic
MKLSKVTYRVKDKNAKYKKEYNVRAAVANNSENAGGVLYHVPGVDLIDLKEQMLDRDRSVRLLYNIFNQIQTGTKPKKWENDETLSVDENERKAKEQNIKIMNYKWREACSEYIEKSQSTINSVLFYSYEESGYKTKRMNDNEAIIVKMQYENRLSHFTGGKLEDFVAYTLRNSLVVSRYDNQEFDSVNAMVVFINNIGNGNISDKDKKTICKLADLIRNDFSKLNPNVQSSQGANMVRSVRNQNMVVQPQGDIVSFPLVSDEGKNTVTNKNVEKKGLNEFLLNYANLDDEERMENLRKLRRIIDVYFSSPSHYQKDMDISLSDNIDKTKFVVWKKHETGKKNTELFVDIPDELFTAETEKIKLDAVLEKQARKRLTDSIRKQNMICYRYTRAVVEKYNSTENLFFENDSINQYWIHHIENAVERILKSCKAETLFKLRRGYLTEKVWRDAINLISIKYIALGKVIYNFTVDDIWKDKKVKNLGSIDEKIKHGITSFDYEMIKAQEALQRELAVNVAFAANNLARAVCDMTNLKDKESDFLIWNKKDIANKLKNKDDMASVSVVLQFFGGKSSWDIDAFREAYKGNKYNYEVCFIDDLRKAVYAARNESFHFKTALVNNDIWNTEFFGKLFIKETEICLDIEKDRFYSNNLPVFYSDNDLKKMLDHLYNNKVSRAAQVPSYNSVMVRKYFPENITSTLKYQKPGYDEDTLEKWYSACYYLLKEIYYNSFLQSDEALALFEESVNNLKGDNKDQELAVKNFRNNYKNIKSSCTSFSQVCQMYMTEYNQQNNQFKKVRSSKDSIVDMPIYQHYKLLLKKVIANAFASYLQHNEELFGFIGKPLKVNCLKEIDKEQFLPEWTSKKYVSLCEEVRKSPELQKWYIVGKFLNSRSLNLMAGSMRSYIQYVNDIKRRADGIGNELHVIVQNLDVVDKWVQVIEVCLLLSSRVSNEFEDYFYDKDDYAAYLKSYVDFDNSDMPSEYSALVEFSDQGKVDLYVDPSNPKVNRNIVQSKLFAADYILRDIIEPVSKDEIEDFYNQKDEITTCKIKGAELTDEEQKKILKYQKLKNRVELRDVVEYGEIINELLGQLINWSFMRERDLLYFQLGFHYNCLRNDSAKPEEYKNLVLDDISIKDAILHQIIGMYVNGVAIYAPGKDKNKLESQCVKGRVGGKIGAFCGYSLYLKLAADTLYNAGLEVFEVLPEHEDIINLRNGIDHFKFYLGGYRSIISLYSEIFDRFFTYDMKYQKNVLNLLQNILLRHNVIIEPIFESGIKKIGKDTKPCAKLCISSIKSDSFEYKIKDGTLITDAKDKRYLETIKKLLYYPDIESNVKILLRKDNFNQNKDKKNVNNRKTKNNNKNGNRNRDKNSGGDGLTYNPFLNLIFDLPE

SEQ ID NO: 799 - protein, 1388 aa, Artificial; identical to SEQ ID NO: 103
  Synthetic

SEQ ID NO: 800 - protein, 1385 aa, Artificial; identical to SEQ ID NO: 670
  Synthetic

SEQ ID NO: 801 - protein, 1287 aa, Artificial; identical to SEQ ID NO: 105
  Synthetic

SEQ ID NO: 802 - protein, 1373 aa, Artificial; identical to SEQ ID NO: 104
  Synthetic

SEQ ID NO: 803 - protein, 1268 aa, Artificial; identical to SEQ ID NO: 76
  Synthetic

SEQ ID NO: 804 - protein, 1388 aa, Artificial; identical to SEQ ID NO: 103
  Synthetic

SEQ ID NO: 805 - protein, 1388 aa, Artificial
  Synthetic
MKLSKVTYRVKDKNAKYKKEYNVRAAVANNSENAGGVLYHVPGVDLIDLKEQMLDRDRSVRLLYNIFNQIHTGTKPKKWENDETLSVDENERKAKEQNIKIMNYKWREACSEYIEKSQSTINSVLFYSYEESGYKTKRMNDNEAIIVKMQYENRLSHFTGGKLEDFVAYTLRNSLVVSRYDNQEFDSVNAMVVFINNIGNGNISDKDKKTICKLADLIRNDFSKLNPNVQSSQGANMVRSVRNQNMVVQPQGDIVSFPLVSDEGKNTVTNKNVEKKGLNEFLLNYANLDDEERMENLRKLRRIIDVYFSSPSHYQKDMDISLSDNIDKTKFVVWKKHETGKKNTELFVDIPDELFTAETEKIKLDAVLEKQARKRLTDSIRKQNMICYRYTRAVVEKYNSTENLFFENDSINQYWIHHIENAVERILKSCKAETLFKLRRGYLTEKVWKDAINLISIKYIALGKVIYNFTVDDIWKDKKVKNLGSIDEKIKHGITSFDYEMIKAQEALQRELAVNVAFAANNLARAVCDMTNLKDKESDFLIWNKKDIANKLKNKDDMASVSVVLQFFGGKSSWDIDAFREAYKGNKYNYEVCFIDDLRKAVYAARNESFHFKTALVNNDIWNTEFFGKLFIKETEICLDIEKDRFYSNNLPVFYSDNDLKKMLDHLYNNKVSRAAQVPSYNSVMVRKYFPENITSTLKYQKPGYDEDTLEKWYSACYYLLKEIYYNSFLQSDEALALFEESVNNLKGDNKDQELAVKNFRNNYKNIKSSCTSFSQVCQMYMTEYNQQNNQFKKVRSSKDSIVDKPIYQHYKLLLKKVIANAFASYLQHNKELFGFIGKPLKVNCLKEIDKEQFLPEWTAKKYVSLCEEVRKSPELQKWYIVGKFLNSRSLNLMAGSMRSYIQYVNDIKRRADGIGNELHVIAQNLDVVDKWVQVIEVCLLLSSRVSNEFEDYFYDKDDYAAYLKSYVDFDNSDMPSEYSALVEFSDQGKVDLYVDPSNPKVNRNIVQSKLFAADYILRDIIEPVSKDEIEDFYNQKDEITICKIKGAELTDEEQKKILKYQKLKNRVELRDVVEYGEIINELLGQLINWSFMRERDLLYFQLGFHYNCLRNDSAKPEEYKNLVLDDISIKDAILHQIIGMYVNGVAIYAPGKDKNKLESQCVKGRVGGKIGAFCGYSLYLKLAADTLYNAGLEVFEVLPEHEDIINLRNGIDHFKFYLGGYRSIISLYSEIFDRFFTYDMKYQKNVLNLLQNILLRHNVIIEPIFESGIKKIGKDTKLCAKLCISSLKSDSFEYKIKDGTLITDAKDKRYLETIKKILFYPEVESEVRILSSKDSFEQNNQYGYMKGKSENNKNKKNKKNNGNRDEKKNSDGLTYNPFLDLPFELPE

SEQ ID NO: 806 - protein, 1388 aa, Artificial; identical to SEQ ID NO: 103
  Synthetic

SEQ ID NO: 807 - protein, 1388 aa, Artificial; identical to SEQ ID NO: 103
  Synthetic

SEQ ID NO: 808 - protein, 1678 aa, Artificial; identical to SEQ ID NO: 360
  Synthetic

SEQ ID NO: 809 - protein, 1366 aa, Artificial
  Synthetic
MKLSKENHIRSAVVISGKEGNIAGTLYKIPGEGTVDLKKRMLERDKAVKSLYNIFNQIQLGNEPKEWKENRNLSTEENTRRMHQKKVKIQNYKMKKACSRYVNTISRTINELLFFYKTTKTTQNNKVKYDKLKMMHKNEDIISKMKNENILQQFKVEGKNGKLEKGKLEDFVTLALRSSLVVSRYKGKDFDSVAAVAVFLENIGNNNISHEDERTINILLDLIREDFTKLNPNIDNTMGARLIRSVTNQNMLVQPQNDRFSFPCVHDSGKSKVSNKNVEKSGLDNFLLDYANLDKDIRENYLRKLRRIIDIYFSAPITYQKDMDVALSEVVVKDKFDVWKKHNEGKKDSNTFVKVPEVLIKAERDHEKLDTVIEKQARKELADRVRKQNMTCYRYTQAVVKKYNAKEALFFENDDINQYWIHHIENAVERILKSCKIGTLFKLHNGYLIEKVWKDVINLISIKYIALGKVVYNFALDDIWNDNKVKRLGDISEKIRSGITSFDYEMLKAQETLQRELAVNVAFSANNLARAVCNMSDLSDKTSDFLLWQPDDINNKMKKSTGNDENNEKNKRAVCAVLQFFGGKSLWNVVDFEKAYKNAGKHGYGVYFINDLRKAIFAARNESFHFKTASVNNEKWDVEFLGRMFEKETEFCLDIEKERFYSNNLPMFYKSSNLEKMLNHFYSKNISRTAQVLSYNTVFVRKTFPEYLNNVLKYKKPGTDAEILDKWYSACYYLLKEIYYNSFLQSKDAFKYFENAVYNLNSKNINHDSLGKKLNRDEMKRKKAAESFQRRFVEIKRVSDSSISYVCQVFMTDYNQQNNQNKKVRSSNDSLLDKPIYQHFKMLLKETIKSAFAAYLKDNNNKDLFGFIGEPLKINKNDDVKVIKKEEFLPDWKSEKYSLLIEKVKKSPKLQMWYIVGKFLNARSLNLMAGSMRSYLQYVSDINKRANVMGSKLHVEVLDKDTVKDWIQVIEVCLLLASRTSNQFDDYFNDGDDYAGYLKSYVDFSDENMPSAYSALVYFSDQGKIDLYVDPKNPKINRNIVQSKLFAADHILGNGRIVQPVSKDDIVEFYNLKAKIADSKIKGENISEKEQRNIIRYQRLKNKVELRDIVEYGEIINELLGQLINWSFMRERDLLYFQLGFHYNCLRNNSEKPEEYKRIEADDISINDAVLYQIIGMYVNGIPVYTSDNNKLKGKCVNGGAGGKIAAVCEYSEYLGFKKATLYESGLEVFEVLAEHDDIIKLRNGIEHFKYYLGNYRSIMSLYSEVFDRFFTYDLKYQKNVLNLLQNILLRHNIVIVPEFESGTKKVGKNIKQAAKISIKNIQSDKFTYKIKGGTASIDAKDDRYLETIKKILYYPEYDKDSGGVC

SEQ ID NO: 810 - protein, 1380 aa, Artificial; identical to SEQ ID NO: 143
  Synthetic

SEQ ID NO: 811 - protein, 1412 aa, Artificial; identical to SEQ ID NO: 427
  Synthetic

SEQ ID NO: 812 - protein, 1412 aa, Artificial; identical to SEQ ID NO: 427
  Synthetic

SEQ ID NO: 813 - protein, 1287 aa, Artificial; identical to SEQ ID NO: 105
  Synthetic

SEQ ID NO: 814 - protein, 1373 aa, Artificial; identical to SEQ ID NO: 104
  Synthetic

SEQ ID NO: 815 - protein, 1330 aa, Artificial
  Synthetic
MKREKNITIMKISKVNHRRMAVALNGDKSELGGILYEAPVQKDKNGNYNDVIAETGKVVNEALDKKSRLYTPFNNQKVIIDKNLQRYANNLKRCYINFVKQYVNNKSFNYKAMQFIPDIQNPKTNDAVNYRTDRDNVYNKNKYYDKQTKSKSKKFIYEKIVIPQNEQNIVISALVNCSLRKSLRKDVSYKTKSGEIKTYNLPELVKKSMRFYCLEGQREPDEKEKYEMYILFSYMKEDKRTKNTDLLVKSISNQNTKVKVEDIDGNKLLKLSIADTKKKPLWEYLIKYADSSRQRELMYDIRKKIVLYVVGIEEYENIKEDSGLSKVSWSKYNISDNKMFVDINSCTDKRKQNLELKIREANIEHYRNASSKLCDDESIFWFQHFEGVIETLFSKKSKISEERLGCAYICDYLWKDFLSYLAAKYIDLGKGVYHFTMKDKLDMLNKNEAVTDLRFGIVSEKYEKGITSFDYERIKAEEELDRNIAAYVTFAADIFAKSVIKSDYRTKKDNNSDVLQYSDKEFRNSEVIRDNAEKNILQYWGGYSRWGTENSKLPENNKVSDFGKLDVSDLCIDIKKHLAGIRNSSVHYTTKIKNESAADGSNVKILFEKDLADINIIYADKYYSNNVWMFYSLEDINKLIAFLYKEKRVIRQVQIPSFSRILKRKAMQDVINEIFKDDFDENIVNPELKEKYRNSLYFMLKEIYYNAFIIQPELKEKFKDKIKTMKSELYNKLKTIDKKEYKALYCMLSNEESALKNFADRIYSVDGDNVSFADICKILMTDYNMQNQEKKNIESMEQKKKNKGKDENYKHFPLLLHKVLKKLFIEYLKQTHELEFLRNNICIKSDVTMESFESQIKGVEIYKDLKEKIDKNNSLLDWYVIAHFLMPKQLNHLIGNIKNYIQFATNIDKRAESVKNLTESGMVKRIQYYDDIVRTLEFSAQYIGKISNNINDYFNSEDEYVSFLSKYVGFINDKSEDVLTELKDFCREKINNGSQIIGIYYGGDNVIINRNVIYAQMYSNAEVFSNIYKKVTKNDIINYYEKQNDLKDVFKSGVCQNEGEQRSLCEFQQLKNRIELTELSTYADMVNDFMAQFVEWAYLRERDLMYFQLGIHYIRLFYSDNVLDKKYHKLSDNVIDIEEGALLYQIVAMYDYELRIFETDNSGNAKRIGQGGPGKSIPVFLKKYCNGTDVYECGLELFEDINQHEHIIRFRNDIAHMRYMSNQAMNIMSIVSNIYKSFFVYDTKLKKSISLVFKNILMRYGVIADLVFSYNNKNQSIKDDMDINIINIKNLKSDKYVYKIVNEDIVKQVEIEIRNQVFLEQLHNLLYFSR

SEQ ID NO: 816 - protein, 1412 aa, Artificial
  Synthetic
MKLSKEKHTRSAVANNGDIKSAEVNNGNTKSEEVNNGDTRSAVANEEQNIGGILYRFPGKSIDGVKDQMLRRDKEVKKLYNVFNQIQVGTKPKKWNNDEKLSPEENERRAQQKNIKMKNYKWREACSKYVESSQRIINDVIFYSYRKAKNKLRYMRKNEDILKKMQEAEKLSKFSGGKLEDFVAYTLRKSLVVSKYDTQEFDSVAAMVVFLECIGKNNISDHEREIVCKLLELIRKDFSKLDPNVKGSQGANIVRSVRNQNMIVQPQGDRFLFPQVYAKENETVTNKNVEKEGLNEFLLNYANLDDEKRAESLRKLRRILDVYFSAPNHYEKDMDITLSDNIEKEKFNVWEKHECGKKETGLFVDIPDVLMEAEAENIKLDAVVEKRERKVLNDRVRKQNIICYRYTRAGVEKYNSNEPLFFENNAINQYWIHHIENAVERILKNCKAGKLFKLRKGYLAEKVWKDAINLISIKYIALGKAVYNFALDDIWKDKKNKELGIVDERIRNGITSFDYEMIKAHENLQRELAVDIAFSVNNLARAVCDMSNLGNKESDFLLWKRNDIADKLKNKDDMASVSAVLQFFGGKSSWDINIFKDAYKGKKKYNYEVRFIDDLRKAIYCARNENFHFKTALVNDEKWNTELFGKIFERETEFCLNVEKDRFYSNNLYMFYQVSELRNMLDHLYSRSVSRAAQVPSYNSVIVRTAFPEYITNVLGYQKPGYDADTLGKWYSACYYLLKEIYYNSFLQSDRALQLFEKSVKTLSWDDKKQQRAVDNFKDHFSDIKSACTSLAQVCQIYMTEYNQQNNQIKKVRSSNDSIFDQPVYQHYKVLLKKAIANAFADYLKNNKDLFGFIGKPFKANEIREIDKEQFLPDWTSRKYEALCIEVSGSQELQKWYIVGKFLNARSLNLMVGSMRSYIQYVTDIKRRAASIGNELHVSVHDVEKVEKWVQVIEVCSLLASRTSNQFEDYFNDKDDYARYLKSYVDFSNVDMPSEYSALVDFSNEEQSDLYVDPKNPKVNRNIVHSKLFAADHILRDIVEPVSKDNIEEFYSQKAEIAYCKIKGKEITAEEQKAVLKYQKLKNRVELRDIVEYGEIINELLGQLINWSFMRERDLLYFQLGFHYDCLRNDSKKPEGYKNIKVDENSIKDAILYQIIGMYVNGVTVYAPEKDGDKLKEQCVKGGVGVKVSAFHRYSKYLGLNEKTLYNAGLEIFEVVAEHEDIINLRNGIDHFKYYLGDYRSMLSIYSEVFDRFFTYDIKYQKNVLNLLQNILLRHNVIVEPILESGFKTIGEQTKPGAKLSIRSIKSDTFQYKVKGGTLITDAKDERYLETIRKILYYAENEEDNLKKSVVVTNADKYEKNKESDDQNKQKEKKNKDNKGKKNEETKSDAEKNNNERLSYNPFANLNFKLSN

SEQ ID NO: 817 - protein, 1161 aa, Artificial
  Synthetic
MKVTKVDGISHKKYIEEGKLVKSTSEENRTSERLSELLSIRLDIYIKNPDNASEEENRIRRENLKKFFSNKVLHLKDSVLYLKNRKEKNGVQDKNYSEEDISEYDLKNKNSFSVLKKILLNEDINSEELEIFRKDVEAKLNKINSLKYSFEENKANYQKINENNVEKVGGKSKRNIIYDYYRESAKRNDYINNVQEAFDKLYKKEDIEKLFFLIENSKKHEKYKIREYYHKIIGRKNDKENFAKIIYEEIQNVNNIKELIEKVPDMSELKKSQVFYKYYLDKEELNDKNIKYAFCHFVEIEMSQLLKNYVYKRLSNISNDKIKRIFEYQNLKKLIENKLLNKLDTYVRNCGKYNYYLQDGEIATSDFIARNRQNEAFLRNIIGVSSVAYFSLRNILETENENDITGRMRGKTVKNNKGEEKYVSGEVDKIYNENKQNEVKENLKMFYSYDFNMDNKNEIEDFFANIDEAISSIRHGIVHFNLELEGKDIFAFKNIVPSEISKKMFQNEINEKKLKLKIFRQLNSANVFRYLEKYKILNYLKRTRFEFVNKNIPFVPSFTKLYSRIDDLKNSLGIYWKTPKTNDDNKTKEIIDAQIYLLKNIYYGEFLNYFMSNNGNFFEISREIIELNKNDKRNLKTGFYKLQKFEDIQEKTPKEYLANIQSLYMINAGNQDEEEKDTYIDFIQKIFLKGFMTYLANNGRLSLIYIGSDEETNTSLAEKKQEFDKFLKKYEQNNNIEIPHEINEFVREIKLGKILKYTESLNMFYLILKLLNHKELTNLKGSLEKYQSANKEETFSDELELINLLNLDNNRVTEDFELEANEIGKFLDFNGNKIKDRKELKKFDTNKIYFDGENIIKHRAFYNIKKYGMLNLLEKISDEAKYKISIEELKNYSNKKNEIEKNHTTQENLHRKYARPRKDEKFTDEDYKKYEKAIRNIQQYTHLKNKVEFNELNLLQSLLLRILHRLVGYTSIWERDLRFRLKGEFPENQYIHEIFNFDNSKNVKYKNGQIVEKYISFYKELYKDDTEKISIYSDKKVKELKKEKKDLYIRNYIAHFNYIPHAEISLLEVLENLRKLLSYDRKLKNAVMKSVVDILKEYGFVATFKIGADKKIGIQTLESEKIVHLKNLKKKKLMTDRNSEELCELVKVMFEYKMKEKKSEN

SEQ ID NO: 818 - protein, 1261 aa, Artificial
  Synthetic
MYMKITKIDGVSHYKEKEKGVLKGKDILNGKIEKIVKKRYDATIESKIYKEFIKLRKNRIEQNNEKSILKLIKLNIDKNEKEIKTLLLNKFKIKEKNKKYDKYMLDENKLDNDIKIYESVESLYFLIKEIYLGQNNKKWNISKIDLEKIMEEDNNLIMLGYKLKKNITENDYPYLYSDKNGQESTSVYKLLKKLIEENKDRNQDIRKSQEYEKIRKNFEEYKNRKINLLVKSIKNNKINIQYINNEIKSHNNSREENIIKFFKKMIEEKNKSILKDKLKLFKLEVFFDEEFLEEIKKLLDSDDFDKSYNKKISELRGKIFNRIREEIKNNKNRDELENIYFLELKKYIENNLSHKKEKNKNNNNTGEEKSKELYLKFLKKVLFIDDNNRISIEKLKSRIDDNFKNLLIQHVIEYGKIKYYVENDDYIRNIVKNGELKLETKDLEYIKTKETLIRKMAVLVSFAANSYYNLFGRTENNILTQEISDDLLLGKIENEIYIKGEKNRRYVFKEKMLNYFFNPEIFGDNKIVEVLSAISSSIYNIRNGVNHFDKMVLGKDNNGLDLKDSDTIKDYFHFKKKEIQQDLKDRFIYNNLQYYYTENEIKKYFEKYKFEILKTKASFAPNFKRILIKGENLSISESNNSYEFFKAYSESSDKNTEYNEFMKTRNFLLKELYYNNFYTEFLNNKAKFKEAVEKVKENKKRRGGKSYDVIGNYNFSDNIPEYISYIHKSEMERIEINTEKNRKDTSKHIRDFIEEVFLEGFIKYLDNNNLNFLKNRNKVDKEREEIVRNLNIRIEGLDILNEDDSEILNLYLFFNMIDNKRISEFRNDMIKYKQFLAKRQNIDSKFLKIDIEKIEAIIEFVIITKEKLEILEGETKEQKKDNMNALFNKFYSSESEYDEKLKKFIEEAILGDKKNTPFYSTDGKTPIVHSNLEKMKKYGTENFLSKVLKDSNYTLNNMTAKEKFEAKVSDELKEYKILEKVNRFKEKGKPKKVIEYYNDCKCYLHKEWIEKKKSEEEFECKEIYKKIIEEIRKYNYLENKEKLQNVYLLHEILSDLLARNVAFFNKWERDFKFIVIAIKQFLRENDKEKVNEFLNPHKSDGSRDNFSVTNYRSKMKSIINNIHENFMSLLFLNNNLATGGIQMGRNNNFTWGNLRNYIAHFEYLHKEKDTISFIGQANLLIKLFSYDKKVQNHIIKSMKTLLEKYNIEIRFEISNDSEEIFEYKIKYINSKKGKMLGKNNEFEILENEFVRNVKALLEYSE

SEQ ID NO: 819 - protein, 1161 aa, Artificial
  Synthetic
MKVTKVDGISHKKYIEEGKLVKSTSEENRTSERLSELLSIRLDIYIKNPDNASEEENRIRRENLKKFFSNKVLHLKDSVLYLKNRKEKNAVQDKNYSEEDISEYDLKNKNSFSVLKKILLNEDINSEELEIFRKDVEAKLNKINSLKYSFEENKANYQKINENNVEKVGGKSKRNIIYDYYRESAKRNDYINNVQEAFDKLYKKEDIEKLFFLIENSKKHEKYKIRECYHKIIGRKNDKENFAKIIYEEIQNVNNIKELIEKVPDMSELKKSQVFYKYYLDKEELNDKNIKYAFCHFVEIEMSQLLKNYVYKRLSNISNDKIKRIFEYQNLKKLIENKLLNKLDTYVRNCGKYNYYLQDGEIATSDFIARNRQNEAFLRNIIGVSSVAYFSLRNILETENENDITGRMRGKTVKNNKGEEKYVSGEVDKIYNENKQNEVKENLKMFYSYDFNMDNKNEIEDFFANIDEAISSIRHGIVHFNLELEGKDIFAFKNIVPSEISKKMFQNEINEKKLKLKIFRQLNSANVFRYLEKYKILNYLKRTRFEFVNKNIPFVPSFTKLYSRIDDLKNSLGIYWKTPKTNDDNKTKEIIDAQIYLLKNIYYGEFLNYFMSNNGNFFEISKEIIELNKNDKRNLKTGFYKLQKFEDIQEKTPKEYLANIQSLYMINAGNQDEEEKDTYIDFIQKIFLKGFMTYLANNGRLSLMYIGNDEQINTSLAGKKQEFDKFLKKYEQNNNIEIPHEINEFVREIKLGKILKYTESLNMFYLILKLLNHKELTNLKGSLEKYQSANKEETFSDELELINLLNLDNNRVTEDFELEANEIGKFLDFNGNKIKDRKELKKFDTNKIYFDGENIIKHRAFYNIKKYGMLNLLEKISDEAKYKISIEELKNYSNKKNEIEKNHTTQENLHRKYARPRKDEKFTDEDYKEYEKAIGNIQKYTHLKNKVEFNELNLLQGLLLKILHRLVGYTSIWERDLRFRLKGEFPENQYIEEIFNFDNSKNVKYKSGQIVEKYINFYKELYKDNVEKRSIYSDKKVKKLKQEKKDLYIRNYIAHFNYIPHAEISLLEVLENLRKLLSYDRKLKNAVMKSVVDILKEYGFVATFKIGADKKIGIQTLESEKIVHLKNLKKKKLMTDRNSEELCELVKVMFEYKMKEKKSEN

SEQ ID NO: 820 - protein, 1161 aa, Artificial
  Synthetic
MKVTKVDGISHKKYIEEGKLVKSTSEENRTGERLSELLSIRLDIYIKNPDNASEEENRIRRENLKKFFSNKVLHLKDSVLYLKNRKEKNAVQDKNYSEEDISEYDLKNKNSFSVLKKILLNEDINSEELEIFRKDVEAKLNKINSLKYSFEENKANYQKINENNVEKVGGKSKRNIIYDYYRESAKRNDYINNVQEAFDKLYKKEDIEKLFFLIENSKKHEKYKIRECYHKIIGRKNDKENFAKIIYEEIQNVNNIKELIEKVPDMSELKKSQVFYKYYLDKEELNDENIKYAFCHFVEIEMSKLLKNYVYKKPSNISNDKVKRIFEYQSLKKLIENKLLNKLDTYVRNCGKYNYYLQDGEIATSDFIARNRQNEAFLRNIIGVSSVAYFSLRNILETENENDITGRMRGKTVKNNKGEEKYVSGEVDKIYNENKQNEVKENLKMFYSYDFNVDNKNEIEDFFANIDEAISSIRHGIVHFNLELEGKDIFAFKNIAPSEISKKMFQNEINEKKLKLKIFRQLNSANVFRYLEKYKILNYLKRTRFEFVNKNIPFVPSFTKLYSRIDDLKNSLGIYWKTPKTNDDNKTKEIIDAQIYLLKNIYYGEFLNYFMSNNGNFFEISREIIELNKNDKRNLKTGFYKLQKFEDIQEKTPKEYLANIQSLYMINAGNQDEEEKDTYIDFIQKIFLKGFMTYLANNGRLSLIYIGSDEETNTSLAEKKQEFDKFLKKYEQNNNIEIPHEINEFVREIKLGNILKYTERLNMFYLILKLLNHKELTNLKGSLEKYQSANKEETFSDELELINLLNLDNNRVTEDFELEADEIGKFLDFNGNKIKDRKELKKFDTNKIYFDGENIIKHRAFYNIKKYGMLNLLEKISDEAKYKISIEELKNYSNKKNEIEKNHTTQENLHRKYARPRKDEKFTDEDYKEYEKAIGNIQKYTHLKNKVEFNELNLLQGLLLKILHRLVGYTSIWERDLRFRLKGEFPENQYIEEIFNFDNSKNVKYKSGQIVEKYINFYKELYKDNVEKRSIYSDKKVKKLKQEKKDLYIRNYIAHFNYIPHAEISLLEVLENLRKLLSYDRKLKNAVMKSVVDILKEYGFVATFKIGADKKIGIQTLESEKIVHLKNLKKKKLMTDRNSEELCKLVKVMFEYKMEEKKSEN

SEQ ID NO: 821 - protein, 1387 aa, Artificial; identical to SEQ ID NO: 93
  Synthetic

SEQ ID NO: 822 - protein, 1330 aa, Artificial
  Synthetic
MKREKNITIMKISKVNHRRTAVALNGDKSELGGILYEAPVQKDKNGNYNDVIAETGKVVNEALDKKSRLYTPFNNQKVIIDKNLQRYANNLKRCYINFVKQYVNNKSFNYKAMQFIPDIQNPKTNDAVNYRTDRDNVYNKNKYYDKQTKSKSKKFIYEKIVIPQNEQNIVISALVNCSLRKSLRKDVSYKTKSGEIKTYNLPELVKKSMRFYCLEGQREPDEKEKYEMYILFSYMKEDKRTKNTDLLVKSISNQNTKVKVEDIDGNKLLKLSIADTKKKPLWEYLIKYADSSRQRELMYDIRKKIILYVAGIEEYENIKEDSGLSKVSWSKYNISDNKMFFDINSCTDKRKQNLELKIREANIEHYRNASSKLCDDESIFWFQHFEGVIETLFSKKSKISEERLGCAYICDYLWKDFLSYLAAKYIDLGKGVYHFTVKDKLDMLNKNEAVTDLRFGIVSEKYEKGITSFDYERIKAEEELDRNIAAYVTFAADIFAKSVIKSDYRTKKDNNSDVLQYSDKEFRNSEVIRDNAEKNILQYWGGYSRWGTENSKLPENNKVSDFGKLDVSDLCIDIKKHLAGIRNSSVHYTTKIKNESAADGSNVKILFEKDLADINIIYADKYYSNNVWMFYSLEDINKLIAFLYKEKRVIRQVQIPSFSRILKRKAMQDVINEIFKDDFDENIVNPELKEKYRNSLYFMLKEIYYNAFIIQPELKEKFKDKIKTMKSELYNKLKTIDKKEYKALYCMLSNEESALKNFADRIYSVDGDNVSFADICKILMTDYNMQNQEKKNIESMEQKKKNKGKDENYKHFPLLLHKVLKKLFIEYLKQTHELEFLRNNICIKSDVTMESFESQIKGVEIYKDLKEKIDKNNSLLDWYVIAHFLMPKQLNHLIGNIKNYIQFATNIDKRAESVKNLTESGMVKRIQYYDDIVRTLEFSAQYIGKISNNINDYFNSEDEYVSFLSKYVGFINDKSEDVLTELKDFCREKINNGSQIIGIYYGGDNVIINRNVIYAQMYSNAEVFSNIYKKVTKNDIINYYEKQNDLKDVFKSGVCQNEGEQRSLCEFQQLKNRIELTELSTYADMVNDFMAQFVEWAYLRERDLMYFQLGIHYIRLFYSDNVLDEKYHKLSDNVIDIEEGALLYQIVAMYDYELRIFETDNSGNAKRIGQGGPGKSIPVFLKKYCNGTDVYECGLELFEDINQHEHIIRFRNDIAHMRYMSNQAMNIMSIVSNIYKSFFVYDTKLKKSISLVFKNILMRYGVIADLVFSYNNKNQSIKDDMDINIINIKNLKSDKYVYKIVNEDIVKQVEIEIRNQVFLEQLHNLLYFSR

SEQ ID NO: 823 - protein, 1412 aa, Artificial; identical to SEQ ID NO: 453
  Synthetic

SEQ ID NO: 824 - protein, 1330 aa, Artificial; identical to SEQ ID NO: 191
  Synthetic

SEQ ID NO: 825 - protein, 1382 aa, Artificial; identical to SEQ ID NO: 531
  Synthetic

SEQ ID NO: 826 - protein, 1412 aa, Artificial; identical to SEQ ID NO: 53
  Synthetic

SEQ ID NO: 827 - protein, 1330 aa, Artificial
  Synthetic
MKREKNITIMKISKVNHRRMAVALNGDKSELGGILYEAPVQKDKNGNYNDVIAETGKVVNEALDKKSRLYTPFNNQKVIIDKNLQRYANNLKRCYINFVKQYVNNKSFNYKAMQFIPDIQNPKTNDAVNYRTDRDNVYNKNKYYDKQTKSKSKKFIYEKIVIPQNEQNIVISALVNCSLRKSLRKDVSYKTKSGEIKTYNLPELVKKSMRFYCLEGQREPDEKEKYEMYILFSYMKEDKRTKNTDLLVKSISNQNTKVKVEDIDGNKLLKLSIADTKKEPLWEYLIKYADSSRQRELMYDIRKKIVLYVVGIEEYENIKEDSGLSKVSWSKYNISDNKMFFDINSCTDKRKQNLEIKIREANIEHYRNASSKLCDDQSIFWFQHFEGVIETLFSKKSKISEERLGCAYICDYLWKDFLSYLAAKYIDLGKGVYHFTMKDKLDMLNKNEAVTDLRFGIVSEKYEKGITSFDYERIKAEEELDRNIAAYVTFAADIFAKSVIKSDYRTKKDNNSDVLQYSDKEFRNSEVIRDNAEKNILQYWGGYSRWGTENSKLPENNKVSDFGKLDVSDLCIDIKKHLAGIRNSSVHYTTKIKNESAADGSNVKILFEKDLADINIIYADKYYSNNVWMFYSLEDINKLIAFLYKEKRVIRQVQIPSFSRILKRKAMQDVINEIFKDDFDENIVNPELKEKYRNSLYFMLKEIYYNAFIIQPELKEKFKDKIKTMKSELYNKLKTIDKKEYKALYCMLSNEESALKNFADRIYSVDGDNVSFADICKILMTDYNMQNQEKKNIESMEQKKKNKGKDENYKHFPLLLHKVLKELFIEYLKQTHELEFLRNNICIKSDVTMESFESQIKGVEIYKDLKEKIDKNNSLLDWYVIAHFLMPKQLNHLIGNIKNYIQFATNIDKRAESVKNLTESGMVKRIQYYDDIVRTLEFSAQYIGKISNNINDYFNSEDEYVSFLSKYVGFINDKSEDVLTELKDFCREKINNGSQIIGIYYGGDNVIINRNVIYAQMYSNAEVFSNIYKKVTKNDIINYYEKQNDLKDVFKRGVCQNEGEQRSLCEFQQLKNRIKLTELSTYADMVNDFMAQFVEWAYLRERDLMYFQLGIHYIRLFYSDNVLDEKYHKLSDNVIDIEEGALLYQIVAMYDYELRIFETDNSGNAKRIGQGGPGKSIPVFLKKYCNGTDVYECGLELFEDINQHEHIIRFRNDIAHMRYMSNQAMNIMSIVSNIYKSFFVYDTKLKKSISLVFKNILMRYGVIADLVFSYNNKNQSIKDDMDINIINIKNLKSDKYVYKIVNEDIVKQVEIEIRNQVFLEQLHNLLYFSR

SEQ ID NO: 828 - protein, 1315 aa, Artificial; identical to SEQ ID NO: 751
  Synthetic

SEQ ID NO: 829 - protein, 1315 aa, Artificial; identical to SEQ ID NO: 751
  Synthetic

SEQ ID NO: 830 - protein, 1330 aa, Artificial; identical to SEQ ID NO: 130
  Synthetic

SEQ ID NO: 831 - protein, 1382 aa, Artificial; identical to SEQ ID NO: 210
  Synthetic

SEQ ID NO: 832 - protein, 1330 aa, Artificial
  Synthetic
MKREKNITIMKISKVNHRRTAVALNGDKSELGGILYEAPVQKDKNGNYNDVIAETGKVVNEALDKKSRLYTPFNNQKVIIDKNLQRYANNLKRCYINFVKQYVNNKSFNYKAMQFIPDIQNPKTNDAVNYRTDRDNVYNKNKYYDKQTKSKSKKFIYEKIVIPQNEQNIVISALVNCSLRKSLRKDVSYKTKSGEIKTYNLPELVKKSMRFYCLEGQREPDEKEKYEMYILFSYMKEDKRTKNTDLLVKSISNQNTKVKVEDIDGNKLLKLSIADTKKKPLWEYLIKYADSSRQRELMYDIRKKIILYVAGIEEYENIKEDSGLSKVSWSKYNISDNKMFLDINSCTDKRKQNLEIKIREANIEHYRNASSKLCDDESIFWFQHFEGVIETLFSKKSKISEERLGCAYICDYLWKDFLSYLAAKYIDLGKGVYHFTMKDKLDMLNKNEAVTDLRFGIVSEKYEKGITSFDYERIKAEEELDRNIAAYVTFAADIFAKSVIKSDYRTKKDNNSDVLQYSDKEFRNSEVIRDNAEKNILQYWGGYSRWGTENSKLPENNKVSDFGKLDVSDLCIDIKKHLAGIRNSSVHYTTKIKNESAADGSNVKILFEKDLADINIIYADKYYSNNVWMFYSLEDINKLIAFLYKEKRVIRQVQIPSFSRILKRKAMQDVINEIFKDDFDENIVNPELKEKYRNSLYFMLKEIYYNAFIIQPELKEKFKDKIKTMKSELYNKLKTIDKKEYKALYCMLSNEESALKNFADRIYSVDGDNVSFADICKILMTDYNMQNQEKKNIESMEQKKKNKGKDENYKHFPLLLHKVLKELFIEYLKQTHELEFLRNNICIKSDVTMESFESQIKGVEIYKDLKEKIDKNNSLLDWYVIAHFLMPKQLNHLIGNIKNYIQFATNIDKRAESVKNLTESGMVKRIQYYDDIVRTLEFSAQYIGKISNNINDYFNSEDEYVSFLSKYVGFINDKSEDVLTELKDFCREKINNGSQIIGIYYGGDNVIINRNVIYAQMYSNAEVFSNIYKKVTKNDIINYYEKQNDLKDVFKSGVCQNEGEQRSLCEFQQLKNRIELTELSTYADMVNDFMAQFVEWAYLRERDLMYFQLGIHYIRLFYSDNVLDEKYHKLSDNVIDIEEGALLYQIVAMYDYELRIFETDNSGNAKRIGQGGPGKSIPVFLKKYCNGTDVYECGLELFEDINQHEHIIRFRNDIAHMRYMSNQAMNIMSIVSNIYKSFFAYDTKLKKSISLVFKNILMRYGVIADLVFSYNNKNQSIKDDMDINIINIKNLKSDKYVYKIVNEDIVKQVEIEIRNQVFLEQLHNLLYFSR

SEQ ID NO: 833 - protein, 1382 aa, Artificial; identical to SEQ ID NO: 464
  Synthetic

SEQ ID NO: 834 - protein, 1287 aa, Artificial; identical to SEQ ID NO: 105
  Synthetic

SEQ ID NO: 835 - protein, 1373 aa, Artificial; identical to SEQ ID NO: 104
  Synthetic

SEQ ID NO: 836 - protein, 1330 aa, Artificial
  Synthetic
MKREKNITIMKISKVNHRRTAVALNGDKSELGGILYEAPVQKDKNGNYNDVIAETGKVVNEALDKKSRLYTPFNNQKVIIDKNLQRYANNLKRCYINFVKQYVNNKSFNYKAMQFIPDIQNPKTNDAVNYRTDRDNVYNKNKYYDKQTKSKSKKFIYEKIVIPQNEQNIVISALVNCSLRKSLRKDVSYKTKSGEIKTYNLPELVKKSMRFYCLEGQREPDEKEKYEMYILFSYMKEDKRTKNTDLLVKSISNQNTKVKVEDIDGNKLLKLSIADTKKKPLWEYLIKYADSSRQRELMYDIRKKIILYVAGIEEYENIKEDSGLSKVSWSKYNISDNKMFFDINSCTDKRKQNLEIKIREANIEHYRNASSKLCDDESIFWFQHFEGVIETLFSKKSKISEERLGCTYICDYLWKDFLSYLAAKYIDLGKGVYHFTMKDKLDMLNKNEAVTDLRFGIVSEKYEKGITSFDYERIKAEEELDRNIAAYVTFAADIFAKSVIKSDYRTKKDNNSDVLQYSDKEFRNSEVIRDNAEKNILQYWGGYSRWGTENSKLPENNKVSDFGKLNVSDLCIDIKKHLAGIRNSSVHYTTKIKNESAADGSNVKILFEKDLADINIIYADKYYSNNVWMFYSLEDINKLIAFLYKEKRVIRQVQIPSFSRILKRKAMQDVINEIFKDDFDENIVNPELKEKYRNSLYFMLKEIYYNAFIIQPELKEKFKDKIKTMKSELYNKLKTIDKKEYKALYCMLSNEESALKNFADRIYSVDGDNVSFADICKILMTDYNMQNQEKKNIESMEQKKKNKGKDENYKHFPLLLHKVLKELFIEYLKQTHELEFLRNNICIKSDVTMESFESQIKGVEIYKDLKEKIDKNNSLLDWYVIAHFLMPKQLNHLIGNIKNYIQFATNIDKRAESVKNLTESGMVKRIQYYDDIVRTLEFSAQYIGKISNNINDYFNSEDEYVSFLSKYVGFINDKSEDVLTELKDFCREKINNGSQIIGIYYGGDNVIINRNVIYAQMYSNAEVFSNIYKKVTKNDIINYYEKQNDLKDVFKSGVCQNEDEQRSLCEFQQLKNRIELTELSTYADMVNDFMAQFVEWAYLRERDLMYFQLGIHYIRLFYSDNVLDEKYHKLSDNVIDIEEGALLYQIVAMYDYELRIFETDNSGNAKRIGQGGPGKSIPVFLKKYCSGTDVYECGLELFEDINQHEHIIRFRNDIAHMRYMSNQAMNIMSIVSNIYKSFFAYDTKLKKSISLVFKNILMRYGVIADLVFSYNNKNQSIKDDMDINIINIKNLKSDKYVYKIVNEDIVKQVEIEIRNQVFLEQLHNLLYFSR

SEQ ID NO: 837 - protein, 1143 aa, Artificial; identical to SEQ ID NO: 11
  Synthetic

SEQ ID NO: 838 - protein, 1330 aa, Artificial; identical to SEQ ID NO: 332
  Synthetic

SEQ ID NO: 839 - protein, 1387 aa, Artificial; identical to SEQ ID NO: 93
  Synthetic

SEQ ID NO: 840 - protein, 1412 aa, Artificial
  Synthetic
MKLSKEKHTRSAVANNGDIKSAEVNNGNTKSEEVNNGDTRSAVANEEQNIGGILYRFPGKSIDGVKDQMLRRDKEVKKLYNVFNQIQVGTKPKKWNNDEKLSPEENERRAQQKNIKMKNYKWREACSKYVESSQRIINDVIFYSYRKAKNKLRYMRKNEDILKKMQEAEKLSKFSGGKLEDFVAYTLRKSLVVSKYDTQEFDSVAAMVVFLECIGKNNISDHEREIVCKLLELIRKDFSKLDPNVKGSQGANIVRSVRNQNMIVQPQGDRFLFPQVYAKENETVTNKNVEKEGLNEFLLNYANLDDEKRAESLRKLRRILDVYFSAPNHYEKDMDITLSDNIEKEKFNVWEKHECGKKETGLFVDIPDVLMEAEAENIKLDAVVEKRERKVLNDRVRKQNIICYRYTRAVVEKYNSNEPLFFENNAINQYWIHHIENAVERILKNCKAGKLFKLRKGYLAEKVWKDAINLISIKYIALGKAVYNFALDDIWKDKKNKELGIVDERIRNGITSFDYEMIKAHENLQRELAVDIAFSVNNLARAVCDMSNLGNKESDFLLWKRNDIADKLKNKDDMASVSAVLQFFGGKSSWDINIFKEAYKGKKKYNYEVRFIDDLRKAIYCARNENFHFKTALVNDEKWNTELFGKIFKRETEFCLNVEKDRFYSNNLYMFYQVSELRNMLDHLYSRSVSRAAQVPSYNSVIVRTAFPEYITNVLGYQKPGYDADTLGKWYSACYYLLKEIYYNSFLQSDRALQLFEKSVKTLSWDDEEQKRAVDNFKKYFSDIKSACTSLAQVCQIYMTEYNQQNNQIKKVRSSNDSIFDQPIYQHYKVLLKKAIANAFADYLKNNKDLFGFIGKPFKANEIREIDKEQFLPDWTSRKYEALCIEVSGSQELQKWYIVGKFLNARSLNLMVGSMRSYIQYVTDIKKRAASIGNELHVSVQDVEKVEKWVQVIEVCSLLASRTSNQFEDYFNDKDDYARYLKSYVDFSNVDMPSEYSALVDFSNEEQSDLYVDPKNPKVNRNIVHSKLFAADHILRDIVEPVSKDNIEEFYSQKAEIAYCKIKGKEITAEEQKAVLKYQKLKNRVELRDIVEYGEIINELLGQLINWSFMRERDLLYFQLGFHYDCLRNDSKKPEGYKNIKVDENSIKDAILYQIIGMYINGVTVYAPEKDGDKLKEQCVKGGVGVKVSAFHRYSKYLGLNEKTLYNAGLEIFEVVAEHEDIINLRNGIDHFKYYLGDYRSMLSIYSEVFDRFFTYDIRYQKNVLNLLQNILLRHNVIVEPILESGFKTIGEQTKPGAKLSIRSIKSDTFQYKVKGGTLITDAKDERYLETIRKILYYAENEEDNLKKSVVVTNADKYEKNKESDDQNKQKEKKNKDNKGKKNEETKSDAEKNNNERLSYNPFANLNFKLSN

SEQ ID NO: 841 - protein, 1388 aa, Artificial; identical to SEQ ID NO: 103
  Synthetic

SEQ ID NO: 842 - protein, 1349 aa, Artificial; identical to SEQ ID NO: 362
  Synthetic

SEQ ID NO: 843 - protein, 1387 aa, Artificial; identical to SEQ ID NO: 680
  Synthetic

SEQ ID NO: 844 - protein, 931 aa, Artificial
  Synthetic
MKVTKAEKLRVAVSRKLNNEDKRAVLYKTPNPGQTCGTVKKQLANRVERANKLYGVFFRSDVPETLQYHFEELVTYAAQSTSPNEFRQKASQYRECEKKDKFGKMRKYPIFRCSYAPSGKNMKKVMELYVRERMKDEWQSQAYRTAAIEILLCICNKDFSKQLSRVDARIFADFYNASKACPQPYIGKSTGVLEAAFTSVMKQMSLHAKANASNKIWWLQNQLRTIELNKKIVKISDFKYEYATEDRMRAILVRMRKSLKRGTNGDIAVALLQGIAQMNGKTLSGVLEELSANSETKEQLIKFLKAVHEDYHKTPILKAIRNQDVKVQVHEVDPVSPEGRALDLASINVSKGNERKKYKVALTQTLGNYAKSPKDATQTLKAIKGVLLDYFMWLDSDVKAEFLEDNNLWKIPNRTEEYFDNNFVPIDDKKDDKIEAIEDFASIWRQERVKNSRIKARMNYVNCGKYQQLIKQETDDFRICWISYAKDFVEKNYVSKNRQFTQGDCFSTKMLLECWKEIIRFICGKYIDIGKAVYHFAMPETMNARDSLAYGVLGEKYKEGISSFDYEAIKAEETLQRDIAKAAVAAIHAFSGSVIDDKKPVEDILFIKDEELQEHAKADDVIVKQILRFYGGFSSVEGREKLEGMALAKEVLSQLKAIRNENFHFTQGKRKNVEENIPLTKALWENEEKVYRQTVKETYYSNNVSMFYSQEVIQKLVAELYQNNNVAEAQIPAFRTIWKRKDLPEYIGSLNISWDKTEPKQVIYEGALYFLLKEIYYRDFIKSGEAKKLFFDAVMDNATEMEKSSNADSRNQEKKALANAGKNFRDYVNGLNASTLGEVCQFIQNEYNQQNRGKQEQEIYKHFKMLLPICMRKAFQRYIDEKHSFIKKPGELPQTTEDYLENVKVACPEKKIKLGRWFTFAHFIHPRELNF

SEQ ID NO: 845 - protein, 1234 aa, Artificial
  Synthetic
MRIIKPYGRSKTKRYSSGTERRLQPNPALRDGEAMDADGLSIGPFAESHDSLVIGQWISTIDKIATKPKGKGKATQEQRNVRSALGAACWARLVHPDGTFGALDSERMNWARNTWERRLHPYSDKNFVTNGREKTPDSKAHWFNRFCKGLSVQEVTDPSVAGDVAQSIEEHLTKDAFRRGGGTRRSPKASASRAGLIAVRADSITKNALRFPGADIAEQREHGWTEEDIARYVAKSDPVAQIYKAVLDAEPDGQRVRWSIAAERLYAHYARVFTAPDIVLDRKDADKILRGVLALHEALRQLYRHRLKRHRRKPVHVTVLLPRDIRDALTMISRQQDNSDLNALVRLGKVIHHEAADQAGVESVAKIIGNWPEDVSRSYYWTSDGQTEIKRTEAFVRAWRGPIAHAQRTLADWVDPDRLSVKSDSAEAKPPDMLGAKFDDALAQLDDDAAITKARLLFGTRSDALGGPDPKAVLRLTKRALSKLRNAAFHFKGMGGFVQDMTLKILPSGSEDCEVLERVHALWHADQKDRMIRVKDALVGAHAEVYLNQPQMNQLWELLGAQESKIALPRFNRVIARAAHAWTSKEDRLALPDSASSKDLEAQPARRCQYVLIKMVYERGFRTWLTSRSADDLNIWIKQATDHTTEAAKEFHKHQVSKEELAQISARSAGLVKLEPGEGFAKFLFKMTALTTTEFRVQKGYTHDAGRAREQASFLDDLHCDLVALAFDTYLKDKKLGWLYRLRQDESPGNPQSSAADLPLGSVASAQDWQAVLYLVLHLIPVDDVGRLLHRWRWWSNKYDDEHLPAEGLQLAEAFTLYLDMHDAKFDGAEAITGSAAFHDLFDSDTTRKQVFPDALAAEAEGPRQIMQRGLREMLRFGDMASFAPVFAGRKVTAEQVKEWQNLDAQVAAAHETRKKVHEDYKRGLRPSTENERLLEQKYDLAAYVKAVKTITRHKRLSHHVKLTNHVRLHQIVMRVLGRLVDYAGLWERDVYFVLLALICLRGQTPRDVFQNAYGRKALRGGQIRKAVQNLEPEYKTALERHFGTGAFEEGGVVTIRNDLAHLNMMGRAARSDDARVPLDLTCQIDRTRRLMSYDRKLQNSVSKSVTDLMEREKIRLSFRLDKGKLTQATVKADLIKHFKRKELTENLHDPLFLGMVADVYGGTVGQLQNDLTDAQDIAAVVNQTFAAVKAEQDARRRPRNNRAQSQNPGGGTRRNGGKEKYGKHPKGKRTDRH

SEQ ID NO: 846 - protein, 1394 aa, Artificial; identical to SEQ ID NO: 791
  Synthetic

SEQ ID NO: 847 - protein, 1287 aa, Artificial; identical to SEQ ID NO: 105
  Synthetic

SEQ ID NO: 848 - protein, 1217 aa, Artificial; identical to SEQ ID NO: 335
  Synthetic

SEQ ID NO: 849 - protein, 1217 aa, Artificial; identical to SEQ ID NO: 335
  Synthetic

SEQ ID NO: 850 - protein, 1388 aa, Artificial; identical to SEQ ID NO: 103
  Synthetic

SEQ ID NO: 851 - protein, 1382 aa, Artificial
  Synthetic
MKLSKEKHTRSAVANEEQNIGGILYRFPGKSIDGVKDQMLRRDKEVKKLYNVFNQIQVGTKPKKWNNDEKLSPEENERRAQQKNIKIENYKWREACSKYVKSSQKTINYVIFYSYGNAENKLRYMRKNEDILKKMQEEEKLPKFSGGKLEDFVAYTLRKSLVVSKYDTQEFDSVAAMVVFLECIGKNNISDHEREIVCKLLELIRKDFSKLDPNVKGSQGANIVRSVRNQNMIVQPQGDRFLFPQVYAKENETVTNKNVEKEGLNEFLLNYANLDDEKRAESLRKLRRILDVYFSAPNHYEKDMDITLSDNIEKEKFNVLEKHECGKKETGLFVDIPDVLMEAEAENIKLDAVVEKRERKVLNDRVRKQNIICYRYTRAVVEKYNSNEPLFFENNAINQYWIHHIENAVERILKNCKAGKLFKLRKGYLAEKVWKDAINLISIKYIALGKAVYNFALDDIWKDKKNKELGIVDERIRNGITSFDYEMIKAHENLQRELAVDIAFSVNNLARAVCDMSNLGNKESDFLLWKRNDIADKLKNKDDMASVSAVLQFFGGKSSWDINIFKEAYKGKKKYNYEVRFIDDLRKAIYCARNENFHFKTALVNDEKWNTELFGKIFKRETEFCLNVEKDRFYSNNLYMFYQVSELRNMLDHLYSRSVSRAAQVPSYNSVIVRTAFPEYITNVLGYQKPGYDADTLGKWYSACYYLLKEIYYNSFLQSDRALQLFEKSVKTLSWDDKKQQRAVDNFKDHFSDIKSACTSLAQVCQIYMTEYNQQNNQIKKVRSSNDSIFDQPIYQHYKVLLKKAIANAFADYLKNNKDLFGFIGKPFKANEIREIDKEQFLPDWTSRKYEALCIEVSGSQELQKWYIVGKFLNAMSLNLMVGSMRSYIQYVTDIKRRAASIGNELHVSVQDVEKVEKWVQVIEVCSLLASRTSNQFEDYFNDKDDYARYLKSYVDFSNVDMPSEYSALVDFSNEEQSDLYVDPKNPKVNRNIVHSKLFAADHILRDIVEPVSKDNIEEFYSQKAEIAYCKIKGKEITAEEQKAVLKYQKLKNRVELRDIVEYGEIINELLGQLINWSFMRERDLLYFQLGFHYDCLRNDSKKPERYKNIKVDENSIKDAILYQIIGMYVNGVTVYAPEKDDDKLKEQCVKGGVGVKVSAFHRYSKYLGLNEKTLYNAGLEIFEVVAEHEDIINLRNGIDHFKYYLGDYRSMLSIYSEVFDRFFTYDIKYQKNVLNLLQNILLRHNVIVEPILESGFKTIGEQTKPGAKLSIRSIKSDTFQYKVKGGILITDAKDERYLETIRKILYYAENEEDNLKKSVVVTNADKYEKNKESDDQNKQKEKKNKDNKGKKNEETKSDAEKNNNERLSYNPFANLNFKLSN

SEQ ID NO: 852 - protein, 1102 aa, Artificial; identical to SEQ ID NO: 648
  Synthetic

SEQ ID NO: 853 - protein, 1193 aa, Artificial
  Synthetic
MKGGSMKITKVDGLSHYKKQDKGVLKKKWENLDERKEREKIEERYNKQIESKIYKEFFRLKDGKRITKEEKDQNIKSLYFFIEELYLSKENEEWELENINLEILDDKERVIKGYKFKEDVYFFKEGDKEYYLRTLFNNLIEKIQNENREKVRKSKEFSDLKEIFKKYRDRKIDLLLKSINNNKINLEYKKENVNEEIYGINPTNDREMTFYELLKEIIEKKDEQKSILEEKLDNFDITNFLENIEKIFNEETEINIIKGKVLNELREYIKEKEENNSDYRLKQIYNLELKKYIENNFSYKKQKSKSKNGKNDYLYLNFLKKIMFIEEVDEKKGINKEKFKNKINSNFKNLFVQHILDYGKLLYYKENDEYIKNTGQLETKDLEYIKTKETLIRKMAVLVSFAANSYYNLFGSVSEDILGTEVVKNRRTNVIKVKSYIFKEKMLNYFFDSEDFDVNKTIEVLESISYSIYNIRNGVGHFNKLVLGKYKKKDITTNKRVEEDLNNNEEIKGYFIKKRGEIEKKIKERFLSNNLQYYYAKEKIENYFKVYEFEILKEKIPFAPNFKRIIKKGEDLFNNKKNKKYEYFKNFDKNSAEEKKEFLKTRNFLLKELYYNNFYKEFFSERKKYEFKKIITEVKEEKKNRGNTNSKKSGVSFQSIDDYNTKISISDYIASIHKKEMERVEKYNEEKQKDTAKYIRDFVEEIFLTGFINYLEKDERLHFLKEEFSVLCNSNNNVIDFNVNINEEKIKEFLKENDSKTLNLYLFFNMIDSKRISEFRNELIKYKQFTKKRLDEEKEFLGIKIELYETLIEFVILTREKLDTKKSEETDAWLVDKLYVKEKNECNEYEYKEYEEILKLFVDEKILSLKEAPYYATDNKTPIILSNFEKTRKYGTQSLLSEIQSNYKYSKVEKENIEDYDKKEEIEKKKKSNIEKLQDLKVELHKKWEQNKITEKEIKKYNDTIKEIREYNYLKNKEELQNVYLLHEILSDLLARNVAFFNKWERDFKFIVIAIKQFLRENDKEKVENFLNPPDNSKGKKVYFSVSKYKNTVENIDGIHKNFMNLIFLNNKFMNRKIDKMNCTIWVYFRNYIAHFLHLHTKNEKISLINQMNLLIKLFSYDKKVQNHILKSTKTLLEKYNIQINFEISNDKNEVFKYKIKNRLYSKKGKMLGKNNKFEILENEFLENVKTLLEYSK

SEQ ID NO: 854 - protein, 904 aa, Artificial
  Synthetic
MKVTKIDGISHKKYKEKGKLIKSNEIEKDVTEERFNNIEAKTTELFQKTLDFYVKNYEKCEEQNKERREKAKNYFSKVKLIVDNKKITICNENTEKIEIEDFNEYDVRNRKYFNILNKILNGENCTEEDLEVFENDLQKKLNQIQSIKNSLEKNKAHFKKESVNNTADRVKGNNKKSLFYEYYRNSSKHQEYVNNIFEAFDKLYSNSHEDINNLFLEITKDSNDRNIRKIREAYHEILNKNKTEFGEELYKKIQDNISNFDKLLEIEPEIKELTKSQIFYKYYIDKVYLDETSTKHCFCHLVEIEVSQLLKNYVYSKKDINKEKLENIFEYCKLKNLVKNKLVNKLNNYIRNCGKYNGYINNNDVINSEKISEIRTKEAFLRSIIGVSSSAYFSLRNILNTDNTQDITNKVKGEVEKLYQENKKIKLEERLKLFFGNHFDINNQQEIEDFLMNIDKIISSIRHEIIHFKIEANAQNIFDFNNVNLGNTAKNIFNNEINEERIKFKIFKQLNSANVFDYLSDENITEYMGKIIFSFTNRNIPFVPSFRKICDRVQDLANSLKIKEWKISDESEGKDAQIYLLKNIYYGEFLDDFLNEKNEKFIKIKDEIIELNKNQNKITGFYKLEKFEKIEEKNPKKYLEIIQSLYMINIEEIDNEEKNIFLDFIQKIFLKGFFEFIKNNYNYLLKLKKVQDKKNIFDREMSEYIAGEKTLEDMEEINKIIQDIKITEIDKILNQTDKINCFYLLLKLLNYKEITELKGNLEKYQILSKTNIYEKELILLNIVNLDNNKVKIENFKISAEEIGKFIEKIGRNTKIETFEELRNFEKIENSVECYNIYSDDKNIKNMRNLYNIKKYGMLDLLERISEKTNYCIKKKDLEEYSKLRKQLEDEKTNFYKIQKDLHYE

SEQ ID NO: 855 - protein, 1412 aa, Artificial; identical to SEQ ID NO: 840
  Synthetic

SEQ ID NO: 856 - protein, 1388 aa, Artificial; identical to SEQ ID NO: 103
  Synthetic

SEQ ID NO: 857 - protein, 1185 aa, Artificial; identical to SEQ ID NO: 421
  Synthetic

SEQ ID NO: 858 - protein, 1140 aa, Artificial
  Synthetic
MRGDYMKITKIDGISHKKYKEKGKLIKSNEIEKDVTEERFNDIEVKTTELFQKTLDFYVKNYEKCEEQNKERREKAKNYFSKVKLIVDNKKITIFNENTEKIEIEGFNEYDVRDEKYFNVLNKILKEENCTEEDLEVFENDLQKKLNQIQSIKNSLEENKAHFKKESVNNTADRVKGNNKKSLFYEYYRNSSKHQEYVNNIFEAFDKLYSNSHEDMNNLFSAITKDSNDRNIKKIREAYHEILNKNKIEFGEELYKKIQDNINNFDKLLEIEPEIKELTKSQIFYKYYIDKVSLDGTNIKHCFSHLVEIEVNQLLKNYVYSKRSTNKEKLENIFEYCKLKNLVKNKLVNKLNSYIRNCGKYNSYINNNDVVNSEKISEIRTKEAFLRSTIGVSSSAYFSLRNILNTDNTQDITNKVKGEVEKLYQENKKVKLEERLKLFFGNNFDINNQQEIEDFLMNIDKIISNIRHEIIHFKIEANAHSIFDFNNVTLGNKAKNIFNNEINEERIKFKIFKQLNSANVFDYLSDENITEYMGKVIFSFTNRNIPFVPSFRKIYNRVQDLANSLKIKEWKISDESEGKDAQIYLLKNIYYGEFLDEFLNEENGIFISIKDKIIELNRNQNKRTGFYKLEKFEKIEEKNPKKYLEIIQSLYMINIEEIDNEEKNIFLDFIQKIFLKGFFEFIKNNYNYLLELKKIQDKKNIFDSEMSEYIAGEKTLEDIGEINEIIQKIEITKIDKILNLTDKINCFYLLLKLLNYKEITELKGNLEKYQILSKTDIYEKELILLNIVNLDNNKVKIEKFKISAEEIGKFIEKISRNKKIKTFEELRNFEKRENTGEYYNVYSDDKNIKNIRNLYNIKKYGMLDLLERISEKSNYCIKKEDLEEYSELRKQLEDEKTNFYKIQKDLHYEYQKKYKNFSKKNNPEDYEKYKESIKNIEKYVHLKNKIEFNELNLLQSLLLKILHRLVGFTSIWERDLRFRLIGEFPDELDVEDIFDHRERYRGTRGQICKKYDQFISVHIEYQNNNKMKNIKFDDNNPIRNYIAHFNYLPTPKYSILKMLGKLRELLDYDRKLKNAVMKSIKDILEEYGFKAEFVINPDKEIILNSVKSVEIIHLKKNDLNSHRNSEDLCKLVKAMLEYSE

SEQ ID NO: 859 - protein, 1388 aa, Artificial; identical to SEQ ID NO: 755
  Synthetic

SEQ ID NO: 860 - protein, 1388 aa, Artificial; identical to SEQ ID NO: 755
  Synthetic

SEQ ID NO: 861 - protein, 1388 aa, Artificial; identical to SEQ ID NO: 103
  Synthetic

SEQ ID NO: 862 - protein, 1191 aa, Artificial
  Synthetic
MKLTKVEKARIAVSREKKDSGRIILYTNPEDVKKTSVTTMEQQVSKRIDQANKLYQVFFKSVIPVELNKHFAEISKIAAKCRNTEEFYKKACGYSGYEWTDAKQKKRTSQISRFSYTSSGKNMYVVMDNFVKEYMVQIWQEKDFRNAAVKILCCICDGKKFASKLEKVKKESPDTLKKFIEISGKCEGNPFVDYDTSFLEKVFTLVISQMVKNCDRKSYEQDDKEKIKKSIQKEIQWLSHVQSVTERSFGREGKTYLLFKIRNPYATEERLQTVLIRMRKTLKRGRNRDIAIVLLQGLAQMNQVTFTDTVKHLYQEEEKAFCDFIDAVNRDYYRVNIVKSVRNMDVKVQPDLNDNSILKLSGLGNIKKEALSDTLLRYAASADESDQVLLDIKKLLFEYFLPENSKETSKYTTVQNLWNIPYLPKIFFDYGFENEDSDDDNECAEDIETLCDVEPQYKINQHSLKRRIRYVNYGKYLQMTKNESDRERRYWIHYIKEFVEKNYVDSGRTLSEKNCYASSMMLNCWKEIIRYLCGKYIDIGKAVFHFTNLTAMPKPKDKIIYGQLEEQYKKGISSFDYEAIKAEETLQRDIVQSVVAAAFAFSKSVIDETKMEECQETNKEDILFLSENVLGSLLKENTIKLILRFYGGESSVAQKEYFDQQEIVQEMISHLKSIRNENFHYLDGAKKDNPHKYASILWKNDEMAYQKLTKQRYYANNVGLFYRAEEIQELVQELYSQKNITEAQIPAFRTVLKRKDLPGYMEELGILFPDNTQEKSKGDFEGTLYFLMKEIYYRDFIVKDKAAAYFFKAVDQNKEQSKKEDKHTERAAENFHRYVKSLEKKYNKKEISFGTVCQYIMMEYNQQNTTKQETEIYKHFKMLISLCIRKAFGNYIKETYRFLFHPIYSKQQGEPEYLDTLELESGVKEKNYEWFTLAHFLHPVQLNHLVGDLKSYIQYREDILRRIVFAEQRVYADQQKEVQQKVKTAKEILEVLEFVREVSGRVSNEYTDYYENEEEYAEFLYQYIDFRKREGKSAFESLKYFCQNILDSGTVVDLYADTENPKVLRNIELTRMYAGSNVKIPEYEKITEDEIKMYYQEKNSVALILSRGLCRNEKEQKKVIEFNWKKKRLTLNEITDVFSLVNDLLGKMISFSYLRERDQMYLLLGFYYMALCAENKSENHLGWKGETLDKL

SEQ ID NO: 863 - protein, 1130 aa, Artificial
  Synthetic
MKVSKVKVKVGAGRSSERMVFMRRTSKIGSLVYEDEQRNGKPETDDKTTSILPDKKRDSFILSIVNKTIPKKEIVKKNLGKGFVNEYYNAIAGIIDSFLEKKIVDRKHYIIVNKLTEEEIKQYLNHRFQEANYKYVRDKEEVNFNLPKLLKESAKSNSTAPLQPYKEWAEWHIETKSVRLIRSIQNNRLVIDTQEEAENMSPRKRALLKWENEFLLSHKLDLQDVEKTYLIDDLIHALHEVTYTTNDKGFINGNEYHRFLKKALQSHQQNIFGSRETPNKVNRENAELYSYNMEVVKYLEHYFPIKKTNRRNTLDTKDYYLNGINIKDRVRKQLENAVRNNLVRQGKYTLHTLTTDTANSDNLSKIKADEGFALTMLNQCAFAANNVRNIIDPTQVEDILLDRPFNESLEKFNSAQMLHLSSFFDVKEFNEPLRAIRDAVAKIRHNIIHYKVNALNVIFKIETFGSTEKQYKDTIFGSLLQADMMNVSESLAKQLMTGNVLEYYPMLELKSFFSKNSISLYRSVIPFAPGFKRVMKKGENYQNANNKDDKSKYYNLKIESFLPQESFTKEAYDARYFLLKLIYNNIFLPKFTESTDWFKSTVNGVIALNREENVRKGKKHKIAFAEIRLMDSRDTIGTYAAYLQSCAIIEANKKPDAAKDETVLLNFEKLILQIFIKGFDDFLRRYGMLKFVQQPSLQFKSGAKDETKQRKDWAKEVEGSLHAPVNDINPTESSHISFYVFCKLLDAPHLNDLRNELIKYYRSQSHRPQKIKNIKYLLSIIELCLLSVDASELNKLFTDADNSINDRLLAFLEKNKTVADYEDLYTQSDNETMVLHRTIAKAYKYGTRKVLEQVIDSDPSYRVTVSEYEEWKNLKENVEEWIACREKLHAKWVKVERVPKMKEGEMKDDMKEYVEVCSTIDRYNWLDNKVHLEHINKLHNLTIDLLGRMAGFNTLFERDLQYYCNCNEKVRSLLKPESSEGFDFSKGLPKFTEEQNSILFQTFLVEGYRDTRNFVAHFNFLNSFEDSYSKNRYSLIDVINRLRKQFKYDRKLKNAVSKAIIKLFEKHGMVLTFSFEGDHELVVKDVFPRKIIHFSKLKLDKKIEQKPKVETDMVPKEFCAMCKFLLELKK

SEQ ID NO: 864 - protein, 1382 aa, Artificial; identical to SEQ ID NO: 278
  Synthetic

SEQ ID NO: 865 - protein, 1388 aa, Artificial; identical to SEQ ID NO: 103
  Synthetic

SEQ ID NO: 866 - protein, 1388 aa, Artificial; identical to SEQ ID NO: 103
  Synthetic

SEQ ID NO: 867 - protein, 1187 aa, Artificial
  Synthetic
MKIIRPYGSSSTDLNERSLSDKNEQKQEITLYCTEHEELVIAQWISIIDKIIIKPKQDKAPSDEQRSARTKIGEAAWKLIIADMRLKTRDTARLAHLARLWNFKIHPYGTKTGNQNSNHGRPLPSIKGRWYKVFVGDNVPVEDINPQDTAQRISEHLYEAEYRIKLGHPKRRKGLIQARAESIKKNVPSKKQPATQPTWSDGDIERYTKHGDVAAAIWNKATECETNKKPVRLDIAAACLYDHWAKIFFDPATKAVLNITQAKDKEPNLYALHMAIKRTYTRILKNHRKNTKDQQNKNANNNRKISSILPRDMQELLRMSRDQKDNTDIASLVRLGKIIHYTASDNDHDNTKNIIANWPQDVSQSRFWTSDGQAEIKRAESFVRVWRRTLSYATLTLRNWASIEAEDAEQDLLGSGDAIAGAIEKIKHNYDHDTFKKKTELLFGKRAASLLSDKDKNTELLNFALKGARDLRNASFHFKGLGMFIKQLEALEQDSRAKDLWEQDNADYAESIRAKLKGAHAEFFFTQTQNEQLLTLLAKPNENALPLPRFSRVLLRAENTRDTNNPCQLPAPTNRTELEENPARLCQYTALKSVYEKDFRVWLTEKKGDALHNWIDSAIKRTTKAARTINGKKDENNRDLIISKAAGLPKPKAEDGIAQFLFKLSAATASEMRVQRGYESDGEKAKEQAEYIDEFLCDVIALALADYLKEKGLQWLAALKPDQPKAYQMSYLEKIPLPKLTDRSEEWQATLYLLLHMIPVEDAGKLLHQIKKWEITASRPTASKSKTLESLTPLLRVLHLYLDMHDAKFEGGMSLASCEKFSAFFETQGGFDTIFPKDPSPDAQDRIPKRGLREVMRFGHFPLLQKISTKKITNEMIEEMLEQEKIAPSEKLSKIAKAQHQREDIHKKWAKAPKNLSNNDKRAYCEALRIVINHRKNAAQVNLVNHVRIHRLLMSVLARLLDYSGLFERDLYFVTLAHIHLARKKTDDFSTNKENRDKIRDKLKNGQIIESLNIVNQNEDAKTLCENIAHHFGSVWEENNNIQIIRNNLSHFNMLELNQPIPDLTHWVNQTRKLVAYDRKLKNAVSQSVNELLQREGIIIDWVMNKDHQLENPSVTTAYATHLKTKSIQEALHGEDYIHMVVALLKGHISPKITDITTTSIDEILRENAPKNKNYGNKNHRNHAKRP

SEQ ID NO: 868 - protein, 1388 aa, Artificial; identical to SEQ ID NO: 103
  Synthetic

SEQ ID NO: 869 - protein, 1360 aa, Artificial; identical to SEQ ID NO: 92
  Synthetic

SEQ ID NO: 870 - protein, 1382 aa, Artificial; identical to SEQ ID NO: 631
  Synthetic

SEQ ID NO: 871 - protein, 1128 aa, Artificial
  Synthetic
MLYVKPYGKTETIRTPDGSLIRKLVVPTDGAPPKSVSLSDFYNNDPVFLLSKIISEFDGIARKSLNQQTSKRQRAFRDKLGPTVWGYFRTYECFAEKLSYWDKLWLTKLHPYDGKPLKGTTQRDTEDRKGRWYYTYFGKTPVDDVVPDGLGELIEDSLIRNAKSMNGGLISVGRTTEDRGAKGKIDAAARTISQNIHSAAKSISTGDAHWSKEDEKRYERAGDVAALIQSTLRDYIRSASVDRCPPKKRIGPIFFEQFARLFPREDLDETQKPVLTIKEIYEEPDLERLLHLHMSIKDYYNNAFRGQRRAGTLQDVLPKNMTSLFRMLKARKDNKSVNGLIRLGKVIHYSCAQSPETDTPRDVTNAQLWQSDVSNSMFWTSAGQSMIKRNESFVRIWRGAIVIAAHTLHHNIDPEGRLSDDILLSKGRKFLQENYSDATTQSRLKILFGARSECFDHLSPENRQNLMEVLRAGLENYRNNGFHFKGRGGFVDSLSVIKGNLPTEIETALRDLLSRDRNALIARNRAALEASGIQDFTKQHELKQLDELVRQGRESSNILPRYHRVLDRAHGAWDELPKSVKDILKRTNLPQRRNRREMEKNALWRAQYVAMKMVYETAFRDWDGLNNTDNLRRWRDDAIQRASAGAKQIVDPKDTRIIVSKMKGLIELRDNDGLAEFNERTAEAAARFIECQNNYENDEEAMQRKDAHIEYLRLDVIAQAWSEFLRSSNLQWLSYIDDERSAGRQPSSDISALPKIAPDTSTIPETHALLYALLHLMPAYTANQLVHQMRKWTVLETKGDGVADRDQSVKAIIGIFDLYLSMRDAKYMGSDLVPITNALASAFDGQEVLERVFPKLDPDAVDDHIPIRGLREMVRTGSHETLKSVFARVPVRATQLDELDVKLKKLDQLYTFYDGLRQKWENFKRGKPGLSDLTTEELKQYALAAESLSQYRHLANHAYLVDQLATQRVMMQIFGRLIDYVGMWERDLYFVMLALIYKDDQTPQTAWTDDNKIEKVKTGQSVAAARLLTGGLKPQLEEIFGSGFLDGRQEGSKVWIRNQLAHLNMLRSPAATQDQSINVTTWINHTRTLMSHDRKLKNAVASSMMTLMQRENFDLRWTMNANHQGTTQ

SEQ ID NO: 872 - protein, 947 aa, Artificial
  Synthetic
MKIVKPLGRSGTRFKSDDPSQLERILITTDKQNIQHDHELDQYIKTTDRAKLAQWVSLFDKIAKKPQPLKKASSIQREFRQRLWDKVSAFLKTSGEFNDWTKVKSAFELKIHCYPKDVDTSSNAGAKGKLYYAFLEKGAPLHVDLSTIAQDMQSHLNKERRFSRATKDPSAPGLISHRAKAIEANTMRLHGQSRTRMVGGVGVQTDYDANDISVYRKYGDIAKTIHNWIVAQENTRIKDNTSSPIGYKNVADLLFTHYGTVFKDPAGAVLPMKAVPESRMGELAFHNALRGFYRDRLRSHKISYDKKHGGTRHQKSLVHKIPHDFDSLLKRMGYVADNRDIAALIRTGKAIHYTLSLSQNGSSGVGYTQADWDLSTLDTSHFLTSAGQDEIKRNEAFVRVWRGYLGFAVRTLENWIDPKGEHVGDYTGRDFNAAFADMDENSFDEKLRLLFGLPIDVEDNPFQNADFSIKKAFIKKLRNDLRELRNQSYHFKSPKDFPNIIRQLGVAPNTPTSPQSPEDQAIAGLFRDYWTRDIRAQRELLYQSLIGVHADYYLSIKTLTKVYKALRDGGSNDLILPRFNRILGRYQGAWTEHTLNMKGKRLEFSMPKKPNNAQMENDPARRCQYVVLKMLYEREFCQWLKSDIKPKVLQGCVAIAEQRSDQAAKKIKTTAIARIVGKFPMGQGATIAKLLDRISEAMASEVSVQKHYEADKKAAEEKSAFLNDFTCDIILLAFRQFINDKGYTDIIALDPNKPLPAQAISRVSPVEREGPQADSSAPWQHILHVASHLVPVSEVGRIRHQFRKWQALSEKIRGGGAMAAGMAEAPQQFQVPVFADTLLQSFDLFLDMHDAKASGGAAVLTPRFEGILFEDRGHFERLFPDQPGTQEERKVPIRGLREIQRFGSLEPLKHIFESNKVSKEDVSRLLAMERQKPSGKSRTNHPGSHRL

SEQ ID NO: 873 - protein, 1161 aa, Artificial; identical to SEQ ID NO: 261
  Synthetic

SEQ ID NO: 874 - protein, 1184 aa, Artificial
  Synthetic
MRVSKVKVLGNEETKGRIVLMHRSPVKGQLIYSEDAGKRDRTEDIIPEQKLESFHLSILNKTFLRKEFFKKELKHEAKKNGLKGDAEDKYISEKLKEYHSLLQFIDDVLSVKYNENRKAIKFPEYLTREMIEIFLNHKFRKEVTYTNKNGASVSFLLSTLILNAIEKHSVIEMQPFVDWRNWFVETKSKFLKKSIINNCIPTNGGPISRRRETLMKWRDDYFTNAEIDLARLHKKFGTDTLMASLREVPQTEKSGNEYHRLLKSCLQSHQKKLFGKRAEGYDINRADNQLYVYNTEVVKYMEHYFPVKSSKRRNSTAEIKYYLQTDTIKCCLHHQIINAVRGLALREGKFNLHGFDDKLIPNERNVSSSILNELKTSEGFVLNMLGGCAFAANCLRNIVDATQRSDLLGFRCFEVSLKKGKSNSDLFALFFGFGREDMDDDSEWEKHLYAARYSVSEIRNRVAHYHKSAIENIYNITDFEYRENSMCSYTDTKFTTALQNEIYNTPKAFSLQLMTGKVLEYYPKEKLVSFFQKYKFSLYRSVVPFAPGFKNIMRTGVNYQNATQNRLFYDMGLTAFQDKDRYIDDVEAWNARYFFMKLIYNNLFLPRFTNDKNDLFRKTVEQVLEVNRSHMEKVGKDDRQAFGEVRQMRENETANDYMAYLQSSLRMEKNKKELEGNGAKRINFEKFILQMFVKGFDSFLKDGAFEFVHSPENCLTGSTEKERAKERNSLCEEIGNYVRLVSTVIDPGKGSHVAFYVFCKMLNSVYLSNIRNEMIKYHKVVRTDELAHLIEIIELCLLSADAVSQKTVNADKLSHFFAEGVNVDDDENVIHASMETFRKYGTRDLFHKLMLQDDRFLVSSDDYREWEEMKEKIEGKVKQRELLHAEWCEAKEKDKKSRKVKSNSRTCFEKKFMGAKAEEYYSLCNVIDKYNWLDNKLHLVHLNKLHNLVIEILGRMVGFTALFERDFQYICKSDSEYEQLYNLDFNMGLPKFKNSIKGSGKAKNSTQNIDHNATGIGNSSNLLKENSNGTHYCKNLSGDGVEDKLKRLFLYDDYRNVRNFVAHFNYLTRVEDDLGGNDAVKLSGTRYSLIELINELRNLLKYDRKLKNAVSKSFIDMFERHGMHVKMKLNHNHKLFVDSISPRKIKHLGGGYKKRGKDDKMYVQTTNHVDPLYCDMCRALLEMK

SEQ ID NO: 875 - protein, 1228 aa, Artificial
  Synthetic
MQMKISKIKNSRPGISVAENKNEESLSRQSLLYYAPVKDGKIRLESKDLEQHVTECNEKAQKLYNVITPEINFYRDENRQKMVENLARNFNAVINNALRSIRNPKEKKEQRVEKEVAFILNLSKKSIKMKKDVFVKSTDLIVKFPENNKYNKKNDKGTGSKEAYIQKMISDLVLRKLKNTLRKEVKLENGYRMQMTEIIISLMSAICLYGNAESFDPAILKAFFEKVDSDYTKYKYVEQIVKSIESQSAKLKVVEKDGRHLLISANADHRKKKYVFEFMRMYAAADEKEKRELTEHIQDLIGLYLCGKAGYENAENRFSDMTESHNCICGKIEEILNELEKPENLSQKKKENLKNTTVKVMALKYRAAVNYLADEVGKTVLGEIREKKVRSCADLYWIEYIDSTVEKLLLKSRNKDGYRYEIGFLSKHIWKEWTQYISGKYIEMGKGVYHFAIPDLSGNLEGEPISICEVKPEYRNGVSGFDYERIRAEESLEREMEKYVLFAVNNFARAVTPEEEREKSGHEDVLLMKTLSEIEESQTKEERQKKHDNNVKNAITLYADADRRILQFFGGQSRFREKEDSLINLYSGEDLYKEIRKELYAIRNITFHYTTKADKDQTQKHDLAEYLFEEEFSDITELFREKYYANNVWKYYDVEVINTIMENIYCGRKYRAAQVPAFKNIISRPELPQVMNGFVKGNSLRRLMNCPDRDVINKYWSALFFVLKELYYYDFLQEQKKPEDNVKERFFRAIEKLSGQENDDKKQKAWESFGNRIDQIGRDRSFGAICQGLMIEYMLQNSDISMVQTETDNGKANNKKQIYKHYRTLLYNCIREAFIEYLREKWEELRTPVLTVKEWSKEEFCRADGLKHLSLFDHLKKTFNDAESGSSWYMAAHFINQKYLNHLLGSIRNYLQFTEDIEDRAISLGDCVDNKREEKNLRYRNTLEILEFVAQFCERTTNVMEDYFESNQEYAEYLSGFVDYNTTKKETDIEKALYSFCKQKFKVDGKEYMAGIYYDGENLIPNRNIIRANMYGNTSCLKPCMDRITLKEIRTMYADQNKLDLVLKEGVCHTEEEQKAYREYQNEKNRIELFDVCTYTQILNDMQARLIGWSYMRERDLMYYQLGYYYTKLFWTDSISEEDARRRLVGNLVNVEDGAILYQILAFNSYNLPIIANKNNTVTLLKDEGSIGGKAITAFFKNYENAEMIYEEALDLFENMDEHAAIINTRNY

SEQ ID NO: 876 - protein, 1387 aa, Artificial
  Synthetic
MKLTKVEKARIAVSREKKDSGRIILYTNPEDVKKTSVTTMEQQVSKRIDQANKLYQVFFKSVIPVELNKHFAEISKIAAKCRNTEEFYKKACGYSGYEWTDAKQKKRTSQISRFSYTSSGKNMYVVMDNFVKEYMVQIWQEKDFRNAAVKILCCICDGKKFASKLEKVKKESPDTLKKFIEISGKCEGNPFVDYDTSFLEKVFTLVISQMVKNCDRKSYEQDDKEKIKKSIQKEIQWLSHVQSVTERSFGREGKTYLLFKIRNPYATEERLQTVLIRMRKTLKRGRNRDIAIVLLQGLAQMNQVTFTDTVKHLYQEEEKAFCDFIDAVNRDYYRVNIVKSVRNMDVKVQPDLNDNSILKLSGLGNIKKEALSDTLLRYAASADESDQVLLDIKKLLFEYFLPENSKETSKYTTVQNLWNIPYLPKIFFDYGFKNEDSDDDNECAEDIETLCDVEPQYKINQHSLKRRIRYVNYGKYLQMTKNESDRERRYWIHYIKEFVEKNYVDSGRTLSEKNCYASSMMLNCWKEIIRYLCGKYIDIGKAVFHFTNLTAMPKPKDKIIYGQLEEQYKKGISSFDYEAIKAEETLQRDIVQSVVAAAFAFSKSVIDETKMEECQETNKEDILFLSENVLGSLLKENTIKLILRFYGGESSVAQKEYFDQQEIVQEMISHLKSIRNENFHYLDGAKKDNPHKYASILWKNDEMAYQKLTKQRYYANNVGLFYRAEEIQELVQELYSQKNITEAQIPAFRTVLKRKDLPGYMEELGILFPDNTQEKSKGDFEGTLYFLMKEIYYRDFIVKDKAAAYFFKAVDQNKEQSKKEDKHTERAAENFHRYVKSLEKKYNKKEISFGTVCQYIMMEYNQQNTTKQETEIYKHFKMLISLCIRKAFGNYIKETYRFLFHPIYSKQQGEPEYLDTLELESGVKEKNYEWFTLAHFLHPVQLNHLVGDLKSYIQYREDILRRIVFAEQRVYADQQKEVQQKVKTAKEILEVLEFVREVSGRVSNEYTDYYENEEEYAEFLYQYIDFRKREGKSAFESLKYFCQNILDSGTVVDLYADTENPKVLRNIELTRMYAGSNVKIPEYEKITEDEIKMYYQEKNSVALILSRGLCRNEKEQKKVIEFNWKKKRLTLNEITDVFSLVNDLLGKMISFSYLRERDQMYLLLGFYYMALCAENKSENHLGWKGETLDKLESSDSKFDIGGGLVLYQIVSAFNFGSKLLYISEDGRWKMAGGAFPGKYGRFENDYNHRTSLSKVIRLFENESYEREIIYWRDYVDHMKYYVNQNQSIMEIYSAFYSKVLGYSAKLRKSVVFNLQAALEKHHINPECIWMTSDGKCADIKLMKNLESQKFTYKLAKREGEKTERKICMNALNENFLKTIRTSLEYKK

SEQ ID NO: 877 - protein, 1432 aa, Artificial; identical to SEQ ID NO: 494
  Synthetic

SEQ ID NO: 878 - protein, 1104 aa, Artificial; identical to SEQ ID NO: 697
  Synthetic

SEQ ID NO: 879 - protein, 1360 aa, Artificial; identical to SEQ ID NO: 92
  Synthetic

SEQ ID NO: 880 - protein, 1360 aa, Artificial; identical to SEQ ID NO: 101
  Synthetic

SEQ ID NO: 881 - protein, 1373 aa, Artificial; identical to SEQ ID NO: 104
  Synthetic

SEQ ID NO: 882 - protein, 1287 aa, Artificial; identical to SEQ ID NO: 105
  Synthetic

SEQ ID NO: 883 - protein, 1388 aa, Artificial
  Synthetic
MKLSKVTYRVKDKNAKYKKEYNVRAAVANNSENAGGVLYHVPGVDLIDLKEQMLDRDRSVRLLYNIFNQIQTGTKPKKWGNDETLSVDENERKAKEQNIKIMNYKWREACSEYIEKSQSTINSVLFYSYEESGYKTKRMNDNEAIIVKMQYENRLSHFTGGKLEDFVAYTLRNSLVVSRYDNQEFDSVNAMVVFINNIGNGNISDKDKKTICKLADLIRNDFSKLNPNVQSSQGANMVRSVRNQNMVVQPQGDIVSFPLVSDEGKNTVTNKNVEKKGLNEFLLNYANLDDEERMENLRKLRRIIDVYFSSPSHYQKDMDISLSDNIDKTKFVVWKKHETGKKNTELFVDIPDELFTAETEKIKLDAVLEKQARKRLTDSIRKQNMICYRYTRAVVEKYNSTEKLFFENDSINQYWIHHIENAVERILKSCKAETLFKLRRGYLTEKVWKDAINLISIKYIALGKVIYNFTVDDIWKDKKVKNLGSIDEKIKHGITSFDYEMIKAQEALQRELAVNVAFAANNLARAVCDMTNLKDKESDFLIWNKKDIANKLKNKDDMASVSVVLQFFGGKSSWDIDAFREAYKGNKYNYEVCFIDDLRKAVYAARNESFHFKTALMNNDIWNTEFFGKLFIKETEICLDIEKDRFYSNNLPVFYSDNDLKKMLDHLYNNKVSRAAQVPSYNSVMVRKYFPKNITSTLKYQKPGYDEDTLEKWCSACYYLLKEIYYNSFLQSDEALALFEESVNNLKGDNKDQELAVKNFRNNYKNIKSSCTSFSQVCQMYMTEYNQQNNQFKKVRSSKDSIVDKPIYQHYKLLLKKVIANAFASYLQHNKELFGFIGKPLKVNCLKEIDKEQFLPEWTAKKYVSLCEEVRKSPELQKWYIVGKFLNSRSLNLMAGSMRSYIQYVNDIKRRADGIGNELHVIAQNLDVVDKWVQVIEVCLLLSSRVSNEFEDYFYDKDDYAAYLKSYVDFDNSDMPSEYSALVEFSDQGKVDLYVDPSNPKVNRNIVQSKLFAADYILRDIIEPVSKDEIEDFYNQKDEITTCKIKGAELTDEEQKKILKYQKLKNRVELRDVVEYGEIINELLGQLINWSFMRERDLLYFQLGFHYNCLRNDSAKPEEYKNLVLDDISIKDAILHQIIGMYVNGVAIYAPGKDKNKLESQCVKGRVGGKIGAFCGYSLYLKLAADTLYNAGLEVFEVLPEHEDIINLRNGIDHFKFYLGGYRSIISLYSEIFDRFFTYDMKYQKNVLNLLQNILLRHNVIIEPIFESGIKKIGKDTKPCAKLCISSIKSDSFEYKIKDGTLITDAKDKRYLETIKKILFYPEVESEVRILSSKDSFEQNNQYGYMKGKSENNKNKKNKKNNGNRDEKKNSDGLTYNPFLDLPFELPE

SEQ ID NO: 884 - protein, 1104 aa, Artificial; identical to SEQ ID NO: 697
  Synthetic

SEQ ID NO: 885 - protein, 1287 aa, Artificial; identical to SEQ ID NO: 105
  Synthetic

SEQ ID NO: 886 - protein, 1373 aa, Artificial; identical to SEQ ID NO: 104
  Synthetic

SEQ ID NO: 887 - protein, 1388 aa, Artificial; identical to SEQ ID NO: 102
  Synthetic

SEQ ID NO: 888 - protein, 1382 aa, Artificial; identical to SEQ ID NO: 430
  Synthetic

SEQ ID NO: 889 - protein, 1388 aa, Artificial; identical to SEQ ID NO: 103
  Synthetic

SEQ ID NO: 890 - protein, 1385 aa, Artificial; identical to SEQ ID NO: 396
  Synthetic

SEQ ID NO: 891 - protein, 1177 aa, Artificial; identical to SEQ ID NO: 457
  Synthetic

SEQ ID NO: 892 - protein, 1161 aa, Artificial; identical to SEQ ID NO: 458
  Synthetic

SEQ ID NO: 893 - protein, 1245 aa, Artificial; identical to SEQ ID NO: 2
  Synthetic

SEQ ID NO: 894 - protein, 1388 aa, Artificial; identical to SEQ ID NO: 103
  Synthetic

SEQ ID NO: 895 - protein, 1202 aa, Artificial
  Synthetic
MRIIRPYGRSATRPGAGDGAARVRVLRLREVPGGGGSAEREIAPFASSEDALVIAQWISTIDKIATKPKGDKKPTQAQRDLRDLRERLGKAGWDFIVEKKLLPGLAADADGYFKKLWDFKIAPYPDGTYTPPEGKQPPSPKGRWYARFAGDVAPEDVNAAEVAASIHEHLYTAAYRMADGRPNHPMGRIEARAASIAANSLSLERAGARERTWTDDDRRSYEEKGGNIAEQIRQAATAQESAHRRVGVDVAARVLHEAWPKLFDGEALSFKDARDRSPGLVDLHEAIRDRYSRTLKRHGKDQKAHGEHRRKVSTLLPATMEGLFALVDSTLENRDLAALVRLGKVIHYQAATAQDTPADVVNHWPAADAIAASHYWSSDGQAEIKRNEAFVRIWRHSLALARQTLVDWADPGGRINTDILLGGGITQAIGTCFDPRHHERKLKLLFGSRSALFTDSRDDAVKKETLRVALKGVADLRHSAFHFKGLGGFSQALHELSASGDVLAKIRDLWVEDIQGRAERLRQTMVGAHFDCFFKKEQNRKLFEAVIGAAGDVPLPRFRRLLERAHNIAGTGAIKLKLPPPANRLALQEQPARLCQYVALKLLYEHPFRGWLGGLDAATINGFIDRAVERTEQAARSINAGRNKDRRALITAKARALGRLADGERIQDFLERLTAETASEMRVQRGYASDAESAREQAGYIDELLCDVLAQAFETYLDQQGFRFVTHLRPDAAQPGSPVCALDSLSPAAVDTTVADWQAILYFLLHLVPVEEAGRLLHQIRKWDILAGKAEGAPLRTTKSNVAPITKALELYLDMHDAKFTGGEALQVIDDFKQLFANKALFDEVFPATAAGAEDERLPLRGLREILRFGNLERLLPIFQQHRISQVDVEKVRADENANSSSSPIADAQAKRETLHEKWSKKRKEFSESDRRAYVEALAFVMVHRHLAAQVRLVNHVRLHHLMMAVLGRLVDFSGLWERDLYFAMLALLSRQGLSPQQVFQGDGLNKLERGQVVEACRNLDLTVRADLAPHFGSPDSDFEALVRIRNTFAHFNMLRGNAAPDLTKCINDARELMAYDRKLKNAVAQAVIELLARDGFALRWTMDATSADHMLNCARVATRQAKHLGSESIRESLHGPCFVEMVAVLFGGQMSASDCDVSQLPLDLIDWEKVGRPREGGAGKRRIPQGKAHPGRRHRRKVPRE

SEQ ID NO: 896 - protein, 949 aa, Artificial; identical to SEQ ID NO: 43
  Synthetic

SEQ ID NO: 897 - protein, 1130 aa, Artificial; identical to SEQ ID NO: 863
  Synthetic

SEQ ID NO: 898 - protein, 1388 aa, Artificial; identical to SEQ ID NO: 103
  Synthetic

SEQ ID NO: 899 - protein, 949 aa, Artificial; identical to SEQ ID NO: 43
  Synthetic

SEQ ID NO: 900 - protein, 1388 aa, Artificial; identical to SEQ ID NO: 103
  Synthetic

SEQ ID NO: 901 - protein, 1360 aa, Artificial; identical to SEQ ID NO: 92
  Synthetic

SEQ ID NO: 902 - protein, 949 aa, Artificial; identical to SEQ ID NO: 43
  Synthetic

SEQ ID NO: 903 - protein, 1161 aa, Artificial
  Synthetic
MKVTKVDGISHKKYIEEGKLVKSTSEENRTSERLSELLSIRLDIYIKNPDNASEEENRIRRENLKKFFSNKVLHLKDSVLYLKNRKEKNAVQDKNYSEEDISEYDLKNKNSFSVLKKILLNEDINSEELEIFRKDVEAKLNKINSLKYSFEENKANYQKINENNVEKVGGKSKRNIIYDYYRESAKRNDYINNVQEAFDKLYKKEDIEKLFFLIENSKKHEKYKIREYYHKIIGRKNDKENFAKIIYEEIQNVNNIKELIEKVPDMSELKKSQVFYKYYLDKEELNDENIKYAFCHFVEIEMSKLLKNYVYKKPSNISNDKVKRIFEYQNLKKLIENKLLNKLDTYVRNCGKYNYYLQDGEIATSDFIARNRQNEAFLRNIIGVSSVAYFSLRNILETENENDITGRMRGKTVKNNKGEEKYVSGEVDKIYNENKQNEVKENLKMFYSYDFNMDNKNEIEDFFANIDEAISSIRHGIVHFNLELEGKDIFAFKNIAPSEISKKMFQNEINEKKLKLKIFRQLNSANVFRYLEKYKILNYLKRTRFEFVNKNIPFVPSFTKLYSRIDDLKNSLGIYWKTPKTNDDNKTKEIIDAQIYLLKNIYYGEFLNYFMSNNGNFFEISREIIELNKNDKRNLKTGFYKLQKFEDIQEKTPKEYLANIQSLYMINAGNQDEEEKDAYIDFIQKIFLKGFMTYLANNGRLSLIYIGSDEETSTSLAEKKQEFDKFLKKYEQNNNIEIPHEINEFVREIKLGKILKYTESLNMFYLILKLLNHKELTNLKGSLEKYQSANKEETFSDELELINLLNLDNNRVTEDFELEANEIGKFLDFNGNKIKDRKELKKFDTKKIYFDGENIIKHRAFYNIKKYGMLNLLEKIADKAKYKISLKELKEYSNKKNEIEKNYTMQQNLHRKYARPKKDEKFNDEDYKEYEKAIGNIQKYTHLKNKVEFNELNLLQGLLLKILHRLVGYTSIWERDLRFRLKGEFPENQYIEEIFNFDNSKNVKYKSGQIVEKYINFYKELYKDNVEKRSIYSDKKVKKLKQEKKDLYIRNYIAHFNYIPHAEISLLEVLENLRKLLSYDRKLKNAVMKSVVNILKEYGFVAKFKIGADKKIGIQTLESEKIVHLKNLKKEKLTTNRNSKELCKLVKVMFEYKMEEKKSEN

SEQ ID NO: 904 - protein, 949 aa, Artificial; identical to SEQ ID NO: 43
  Synthetic

SEQ ID NO: 905 - protein, 1380 aa, Artificial; identical to SEQ ID NO: 143
  Synthetic

SEQ ID NO: 906 - protein, 1245 aa, Artificial; identical to SEQ ID NO: 2
  Synthetic

SEQ ID NO: 907 - protein, 1373 aa, Artificial; identical to SEQ ID NO: 104
  Synthetic

SEQ ID NO: 908 - protein, 1373 aa, Artificial; identical to SEQ ID NO: 104
  Synthetic

SEQ ID NO: 909 - protein, 1287 aa, Artificial; identical to SEQ ID NO: 105
  Synthetic

SEQ ID NO: 910 - protein, 1373 aa, Artificial; identical to SEQ ID NO: 104
  Synthetic

SEQ ID NO: 911 - protein, 1170 aa, Artificial
  Synthetic
MKITKNTKNGKLEFYRDVKEGGLRDPKSKTIWTSETIKRLDINKSLKGRILAYGTSLGSSNPYSVFVDSLIRENKEISLSELKREQCKKENVQKYLSAYGRMINYCTEENTSLGNLLVEYGNGAEISEALVQIKKQILKLKRHKKKSLLDSFMNNKIPFKLTNGKLEPATDKMSRLFSLLEEDGVDKNKFEKYKTWYQYEVLKKRLDLICEEHFSAAERKPRVLAKKIYSAVKLYNKEKANSDVIKNKDDAHSLFLDEIRDHFRKYFPVTGKKGLSSGGDSEKLNSLASEKNVKYYYSDKYVFQQVWRQIVNQLTAGLIQYGKLSYYFHDKENHTWQEEKLNSEGMQEIQVRETFKKQLFLSVVWSVNKLNYFFQYGGENPKMLYQVKYDEDCIAGDIIEELRKADFSRFCYDDPIKNNYIHRFMHGIKEEPEKFELLFDKMSVSYPLEEEDKNPEEILKVLQEINCSVTDLRHSIIHYQKDVVYQETQGPKYPKASEFLRRDIDNIENCFLEQIRSMSLAEYYPLDLLQKVFKDCNLNFQLYASQVPMVPSFQKVFGKGVNLYKADQKSGSLKWYMEERKDPEAKLATLAYRNFIQLIYYHGFLPAVEKNNALVTDFINETVEWNQERSLQSQREDPETKYINFSKYRYQGMPEFQNKSLLEYMSELQRDQSNKEKEDSKAGVPEDKKKRYYTKFIQDIFAFSFGSFLNSKLNECREDLLQPRYQEIKTNEDREQRLKKLLEDLEMKTNIKNGSPTQLAMYPFLKLLDQRGLNQLLHQFIRCSASVKSGFMQDDKALNLNREIEELIALVAFTKRPLMNTEAYSRAIEMLSETFIEGEIKDYADLYYQSDQEHSVLHRNIAYMGGTGVIALYSDVLRDCYRVKKTDYVEYKKANSKENGRQFTRIGEDQKRLQDLHESLIGRYNSGQIQEYKKLLRKTHEYNVLKKRITFENMYEIYQLHTELLGRLASFAEDWERDMLFLLTGLESRGLIEDRVEKIFLKDKGGVVAKMNKNLKDNEKLLKSLYCREDQESTDFWKTFHVRNAVAHFNHFTQKSQSKGGSVVYQRSIEELINRIRGLLAYDMKRQNAVTQAVQKIFDKHQMIIKFKPVTINSDPEKWVGTWNIEFGIDCIRSKNIVHFKNLSDRICLIEAHDRNTIKAIEKLMKFKYN

SEQ ID NO: 912 - protein, 949 aa, Artificial; identical to SEQ ID NO: 43
  Synthetic

SEQ ID NO: 913 - protein, 949 aa, Artificial; identical to SEQ ID NO: 43
  Synthetic

SEQ ID NO: 914 - protein, 1388 aa, Artificial; identical to SEQ ID NO: 103
  Synthetic

SEQ ID NO: 915 - protein, 1187 aa, Artificial; identical to SEQ ID NO: 867
  Synthetic

SEQ ID NO: 916 - protein, 978 aa, Artificial
  Synthetic
MQMKISKIKNSRPGISVAENKNEESLSRQSLLYYAPVKDGKIRLESKDLEQHVTECNEKAQKLYNVITPEINFYRDENRQKMVENLARNFNAVINNALRSIRNPKEKKEQRVEKEVAFILNLSKKSIKMKKDVFVKSTDLIVKFPENNKYNKKNDKGTGSKEAYIQKMISDLVLRKLKNTLRKEVKLENGYRMQMTEIIISLMSAICLYGNAESFDPAILKAFFEKVDSDYTKYKYVEQIVKSIESQSAKLKVVEKDGRHLLISANADHRKKKYVFEFMRMYAAADEKEKRELTEHIQDLIGLYLCGKAGYENAENRFSDMTESHNCICGKIEEILNELEKPENLSQKKKENLKNTTVKVMALKYRAAVNYLADEVGKTVLGEIREKKVRSCADLYWIEYIDSTVEKLLLKSRNKDGYRYEIGFLSKHIWKEWTQYISGKYIEMGKGVYHFAIPDLSGNLEGEPISICEVKPEYRNGVSGFDYERIRAEESLEREMEKYVLFAVNNFARAVTPEEEREKSGHEDVLLMKTLSEIEESQTKEERQKKHDNNVKNAITLYADADRRILQFFGGQSRFREKEDSLINLYSGEDLYKEIRKELYAIRNITFHYTTKADKDQTQKHDLAEYLFEEEFSDITELFREKYYANNVWKYYDVEVINTIMENIYCGRKYRAAQVPAFKNIISRPELPQVMNGFVKGNSLRRLMNCPDRDVINKYWSALFFVLKELYYYDFLQEQKKPEDNVKERFFRAIEKLSGQENDDKKQKAWESFGNRIDQIGRDRSFGAICQGLMIEYMLQNSDISMVQTETDNGKANNKKQIYKHYRTLLYNCIREAFIEYLREKWEELRTPVLTVKEWSKEEFCRADGLKHLSLFDHLKKTFNDAESGSSWYMAAHFINQKYLNHLLGSIRNYLQFTEDIEDRAISLGDCVDNKREEKNLRYRNTLEILEFVAQFCERTTNVMEDYFESNQEYAEYLSGFV

SEQ ID NO: 917 - protein, 1360 aa, Artificial; identical to SEQ ID NO: 101
  Synthetic

SEQ ID NO: 918 - protein, 1388 aa, Artificial
  Synthetic
MKLSKVTYRVKDKNAKYKKEYNVRAAVANNSENAGGVLYHVPGVDLIDLREQMLDRDRSVRLLYNIFNHIQTGTKPKKWGNDETLSVDENERKAKEQNIKIMNYKWREACSEYIEKSQSTINSVLFYSYEESGYKTKRMNDNEAIIVKMQYENRLSHFTGGKLEDFVAYTLRNSLVVSRYDNQEFDSVNAMVVFINNIGNGNISDKDKKTICKLADLIRNDFSKLNPNVQSSQGANMVRSVRNQNMVVQPQGDKVSFPLVSDEGKNTVTNKNVEKKGLNEFLLNYANLDDEERMEKLRKLRRIIDVYFSSPSHYQKDMDISLSDNIDKTKFDVWKKHETGKKNTELFVDIPDELLTAETEKIKLDAVLEKKARKRLTDSIRKQNMICYRYTRAVVEKYNSTENLFFENDSINQYWIHHIENAVERILKSCKAETLFKLRRGYLTEKVWKDAINLISIKYIALGKVIYNFTVDDIWKDKKVKNLGSIDEKIKHGITSFDYEMIKAQEALQRELAVNVAFAANNLARAVCDMTNLKDKESDFLIWNKKDIANKLKNKDDMASVSVVLQFFGGKSSWDIDAFREAYKGNKYNYEVCFIDDLRKAVYAARNESFHFKTALVNNDIWNTEFFGKLFIKETEICLDIEKDRFYSNNLPVFYSDNDLKKMLDHLYNNKVSRAAQVPSYNSVMVRKYFPENITSTLKYQKPGYDEDTLEKWYSACYYLLKEIYYNSFLQSDEALALFEESVNNLKGDNKDQELAVKNFRNNYKNIKSSCTSFSQVCQMYMTEYNQQNNQFKKVRSSKDSIVDKPIYQHYKLLLKKVIANAFASYLQHNEELFGFIGKPLKVNCLKEIDKEQFLPEWTSKKYVSLCEEVRKSPELQKWYIVGKFLNSRSLNLMAGSMRSYIQYVNDIKRRADGIGNELHVIAQNLDVVNKWVQVIEVCLLLSSRVSNEFEDYFYDKDDYAAYLKSYVDFDNSDMPSEYSALVEFSDQGKVDLYVDPSNPKVNRNIVQSKLFAADYILRDIIEPVSKDEIEDFYNQKDEITTCKIKGAELTDEEQKKILKYQKLKNRVELRDVVEYGEIINELLGQLINWSFMRERDLLYFQLGFHYNCLRNDSAKPEEYKNLVLDDISIKDAILHQIIGVYVNGVAIYAPGKDKNKLESQCVKGRVGGKIGAFCGYSLYLKLAADTLYNAGLEVFEGLPEHEDIINLRNGIDHFKFYLGGYRSIISLYSEVFDRFFTYDMKYQKNVLNLLQNILLRHNVIIEPIFESGIKKIGKDTKPCAKLSIRSIISDSFEYKIKDGNLIADAKDKRYLETIKKILFYPEVEPEVRILSSKDSFEQNNQYGYMKEKSENNKNKKNKKNNGNRDEKKNSDGLTYNPFLNLPFELPE

SEQ ID NO: 919 - protein, 1220 aa, Artificial
  Synthetic
MQMKISKIKNSRPGISVAENKNEEPLSRQSLLYYAPVKDGKIRLESKDLEQHVTECNEKAQKLYNVITPEIDLCKEENREWIVEDLTKNFNAVINNALRSIKNPKEKREERVEKEVAFILNLNKNSIKIKKDVFVKSTDLIVKFSANNKYNKKNDKGTGSKEEAYIREMISNLVLRKLKKTLRKEVKLENGCKMQMTEITISLMSAICLYGNVESFDPVILKAFFEKVDSDYTKYKYVEQIVKSIESQSAKLKVVEKDGKHLLIPANADHRKKKYVFEFMRKYAAAEEKEKREITEHIQNLIGLYFCGKAGYENAENRFSNMTESHNCISGEIEEIFNEIEELENSSKQKREEKKKTREELDKIQESRKGNKRNTNSNNQNYKNNKTDSDKKENQADANENKLKENELRDKIRRLSKELENLDSEVRIKKEKLKNTTVKEMALKYRAAVNYLADEVGKTVRGEIKEKKVRSCADLYWIEYIDSTVEKLLLKSRNKDRYRYEIGFLSKHIWKEWTQYISGKYIEMGKGVYHFAIPDLSGALEGESVSICEVKPEYRNGVSGFDYERIRAEESLEREMEEYVLFAVNNFARAVTPEEEREKSGHEDVLLMKTLSEIEESQTKEERQKKHDNNVKNAITLYADADRRILQFFGGQSRFREKEDSLINLYSGEDLYKEIRKELYAIRNITFHYTTKADKDQTQKHELTEYFFEEEFSDITELFREKYYTNNVWKYYDIEVINNIMGKIYCGRKYRAAQVPAFNNIISRPALPQLMDGFVKGNSLRRLMNCPDRDVIKKYWSSLFFVLKELYYYDFLQEQEKPEDNIKERFFRAMEKESGQAKDGKEQKAWESFENRIDQIGRERSFGAICQGLMVEYMLQNRDISMVQTETGDGKTNKKQIYKHYRTLLYICIRSAFTEYLREKWEELRTPVLTVKEWSKEEFCQTDGLKHLSLFDHLKETFNDAESGSFWYMAAHFINQKYLNHLIGSIRNYLQFTEDIEDRALSLGDCVDNKREEKNLRYRNTLEILEFVAQFCERTTNVMEDYFESNQEYAAYLSGFVDYNVSKKETDIEKALYGFCRQKFKVDGKEYMAGIYYDGENLIPNRNIIRANMYGNVSCLKPYMDRITLKEIRTMYADQNKLDIVLKEGVCRTEEEQKAYREYQNEKNRIELFDLCTYTQILNDMQAKLIGWSYMRERDLMYYQLGYYYTKLFWTDAISEEDAR

SEQ ID NO: 920 - protein, 1380 aa, Artificial; identical to SEQ ID NO: 153
  Synthetic

SEQ ID NO: 921 - protein, 1102 aa, Artificial; identical to SEQ ID NO: 648
  Synthetic

SEQ ID NO: 922 - protein, 1412 aa, Artificial; identical to SEQ ID NO: 182
  Synthetic

SEQ ID NO: 923 - protein, 1382 aa, Artificial
  Synthetic
MKLSKEKHIRSAVANEEQNIGGVLYHVPGTDTIGLKDQMLIRDRDVKQLYNVFNQIQVGDKPKKWKNDEKLSPEENERRAQQKNIKMKNYKWREACSKYVESSQRTINDVLFYSYMEADKKIRNMRKNEDILIKMQEVTKLPKFSGGKLEDFVAYTLRKSLVVSKNSTQEFDSVAAMVVFLECIGKSNISDHEKEIVCKLLELIRKDFSKLDPNVEGSQGANIVRSVRNQNMIVQPQGDRFSFPQVSDKEKKTVTNKNVEKEGLNEFLLNYANLDDEKRAEILRKLRRILDVYFSAPNHYEKDMDITLSDNIDKEKFNVWKKYECGKKVTDLFVDIPDVLMEAEAENIKLDAVVEKRERKVLADRVRRQNIICYRYTRAVVEKYNSNESLFFENDAINQYWIHHIENAVERILKNCKAGKLFKLRMGYLAEKVWKDAINLISIKYIALGKAVYNFALDDIWKDKKDKELGIVDERIRNGITSFDYEMIKAYENLQRELSVDIAFSVNNLARAVCDMSNLKDRESDFLLWKKEDIADKLKNKDDMASVSAVLQFFGGKSSWDINIFKEAYKGKNKYNYEVRFIDDLRKAIYCARNENFHFKTALVNNEKWNTELFGKIFERETEFCLNVEKDRFYSNNLYMFYPVSELRNMLDQLYSRSVSRAAQVPSYNSVFIRKNFPEDITNVLRYQKPGYDADTLGKWYSACYYLLKEIYYNSFLQSDKALQLFEKSVKTLSWDDEEQKRAVDNFKNHFSDIKSACTSLAQVCQIYMTEYNQQNNQIKKVRSSNDSIFDQPIYQHYKVLLKKAIANAFAAYLKNNKDLFGFIGKPFKANEIREIDKEQFLPDWTSRKYESLCIEVSGSQELQKWYIVGKFLNARSLNLMAGSMRSYIQYVTDIKRRAASIGNELHVSVQDVEKVEKWVQVIEVCSLLAFRTSNQFEDYFNDKDDYARYLKSYVDFSNADMPSEYSALVDFSNEEQSDLYVDPKNPKVNRNIVHSKLFAADHILRDIVEPVSKDNIEEFYDQKAEIVYCKIKGKDITAEEQKAVLKYQKLKNRVELRDIVEYGEIINELLGQLINWSFMRERDLLYFQLGFHYNCLRNNSEKKEAYQKIEVNGDSIKDAILYQIIGMYVNGVAVYAPDEKGDILKEQCTKGGAGGEISAFNRYSEYLGLDKLTLYNAGLEIFEVVAEHDDIINLRNGIDHFKYYLGDYRSMLSIYSEVFDRFFTYDIKYQKNVLNLLQNILLRHNVIVEPVLESGFKTIGKQTTSGAKLSIRSIKSDTFQYKVKGGSLITDAKDERYLKTIRKILYYVENEEDNLKKSVVVTNADKYEKNKESDDQNKQKEKKNKDNKGKKNEETKSDAGKNNNERLSYNPFANLNFKLPN

SEQ ID NO: 924 - protein, 1248 aa, Artificial
  Synthetic
MKLSKEKHTRSAVANNGDIKSAEVNNGNTKSEEVNNGDTRSAVANEEQNIGGILYRFPGKSIDGVKDQMLRRDKEVKKLYNVFNQIQVGTKPKKWNNDEKLSPEENERRAQQKNIKMKNYKWREACSKYVESSQRIINDVIFYSYRKAKNKLRYMRKNEDILKKMQEAEKLSKFSGGKLEDFVAYTLRKSLVVSKYDTQEFDSVAAMVVFLECIGKNNISDHEREIVCKLLELIRKDFSKLDPNVKGSQGANIVRSVRNQNMIVQPQGDRFLFPQVYAKENETVTNKNVEKEGLNEFLLNYANLDDEKRAESLRKLRRILDVYFSAPNHYEKDMDITLSDNIEKEKFNVWEKHECGKKETGLFVDIPDVLMEAEAENIKLDAVVEKRERKVLNDRVRKQNIICYRYTRAVVEKYNSNEPLFFENNAINQYWIHHIENAVERILKNCKAGKLFKLRKGYLAEKVWKDAINLISIKYIALGKAVYNFALDDIWKDKKNKELGIVDERIRNGITSFDYEMIKAHENLQRELAVDIAFSVNNLARAVCDMSNLGNKESDFLLWKRNDIADKLKNKDDMASVSAVLQFFGGKSSWDINIFKDAYKGKKKYNYEVRFIDDLRKAIYCARNENFHFKTALVNDEKWNTELFGKIFERETEFCLNVEKDRFYSNNLYMFYQVSELRNMLDHLYSRSVSRAAQVPSYNSVIVRTAFPEYITNVLGYQKPSYDADTLGKWYSACYYLLKEIYYNSFLQSDRALQLFEKSVKTLSWDDKKQQRAVDNFKDHFSDIKSACTSLAQVCQIYMTEYNQQNNQIKKVRSSNDSIFDQPVYQHYKVLLKKAIANAFADYLKNNKDLFGFIGKPFKANEIREIDKEQFLPDWTSRKYEALCIEVSGSQELQKWYIVGKFLNARSLNLMVGSMRSYIQYVTDIKRRAASIGNELHVSVHDVEKVEKWVQVIEVCSLLASRTSNQFEDYFNDKDDYARYLKSYVDFSNVDMPSEYSALVDFSNEEQSDLYVDPKNPKVNRNIVHSKLFAADHILRDIVEPVSKDNIEEFYSQKAEIAYCKIKGKEITAEEQKAVLKYQKLKNRVELRDIVEYGEIINELLGQLINWSFMRERDLLYFQLGFHYDCLRNDSKKPEGYKNIKVDENSIKDAILYQIIGMYVNGVTVYAPEKDGDKLKEQCVKGGVGVKVSAFHRYSKYLGLNEKTLYNAGLEIFEVVAEHEDIINLRNGIDHFKYYLGDYRSIDRKSVV

SEQ ID NO: 925 - protein, 1185 aa, Artificial; identical to SEQ ID NO: 421
  Synthetic

SEQ ID NO: 926 - protein, 1167 aa, Artificial
  Synthetic
MQMKISKIKNSRPGISVAENKNEESLSRQSLLYYAPVKDGKIRLESKDLEQHVTECNEKAQKLYNVITPEINFYRDENRQKMVENLARNFNAVINNALRSIRNPKEKKEQRVEKEVAFILNLSKKSIKMKKDVFVKSTDLIVKFPENNKYNKKNDKGTGSKEAYIQKMISDLVLRKLKNTLRKEVKLENGYRMQMTEIIISLMSAICLYGNAESFDPAILKAFFEKVDSDYTKYKYVEQIVKSIESQSAKLKVVEKDGRHLLISANADHRKKKYVFEFMRMYAAADEKEKRELTEHIQDLIGLYLCGKAGYENAENRFSDMTESHNCICGKIEEILNELEKPENLSQKKKENLKNTTVKVMALKYRAAVNYLADEVGKTVLGEIREKKVRSCADLYWIEYIDSTVEKLLLKSRNKDGYRYEIGFLSKHIWKEWTQYISGKYIEMGKGVYHFAIPDLSGNLEGEPISICEVKPEYRNGVSGFDYERIRAEESLEREMEKYVLFAVNNFARAVTPEEEREKSGHEDVLLMKTLSEIEESQTKEERQKKHDNNVKNAITLYADADRRILQFFGGQSRFREKEDSLINLYSGEDLYKEIRKELYAIRNITFHYTTKADKDQTQKHDLAEYLFEEEFSDITELFREKYYANNVWKYYDVEVINTIMENIYCGRKYRAAQVPAFKNIISRPELPQVMNGFVKGNSLRRLMNCPDRDVINKYWSALFFVLKELYYYDFLQEQKKPEDNVKERFFRAIEKLSGQENDDKKQKAWESFGNRIDQIGRDRSFGAICQGLMIEYMLQNSDISMVQTETDNGKANNKKQIYKHYRTLLYNCIREAFIEYLREKWEGLRTPVLTVKEWSKEEFCRADGLKHLSLFDHLKKTFNDAESGSSWYMAAHFINQKYLNHLLGSIRNYLQFTEDIEDRAISLGDCVDNKREEKNLRYRNTLEILEFVAQFCERTTNVMEDYFESNQEYAEYLSGFVDYNTTKKETDIEKALYSFCKQKFKVDGKEYMAGIYYDGENLIPNRNIIRANMYGNTSCLKPCMDRITLKEIRTMYADQNKLDLVLKEGVCHTEEEQKAYREYQNEKNRIELFDVCTYTQILNDMQARLIGWSYMRERDLMYYQLGYYYTKLFWTDSISEEDARRRLVGNLVNVEDGAILYQILAFNSYN

SEQ ID NO: 927 - protein, 1388 aa, Artificial; identical to SEQ ID NO: 102
  Synthetic

SEQ ID NO: 928 - protein, 1380 aa, Artificial; identical to SEQ ID NO: 143
  Synthetic

SEQ ID NO: 929 - protein, 1102 aa, Artificial; identical to SEQ ID NO: 648
  Synthetic

SEQ ID NO: 930 - protein, 1388 aa, Artificial; identical to SEQ ID NO: 103
  Synthetic

SEQ ID NO: 931 - protein, 1169 aa, Artificial
  Synthetic
MKITKRKWEDVPPLFFHRDKDSGRLIRQDDREHDYTDELFRKTTVDSIFIRSLQNRLLRSQDKEGNKIGRNEITELVENLCKGAEIQKSIDEIKDSKSNVKALCDKTLTDYGKSFAAEEGRTTLYEAILNLAKGNAIQKAMAEAELKQIHEALKKEKEDRINRVQNSIKNNKIPLKVNEDGTISANNDRASWLLELLKPVASEHDKGDRYPVLTEMEGIVSFDKLCEEVRNKIHGRKGRTRSIAMSVDEAVKEYLKELWKKHADRHRDMRYYFQAVKEYFKENFPIRTKQKGAGIRQSLLKEDTVVARLLDPKHMAKAVRRKLINQSTQMHILYGKLYEYCCREDRNLPVNSETLQLIQVLEAVKKQLMTAVLWSVSRLCYFYEFYSGDILLAEEYRRDFLNQKNDHKDIQACKEKLQDFFPLAELQEKIRECADKDINNIKDKITNDVLACNNLLEECVFCISKLRNNIFHYKNLSFTQALKHIANEIKEEDIPIILRLYKQDCENVNKAFANRISSMNLPLYYSTEFLLRIFKKQGAELSLYSTKNQMTPSFKRVYERGKNLRLEYEREPMRSNIANEYDKDPQSDYWMRWFSQFATGTVDTNAGIKGEMEDYPHASVNLGIEIEAGTNIDAQRAMRNLLQLIYKHHFLPEVQKDETVVTDVIPKVLERNRKLSEVRNRSDKTYGYKEIEELCKKNKGKKDSLSELMKDLQRKVSETEKEKRELAREKTDYAQRFILDIFAEAFCNFMDERYEDEYQEIMSPIKNEEEAKKWTEMFTDKADKDNKDKLLVLKTSFDKDNVEKYLLVLYPLMRLLDDKELSELQQQMLRFRASVSGWQGGTDFSEDIAMAEKIEELAELVKLTEPESQYAEEAWKNRAIGVFEQFVEGKMAEYGTFYIQNDSLTQVPRGNMRKLLRSGVIGVYNKVLASCKQATKADYGAYSGDHWSIEDPDGNPIKSAEQAQALLQRLHKKYTESPSQFSDDDHKLYDKTLRQLDAYNRAMKNLSFGSLYEICRIHMETLSRWVGFVQDWERDMYFLLLAWTKQGKLLNVTETDVIEIFEKGSVIYKMNKKLKNGDRYAFTSIYRNNNDEKLEFLQIRNFIAHLHLLRKSEWKGDKKAGYSVIEDYINKLRFLLSYDQKRMNAVTKAMQQIFEKHKVIVKFMVEKGG

SEQ ID NO: 932 - protein, 1049 aa, Artificial
  Synthetic
MKALCDKTLTAYGKSFAAEEGGTTLYEAILNLANGNAIQKAMAEAELKKIQKALKKEKEDRINRVRNSIRKNKIPLKVNADGTISANNDRAAWLLELLKPVASEHDKDDRYPVLTEMEEIVSFDKLCEEVRKKIQSCKSGARSRAMLADEAVKEYLKALWEKHTDRHRDMRYYFQAVKEYFNKNFPIRTKQRGASIRQRLLMEETVVTRLLNPKHMAKAVRRKLINQSTQMHILYGKLYEYCCRKGRNLPVNSETLQLIQVLEAVKKQLMTAVSWSVSRLCYFYEFYIGDILLAGKYRRDFLIKQNNNRKDIQACKEKLQDFFQLAELQEKIKESADEDINLTETITNDALVCNKLLEECAFCISKLRNNIFHYKNLGFTQALKHIANEIKKEDVPVLLRLYKQDCENLNNAFASRISSMNIPLYYSTEFLLRIFKKQGVELSLYSAKYQMTPSFKRVYERGKNLRLEYERESMRSNIANEDGNDLQNGNWLRWFSQLEAGIVDTDAGMKGDIGDYPDTSADLGIEAETGTNTDAQRAMRNLLQLIYKYHFLPEVQKNENIVTDLIPKVLERNRKLSEIRNRSNRTYDYGYKEIEELYKKNKGKKDSLSELLKDLQRKVSETEKENQELAREKTDYAQRFILDIFAEAFSNFMDDRYEDEYQEIMNPKKDEEKAKKWAELFTEKADKDNRKDEPLVLKTSFDKDNIEKFLLVLYPLMRLLDDKELSELQQQMLRFRASVSGWQGSTDFNEDIAMAEKIEELAELVKLTEPESQCAEVSWKNRAIEVFEQFVEGKMAEYGAFYLQSDTLTPVPRRNMKELLRSGIMGVFKKVLLSHMQATKKDYGVYSGEHWNIDDPAGNPIKSAEQAHALLQRLHNKYTESPSQFSYEDYKLYDRTIRQLDEYNQAKKNLSFGSLYEVCRILLDMLSRWVGFVQDWERDMYFLLLAWAKQGKLHNVTETDVLEVFNEGRVICKLNKKLKDGDWHAFASIYCNNSGEKLEFLQVRNFIAHLHLLRESEWNGDEKTGCSAIEDYINKLRFLLSYDQKRMNA

SEQ ID NO: 933 - protein, 1373 aa, Artificial; identical to SEQ ID NO: 104
  Synthetic

SEQ ID NO: 934 - protein, 1287 aa, Artificial; identical to SEQ ID NO: 105
  Synthetic

SEQ ID NO: 935 - protein, 1387 aa, Artificial; identical to SEQ ID NO: 93
  Synthetic

SEQ ID NO: 936 - protein, 1102 aa, Artificial; identical to SEQ ID NO: 648
  Synthetic

SEQ ID NO: 937 - protein, 1102 aa, Artificial; identical to SEQ ID NO: 648
  Synthetic

SEQ ID NO: 938 - protein, 1360 aa, Artificial; identical to SEQ ID NO: 92
  Synthetic

SEQ ID NO: 939 - protein, 1053 aa, Artificial
  Synthetic
MKVSKVNHRRAAVAVNKKSVTVNGILYDAPVKKNVKTGNMSAYVSSKYVIDNVVKNSSRLYSPFSSKRIVIDREKIRIADRLKQCYVNFVKYYLSNGSLNEQQMRFNPNNTYMADSRVHFCVPSGIDIESLINSIVDSSLRKSLKRTYRFETNYGEKNTFNLPDLVKKSIKIYCTDEKRKLNDREEQEMYVLFSYMYEDKYKDRQKVLIANSISNQATKVKVCDDESRLIKLSIADTKKKPLWDFIVDYANSDKNGQYTILRNIRKSIVLFVCGVDVYRNIENNDNLDIWKWEEYGIQESQLFVKIENCYTTKGEDIALNEIRNVNLDHYMKAIGVLDDERSKFWFQHYENTIEALFSKKSKRKIERIKTAYLCEYLWKNFCSYVALKYVDLGKGVYHFTMSDKLSLMNKNTNENGIKFGEVDSRFNKGISSFDYERIKAEETIDRNISTYTTFATNIFAKSVIKDSYRQKKAGNSDALQYDDETYYNRKAMNPYALKRVLRYWGGQSRWKSELEELNVAELCIDIKNRLSKIRNSGVHYTSTSALKGNDDDSIVGMLIKKDFDDIKDVYASKYYSNNVWMFYNTDKISKMMEYLYQDDSNIRDAQIPAFNSVIKRKDMAEVIEKIVKKNSYKTIKEPYQREKYRSCLYFMLKEIYYNRFIKQDNLKDQVIQIIDSNTELIGDNSRAVDNLKKRIHDVDSQTMSFGELCQVIMTDYNMQNQENKSIKSKERQDKDRKNGIDNSYKHFPLLLHHLIKVSFLKFIKTDEKLAFIREPRITEWDKTLEQFEAQIQTVDIYNSLKMMVAENKSLLDWYTLAHFLMPKQLNHLIGDVKNYIQYLSNIDKRAGSVKNNKSASTEVKIRQYSEIVRILDFSLQYIGRVSNDVTDYFVDEDEYAAFLSKYVEFSGNDIVSMKAFCQSRTANGKHTIGLYCDGANPIMNRNIAYAKMYGNDEILSYIYNKVTKKDIEKYYVSQDNLEKVFADGKCQDVQQQNALCDFQKMKNHIELTEVSIYTDILNDFMAQFISWAYLRERDLMYFQLGLNYIRCFMVHMN

SEQ ID NO: 940 - protein, 1102 aa, Artificial; identical to SEQ ID NO: 648
  Synthetic

SEQ ID NO: 941 - protein, 1188 aa, Artificial
  Synthetic
LSCAIKKTLRKEVKLENGCRMQMTEITISLMSAICLYGNAESFDPAILKAFFEKVDSDYTKYKYVEQIVKSIESQSAKLKVVEKDGRHLLISANADHRKKKYVFEFMRMYAAADEKEKRELTEHIQDLIGLYLCGKAGYENAENCFSDMIESHNCICGKIEEILNELEKPENLSQQKKEKLKNTTVKVMALKYRAAVNYLADEVRKTVLGEIREKKVRSCADLYWIEYIDSTVEKLLLKSRNKERYRYEIGFLSKHIWKEWTQYISGKYIEMGKGVYHFAIPDLSGALEGGSVSICEVKPEYRNGVSGFDYERIRAEESLEREMEKYVLFAVNNFARAVTPEEEREKSGHEDVLLMKTLSEIEESQTKEERQKKHDNNVKNAITLYADADRRILQFFGGQSRFREKGDSLVNLYSGEDLYKEIRKELYAIRNITFHYTTKADKDQTQKHDLAEYLFEEEFSDITELFREKYYANNVWKYYDAEVINTIMENIYCGRKYRAAQVPAFKNIISRPELPQVMNGFVKGNSLRRLMNCPDRDVINKYWSALFFVLKELYYYDFLQEQKRPEDNVKERFFRAIKKLSGQEKGDKEQKAWESFENRIDQIGRDRSFGAICQGLMIEYMLQNSDISMVQTETDNGKANNKKQIYKHYRTLLYNCISEAFIEYLREKWKELRTPVLTAKEWSKEEFCRADGLKHLSLFDHLKETFNDAESGSSWYMAAHFINQKYLNHLLGSIRNYLQFTEDIEDRAISLGDCVDNKREEKNLRYRNTVEILEFVAQFCERTTNVMEDYFESNQEYAEYLSGFVDYNITKKETDIEKALYSFCKQKFKVDGKEYMAGIYYDGENLIPNRNIIRANMYGNTSCLKPCMDRITLKEIRTMYADQNKLDLVLKEGVCHTEEEQKAYREYQNEKNRIELFDVCTYTQILNDMQARLIGWSYMRERDLMYYQLGYYYTKLFWTDSISEEDARRRLVGNLVNVEDGAILYQILAFNSYNLPIIANKNNTVTLLKDEGSIGGKAITAFFKNYENAEMIYEEALDLFENMDEHAAIINTRNYIEHFKYFIKSDRSMMDLYSEIYDRFFRHDHNRKKNVPDSLKNVLADNFMIVDIDMELGSKKVGEKKKGFREYKAARIEFTDSGIRSTDMTYTIKPDIKDNKKDEKVLVPARSEVFLKQFRKILEYRIQDKTQ

SEQ ID NO: 942 - protein, 1394 aa, Artificial
  Synthetic
MRILQSKGRSFTTFSAESIGMTRGLEPDDTQSAAKWLDEGEKRIAPVRIPVFLKEDPDLIIRQVVSVLDKVIRKTKILRDLPLQTYVDRTLLAEELWQRITDRIRQSHDGEITPADLDAYKSRWSWKVHPYAKNPPDPSNPKGDQNAVLILKNGDRLPSPTDSRGRWHGALWKTTSDGDPDYASTANAIINHIFSNEVLIGGHYLSDWSGKGSKSSVGLAERRGDSIRSSTPDLKLPIGPGASARLLLDLDDQNAKPIIKLFFHQDIAAKIYAFVLERARVDGPRKPNVAFSVRSSDFGRLLSKHFGDVPNHRDFDDETKIKIVAFYDRVKRYYAALSKSESFRRAIAKAEISKLEAILPRDKSHLLAVLAGKERNTEISSLIRFGKLVGHACDISPVVEVQTAFDNNVRHLATSDGQSEIKRNENFTRVWRTSVAFSLRTLDSWLKPDWPKLTEDEARRRNDRNPGGQQINKSALERDIAQMSYIKTIAGEEPVEGFLNGAGIIFGSKHVEFEGEAARRCEIFAQGDKAKNRELVWAWLRLAAEMRHRTNHFSTKPRLVSLMQKGVLSPTRDNPGNFENRKGNEVQQAALDAFGQLLSFDINYQAILLVNDFNRLQVTRYTSDGQFKDVLRRALSTDDDPVITTPKFMSVLRKAKGIFDHDLESAPEWSKFLGSLDLTALSAAPDGPNQFKIGLLRHLFATDFQSWLARKANTKDQIQAAVVAVSEDKNRRTLDVLKNEESRVYAVAETAAKMLIFAKADSFSELAALVMSMAFAEDNTRKSYKPKPEEQSKRSTWVDDFQRDLFVYLFNHYLNTQSLHWIFDVTDLVGDGEARTVTLFDLGAGRWSLESKPWHSQFYAWLYLTPVDEVALLRNQMRRMLILEKKGGSNETPALRDLDRLMTLYIAVSSAGFDGTEHIQTTAEDDKRFRLYGGLLYEDAVQFEKVYSAAADTNDQSLPGTRRGLRQIARLGHISVLKGIFEKHLITPDEVSTLIETKKAKSFKDATKRAKLHNEIVTLSKGFKPDIHQLDKKCKEYKDLSAEITVHNFKAAGARLTEHARLHQLLMRVISRLADFTLIWERDRNYVLLALIYPKLLHPDENAPRLHRRDGKVGFLLPPETTKTMRAAHAPLSDNDKRKLSREIALTSENVEEGFLPLWDDDMGYRLTGYPIHLALLEMDKRDAFARFFDRSETENPLDVAERARIKRGTGNSSPLQRRQLTFKDGKRRIRNDFAHFNVIVSDRKRVSLTYLMNAVRSLVAYDRKLKNAVSKAVADILVDEGLDISWEMTGDRLRNPVVVPRLETNLKKVRKHRGLADPQFVLPLASVRYTSMVKALFDFQAGGYRKEIIVGQETKQRGELGYPVELRVLLGSLGADMPDDVLGMKLYVIQPQK

SEQ ID NO: 943 - protein, 1330 aa, Artificial; identical to SEQ ID NO: 836
  Synthetic

SEQ ID NO: 944 - protein, 1412 aa, Artificial; identical to SEQ ID NO: 453
  Synthetic

SEQ ID NO: 945 - protein, 1388 aa, Artificial; identical to SEQ ID NO: 103
  Synthetic

SEQ ID NO: 946 - protein, 1388 aa, Artificial; identical to SEQ ID NO: 627
  Synthetic

SEQ ID NO: 947 - protein, 1388 aa, Artificial; identical to SEQ ID NO: 103
  Synthetic

SEQ ID NO: 948 - protein, 1382 aa, Artificial; identical to SEQ ID NO: 154
  Synthetic

SEQ ID NO: 949 - protein, 1382 aa, Artificial; identical to SEQ ID NO: 631
  Synthetic

SEQ ID NO: 950 - protein, 1330 aa, Artificial; identical to SEQ ID NO: 324
  Synthetic

SEQ ID NO: 951 - protein, 1345 aa, Artificial
  Synthetic
MKISKESHRKTGVLINNSGAEGILYKDPLKSNEKIEDVVNARANSTKRLFNLFGTGEESKDISKNAKEVAKTVNRAIGNLKANKKFNKKERINSELKVEQLVEEIINNKKFDFKEHDVDEALDRLLKKSFRVAPYKGAVRTLLMSTLVEKKELSVEENDKVQNYFIKKLVAEYDKTLIKRQIPKALVNQNMVIQPSSNDGTLVIAETNKSKETKLTEKDAFRLFLRDYATLDDKLRHEMRLKLRRLVDLYFYGEEAVIKEDFDEWEIHEKRKADTALFVDKATKIKVLKNGVKREILDVDTTLDAIRGKNISCYRKSVSIVKDNNTGYFDSEALNKFWIHHIENEVERIYGHLKNDTGNYKFQLGYLSEKVWKGIINYLSIKYIAEGKAVYHYAMKALSRDDTTKTFGKVDEKYLKGISSFEYERIKAEETLQRECAVNVAFAANHLANATVQLDDINTDFLLLKNKEPQEDSKKKGIKSLAECASAKPNTLRNILQFFGGKSTWEDFDFSGYDEIELLNDMKEMIYSLRNMSFHFKTENVNEGKWNTELIGRMFAHDCDRASIVQKNKLYSNNAAMFYNSSDLAKLLDKLYNHYNERASQVPSFNTVFVRKNFPEYLKQQQISPALSAEDTLKWQSAVYYLYKEIYYNAFLQDKESFNLLKQYVRNLDEHCQDKNQAGANRDFKAAFEIYSESGSMSATCQMIMTEYNNQNKGNRVGISGRTNSDDKLIFQHYKMILFDGLKAAFSEYLKKNGEVYDFIKTPKLVTILVDADVFLGDYKSHQYDSLVENVKTNPELQKWYVTGRLLNPKQVNQLIGTFRSYVQYVNDVMRRAKQVKNPLTDETISIDVDNIIKVLDICTKLNGATSNKIDDYFDNGDEYAKYLGNFVDFGLRDDVNLANAKLAGFCNQEVDGQKIGIYHDGTNPVLNRNVVLCKLYGASDVVAQAGILPVDFEIIKKYMQLSGEIKEYQLTGVCKTKEDQQRLKKYQELKNMVELRNIVDYSELVDELQGQLINWGYLRERDLMYFQLGFHYLALNNESKKPEGYEKAGDINGAILYQIVAMYTNGLSLIDATGKSKGNAKASAGAKIGSFCSYSKSLRNVPGDTKEEIDPIYHAGLELFENINEHDQCVALRNYIEHFHYYAKMDRSLLDIYSEVFDRFFTYDMKYAKNVPNMLYNILLQHLVVPSFEFNSGEKKLGDHNSLSKKRATISLKSENGLASEKFTYKIGDKKNPIKLSARSNDYLSDVAAILYYPDKAPTGVVRDTVKEDNSAKEQGKKSKDFAGPRNNKNNNYHGHNNGYNNQKRDYSKQNENEHSGSLSTGLFDAANYKKDRHNNNQNYKKRK

SEQ ID NO: 952 - protein, 1225 aa, Artificial; identical to SEQ ID NO: 394
  Synthetic

SEQ ID NO: 953 - protein, 1163 aa, Artificial; identical to SEQ ID NO: 586
  Synthetic

SEQ ID NO: 954 - protein, 1197 aa, Artificial; identical to SEQ ID NO: 585
  Synthetic

SEQ ID NO: 955 - protein, 1085 aa, Artificial
  Synthetic
MKVTKAEKLRVAVSRKLNNEDKRAVLYKTPNPGQTCGTVKKQLANRVERANKLYGVFFRSDVPETLQYHFEELVTYAAQSTSPNEFRQKASQYRECEKKDKFGKMRKYPIFRCSYAPSGKNMKKVMELYVRERMKDEWQSQAYRTAAIEILLCICNKDFSKQLSRVDARIFADFYNASKACPQPYIGKSTGVLEAAFTSVMKQMSLHAKANASNKIWWLQNQLRTIELNKKIVKISDFKYEYATEDRMRAILVRMRKSLKRGTNGDIAVALLQGIAQMNGKTLSGVLEELSANSETKEQLIKFLKAVHEDYHKTPILKAIRNQDVKVQVHEVDPVSPEGRALDLASINVSKGNERKKYKVALTQTLGNYAKSPKDATQTLKAIKGVLLDYFMWLDSDVKAEFLEDNNLWKIPNRTEEYFDNNFVPIDDKKDDKIEAIEDFASIWRQERVKNSRIKARMNYVNCGKYQQLIKQETDDFRICWISYAKDFVEKNYVSKNRQFTQGDCFSTKMLLECWKEIIRFICGKYIDIGKAVYHFAMPETMNARDSLAYGVLGEKYKEGISSFDYEAIKAEETLQRDIAKAAVAAIHAFSGSVIDDKKPVEDILFIKDEELQEHAKADDVIVKQILRFYGGFSSVEGREKLEGMALAKEVLSQLKAIRNENFHFTQGKRKNVEENIPLTKALWENEEKVYRQTVKETYYSNNVSMFYSQEVIQKLVAELYQNNNVAEAQIPAFRTIWKRKDLPEYIGSLNISWDKTEPKQVIYEGALYFLLKEIYYRDFIKSGEAKKLFFDAVMDNATEMEKSSNADSRNQEKKALANAGKNFRDYVNGLNASTLGEVCQFIQNEYNQQNRGKQEQEIYKHFKMLLPICMRKAFQRYIDEKHSFIKKPGELPQTTEDYLENVKVACPEKKIKLGRWFTFAHFIHPRELNFLIGDFKNYIQYREDVLRRSEHAGQFSDTTERDGEKAVVDHAVQKAKDILGVLEFVRHISGRVSNEFTDYYADRAEYDEYMAKYFEPDVQIEQYDLYGDAKNAKVIRNISINKYKEKFRLKRIPSEYTLSLEELAECIPDERGRDEADSERIADA

SEQ ID NO: 956 - protein, 1152 aa, Artificial
  Synthetic
MCMKITKIDGISHKKYKEKGKLIKSNEIEKDITEERFNDIEAKTTELFQKTLDFYVKNYENSEDQNKERREKAKNYFSKVKILVDNKKITICNENTEKMEIEDFNEYDVRNRKFFNVLNKILNRENCTEEDLEVFENDLQKRIGRIKSIKNSLEENKAHFKKESINNNINYDKVKGNNKRSIFYEYYKNSLKHQEYINNIFEAFDKLYSNSHEAMNNLFSEITKDSKDRNIRKIREAYHEILNKNKTEFGEELYKKIQDNRNNFDKLLEIEPEIKELTKSQIFYKYYIDKVNLDETSIKHCFCHLVEIEVNQLLKNYVYSKRNINKEKLENIFEYCKLRNLVKNKLVNKLNNYIRNCGKYNAYISNNDVVVNSEKISEIRTKEAFLRSIIGVSSSAYFSLRNILNTDNTQDITNKVDKEVDKLYQENKKIELEEILKLFFGNYFDINNQQEIKVFLMNIDKIISSIRHEIIHFKMETNAQNIFDFNNVNLGNTAKNIFSNEINEEKIKFKIFKQLNSANVFDYLSNKDITEYMDKVVFSFTNRNVSFVPSFTKIYNRVQDLANSLEIKEWKIPDESEGKDAQIYLLKNIYYGKFLDKFLNEENGIFISIKDKIIELNKNQNEDKHCKFKKFESVNEKNPKKYLEIIQSLYMINIEKINSERKNVFLDFIQRIFLKGFFEFIKNDYNYLLELKKVQDKKNIFDSKMSEYIAGEKTLEYMEEINEIIQDIKITEIDKILNQTDKINCFYLLLKLLNYKEITELKGNLEKYQILSKTNVYEKELMLLNIVNLDNNKVKIENFKISAEEIGKFIEKINIEEINKKIKTFEELRNFEKGENTGEYYNIYSDDKNIKNIRNLYNIKKYGMLDLLEKISEKTNYCIKKKDLEEYSKLRKQLEDKKKENEKIEDEKTNFYKIQEYLHSKYQQEPKKILWKNNKNDYEKYKKSIENIEKYVHLKNKIEFNELNLLQSLLLKILHRLVGFTSIWERDLRFRLTGEFPDELDIEDIFDHRKRYKGTGGGICKKYDRFINTYTEYKNNNKMKNVKFADNNPVRNYIAHFNYLPNPKYSILKMMEKLRKLLDYDRKLKNAVMKSIKDILEEYGFKAEFIINSDKEIILNPVKSVEIIHLGKEDLKSRRNSEDLCKLVKAMLEYSE

SEQ ID NO: 957 - protein, 1185 aa, Artificial; identical to SEQ ID NO: 421
  Synthetic

SEQ ID NO: 958 - protein, 1382 aa, Artificial; identical to SEQ ID NO: 430
  Synthetic

SEQ ID NO: 959 - protein, 1340 aa, Artificial
  Synthetic
VPPAFPGEVFEASGEIGGQALRQPGLSPWRERKDQRNRACQPPGRRPYAATRNSGRSRDDMLIVKPYGRSEAARGEDGALRRQLRLRPDDAGPLALPEFAETHPELVVAQWISAIDKIAAKPRGQAKPTPEQRRLRNMLGGAAWELLARKHFPQDRLEELGKLWRRKLHPYGDGESDHASGREKGRWYARFAGETAPGDIGKDKSAEIAGKIEEHLHETEYRIGGGRPNKRRGRIAARAESIAGNVVTTVSEPPKAGWTDADLERYRTAGDVAAKIRAAAQALETENRRVGPRAAAEALYAHYGKLFAGGDGAALAVAKAREREPGLFALHVAVRETYTRILKNHGKDRQEHGARRRKVSALLPGDMEALFRLAGAMGRNRDLNALVRLGKLVHYEAAPAPEAESATGDEPVYAVDRWPGDDAIRRSRYRTSAGQAEIKRNEAFVRIWRGAGALAQRTLTDWADPEGDIDRDILGGPEIEKACGAEFNENAYRAKLPILFGSRAELFDDAEGPGILRLALEGWTGLRNGSFHFKGRAGFARALRAGLAGGEPSEAVAALVGRDAAERRARLLASLRAAHVEYCYTQEQLGALFDALANGAPAVSPLPRFRRVLARAENAWRRGKFRLRLPGPENRRDMEASPGRLARYIVLKTLYERAFPRWLEAQEAETLNGWIGRAADRATAAARHINKDEEAAARMAGLVRLADDERIADFTDRLAAQTASEYRVQRGYDSDPLAARKQAKHIEDLRCDVVGQAFEAYLADEARKLTWMMNDPPGGPLPDEKKASLETAAPPAEDAGTEAEEDWLARLYFLLHMLPVETAGGLRHQLRKWSVLEEKAKPGESAPDKDVVAIERIFDLYLDMHDARFEGGDGVAGAEALSGLFASPAQFRRVCPEGGAGGGSHVPWRGLREMLRFGGGEPRLMWAFGKWPIGAGMVDGLEALEATVAEAHTQREDLHAKWAGKKGFSRKDRDDYRAALETVVAHRHLAAHVQLVNHARLHRLAMAVLARLADYAGLWERDLYFATMAFIRLENRKPEDVFRSKGLERLREGRIVDALKELKKNADGSESAVGTALQRLFGKGFLTGGGTVSVRRDLLHFNMLQRKENEPFNLTTAVNDTRRLMAYDRKLKNAVSRSIIELLAREGLGLAWEMKDHELAGATLESRQAVHLGGAKVDRGPITEDLHGPEFTAMAAALFGGEARAATGAAEAATGRPNRRERKSGGARPRAARPAKAPPAPTPRLLPATGERVEGVLIEEKTRKGGWKAAVETGGRRIVGDIYNSGEVPPDAGPGLEAEMVVRVANPANASFLWLSPDVEERLKKGAGPRRGGRPAGRRR

SEQ ID NO: 960 - protein, 1039 aa, Artificial
  Synthetic
MQMKISKIKNSRPGISVFENKSEEQFSKQSFLYYAPKKNGKVRLKSNDLRKHVMDCNKNAQNLYNVINPEFDFCKDKNRKKVFEDLAKNFNLVLCSALRSVDTSISDPKERAKEETAFILNMDKEGIKTKKDSMKSENLIVEFPPSDEDNGTEKTKKAESPELKEQRRKEQEAEILKMTEELVLRKLKKTLRRNATLDDESKMQMTEIAISLMKAICVHGNAGSFDPVILKTFFKEIDKDYMKNEQMEEIVRSIESQSVKVKVAEKDGKYLLLPANADHRKKKYAFEFMRKYAAAEAEGKQELTEHIQALIGLYLCGESEYQDAKNCFYDMVENHECMSGEIEEICNTIEELKNLSRQKREERKEIKEKIRKIEKSGKGDKRTPNNNSNKSYKNDKKDNDNKENDINLNENDLKKAIEEIDKELAKIPLEICINNEKLNNAVIKTMSVKYRAAVKYLVSKVKKTVLGEIKEKKDCSCADLYWIDYIDNTVKKLLLDSRNKGMYRYEISFLSNHIWKEWTQYISGKYIELGKGVYHFAIPDLSGALEGKPVSVCEVKPEYRKGISGFDYERIKAEESLDREMEEYVLFAVNNFARAAAPENEREKPGHEDVLIMKTSDELIAENKKNQEPIVLYKDADRRILQFFGGQSRFREKEDSFINLYSGEDLYKEIRNELYTVRNITFHYTTKAEKDQIQKHEMAEYFFKEELADISGVFRKKYYSNNVWKFYDVEVINDLMDKIYSGRKYRAAQIPAFNKIISRPALPQIINGFVKGNSLKKIMNYPDREIIKQYWSALFFVLKELYYYDFLQEQENLEENIRERFLRVLARKLEETSDAKEQKAWESFDKRISEIGRERSFGEICQGLMIEYMLQNNDSPMVRKENIHKRTKSRDTQIYKHYRTLLYICIRDAFIEYLKEKWQGLREPVLIKKEWSEEEFCHSDNVEHLSLYDHLKDLFHSTASGPSWYIAAHFINPKYLNHLIGSIRNYLQFTEDIERRAVSLEKCVDNEREEKNLRYRNTLEILEFVLQFCGKKTKGMEDK

SEQ ID NO: 961 - protein, 1049 aa, Artificial; identical to SEQ ID NO: 932
  Synthetic

SEQ ID NO: 962 - protein, 1315 aa, Artificial
  Synthetic
MIIIKKFGRSVITQDKNTDNKRERELDTSARAKAKSQNSQVFPFLNKKEDFINLWISEFDKLIYKPKGDDKPTKEMYTLREAAGKGFLNYWNQMPMVSKKDGAFSDMWMSKVHPYGRGITEFSPPLQLEKLIDQGLLSAMGGSEPLKNCHWNRVTSNVFKGLKVQLDILEAQAKNTFVIKNKTNSKRNRPASQNIKEFLLTDETAFINLWISEFDKLILKPQGHNKPTEKMYNLRQQAGVAFLNYWKKKPLIPWANSESFPDKWMLKVHPYGDKTSNNRSETLIKSKWGSVMRAKECLSDDQWEQVAFNVYSHLYGNQKTLNGKNKEIGLIAARANSIKQNVPSYTLDKDNNFLSDKKDKLRYIAALRGEGIKWEEVKDRYKWKELTQLINIEEIDSTDIAKRKQHLAECFYTHHGRIFGDIQKSKIEDKDCFLYHSLVKEILFECIEKKQDFLNDTEVHQRLIYKENNRIMATAVSIGKLIHYQGGIEAIGNKEDLVNSKFLTDAGLTEIKQNESFVRQWLELIAIANTTLSQLVDPDGKHEDIFAATSFDDALKGLNNISDFDSKFKLLFGENHRLYDDDTERQKLLRIIYDTISALRNASFHFKNIQGFNKALEDNLSTKGRRQKGVVDKIIEYTKVHQQKQHELLIADLKAANVEDYLSQLQLDYLFEVVCKGERELLDMPKFSKLLLRAGEIGEKIISPVNATAMEHPAYQFCFISLKMLYDQDFVNWLKKQSNKNIASWMDSAKTRATNAAKKIFRNGTNISSKMARLRNIVEDETLVEYFSFITAETANEFQVQQQKNRYQSNSASAKEQSNFVEQFKQDFLIYAFKGYIGDIKFGKLDQGEKLLKCNAKGSLLPENNRSDTGAEDIERPWLYLVLHLVPIEVVNRITLQIKKHSVLTNSTLDDTRAAYTDIHQAFSLYLGVHGAILGLQSLSNEPELQVFFEKESDFNNLFTDNGEGLVPVKGLRDILRFGNLEQLKKMFSDKKVASDDITNLKEYLEATGGKSKIARAQEKRIELHKTLTELPKRLTKPRVKQTGIDTYEKNNNISISGSISEYRKDLKCIVSYRELKNKIYLYNVKQAHQLIMATQARLLGYSQIRERDLYFVLLTQLMLRGVTLEKEKKKKDKDKLNALDTDTVLDEEEKKKLEKQIKPERSLKDLVEKGLIFLALDQLSSSDKDLKAIHSEIEDMFVGVSPDSDNRNLRNRLAHFKDLGNKNLINITSQINEVRKMMSYDRKLKNAVSKSMIDLFERYNLILSFKVQSHKLQLKNLKSKQITHLNNKGITENLLSDDYFSVIKRLLLTEQNPE

SEQ ID NO: 963 - protein, 1225 aa, Artificial; identical to SEQ ID NO: 394
  Synthetic

SEQ ID NO: 964 - protein, 1388 aa, Artificial; identical to SEQ ID NO: 103
  Synthetic

SEQ ID NO: 965 - protein, 1208 aa, Artificial
  Synthetic
MLIVKPYGWSKAGRGEDGTLRRQLRLRPDNAGPLAFPEFAETHPELIVAQWISAIDKIAAKPRGQAKPTPEQRRLRNILGDAAWELLARKHLPEDRLEELGKVWRRKLHPYGGEEDDRASGREKGRWYARFAGETAPGGIGKAEAAEIAGKIEEHLHETEYRIDGGRPDKRKGRVATRAASIAGNVVTAVSELQQAGWTEDDLERYRAAGDVATAIKSAAEDLESKNRRVGPRAAAEALYAHYGTLFADEDGTALAVAKAREREPGLFALHMAVRETYTRMLKNHGKDRQEHGARRRKVSALLPGDMEALFRLAGAMGRNRDLNALVRLGKLIHYEAAPAPDAESATGDEPVYAVDRWPGDEAIRRSRYRTSAGQAEIKRNEAFVRIWRGAGALAQRTLTDWADPDGDIDRDILGGPEIKKACGAEFNDGAYRAKLPILFGSRAELFDDAEGPGILRLALEGWTGLRNGSFHFKGRAGFARALRTGLAGGEPSEAVAELVRMDAAERRARLLATLRAAHVEYCYAQEQLGALFDALANGAPAVSPLPRFRRVLARAENAWRRGKFRLRLPGPENRRDMEASPGRLARYIVLKTLYERAFPRWLEAREAETLNGWIDRAADRATVAARHINKDEDAAARMAGLVRLADGEGIADFTDRLAAQTASEYRVQRGYDSDPAVARKQAKHIEDLRCDVMGQAFEAYLADEARKLAWTMNDPPGGPLPDEKKASLETAAPPAEDAGAEAEEDWLARLYFLLHMLPVEAVGGLRHQLHKWSVLERAPDADVGAVERILGLYLDMHDAKFEGGKGVVGAEALTDLFTSPAQFRRVCPEDGAGDDGHVPWRGLREMLRFGGGEPRLMWAFREWPIGAGMVDGLEALEATVAEAHKQREDLHAKWAGKKGFSRKDKDEYRAALETVVVHRHLAAHVQLVNHARLHRLAMAVLARLADYAGLWERDLYFTTLALIRLENGKPEDVFRSAGFKRLREGRIVDALKELKKNADGSESAVETALQRLFGKGFLKGGGTVSVRRDLLHFNMLQRKANEPFNLTTAVNDTRRLMAYDRKLKNAVSRSIIELLAREGLDLAWEMKDHKLAGAALESRQAVHLGGAKVGGGPITEDLHGPEFTAMAAALFGGEARAATDAAEAATGRPDRRERKSGGASPRPARPAKTLPAPTPRLLPAAGERVEGVLVEEKTRKGGWKAAVEIGG

SEQ ID NO: 966 - protein, 1165 aa, Artificial
  Synthetic
MGSGKYRITKIARKWDKNENWEKIILKRIVDNKKIKYVNENNNKDVDITDTYYSILSKNNSKFLGSEEQFIFKVNKMKRNIKNDCVIIKDYTEEEFEKFDKKIFFSRKIKVNNEDREKICRNFYEDEREIMKKRLEEAKNFNNIIFNICNKIFKLEYIDYTDEKVYEIFQKEIKFEDIKNLKEAFKQQENGLETDKLLTISFNKKRSNVLLEFIQQIVKQNFENEKELENWFSHDGEKYCKEIFKIYSNMSQKEKYSKLLGHNDKSIASNSEKRETLQRRLKLGDYSKYDLKKYYQKDYKEEAINELEDKSKEELEKEVEEIIKKNYKIDKLCDEISNLEFSFVDSKKENKDKMSEIIVKIKEHYKNNVNVEEELENKEKYILSMIHNYIKGRYRKCLELQQKENVDFENLGKRIKEIFDSNKVTEKLKKSILNKVNNYKIFETKFQNPNIESSDDLEILKAEETFLNKLSTAVSKVGYILNILLEIHFRNDILQDYNQVEKLWKSDSFQKICAIYPEINNDEKLLKGMIYFIQGLRQQVLHPKILWEKQNIYNAENIKEKEKIVSVRLQNEGEAYNKKGIQNYFENVLKKIPDYFIEKYESSNVFNIYRNFVDKIMEVVKNFNFKENNTIDYLFPKFHKIYKRMCKLENIDDRQNGARKYLLQIIYYYYFQYEIENDKNNISKYLNLYRNKIKVKKISYSYITDNKAVNNKNIEILYRNIQREGMLNNKLSQMNKEWIEFIVVQFSEFLTNKKLNWILDNLSGYKKKEKLDENDKNRLLKILKQKMNKKIIYSNDSYAFISLAQFLDLKEISNLIHDIKKFIQFREKNVSKYKPEKNKLYIKELRKVLYILKVMLEHKERVIQKHYLESYDENISIIYGKDIERKDIKDIKIKIKNENQEIINQPLYKSGNDENSSWIVLYGIEQAKRNGTFKFFEGFFNLNDDIKLCKENIEKYEELYNEKEENQRKVDEYISSEENNNIDEIKEINNNKQLFYYYKNMIYGDGLKKGYDFINDIYSHYLSWAYRVERDCKIYKIKEYENKKNFNEYKFKEYKSIKNFRNEIAHFNYFQKTNKSLLELLNDFYDIFDYNLKYQRDVQNVINNIFEKYQIVRKDGGPVVFYCKTDKKLKLSENLVPKKHSKYPEIKLIHEKYVMFFRKLFEYKK

SEQ ID NO: 967 - protein, 1298 aa, Artificial
  Synthetic
MTRAALDQEVIMRIGKVQGRTFTGFDNARGKTLRRRLLTRPDNEARSLSEHLAHDPKALIGQAISRIDTIYQKPKTGKPTPEQFGHRDTLGWAYWKLLVASYPEVEGHRDLFVRRLHPYGDTPPKSHGQKEGEHQKGGKPQLEGRWHGVMAQHGKNPDQIAARLFDHLHNSELRFGGTASGEPRTRPGKEATPTGLIGARAKTIEHSVLPRDAKRFVAEWRGEDQERYAGARDIAAAISAGLNDKDQKSGSGRKSAVIGKLLSDHLETLTGNRKCRFDPKSTAETLELRDGESVDDRRRILELHAEVKATYKRMAAWKPAKLPRNSDELFRLVRQQADNRILNHLVRVGRISVYSEQSDALSESQFWTSGGQTQIKESEVFARLWIGAISRASYSMKAWLEPEGTVFNPSINDFDVTSSHNTNRILEDSGRLSNAMARRAIYFGETPEFDALGEEDQRVLVKKCLDALSACRNRTFHHGQRAKFLKEVRKGLKEKEADSAGPAAWEGIREVIQADARNLGARLLQDLTGAKVHSFATDPEFRHLYESVAATLTAGGELEAALPRLKNVLKRAEGVRCYLDTPSQRREGDESLIARLPVAPVPRELDDAATKARHSALLRLYDGPFRPWATELRGERLSDYAARAKRLATRLAKSTNTASPYPDSVEGRSVRLRDPITADTAPETLKTYLSALTAETATEFRVQKGYESDGEKAKEQAEFIEDFRRDMIALAFQDFIRDHGFAWLLDIASKAEPSNDAPNLPDPVDTGKDTVFEDWQALLYLFLHFVPADDVSQLLHQLRKWDALQDKYELAEPGETLGQTKADTRKIVGQFRDCLTLFLKTGDARFDGEGVELPLSDFQELFESPATFKELFLAEPAENDASETDDQDAPGEKHRVTRTRRGLRQILRYNHMPVLRDLFLAHKVTDAEVDGLQALEVDDPQTGESQIGAAQRIRTEIHHHTSNDKQISEAKVEEYRRALSTIERHRFLVGRVYLGDHIRVHKLMMDVMGRLVDFAGAWEREAADGDRKGFISRAIALPEVAEGYAADRLKTVARRVLDDGEARRIRNDLGHFNDLAPTSGPANLTFVVNRARRMMRHDRKRKNAVTKSVIEILNRQGLGIEWTMRNHELCEAKLWQNPVKHLGFATLEGRGKKWRRPFEARYGDAYMAMVAQLFDGTVTSPPAKGPPQSGKSGGKPGKGAEGGAKEKSRSPTRMEEGGVYEGRVAKAKSDKGFGFLLVEGAQEEIFLHIYGISGNRPARIENGQRYRFTLGIDRDRERRKERAWVAREAVRIDENRSK

SEQ ID NO: 968 - protein, 1419 aa, Artificial
  Synthetic
VRTPFLRSSFTSRLCLLGRTASGQCCVIEYPIEYPCVKGLAKRSAIMAKHLRPIGESYTDFLDETEFVRLGRGLHRGHHGVQIPPTELPSYLAEYRKALMRQVVAVLDKVVGKRRRLSGMHPEAYRDRVHLAEALWVRLVARVKEIGTPPDPSELLDLRRMWNAKAHPYAEYDVVPRAPLNDGNGQKILECREVDDPKIERSDFEGRWHGRFWQSEPGPVDYNAIADRIFAHLFDQEAVIGGGPRREGNVTVPDEDINGQPGPATGKGLIIARGQSIVKSASDPRRSSKKVQRTWDKAVERRYFGDDGKGGSDIAKAIYEELGDPATLADPIYASWFGSRLYDHFGSFKNSLPLELKDPFKEQIWALHNSVRQFYQRMAKSDRFRLALQNARSEVPDRSELLALLPKDHDHLLLVLGGKKKNAEMSELIRLGKLFVHASDVLHDFDANDAAALDAFKRRMSFLATSIGQSEIKQTETFARTWRGAVGLTLRTVKGLADPRGIIGTPDNRDLGTAGPMKDAFNKFDQPHFQQHMTIIFGNKELQAEGNPTRSSVFTANGDKDHQAELLWGFLCVVRSVRNRTNHYNVRRALLRLLDEGIVSPMPSDPKKERVENRNLCTVSPTALEAFRRLLNFDLAIQKEAVRTALEQAKASEFVEEGKLRGLVSELAGTEDMPALHIPRFSAVMDKVRRLADNRDVGLDPILSTLQRSLPPTDKQAESDAARCRYRLLLELYKSGFRSWFSGIQSNEENNREICHWAVKQVGRAKDARKSEYDKKTKRHYRSPNSLIDDLGLDKFDDLTDLLEALASQSTREHDQNLKYVPDARVQSQMSNRIEEFRQELFAHIFTKYLDTHDFGWIGAIEVRREACDLADVVSAFEVRDQKFDADWHSQFYAWLYMVPPIEASRLRHQMRKSAVMDDKWSTTLELTSGDRKTRDDHAQDVLADMDRLFSLYTKVQAAGFNGQEHESALGSKSLFYEDGNQFDEVYSPDTETHNKTFPGTRRGLRQLVRYAHLPALEGVFKKHRITKAEVETFVALYDENRRDPGSVAHMLRREKLRTEILRSIHDGPKPKDKDFWPKLEAKCLEYRTVATETAIYNFQANAARLNDHARLHQIVMRVVARLTDYALIWERDRLFAFVGMLYRQTGGTGINPAMRHAEKTNAPPRIGILVSDSALAKKLNSNSAEVFIPYLDTETGFDAPRFDDLCTLLSHEHAKEFRFHFLEVGEENSKDEARRLNEETMGHRKRPAFKRGTRRQGIRNDLAHHNVLDLAGGAGPNLTYVVNAVRSLLSYDRKLKNAVPKSIKRILGEEGLIIEWQMNYDRLKKPTVYPNVETHLTMVPPRHMTAPVSFTLPRASVRLASMVKAVFDFGSSGYGEERMIGGRTAKQAVYPDDFTRRFPQTPMGLKQATRLVFASENS

SEQ ID NO: 969 - protein, 1282 aa, Artificial
  Synthetic
MQSPEALAPAARGAWNGGKAMRIVRPYGESRAGAGAEGPRRRVLVDTTPQRQAHDIPAFAGSHDALVLAQWISLLDRIATKPSDNNGPTDRQRAFRDRLGEAAWAQICASDRIDPAGRAHLETLWRFKTHPYGNAKYRPRKTKDGQTKPDPDPRGRWYRRFVGDVAPEQADVNAIARLMDRHLHVAELRMDPDRPDKCKGVIQARAESIAGNVPQENPRPPQRDRDQTTAERYFAADDVAKRIFKAAREREQSENGATKVPVRRSFAAEILHAHFAKVFGPDVREIEQARKRDPALLDLHMAVKDVYRKLIKRRAAPKKMRLAQALPKSRHDLLRLLGHHDRNRDLAALIRHGKLIHYTAADLAARDAGGAQEPGDRPAHVLTHWPDDLSTSRYLTSEGQSAIKRSEAFVRHWRHTIALAALTLRDWASMGKDIGDVLGNSNKVQEATGKGNFRADMHDAKVRPLFGARASLFPSDDDAGRKALLASVIRAGIKLRNNSFHFTGRGGFLAALKGLGSDDVLTKEVRAAALALWREDAGARAGRVRASLTAVHAPNYFDERQNRVIVELLEQEPGQQREPLPLPRFRRMLSRAEGAWKGKAQLRLPKTANRVELQDPARRCRYVVLKMLYERPFRDWLAARTHVEVNRWIDRALKRSTEAAQTNYGKRLDDAQKALIVAKANKLPRLSEGRRIHDFFYDLSSATAAEMRVQRGYGHDGEAAREQASHIDDLLCDVVALAFEEWLHAPQDVRGPLSWLIDLEPGTLLPGKQCDLNEIPLTADMKGPEDWQAALYLFLHLVPVGEASRLLHQLAKWSITSQLSDKLSEAEERSLTALIQTLLFYLDMHDAKFEGGEALTGCEPFKDLFESPAGFEKVFPADNESPLEGWVPKRGLREIMRFGHRRLVAGLAQDDRVTDAEVDAFLRVEMGTGEDSIAKLQAGREKVDEAWSKKRRGGGKKGQKKSDITSEMLREYVEAIAGIARHRRMGARVTLTELVTLHRVLMSVMGRLADYAGMFERDLYFAMLGCLATERSEAAKVLNPAGQDKLSSGQIIDALRTLPDYRYKQAASRDGPQVAATIKELFGKNVAELHAFRSRQTNETTRTSENPRGPDVDEHAKFESLIAIRNDLSHLNSLNSDSYTLDLTALVNQTRTLMSYDRKLKNAVSQSIKELLLRQSIRLKWGTTDRHELADAKIAGKMAKHLGGRKLHLQTGDKPEVISENLCSEHHLKAVAKLFAGKADIASDVADLDLNTVDWATPNEKGKGSQHAPSPGRPGSPKAPRR

SEQ ID NO: 970 - protein, 1439 aa, Artificial
  Synthetic
MAGREIVSMKITKVNYVHAGIVREQDPRNGKLYKYEGYQSGKDTGIEAHIRNRVEASQKLFSILNPDKKESDDKNGKESPEGANQKGAQKGSNQAEAQEKTEEEKKAEEEEKRKKELEKQKNIHDFIRGSLKTLDDSIKKACENAKEGSSAAAFARELDDLFSYRNARFVKSPDSSLCSAEEFENGVQEFVDHYVRRPLTATVKSPDKKRSIDLNQVAYRLFLLYMTAGKDEAQYNQRLSEINQEDRNAFYDRVLESYTKEGQIERLVTSISNKTVPVAVNEIDGHFLLQPANAEQKKNKDEYSAHHLFDFMKEYCGTDENGRDRMVSHIRYLIACYFYGKSTVDTYAAGGCLKDSFKGLAGDGSVSMYFSEELHEKLYEKSIDKDGNPNPRKFVEVNGALKPLLKEAFKKRIIDCNMSLSDPRDKYWILEFISKQTEKELDHSKLRPEDLNNYKLSKTIMNSWRSYISDQYISMGKAVYHFVMGKDAALSKRPNVTVSFKDVKNEFTKGITSFEYERISAAESLDRASARYITFAYNNFRRAVLKSFSETADGDEDILNITDDNKIMDLTREDSTRCILQFFGGASTWPENIVNKDRMEFLHTMMQGITYCRNNAFHFSVNSKATEMDPLGNEIFEYEKDHLGQVLRKQYYSNNVPMFYAVKDIDGLMDYLYQHNVHSAGQIPSFRRLFKSGEELFMSLELSTESFLHGAPKETFKKLWPSFYFVCKEIYYYGFLNDNNARNLFLEAVADIGNADYDKKHQNAMSDFTKRINGIAGVNIYNTHKDADPFVKVSLPQDDSSLTLDVICQTLMTEYEQQNNGKTVIAKFGEEKKFKHYRDLLYSGLALAFVNYLKRQAAYAFLLAPKDRTETFAKLSEEEFTGSWNNIHVFDHFLEKEKILSKKQKQRMKGNIEAPKEKKALDSYLTAWYLTAHFLSSRQLNLLVGAFRSYIQYKENIEWRAATLNHGDAKYNKDVKGTINTCKSIVEILELVRNFSGKFSNEITDYFTTEDEYAEYVGKFVDLGEAPTKDTLLRFANTQVLNGQKIGIYADAENLIMLRGIAIAKMFGNADLLAKCWNKITFEEYEAYYEQQLKLTDYYKNGRCTSEEELKDLLGYQKMKNRLELYSVSEYTEILNDLYSQLVSWSYLRERDFMYMLLGYHYIELYYTDRVPENDLSRRMTGSCVLEDNIGKHSGNDAAPASVEYFWNITDGAILYEILAANDRTIPLVKANAKKPSGFEASTKGTIGSRYGNIMSTFRESAFDFTDGLDLFVRTTAKANKVKGQDEYDDCVSFRNAIDHFKYFSKPKESMVEMYRRVYDEFFTYDVKLRKSVSFIFKNILADHFVVADTAMRADHQRIYNLYSTKKDVKPVVSERKSCGFSIKDSLKSMKFTYKFRDVHDVKDKVYEYKWDETFLNTLQRILEYSEPDPELKEILGTD

SEQ ID NO: 971 - protein, 1382 aa, Artificial
  Synthetic
MKLSKEKHIRSAVANEEQNIGGVLYHVPGTDTIGLKDQMLIRDRDVKQLYNVFNQIQVGDKPKKWKNDEKLSPEENERRAQQKNIKMKNYKWREACSKYVESSQRTINDVLFYSYMEADKKIRNMRKNEDILIKMQEVTKLPKFSGGKLEDFVAYTLRKSLVVSKNSTQEFDSVAAMVVFLECIGKSNISDHEKEIVCKLLELIRKDFSKLDPNVEGSQGANIVRSVRNQNMIVQPQGDRFSFPQVSDKEKKTVTNKNVEKEGLNEFLLNYANLDDEKSAEILRKLRRILDVYFSAPNHYEKDMDITLSDNIDKEKFNVWKKYECGKKVTDLFVDIPVVLMEAEAENIKLDAVVEKRERKVLADRVRRQNIICYRYTRAVVEKYNSNESLFFENDAINQYWIHHIENAVERILKNCKAGKLFKLRMGYLAEKVWKDAINLISIKYIALGKAVYNFALDDIWKDKKDKELGIVDERIRNGITSFDYEMIKAYENLQRELSVDIAFSVNNLARAVCDMSNLGDKESDFLLWKRNDIADKLKNKDDMASVSAVLQFFGGKSSWDINIFKEAYKGKNKYNYEVRFIDDLRKAIYCARNENFHFKTALVNNEKWNTELFGKIFERETEFCLNVEKDRFYSNNLYMFYPVSELRNMLDQLYSRSVSRAAQVPSYNSVFIRKNFPEDISNVLRYQKPGYDADTLGKWYSACYYLLKEIYYNSFLQSDKALQLFEKSVKTLSWDDEEQKRAVDNFKNHFSDIKSACTSLAQVCQIYMTEYNQQNNQIKKVRSSNDSIFDQPIYQHYKVLLKKAIANAFAAYLKNNKDLFGFIGKPFKANEIREIDKEQFLPDWTSRKYESLCIEVSGSQELQKWYIVGKFLNARSLNLMAGSMRSYIQYVTDIKRRAASIGNELHVSVQDVEKVEKWVQVIEVCSLLAFRTSNQFEDYFNDKDDYARYLKSYVDFSNADMPSEYSALVDFSNEEQSDLYVDPKNPKVNRNIVYSKLFAADHILRDIVEPVSKDNIEEFYDQKAEIVYCKIKGKDITAEEQKAVLKYQKLKNRVELRDIVEYGEIINELLGQLINWSFMRERDLLYFQLGFHYNCLRNNSEKKEAYQKIEVNGDSIKDAILYQIIGMYVNGVAVYAPDEKGDILKEQCTKGGAGGKISAFNRYSEYLGLDKLTLYNAGLEIFEVVAEHDDIINLRNGIDHFKYYLGDYRSMLSIYSEVFDRFFTYDIKYQKNVLNLLQNILLRHNVIVEPVLESGFKTIGKQTTSGAKLSIRSIKSDTFQYKVKGGSLITDAKDERYLKTIRKILYYVENEEDNLKKSVVVTNADKYEKNKESDDQNKQKEKKNKDNKGKKNEETKSDAGKNNNERLSYNPFANLNFKLPN

SEQ ID NO: 972 - protein, 1360 aa, Artificial; identical to SEQ ID NO: 92
  Synthetic

SEQ ID NO: 973 - protein, 1388 aa, Artificial; identical to SEQ ID NO: 755
  Synthetic

SEQ ID NO: 974 - protein, 1101 aa, Artificial
  Synthetic
MKLSKEKYTRSAVANNGDIKSAEVNNGNTKSEEVNNEYIRSAVANEKQNIGGVLYHAHGTDTIDLQDQMLRRDKEVKKLYNVFNQIQVGTKPKKWNNDEKLSPEENERRAQQKNIKMKNYKWREACSKYVESSQRIINDVIFYSYRKAENKLRYMRKNEDILKKMQEAEKLSKFSGGKLEDFVAYTLRKSLVVSKYDTQEFDSVAAMVVFLECIGKNNISDHEREIVCKLLELIRKDFSKLDPNVKGSQGANIVRSVRNQNMIVQPQGDRFLFPQVYAKENETVTNKNVEKEGLNEFLLNYANLDDEKRAESLRKLRRILDVYFSAPNHYEKDMDITLSDNIEKGKFNVWEKHECGKKVTDLFVDIPDVLMEAEAENIKLDAVVEKRERKVLTDRVRRQNIICYRYTRAVIEKYNSNEPLFFENNAINQYWIHHIENAVERILKNCKAGKLFKLRKGYLAEKVWKDAINLISIKYIALGKAVYNFALDDIWKDKENKELGIVDERIRNGITSFDYEMIKAHENLQRELAVDIAFSVNNLARAVCDMSNLGNKESDFLLWKRNDIADKLKNKDDMASVSAVLQFFGGKSSWDINIFKEAYKGKKKYNYEVRFIDDLRKAIYCARNENFHFKTALVNDEKWNTELFGKIFERETEFCLNVEKDRFYSNNLYMFYQVSELRNMLDHLYSRSVSRAAQVPSYNSVIVRTAFPEYITNVLGYQKPGYDADTLGKWYSACYYLLKEIYYNSFLQSDRALQLFEKSVKTLSWDDKKQQRAVYNFKDHFSDIKSACTSLAQVCQIYMTEYNQQNNQIKKVRSSNDSIFDQPVYQHYKVLLKKAIANAFADYLKNNKDLFGFIGKPFKANEIREIDKEQFLPDWTSRKYEALCIEVSGSQELQKWYIVGKFLNARSLNLMVGSMRSYIQYVTDIKRRAASIGNELHVSVQDVEKVEKWVQVIEVCSLLASRTSNQFEDYFNDKDDYARYLKLYVDFSNVDMPSEYSALVDFSNEEQSELYVDPKNPKVNRNIVHSKLFAADHILRDIVEPVSKDNIEEFYSQKAEIAYCKIKGKEITAGSKRCMTIPESRRRADCLIRVRRAGKLLTQTG

SEQ ID NO: 975 - protein, 1360 aa, Artificial; identical to SEQ ID NO: 92
  Synthetic

SEQ ID NO: 976 - protein, 1234 aa, Artificial; identical to SEQ ID NO: 845
  Synthetic

SEQ ID NO: 977 - protein, 1330 aa, Artificial
  Synthetic
MKREKNITIMKISKVNHRRMAVALNGDKSELGGILYEAPVQKDKNGNYNDVIAETGKVVNEALDKKSRLYTPFNNQKVIIDKNLQRYANNLKRCYINFVKQYVNNKSFNYKAMQFIPDIQNPKTNDAVNYRTDRDNVYNKNKYYDKQTKSKSKKFIYEKIVIPQNEQNIVISALVNCSLRKSLRKDVSYKTKSGEIKTYNLPELVKKSMRFYCLEGQREPDEKEKYEMYILFSYMKEDKRTKNTDLLVKSISNQNTKVKVEDIDGNKLLKLSIADTKKKPLWEYLIKYADSSRQRELMYDIRKKIVLYVVGIEEYENIKEDSGLSKVSWSKYNISDNKMFVDINSCTDKRKQNLELKIREANIEHYRNASSKLCDDESIFWFQHFEGVIETLFSKKSKISEERLGCAYICDYLWKDFLSYLAAKYIDLGKGVYHFTMKDKLDMLNKNEAVTDLRFGIVSEKYEKGITSFDYERIKAEEELDRNIAAYVTFAADIFAKSVIKSDYRTKKDNNSDVLQYSDKEFRNSEVIRDNAEKNILQYWGGYSRWGTENSKLPENNKVSDFGKLDVSDLCIDIKKHLAGIRNSSVHYTTKIKNESAADGSNVKILFEKDLADINIIYADKYYSNNVWMFYSLEDINKLIAFLYKEKRVIRQVQIPSFSRILKRKAMQDVINEIFKDDFDENIVNPELKEKYRNSLYFMLKEIYYNAFIIQPELKEKFKDKIKTMKSELYNKLKTIDKKEYKALYCMLSNEESALKNFADRIYSVDGDNVSFADICKILMTDYNMQNQEKKNIESMEQKKKNKGKDENYKHFPLLLHKVLKELFIEYLKQTHELEFLRNNICIKSDVTMESFESQIKGVEIYKDLKEKIDKNNSLLDWYVIAHFLMPKQLNHLIGNIKNYIQFATNIDKRAESVKNLTESGMVKRIQYYDDIVRTLEFSAQYIGKISNNINDYFNSEDEYVSFLSKYVGFINDKSEDVLTELKDFCREKINNGSQIIGIYYGGDNVIINRNVIYAQMYSNAEVFSNIYKKVTKNDIINYYEKQNDLKDVFKSGVCQNEGEQRSLCEFQQLKNRIELTELSTYADMVNDFMAQFVEWAYLRERDLMYFQLGIHYIRLFYSDNVLDEKYHKLSDNVIDIEEGALLYQIVAMYDYELRIFETDNSGNAKRIGQGGPGKSIPVFLKKYCNGTDVYECGLELFEDINQHENIIGFRNDIAHMRYMSNQAMNIMSIVSNIYKSFFVYDTKLKKSISLVFKNILMRYGVIADLVFSYNNKNQSIKDDMDINIINIKNLKSDKYVYKIVNEDIVKQVEIEIRNQVFLEQLHNLLYFSR

SEQ ID NO: 978 - protein, 1161 aa, Artificial
  Synthetic
MKVTKVDGISHKKYIEEGKLVKSTSEENRTSERLSELLSIRLDIYIKNPDNASEEENRIRRENLKKFFSNKVLYLKDSVLYLKNRNEKNAVQDKNYSEEDISEYDLKNKNSFSVLKKILLNEDINSEELEIFRKDVEAKLNKINSLKYSFEENKANYQKINENNVEKVGGKSKRNIIYDYYRESAKRNDYINNVQEAFDKLYKKEDIEKLFFLIENSKKHEKYKIREYYHKIIGRKNDKENFAKIIYEEIQNVNNIKELIEKVPDMSELKKSQVFYKYYLDKEELNDKNIKYAFCHFVEIEMSKLLKNYVYKKLSNISNDKVKRIFEYQSLKKLIENKLLNKLDTYVRNCGKYNYYLQVGEIATSDFIARNRQNEAFLRNIIGVSSVAYFSLRNILETENENDITGRMRGKTVKNNKGEEKYVSGEVDKIYNENKQNEVKENLKMFYSYDFNMDNKNEIEDFFANIDEAISSIRHGIVHFNLELEGKDIFAFKNIVPSEISKKMFQNEINEKKLKLKIFRQLNSANVFRYLEKYKILNYLKRTRFEFVNKNIPFVPSFRKLYSRIDDLKNSLGIYWKTPKTNDDNKTKEIIDAQIYLLKNIYYGEFLNYFMSNNGNFFEISREIIELNKNDKRNLKTGFYKLQKFEDIQEKTPKEYLANIQSLYMINAGNQDEEEKDTYIDFIQKIFLKGFMTYLANNGRLSLIYIGSDEETNTSLAEKKQEFDKFLKKYKQNNNIEIPHEINEFLREIKLGNILKYTERLNMFYLILKLLNHKELTNLKGSLEKYQSANKEETFSDELELINLLNLDNNRVTEDFELEVNEIGKFLDFNGNKIKDRKELKKFDTNKIYFDGENIIKHRAFYNIKKYGMLNLLEKIADKAKYKISLKELKEYSNKKNEIEKNYRMQQNLHRKYARPKKDEKFNDKDYKEYEKAIGNIQKYTHLKNKVEFNELNLLQGLLLKILHRLVGYTSIWERDLRFRLKGEFPENQYIEEIFNFDNSKNVKYKSGKIVEKYINFYKELYKDNVEKRSIYSDKKVKKLKQEKKDLYIRNYIAHFNYIPHAEISLLEVLENLRKLLSYDRKLKNAVMKSVVDILKEYGFVVKFKIGADKKIGIQTLESEKIVHLKNLKKKKLMTDRNSEELCKLVKVMFEYKMEEKKSEN

SEQ ID NO: 979 - protein, 1366 aa, Artificial
  Synthetic
MKLSKENHIRSAVVISGKEGNIAGTLYKIPGEGTVDLKKRMLERDKAVKSLYNIFNQIQLGNEPKEWKENRNLSTEENTRRMHQKKVKIQNYKMKKACSRYVNTISRTINELLFFYKTTKTTQNNKVKYDKLKMMHKNEDIISKMKNENILQQFKVEGKNGKLEKGKLEDFVTLALRSSLVVSRYKGKDFDSVAAVAVFLENIGNNNISHEDERTINILLDLIREDFTKLNPNIDNTMGARLIRSVTNQNMLVQPQNDRFSFPCVHDSGKSKVSNKNVEKSGLDNFLLDYANLDKDIRENYLRKLRRIIDIYFSAPITYQKDMDVALSEVVVKDKFDVWKKHNEGKKDNNTFVKVPEVLIKAETDHEKLDTVIEKQARKELADRVREQNMTCYRYTQAVVKKYNAKEALFFENDDINQYWIHHIENAVERILKSCKIGTLFKLHNGYLIEKVWKDAINLISIKYIALGKVVYNFALDDIWNDNKVKRLGDISEKIRSGITSFDYEMLKAQETLQRELAVNVAFSANNLARAVCNMSALSDKTSDFLLWQPDDINNKMKKSTGNDEDNEKNKRAVCAVLQFFGGKSLWNDVDFEKAYKNAGKHGYGVYFINDLRKAIFAARNESFHFKTASVNNEKWNVEFLGRMFEKETEFCLDIEKDRFYSNNLPMFYKSSNLEKMLNHFYSKNISRAAQVLSYNTVFVRKTFPEYVNNVLKYKKPGTDAEILDKWYSACYYLLKEIYYNSFLQSKDAFKYFENAVYNLNSKNINHDSSGQKLSRDEMKRKKAAESFQRRFVEIKRVSDSSISYVCQVFMTDYNQQNNQNKKVRSSNDSLLDKPIYQHFKMLLKETIKSAFAAYLKDNNNKDLFGFIGEPLKINKNDDVKVIKKEEFLPDWKSEKYSLLIEKVKKSPKLQMWYIVGKFLNARSLNLMAGSMRSYLQYVSDINRRANVVGNKLHVEVLDKDTVKDWIQVIEVCLLLASRTSNQFDDYFNDGDDYAGYLKSYVDFSDKNMPSAYSALVYFSDQGKIDLYIDPKNPKINRNIVQSKLFAADHILGNGQIVQPVSKDDIAEFYNLKAKIADSKIKGENISEKEQRNILRYQRLKNKVELRDIVEYGEIINELLGQLINWSFMRERDLLYFQLGFHYNCLRNNSEKPEEYKKIEADDISINDAVLYQIIGMYVNGIPVYTSDNNKLKGECANGGAGGKITAFCEYSEYLGFKKATLYESGLELFEVLAEHDDIIKLRNGIEHFKYYLGNYRSIMSLYSEVFDRFFTYDLKYQKNVLNLLQNILLRHNIVIVPEFESGTKKVGKNIKQSAKISIKNIQSDKFTYKIKGGTTSIDAKDDRYLETIKKILYYPEYDKDSGGVC

SEQ ID NO: 980 - protein, 1432 aa, Artificial; identical to SEQ ID NO: 494
  Synthetic

SEQ ID NO: 981 - protein, 1281 aa, Artificial
  Synthetic
MKLIRRRISGNSVDQKITAAFYRDISQGLLYYDSEDNDCTDKVIESMDFERSWRGRILKNGEDDKNPFYMFVKGLVGSNDKIVCEPIDVDGDPDNLDILINKNLTGFGRNLKAPDSNDTLENLIRKIQAGIPEEEVLPELKKIKEMIQKDIVNRKEQLLKSIKNNRIPFSLEGSKLVPSTKKMKWLFKLIDVPNKTFNEKMLEKYWEIYDYDKLKANITNRLDKTDKKARSISRAVSEELREYHKNLRTNYNRFVSGDRPAAGLDNGGSAKYNPDKEEFLLFLKEVEQYFKKYFPVKSKHSNKSKDKSLVDKYKNYCSYKVVKKEVNRSIINQLVAGLIQQGKLLYYFYYNDTWQEDFLNSYGLSYIQVEEAFKKSVMTSLSWGINRLTSFFIDDSNTVKFDDITTKKAKEAIESNYFNKLRTCSRMQDHFKEKLAFFYPVYVKDKKDRPDDDIENLIVLVKNAIESVSYLRNRTFHFKESSLLELLKELDDKNSGQNKIDYSVAAEFIKRDIENLYDVFREQIRSLGIAEYYKADMISDCFKTCGLEFALYSPKNSLMPAFKNVYKRGANLNKAYIRDKGPKETGDQGQNSYKALEEYRELTWYIEVKNNDQSYNAYKNLLQLIYYHAFLPEVRENEALITDFINRTKEWNRKETEERLNTKNNKKHKNFDENDDITVNTYRYESIPDYQGESLDDYLKVLQRKQMARAKEVNEKEEGNNNYIQFIRDVVVWAFGAYLENKLKNYKNELQPPLSKENIGLNDTLKELFPEEKVKSPFNIKCRFSISTFIDNKGKSTDNTSAEAVKTDGKEDEKDKKNIKRKDLLCFYLFLRLLDENEICKLQHQFIKYRCSLKERRFPGNRTELEKETELLAELEELMELVRFTMPSIPEISAKAESGYDTMIKKYFKDFIEKKVFKNPKTSNLYYHSDSKTPVTRKYMALLMRSAPLHLYKDIFKGYYLITKKECLEYIKLSNIIKDYQNSLNELHEQLERIKLKSEKQNGKDSLYLDKKDFYKVKEYVENLEQVARYKHLQHKINFESLYRIFRIHVDIAARMVGYTQDWERDMHFLFKALVYNGVLEERKFEAIFNNNDGRIVKKIQNNLNNKNRELVSMLCWNKKLNKNEFGAIIWKRNPIAHLNHFTQTEQNSKSSLESLINSLRILLAYDRKRQNAVTKTINDLLLNDYHIRIKWEGRVDEGQIYFNIKEKEDIENEPIIHLKHLHKKDCYIYKNSYMFDKQKEWICNGIKEEVYDKSILKCIGNLFKFDYEDKNKSSANPKHT

SEQ ID NO: 982 - protein, 1168 aa, Artificial
  Synthetic
MKVTKVDGISHKKYIEEGKLVKSTSEENRTSERLSELLSIRLDIYIKNPDNASEEENRIRRENLKKFFSNKVLHLKDSVLYLKNRKEKNAVQDKNYSEEDISEYDLKNKNSFSVLKKILLNEDINSEELEIFRKDVEAKLNKINSLKYSFEENKANYQKINENNVEKVGGKSKRNIIYDYYRESAKRNDYINNVQEAFDKLYKKEDIEKLFFLIENSKKHEKYKIRECYHKIIGRKNDKENFAKIIYEEIQNVNSIKELIEKVPDMSELKKSQVFYKYYLDKEELNDKNIKYAFCHFVEIEMSKLLKNYVYKKPSNISNDKVKRIFEYQSLKKLIENKLLNKLDTYVRNCGKYNYYLQDGEIATSDFIARNRQNEAFLRNIIGVSSVAYFSLRNILETENENDITGRMRGKTVKNNKGEEKYVSGEVDKIYNENKKNEVKENLKMFYSYDFNMDNKNEIEDFFANIDEAISSIRHGIVHFNLELEGKDIFAFKNIAPSEISKKMFQNEINEKKLKLKIFRQLNSANVFRYLEKYKILNYLKRTRFEFVNKNIPFVPSFTKLYSRIDDLKNSLGIYWKTPKTNDDNKTKEIIDAQIYLLKNIYYGEFLNYFMSNNGNFFEISREIIELNKNDKRNLKTGFYKLQKFEDIQEKTPKEYLANIQSLYMINAGNQDEEEKDTYIDFIQKIFLKGFMTYLANNGRLSLIYIGSDEETNTSLAEKKQEFDKFLKKYEQNNNIEIPHEINEFLREIKLGNILKYTERLNMFYLILKLLNHKELTNLKGSLEKYQSANKEETFSDELELINLLNLDNNRVTEDFELEANEIGKFLDFNGNKIKDRKELKKFDTNKIYFDGENIIKHRAFYNIKKYGMLNLLEKISDEAKYKISIEELKNYSNKKNEIEKNHTTQENLHRKYARPKKDEKFNDKDYKEYEKAIGNIQKYTHLKNKVEFNELNLLQGLLLKILHRLVGYTSIWERDLRFRLKGEFPENQYIEEIFNFDNSKNVKYKSGQIVEKYINFYKELYKDNVEKRSIYSDKKVKKLKQEKKDLYIRNYIAHFNYIPHAEISLLEVLENLRKLLSYDRKLKNAVMKSVVDILKEYGFVVKFKIGADKKIEIQSLKSEEIVHLKKLKLKDNDKKKEPIKTYRNSKELCKLVKVMFEYKMEEKSSEK

SEQ ID NO: 983 - protein, 1264 aa, Artificial
  Synthetic
MKVSKVNHRRAAVAVNKKSVTVNGILYDAPVKKNVKTGNMSAYVSSKYVIDNVVKNSSRLYSPFSSKRIVIDREKIRIADRLKQCYVNFVKYYLSNGSLNEQQMRFNPNNTYMADSRVHFCVPSGIDIESLINSIVDSSLRKSLKRTYRFETNYGEKNTFNLPDLVKKSIKIYCTDEKRKLNDREEQEMYVLFSYMYEDKYKDRQKVLIANSISNQATKVKVCDDESRLIKLSIADTKKKPLWDFIVDYANSDKNGQYTILRNIRKSIVLFVCGVDVYRNIENNDNLDIWKWEEYGIQESQLFVKIENCYTTKGEDIALNEIRNVNLDHYMKAIGVLDDERSKFWFQHYENTIEALFSKKSKRKIERIKTAYLCEYLWKNFCSYVALKYVDLGKGVYHFTMSDKLSLMNKNTNENGIKFGEVDSRFNKGISSFDYERIKAEETIDRNISTYTTFATNIFAKSVIKDSYRQKKAGNSDALQYDDETYYNRKAMNPYALKRVLRYWGGQSRWKSELEELNVAELCIDIKNRLSKIRNSGVHYTSTSALKGNDDDSIVGMLIKKDFDDIKDVYASKYYSNNVWMFYNTDKISKMMEYLYQDDSNIRDAQIPAFNSVIKRKDMAEVIEKIVKKNSYKTIKEPYQREKYRSCLYFMLKEIYYNRFIKQDNLKDQVIQIIDSNTELIGDNSRAVDNLKKRIHDVDSQTMSFGELCQVIMTDYNMQNQENKSIKSKERQDKDRKNGIDNSYKHFPLLLHHLIKVSFLKFIKTDEKLAFIREPRITEWDKTLEQFEAQIQTVDIYNSLKMMVAENKSLLDWYTLAHFLMPKQLNHLIGDVKNYIQYLSNIDKRAGSVKNNKSASTEVKIRQYSEIVRILDFSLQYIGRVSNDVTDYFVDEDEYAAFLSKYVEFSGNDIVSMKAFCQSRTANGKHTIGLYCDGANPIMNRNIAYAKMYGNDEILSYIYNKVTKKDIEKYYVSQDNLEKVFADGKCQDVQQQNALCDFQKMKNHIELTEVSIYTDILNDFMAQFISWAYLRERDLMYFQLGLNYIRMFYGTYELEEKYYKLHGENINIEKGALLYQIVAMYSHELPIYKVDESGIAILAEKQGSSGASIKSFVTEYCKEEMKKAYTYENGLELFEDVNQHDDRNDFAHMRYMSARDKSIMDIVSEIYNGFFIYDTKLKKSVSFIFKNILMRYAVDVNIEFCHKGDNEDTNNLIRIKDEVGLYSDKYTYKVEDNDTVDIEVRNSEFLEQLKKLLEYKKESEGSEL

SEQ ID NO: 984 - protein, 1426 aa, Artificial
  Synthetic
MGEFSLKQKNTRVRIDRVGRKRHMDFGTSRTCCIFGDARRVKKYTRAEESRMKISKENHKRTAVAVKENRVGGVVYKVPGSSEIDLNKYLAKRSVDTKILYNIFNQIQAGTAPSEYEWKDYLSETENKKREAQKTIQKKNYELRSACGDYAKKANFVIGKIIFSEKPKRILSDEQIIFNMKVQRLSKFKGRLEDFVLLTLRKSLIVSTYNEEVFDSRNATTVFLKNIGKENISADDERQIKQLLALIREDYNKWNLDEQSSDKMYSDKKESKGTIVIRSIEYQNMVIQPKEDRLCLSEISNVGKNTKTKQTEKAGLEAFLTEYAQIDANSRMEYLKKLRRLLDTYFAAPFSYIKGAEVSLPENINFSSELKVWERHAAAKKVNIYFVEIPEALLKAEQNNNMIDKVEKEHSLEQLRTDIRCRNIVCYHFANAVAADERYHTLFFENMSMNQYWIHHMENAVERILKKCNVGTLFKLQIGYLSEKVWKDLLNLLSIKYIALGKAVYHFALDDIWNDVSDKKLGKINANTLKGISSFDYEMLKAQEDLQREMAVGVAFSTNNLSRATCQMNNLADRESDFLLWDEKVIAKHIKSTEKGEILSAILQFFGGRSSWDESLFENAYSDFNYELQFLNDLKRAIYAARNETFHFKTAAIDEGSWNTRLFGNMFEKEAGICLDVEKNKFYSNNLALFYTQKDLRVILDELYGKECFRAAQIPSYNTILPRKSFPDFLKQLLKLHEPAYDLAIRDQWYSACYYLFKEVYYNLFLQSSSAKELFEDAVKELRGADEKQKRAVENFKKRYREISISASLADICQSFMTEYNQQNNKDRKVRSANDGMFNEPIYQHYRMLLREALKVAFASYIKNNKELEFVFNPTKNLFNVTSDSFLPNWSSGKYDSLISEVKNSPELQKWYIVGKFMNARMLNLTIGSMRSYCQYVNDIQKRAASLGGRQLHLFVGNVEQVKKWIQVLECCLLLSVRISNEFKDYFKDEDAYASYLKGYVDFKDSIMPSDYSALLAFSDEGKIDLYVDASNPKVNRNIIQSKLYAPDLVLKKVVKKISKDECREFNVKKEQILQIKNKGDEVSWEEQQRILEYQKLKNRVELRDLSEYGELINELLGQLINWSYLRERDLLYFQLGFHYSCLMNKSKKPDAYKTICIDDTASIENAVLYQIIAMYINGFPVYVPEKGKLKAQCKAGSVGQKVGAFCRWASRVEENEYELYNAGLELFEVVKEHSNVIDLRNKFDHFKYYQGNDSILSLYGEIFDRFFTYDMKYRKNVLNHLQNILLRHNVVIKPVISKDKKEVGKGETKDGASFLLEEVSSDRFTYKVKDGERKLDVKNRLYLETVRDILYFPNKAVNDKGEDVVVRSQKAQDSNEKKVDRDKNHDKIKNGNWKKGGNNQRRKPKSEEAYSDRITWNPFAGIKLD

SEQ ID NO: 985 - protein, 1200 aa, Artificial; identical to SEQ ID NO: 790
  Synthetic

SEQ ID NO: 986 - protein, 1101 aa, Artificial; identical to SEQ ID NO: 73
  Synthetic

SEQ ID NO: 987 - protein, 1183 aa, Artificial
  Synthetic
MFSKSKKFIYEKIVIPQNEQNIVISALVNCSLRKSLRKDVSYKTKSGEIKTYNLPELVKKSMRFYCLEGQREPDEKEKYEMYILFSYMKEDKRTKNTDLLVKSISNQNTKVKVEDIDGNKLLKLSIADTKKKPLWEYLIKYADSSRQRELMYDIRKKIILYVAGIEEYENIKEDSGLSKVSWSKYNISDNKMFFDINSCTDKRKQNLEIKIREANIEHYRNASSKLCDDESIFWFQHFEGVIETLFSKKSKISEERLGCAYICDYLWKDFLSYLATKYIDLGKGVYHFTMKDKLDMLNKNEAVTDLRFGIVSEKYEKGITSFDYERIKAEEELDRNIAAYVTFAADIFAKSVIKSDYRTKKDNNSDVLQYSDKEFRNSEVIRDNAEKNILQYWGGYSRWGTENSKLPENNKVSDFGKLDVSDLCIDIKKHLAGIRNSSVHYTTKIKNESAADGSNVKILFEKDLADINIIYADKYYSNNVWMFYSLEDINKLIAFLYKEKRVIRQVQIPSFSRILKRKAMQDVINEIFKDDFDENIVNPELKEKYRNSLYFMLKEIYYNAFIIQPELKEKFKDKIKTMTSELYNKLKTIDKKEYKALYCMLSNEESALKNFADRIYSVDGDNVSFADICKILMTDYNMQNQEKKNIESMEQKKKNKGKDENYKHFPLLLHKVLKELFIEYLKQTHELEFLRNNICIKSDVTMESFESQIKGVEIYKDLKEKIDKNNSLLDWYVIAHFLMPKQLNHLIGNIKNYIQFATNIDKRAESVKNLIESGMVKRIQYYDDIVRTLEFSAQYIGKISNNINDYFNSEDEYVSFLSKYVGFINDKSEDVLTELKDFCREKINNGSQIIGIYYGGDNVIINRNVIYAQMYSNAEVFSNIYKKVTKNDIINYYEKQNDLKDVFKSGVCQNEGEQRSLCEFQQLKNRIELTELSTYADMVNDFMAQFVEWAYLRERDLMYFQLGIHYIRLFYSDNVLDEKYHKLSDNVIDIEEGALLYQIVAMYDYELRIFETDNSGNAKRIGQGGPGKSIPVFLKKYCNGTDVYECGLELFEDINQHEHIIRFRNDIAHMRYMSNQAMNIMSIVSNIYKSFFVYDTKLKKSISLVFKNILMRYGVIADLVFSYNNKNQSIKDDMDINIINIKNLKSDKYVYKIVNEDIVKQVEIEIRNQVFLEQLHNLLYFSR

SEQ ID NO: 988 - protein, 1353 aa, Artificial; identical to SEQ ID NO: 188
  Synthetic

SEQ ID NO: 989 - protein, 1159 aa, Artificial
  Synthetic
MKVTKVGGISHKKYTSEGRLVKSESEENRTDERLSALLNMRLDMYIKNPSNTETKENKKRIGKLKKFFSNKMVYLKDNTLSLKNGKKENIDREYSETDISEYDVRDSKNFAVLKKIYLNENVNSEELEVFRKDIKKKLNKINSLKYSFEKNKANYQKINENNIEKVEGKSKRNIIYDYYRESAKRDAYVSNVKEAFDKLYKEEDIAKLVLKIENLTKLEKSKIREFYHEIIGRKNDKENFAKIIYEEIQNVNNMKELIEKVPNMSELKKSQVFYKYYLNKEELNDKNIKYAFCHFVEIEMSQLLKNYVYKGLSNISNDKIKRIFEYQNLKKLIENKLLNKLDTYVRNCGKYNYYLQDGEIATSDFIARNRQNEAFLRNIIGVSSVAYFSLRNILETENENDITGRMRGKTVKNNKGEEKYVSGEVDKIYNENKQNEVKENLKMFYSYDFNMDNKNEIEDFFANIDEAISSIRHGIVHFNLELEGKDIFAFKNIAPSEISKKMFQNEINEKKLKLKIFRQLNSANVFRYLEKYKILNYLKRTRFEFVNKNIPFVPSFTKLYSRIDDLKNSLGIYWKTPKTNDDNKTKEIIDAQIYLLKNIYYGEFLNYFMSNNGNFFEISKEIIELNKNDKRNLKTGFYKLQKFEDIQEKTPKEYLANIQSLYMINAGNQDEEEKDTYIDFIQKIFLKGFMTYLANNGRLSLIYIGSDEETNTSLAEKKQEFDKFLKKYEQNNNIEIPHEINEFLREIKLGNILKYTERLNMFYLILKLLNHKELTNLKGSLEKYQSANKEETFSDELELINLLNLDNNRVTEDFELEVNEIGKFLDFNGNKIKDRKELKKFDTNKIYFDGENIIKHRAFYNIKKYGMLNLLEKIADKAKYKISLKELKEYSNKKNEIEKNYRMQQNLHRKYARPKKDEKFNDKDYKEYEKAIGNIQKYTHLKNKVEFNELNLLQGLLLKILHRIVGYTSIWERDLRFRLKGEFPENQYIEEIFNFDNSKNVKYKSGQIVEKYINFYKELYKDNVEKRSIYSDKKVKKLKQEKKDLYIRNYIAHFNYIPHAEISLLEVLENLRKLLSYDRKLKNAVMKSVVDILKEYGFVATFKIGADKKIGIQTLESEKIVHLKNLKKKKLMTDRNSEELCKLVKVMFEYKMEEKKSEN

SEQ ID NO: 990 - protein, 1388 aa, Artificial; identical to SEQ ID NO: 755
  Synthetic

SEQ ID NO: 991 - protein, 1161 aa, Artificial
  Synthetic
MKVTKVDGISHKKYIEEGKLVKSTSEENRTSERLSELLSIRLDIYIKNPDNASEEENRIRRENLKKFFSNKVLHLKDSVLYLKNRNEKNAVQDKNYSEEDISEYDLKNKNSFSVLKKILLNEDINSEELEIFRKDVEAKLNKINSLKYSFEENKANYQKINENNVEKVGGKSKRNIIYDYYRESAKRNDYINNVQEAFDKLYKKEDIEKLFFLIENSKKHEKYKIREYYHKIIGRKNDKENFAKIIYEEIQNVNNIKELIEKVPDMSELKKSQVFYKYYLDKEELNDKNIKYAFCHFVEIEMSQLLKNYVYKRLSNISNDKIKRIFEYQNLKKLIENKLLNKLDTYVRNCGKYNYYLQDGEIATSDFIARNRQNEAFLRNIIGVSSVAYFSLRNILETENENDITGRMRGKTVKNNKGEEKYVSGEVDKIYNENKQNEVKENLKMFYSYDFNMDNKNEIEDFFANIDEAISSIRHGIVHFNLELEGKDIFAFKNIVPSEISKKMFQNEINEKKLKLKIFRQLNSANVFRYLEKYKILNYLKRTRFEFVNKNIPFVPSFTKLYSRIDDLKNSLGIYWKTPKTNDDNKTKEIIDAQIYLLKNIYYGEFLNYFMSNNGNFFEISREIIELNKNDKRNLKTGFYKLQKFEDIQEKTPKEYLANIQSLYMINAGNQDEEEKDTYIDFIQKIFLKGFMTYLANNGRLSLMYIGNDEQINTSLAGKKQEFDKFLKKYEQNNNIEIPHEINEFVREIKLGKILKYTESLNMFYLILKLLNHKELTNLKGSLEKYQSANKEETFSDELELINLLNLDNNRVTEDFELEANEIGKFLDFNGNKIKDRKELKKFDTKKIYFDGENIIKHRAFYNIKKYGMLNLLEKISDEAKYKISIEELKNYSNKKKEIEKNHTTQENLHRKYARPRKDEKFTDEDYESYKQAIKNIEEYTHLKNKVEFNELNLLQGLLLRILHRLVGYTSIWERDLRFRLKGEFPENQYIEEIFNFENKKNVKYKSGQIVEKYIKFYKELHQNDEVKINKYSSANIKVLKQEKKDLYIRNYIAHFNYIPHAEISLLEVLENLRKLLSYDRKLKNAVMKSVMNILKEYGFVAKFKIGADKKIGIQTLESEKIVHLKNLKKKKLMTDRNSEELCKLVKVMFEYKMEEKKSEN

SEQ ID NO: 992 - protein, 1143 aa, Artificial; identical to SEQ ID NO: 11
  Synthetic

SEQ ID NO: 993 - protein, 1125 aa, Artificial
  Synthetic
LKRTYRFETNYGEKNTFNLPDLVKKSIKIYCTDEKRKLNDREEQEMYVLFSYMYEDKYKDRQKVLIANSISNQATKVKVCDDESRLIKLSIADTKKKPLWDFIVDYANSDKNGQYTILRNIRKSIVLFVCGVDVYRNIENNDNLDIWKWEEYGIQESQLFVKIENCYTTKGEDIALNEIRNVNLDHYMKAIGVLDDERSKFWFQHYENTIEALFSKKSKRKIERIKTAYLCEYLWKNFCSYVALKYVDLGKGVYHFTMSDKLSLMNKNTNENGIKFGEVDSRFNKGISSFDYERIKAEETIDRNISTYTTFATNIFAKSVIKDSYRQKKAGNSDALQYDDETYYNRKAMNPYALKRVLRYWGGQSRWKSELEELNVAELCIDIKNRLSKIRNSGVHYTSTSALKGNDDDSIVGMLIKKDFDDIKDVYASKYYSNNVWMFYNTDKISKMMEYLYQDDSNIRDAQIPAFNSVIKRKDMAEVIEKIVKKNSYKTIKEPYQREKYRSCLYFMLKEIYYNRFIKQDNLKDQVIQIIDSNTELIGDNSRAVDNLKKRIHDVDSQTMSFGELCQVIMTDYNMQNQENKSIKSKERQDKDRKNGIDNSYKHFPLLLHHLIKVSFLKFIKTDEKLAFIREPRITEWDKTLEQFEAQIQTVDIYNSLKMMVAENKSLLDWYTLAHFLMPKQLNHLIGDVKNYIQYLSNIDKRAGSVKNNKSASTEVKIRQYSEIVRILDFSLQYIGRVSNDVTDYFVDEDEYAAFLSKYVEFSGNDIVSMKAFCQSRTANGKHTIGLYCDGANPIMNRNIAYAKMYGNDEILSYIYNKVTKKDIEKYYVSQDNLEKVFADGKCQDVQQQNALCDFQKMKNHIELTEVSIYTDILNDFMAQFISWAYLRERDLMYFQLGLNYIRMFYGTYELEEKYYKLHGENINIEKGALLYQIVAMYSHELPIYKVDESGIAILAEKQGSSGASIKSFVTEYCKEEMKKAYTYENGLELFEDVNQHDDLSKLRNDFAHMRYMSARDKSIMDIVSEIYNGFFIYDTKLKKSVSFIFKNILMRYAVDVNIEFCHKGDNEDTNNLIRIKDEVGLYSDKYTYKVEDNDTVDIEVRNSEFLEQLKKLLEYKKESEGSEL

SEQ ID NO: 994 - protein, 1125 aa, Artificial; identical to SEQ ID NO: 993
  Synthetic

SEQ ID NO: 995 - protein, 1360 aa, Artificial; identical to SEQ ID NO: 101
  Synthetic

SEQ ID NO: 996 - protein, 1152 aa, Artificial
  Synthetic
MLRRMCMKITKIDGISHKKYKEKGKLIKNNDTAKDIIEERFNDIEKKTKELFQKTLDFYVKNYEKCKEQNKERREKAKNYFSKVKILVDNKKITICNENTEKMEIEDFNEYDVKSGKYFNVLNKILNGENYTEEDLEVFENDLQKRIGRIKSIKNSLEENKAHFKKESINNNIIYDRVKGNNKKSLFYEYYRISSKHQEYVNNIFEAFDKLYSNSHEAMNNLFSEITKDSKDRNIRKIRGAYHEILNKNKTEFGEELYKKIQDNRNNFNKLLEIEPEIKELTKSQIFYKYYIDKVNLDETSIKHCFCHLVEIEVNQLLKNYVYSKRNINKEKLENIFEYCKLRNLVKNKLVNKLNNYIRNCGKYNAYISNNDVVVNSEKISEIRTKEAFLRSIIGVSSSAYFSLRNILNSNNTQDITNDRILKQELDDIYQENNKKNKLEKNLKLFFGNYFDVMRESEIREFFTNIRDIIKRIRNKIIHFEMEANAQNIFDFNNINLGNTAKNIFNNEINEEKIKFKIFKQLNSANVFDYLSNKDIREYMGKDVFSFINRNISFVPSFTKIYNRVQDLANSLEIKEWKIPDESEGKDVQIYLLKNIYYGKFLDKFLNEENGIFISIKDKIIELNRNQNKRTGFYKLEKFEKIEETNPKKYLEIIQSLYMINIEEIDSEGKNIFLDFIQKIFLKGFFEFIKNDYNYLLELKKVQDKKNIFDSKMLEYITGEKTLEDMEEINEIIQDIKITEIDKILNQTDKINCFYLLLKLLNYKEITELKGNLEKYQILSKTNVYEKELMLLNIVNLDNNKVKIENFKISAEEIGKFIEKINIEEINKNKKIKTFEELRNFEKGENTGEYYNIYSDDKNIKNIRNLYNIKKYGMLDLLEKISEKINYCIKKKDLEEYSKLRKQLEDEKTDFYKIQKYLHSKYQQKPKKILWKNNKNDYEKYKKSIENIEKYVHLKNKIEFNELNLLQSLLLKILHRLVGFTSIWERDLRFRLTGEFSDELDVEDIFDHRKRYKGTGGGICKKYDRFINTYTEYKNNNKMKNVKFDDNTPVRNYIAHFNYLPNPKYSILKMMEKLRKLLDYDRKLKNAVMKSIKDILEEYGFKAEFIINSDKEIILNLVKSVEIIHLGKEDLKSHRNSEDLCKLVKAMLEYSK

SEQ ID NO: 997 - protein, 1315 aa, Artificial; identical to SEQ ID NO: 751
  Synthetic

SEQ ID NO: 998 - protein, 1373 aa, Artificial; identical to SEQ ID NO: 207
  Synthetic

SEQ ID NO: 999 - protein, 1426 aa, Artificial; identical to SEQ ID NO: 984
  Synthetic

SEQ ID NO: 1000 - protein, 1184 aa, Artificial; identical to SEQ ID NO: 874
  Synthetic

SEQ ID NO: 1001 - protein, 1161 aa, Artificial; identical to SEQ ID NO: 604
  Synthetic

SEQ ID NO: 1002 - protein, 1360 aa, Artificial; identical to SEQ ID NO: 92
  Synthetic

SEQ ID NO: 1003 - protein, 1197 aa, Artificial
  Synthetic
MKITKIDGVSHYKKQDKGILKKKWRDLGEGKQREKIEARYNKQIESKIYKEFFRLKSGKDSERITKEKNEGIKSLYYLIKELYEGKENDLWELKNINLEILGDKERIIKGYKFKEDVYFFKEGDKEYYLRTLLNNLIEKIQNENREKVRKNKEFLDLKEIFKKYKDRKIDLLLKSINNNKINLEYKKENVNEEIYGINPTNDREMTFYELLKEIIEKKDEQKSILEEKLDNFDITNFLENIEKIFNEETEINIIKGKVLNELREYIKEKEENNSDNKLKQIYNLELKKYIENNFSYKKQKSKSKNGKNDDLYLNFLKKIMFIEEADEKKEINKEKIKNKINSNFKNLFVQHILDYGKLLYYKENDEYIKNTGQLETKDLEYIKTKETLIRKMAVLVSFAANSYYNLFGRTENNILTQEISDDLLLGKIENEIYIKGERNRRYVFKEKMLNYFFNSEIFGDNKIVEVLNAISSSIYNIRNGVNHFDKMILGKCSNGSDLKDSDTIKDYFNFKKKEIQQDLKDRFISNNLQYYYTENEIKKYFEKYKFEILKTKASFAPNFKRILTKGENLSISKSSNDYEFFKAYSESSDKNSEYNEFMKTRNFLLKELYYNNFYTEFLNDKAKFREAVEKVKKNKKRRGGKSYDVIGNYNFSDSISEYISYIHKSEMERIEINTEKNRKDTSKHIRDFIEEIFLEGFIEYLDNNNFKFLKNRNEVDKEREEIVRNLNIRIEGLDILNEDDSEILNLYLFFNMIDNKRISEFRNDMIKYKQFLAKRQNIDSKFLKIDIEKIEAIIEFVIITKEKLEILEDETKEQKKDNMNALFNKFYSSESEYDEKLKKFIEEAILGDKKNTPFYSTDGKTPIVHSNLEKMKKYGTENFLSKVLKDSNYTLNNMTAKEKFEAKVSDELKEHKILEKVNKFNKKGKSKKVIEYYNDCRCYLHKKWIEKKKSEEEFEHKEIYKKIIEEIRKYNYLENKEKLQNVYLLHEILSDLLARNVAFLNKWERDFKFIVIAIKQFLRENDKEKVDEFLNPHKSDGSRDNFSVTNYRSKMKSIINNIHENFMSLLFLNNNLATGGMQMGRNNNFTWGNLRNYIAHFEYLHKEKDTISFIGQANLLIKLFSYDKKVQNHIIKSMKTLLEKYNIEIRFEISNDREEIFEYKIKYINSKKGKMLGKNNEFEILENEFVRNVKALLEYSE

SEQ ID NO: 1004 - protein, 1102 aa, Artificial; identical to SEQ ID NO: 648
  Synthetic

SEQ ID NO: 1005 - protein, 1388 aa, Artificial; identical to SEQ ID NO: 755
  Synthetic

SEQ ID NO: 1006 - protein, 1432 aa, Artificial
  Synthetic
MKISKIKNSRPGISVTENKNEEQLSRQSLLYYAPVKDGKIRLESKDLEQHVTECNEKAQKLYNVITPEIDLCKEENREWIVEDLTKNFNAVINNALRSIKNPKEKREERVEKEVAFILNLNKNSIKIKKDVFVKSTDLIVKFSANNKYNKKNDKGTGSKEEAYIREMISNLVLRKLKKTLRKEVKLENGCKMQMTEITISLMSAICLYGNVESFDPVILKAFFEKVDSDYTKYKYVEQIVKSIESQSAKLKVVEKDGKHLLIPANADHRKKKYVFEFMRKYAAAEEKEKREITEHIQNLIGLYLCGKAGYENAENRFSNMTESHNCISGEIEEIFNEIEELENSSKQKREEKKKTREELDKIQESRKGNKRNTNSNNQNYKNNKTDSDKKENQADANENKLKENELRDKRRRLSKELENLDSEVRIKKEKLKNTTVKEMALKYRAAVNYLADEVGKTVLGEIKEKKVRSCADLYWIEYIDSTVEKLLLKSRNKDRYRYEIGFLSKHIWKEWTQYISGKYIEMGKGVYHFAIPDLSGALEGESVSICEVKPEYRNGVSGFDYERIRAEESLEREMEKYVLFAVNNFARAVTPEEEREKPGHEDVLLMKTLSEIEESQTEEERQKKHDNNVKNAITLYADADRRILQFFGGQSRFRKKEDSLINLYSGEDLYKEIRKELYAIRNITFHYTTKADKDQTQKHELTEYFFEEEFSDITELFREKYYTNNVWKYYDIEVINNIMGKIYCGRKYRAAQVPAFNNIISRPALPQLMDGFVKGNSLRRLMNCPDRDVIKKYWSSLFFVLKELYYYDFLQEQEKPEDNIKERFFRAMEKESGQAKDGKEQKAWESFENRIDQIGRERSFGAICQGLMVEYMLQNRDISMVQTETGDGKTNKKQIYKHYRTLLYICIRSAFTEYLREKWEELRTPVLTVKEWSKEEFCRIDGLKHLSLFDHLKETFNDAETGSFWYMAAHFINQKYLNHLIGSIRNYLQFTEDIEDRALSLGDCVDNKREEKNLRYRNTLEILEFVAQFCERTTNVMEDYFESNQEYAAYLSGFVDYNVSKKETDIEKALYGFCRQKFKVDGKEYMAGIYYDGENLIPNRNIIRANMYGNVSCLKPYMDRITLKEIRTMYADQNKLDTVLKEGVCRTEEEQKAYREYQNEKNRIELFDLCTYTQILNDMQARLIGWSYMRERDLMYYQLGYYYTKLFWTDAISEEDARRRLVGELVNVEDGVILYQILAFNSYNLPIIANKNNTVTFLKGEGSIGGKAITAFLKNYENAERIYEEALDLFENTDEHAAIINTRNYIEHFKYFIKSDRSMMDLYSEVYDRFFRHDHNRKKNVPDSLKNVLADNFMIADISMELGSKKVGEKKKGFREHKAARIEFTDKGIRSTDMTYTVKPDPKDSKKDEKVLVPARSEVFLKQFQKILEYRI

SEQ ID NO: 1007 - protein, 1184 aa, Artificial; identical to SEQ ID NO: 874
  Synthetic

SEQ ID NO: 1008 - protein, 1315 aa, Artificial; identical to SEQ ID NO: 751
  Synthetic

SEQ ID NO: 1009 - protein, 1161 aa, Artificial
  Synthetic
MKVTKVDGISHKKYIEEGKLVKSTSEENRTSERLSELLSIRLDIYIKNPDNASEEENRIRRENLKEFFSNKVLYLKDGILYLKDRREKNQLQNKNYSEQDISEYDLKNKNSFLVLKKILLNEDINSEELEIFRNDFEKKFNKINSLKYSLEENKANYQKINENNIEKVEGKSKRNIFYNYYKDSAKRNDYINNIQEAFDKLYKKEYIENLFFLIENSKKHEKYKIRECYHKIIGRKNDKENFSKIIYEEIQNVNNMKELIEKVPNVSELKKSQVFYKYYLSKEKLNDENIKYVFCHFVEIEMSKLLKNYVYKKPSNISNDKVKRIFEYQSLKKLIENKLLNKLDTYVRNCGKYSFYLQDGEIATSNFIVGNRQNEAFLRNIIGVSSTAYFSLRNILETENENDITGRIKGKTVKNNKGEEKYISGEIDKLYDNNKQNEVKKNLKMFYSYDFNMDSKNEIEDFFSNIDEAISSIRHGIVHFNLELEGKDIFTFKNIVPSQISKKMFQNEINEKKLKLKIFRQLNSANVFRYLEKYKILNYLKRTRFEFVNKNIPFVPSFTKLYSRIDDLKNSLGIYWKTPKTNDDNKTKEITDAQIYLLKNIYYSEFLNYFMSNNGNFFEIIKEIIELNKNDKRNLKTGFYKLQKFEDIQEKTPKEYLANIQSLYMINAGNQDEEEKDTYIDFIQKIFLKGFMTYLANNGRLSLIYIGSDEETNTSLAEKKKEFDKFLKKYEQNNNIEIPHEINEFVREIKLGKILKYTESLNMFYLILKLLNHKELTNLKGSLEKYQSANKEEAFSDQLELINLLNLDNNRVTEDFELEADEIGKFLDFNGNKVKDNKELKKFDTNKIYFDGENIIKHRAFYNIKKYGMLNLLEKISDEAKYKISIEELKNYSNKKNEIEKNHTTQENLHRKYARPRKDEKFTDEDYKKYEKAIRNIQQYTHLKNKVEFNELNLLQSLLLRILHRLVGYTSIWERDLRFRLKGEFPENQYIDEIFNFDNSKNVKYKNGQIVEKYINFYKELYKDDMEKISIYSDKKVKELKKEKKDLYIRNYIAHFNYIPNAEVSLLEVLENLRKLLSYDRKLKNAVMKSVVDILKEYGFVAKFKIGADKKIGIQTLESEKIVHLKNLKKKKLMTDRNSEELCELVKVMFEYKMKEKKSEN

SEQ ID NO: 1010 - protein, 1397 aa, Artificial
  Synthetic
MGNLFGHKKWYKADKIIKDKKGKESTIKQEVRIKRNYSVDRYTLNTNNKEKNNINNEDFVNQFIEYKTNNDILKKFTKKFHMGNILFKLKAEESVKEIRNYNDFLEKEKAILEIEIYQQSEELRKKENITKKDIINKVINDGITEDSNEINMKIKTKKNNFEEIRIIINNESEEYYIKLRSLNNNELNLKREIYEVLKSINANLYTFTKNAIDDTDFKKRNYENFLRENMMKHLKKNIKEKYEITFFKSLSNSLKKIQGNIKKNDEIINFIKYYSNINGSKTVSENKKKFLEKILNTEVSISENDIIDFIIGELKFFGIIKRIEKLQEKTVNRTDGDIKNTYVNTYVLLDKHEKFKKYNRNKKDTIIKSFIKNIKDNTMKQKINQILRKFKIEELIEKLRIKNKNFDTEIFKIFKDHYQEMFSSEKFEEKSDEEKELYKIIYRYLKGRIEKILINEQKVRLKKMEKIEIEKILNESILSEKVLKRVKQYTLEYVMYLGKLIHNDVNMTTVNTDDFTKLHAEEELDLELITFFASTNMELNKIFNGKEKITDFFGFNLNGQKITLKEKVPDFKLNILKKLNFINNENNIDEKLSHFYSFQKEGYLLRNRILHNSYGNIQETKNLEGEYENVENLIKELKVSDEEISKSLNLDIIFEGKVDIINKINSLEIGEYKDKKYLPSFSKIIPEIIRKFREINKDKLFDEESEKIILNVVKYVNKILYEKITSNEENKFIKTLPDKLVKKNNIKKENKNLLSIEEYYKNAQVSSSKGDKKAIKKYQNKVINAYLEYLENTFEKVIDFSNFNLNYNEIKTKIEERKNSKNKIVIKSIPININITNDTEYIISIFALLNNNTYLNKIRNRFFATSVWLNTQEYENLIDILDKVLSINLLRENNIIDILDLKNTIIEAKITENNEEYIRNYIFENNKEELKKRLFCEELDNKEDVLKIFEDKNFKFKNFIKKNESGNFKINFAILSNLECHFELDTKKVIGKNSKKLESFIQNTIDEYKSNIRTLFSSEFLEKYKKEIDNLIGDIESENESKFEKIYYPEEHKNELYIYKKNLFLNIGNPNFDKIYEIISKDIKNTNTEILFDNDIRKNKISEIDAILKNLNDKLNGYSNDYKAKYVNKLKENDDFFAKNIQNENYSSFGEFEKDYNKVSEYKKIRDLVEFNYLNKIESYLIDINWKLAIQMARFERDMHYIVNGLRELGIIKLSGYNTGISRAYPKRNGSDGFYTTTAYYKFFDEESYKKFEKICYGFGIDLSENSEINKPENESIRNYISHFYIVRNPFVDYSITEQIDRVSNLLSYSTRYNNSTYASVFEVFKKDVDLDYDKLKTKFKLFDDEKNNDIKILKIKDLIESKKVSVLELKSYNSDYIKNLIIELLTKVENKDELSS

SEQ ID NO: 1011 - protein, 1545 aa, Artificial
  Synthetic
MKVAKVEHARTAVGERKEIQKNSVGGFIYNDPAQPKKKNPSEMEVIQNLDTRFSELNNRAQNLKFNVFNEIQPGSAPAKPKKYDAYKADPEFSSVPDMDAIEKQKIRESCESYDVRKQNFDRRLKYKKIAEVLNINLSKLIFTYKDTGRTSKRGDKIYVVSGVQTPEKLRDLASSYKWQDEVPEEEDIRGICEGYVRSSLRTCVQKVEGASKAETIDLRKVIAKMLLAMSGQLSAEELSLQEITAFTETLHEAYYRTNQQTLVTRSIYHQNMVVQPDEQGVVSLSKVEQDKKQKKLESTGRSRKNYEKAGEMKTLSDYAVLSKDERMVILRKLRRILDIYFSHSEKEDPKNAPLAPSIPINDTFDVWADHEEKKQTEGMFVSIPEVISSAAKENRTLDSLVSKNAFDMLNTAIRNHNMACYRYTIRMIKENAALFFPDDAQNTFWVHHIESEVERILTRLTTGDLFKLQTGYLSEKVWKGMINELSIKYIAIGKAVYNFAMTGLTEDGDIDLTKMQDVKGITSYDYEMIKAEETLQRDTAVNISYAANNLARATVNVPEGDEDFLLWKIHEKELEKDHFYNRMKSDDGRGTITAIFQFFGGISSWPEGTVEKIMQAYSAFSGREGVHFLNDLKEAIFLLRNKTFHFNSKRKKDYPWNQELICSLFEQDLKSANDRLKDKFYSNNLPDYYSEEDLRRVMDFLYAKPADRATQVPSFNRVFAGQDYQDFFAAYINQKNHFRGADQADILSKWKSAVFYLCKEIYYNGFLQEGSARKLFFTAISNNRKALEQKNNEKKLSKDERTNLQAVKDFSKRCDTLKDNSLAEICQAIMTEYNLQNSGHRKVQSSDDEKRDAKIFQHFETLLKKMLRDAFCLYLQQNDRYTFLVKQTDALNEKVDQKDFLKGWQSQQYADLMQTVRENPELQAWYVCGRFLNGKTLNLLSGDLRQYIQFESDVKRRAAATKNAPKNLEHFDSLKNDCRQAVRVLDVCIQLSSVFSKEITDYFSSNEEYAQYLSKYIEYIDPSSSLSAFDQLRDFSAGLEDEVKNLYMDEKNPIPNRNLIMSKLYGPDRILAEIVNVTTNDIAAYRARKVEVEENRKKEAAETGQNNVDLLSVAERNTFTEYQYLKNKVELRNVVDYGELINELHGQLVNWSFLRERDLLYFQLGFHYVCLHNDSAKPDIYRCITRKNNSQVNGAILYQLAAMYIQGIPMYSPAANKTDAEPTDTGMKERNGNMSPGGKYRFFCNYSGAMTGAIARDKDGVLQYFDESIYEAGLELFENVKEHENIINLRDAIDHFKYYSGKTGSLLDLYSEVFDRFFTYDMRYKKNVPNLLGNILQRHFVTMRPYFGSAKKQVGKSEEKARASIDIANFGLKSDRFTYKVKDNDGDARKWEEDARNTDYLETIGRILYYPVTLPDDKIAEPGKGKFVDDKGKKCAGRRTKANNKPINAAGKESVERKQRNSENAERKLLTDYKKGQKVTGVVTNITSFGAFVDFGAEKKGLVHISKMSHDFVNDPHDIVKEGEMITVKIIHIDLDNGKISLSMI

(The sequence listing continues in the following parts.)
